United States Patent Application Publication US 2015/0052636 A1 - sequence listing, part 25

SEQ ID NO: 87811 - DNA, 722 bp, Citrus clementina
  Intron number 2 from transcript clementine0.9_028772m (loc us clementine0.9_028772m.g) derived from phytozome v7.0 (c hr-ID scaffold_42; pos 333221 to 333942)
taggacacactatttgcccggtttgtaggtcaccagtggctgatcaaccgaaaagcacttctggagaagcagctaatttgccaagtgatgattataataataatgacaaaagaaatgatcaagaaaggttacatagaagtgcttctagttcacgggtagaattattacattcaagtgattttcttggacgtagcgtgtcattagctacgtccattgaagataaacagcaacttttggccacaactttgaagaggtcattgtctatggatgagtgttctaattatgttattgttagattacaaaatcatgatcacatcatgtgtaaacaagaaggtgatgatgattatgatcaatcgtgttcgtcatcttcatcgtttacagcaagatctatgaagcaattagatcgagtgtcttcaagagtagtaaggtctttctcacagctaaggattggcagcaggagtagcagcacaaaagctaacggaaatttccttccttgctgatgagatcaaatcttttgtatttggacttccttattattataattgattcttaatcaataagttagattgtacatttttttccttttagtgaaaaataattaataatcaattaggatatcgcgcaagatttttgttgtccacgttgaaagtaacatttcttcctttcggtttcatttcatgaatctagtgcgccgttaacataatactctctctctctctctc

SEQ ID NO: 87812 - DNA, 462 bp, Citrus clementina
  Intron number 1 from transcript clementine0.9_018339m (loc us clementine0.9_018339m.g) derived from phytozome v7.0 (c hr-ID scaffold_9; pos 3289760 to 3290221 reverse strand)
ctttcattcgattcatcaatttttccaattttaaggtcagattccacgttattgtagatttattgcatttcaattcatgtaaagtttttagcttttttatgaaattgtgctgttttctgtcaaattagtgttttttatgtgaagttttcaagggtttgattcatatattgggtattttatggccaaatcttgatggggtttatttgaattgaatatgatattgctttgtgattttctagggtttttattgttaatgttgtattacaggatttggtttatgaaggaattatcatgtgttaactaatgtttgaattttttgtctgactttgtgcagatcttgtgagattgaaattagggaatttttttttctttctttttgaaatttgaatgcattgggatttcttggcttgagagaggagctagttgtagctttattggtatcgtgtgtgttttctctaaggc

SEQ ID NO: 87813 - DNA, 1002 bp, Citrus clementina
  Intron number 1 from transcript clementine0.9_016250m (loc us clementine0.9_016250m.g) derived from phytozome v7.0 (c hr-ID scaffold_17; pos 2084340 to 2085341)
aatcaaacggcatttctcacatcaccaatcctctggtatttatttatttattcaaacacctttcttacgtcatgttctttgtatgccataggacgtgccattggatcttacgttttcgtcaaagcattcgagctgtttgataaaatgccaaagttgataatgcgtttgctgttaatgctttacattttacgcaacagtttggttgccggggacgatgcatgaatgagagactatgagaataaacattttgagaacttttttagcatatgaattcgaaaatgtcgttcactaaaagcaaaattttatgcgtagacattttgatttgcactaatctttctgccggttcactggaaaaaaaaaaatagtacttgggattttcctttaatagggcgtcaaagaaatcgcaatttggttccatcttcaattttggtagagttaatactaaggctccctttggttatttgatgtccagcacggttctaaaatgttacttgcaacttagtttggaagttaaagatgatttttaccgcaccatcttacctaattttttgtcaaaattattattaaaaattcaaaactactattaccttttatttcatagttagagcttccattttgcagcggcaccgcaactctgcagcaccaaatgcagccttgagataaaataagctttctgaagtcagaaaattaccctttttgacatgcccttagcttagagcacctttacatttccattattatctgtatcctgacagcttcccaatcaattattggaacttcctcatgtatgtactgttcattgtatatgactttattagcaataactatgaaatgttttctgttgtaaggtaatatttttgaaactgcaattgaaatctttttgtgatagccttgtattggtcaaggcatacagttctgttctaatgaacaaatccatctcccttcatcctactgtatgattaaaactgttgatttgtttctctgactccgttttccttggag

SEQ ID NO: 87814 - DNA, 825 bp, Citrus clementina
  Intron number 3 from transcript clementine0.9_025352m (loc us clementine0.9_025352m.g) derived from phytozome v7.0 (c hr-ID scaffold_19; pos 1268274 to 1269098 reverse strand)
gtgcgcaagagaattgaatacatctctgctgagttgtacgtttcttcttacttggttacttggcgattctttgcaatatttttactttttaatatatcacacttagtttcatggaagtatgaattaagatagattaagttagggtgcgtcttgctctttgctgattcttcaagttgtcttatctgggtttgaagaggggtgatgtccatggcatatttgttgcaaggcaaaggcattaccatctttattgcaatttgtattgatgaattacaaggatgcaaaattgaatcaaaaagcttttttctttttttttttaatctttctgcatatgatttattggcttgttgttttcttgctttatattgtataaaaacatcattttcaactcttaaatccttatttctttttataattttactgtcatatttgtttggagttagatacagattttcaatatttagctttttaggtatcgttcttgtcttacattaaccttgggttactgttgggggcagggactaattaaatttcaggttttatatgtgaggtgcatggcagttaaagaaataattaaaggatttcctattttggccacgatctattagttgtatggttttggtgtatgttcatacttcacactgcatacagattaaggttcctgtccaaaaaccattatctcaacaatctatagttccgtggattgtcacgttcctctttgtatttttcactcattatcattgatgttattgcaattgtttggtataaatggtatggccaatatatccttgacctttaaactgcgattctgctctaggaagcgacttg

SEQ ID NO: 87815 - DNA, 559 bp, Citrus clementina
  Intron number 2 from transcript clementine0.9_026370m (loc us clementine0.9_026370m.g) derived from phytozome v7.0 (c hr-ID scaffold_19; pos 3064094 to 3064652)
ctgacggtgagacgtgggaagaatgtaagcatttctctgcttttttctatatttcagcctactttgcccgtatagatgaagaattgtgttttttcttggtggaactgagaattatgtttttgattgtatgtttggatccaatgagcatcgaaatcgtctcaaagttccgaaagaagcaattctcttatggctttatttgaattaaggatctagaagtttcagttatatgtaacctgtttctttgaagaatatgaattattaggatttagtggtgattatatgctgctgctatatgaggcattttacttgaattgatgacctagttaattgctgtaatgccctgatcttatagtccgaggacaactttttaagagcccattcttgattgagggctgggtaatttgcatgattttagagatctgctcatgcactgaatcttggcatgaagggaaatattttattttaggagttctctttatagtcctaatatattattttataattcagtgtaagcttcatttgatataattacttatatttctaggcttggcagagtgca

SEQ ID NO: 87816 - DNA, 560 bp, Citrus clementina
  Intron number 1 from transcript clementine0.9_016485m (loc us clementine0.9_016485m.g) derived from phytozome v7.0 (c hr-ID scaffold_19; pos 574012 to 574571)
ctggttagtttcaaacattcaactttaagaaatttagttatgcaaatttgcttatgtttcttttttatgtctgatgttaccaaataacaacaaacagtttgggattttgactttgtttgataacaatatgtatgattatttaccaatttaatcgttgatgttctccgttcgttatttaaatttatacttttttgaagaagcttttgaaagaattaggagattacaaagacaaaacttcgtaactggaatttggagtagaataggaggagagtatgtatattatgaatgaattgatgtcaagctgtcaattaaaagtagctagctaggtaggtactttagctacttactgtgctttttcattagatatcagctaacacacaatagattcaaaaataaaacagattcatatatggatagtatttacaaacacaccctaaaatcaatcaaaattccttgcagcttctggcacgttaattgcttagtttatatctctatctgattccatgaattatgtatgtaaatcaggtctctgcaaatcacggtgggagaaaactgccaag

SEQ ID NO: 87817 - DNA, 428 bp, Citrus clementina
  Intron number 2 from transcript clementine0.9_020358m (loc us clementine0.9_020358m.g) derived from phytozome v7.0 (c hr-ID scaffold_110; pos 487230 to 487657)
gccgcgacgccgtttttgatcttatagctcttcccgtatgtattgcagctcacctcagctcatgctaatttatgtgatgtttttataattatagattattattgctgatactgaatgttaagctaaataatttgttgttaagtcatcttcatttaattttcgattgaaaatgaaaaaaatagtaattttgagcaaagaaaaatgtagaaaatgtttattttgttttatttttatttttaaatttttgggatttccttattgtgactgttatcattcattatatggtcctagttaaatgtttcaagttgttgtagtctgtgaaactcttttcgatatttattctggcatgtacatttttcctttcaatttatttcgttgctgatactttgattatgatatatccttttttgtttcccttgtagggtggc

SEQ ID NO: 87818 - DNA, 477 bp, Citrus clementina
  Intron number 1 from transcript clementine0.9_005879m (loc us clementine0.9_004981m.g) derived from phytozome v7.0 (c hr-ID scaffold_80; pos 64258 to 64734 reverse strand)
atttataatcagagaaattaacaagttcttggtatgtctcttaatttcttgctgcttttctagctattttttaaagtgctgtctattgaaactgcatgcatttgacatatagttgaattattattacatttgtaggtgtgtaaccatgtattgttgtcatgccggagcatatttagattctgctcttatttcttgagtgtggaaacaggtttggtatggatagtggagaatttgattatcaaagaagaactgggtcagtcaaagcagctggtaatatgtatggaggtagtccttctgtgaagaaatcccatttagatatccctgaggtataattaatttattcaatagcactttttcctttttttgaaaaaaaaaaaattcaatataacccatttgtgattctgttgattaatttctgcatatgtttttctttttttaatttttaagagttcatcttcaagagctagagaacttcac

SEQ ID NO: 87819 - DNA, 819 bp, Citrus clementina
  Intron number 1 from transcript clementine0.9_025923m (loc us clementine0.9_025923m.g) derived from phytozome v7.0 (c hr-ID scaffold_80; pos 835696 to 836514 reverse strand)
aaatctggcaatatatcagacaacacgacctccaggtcttttctttattgcttccttctttgccagttgccgctgttcaagttctttttggcttttcatcgaacgttttgactgcattgtaataattgaaattgtgtgtttcttgttttttgttttttgttttttgtttagcttgtttaatatgctgtaaaaatagcttaaaaaggtcttgtgtgtgttaattgttaattctggaaaatgaaaatattaccttgtttctggtcacgaaataaataaagaaaaataaggcaacattctcgaacaaatgtatcaacgaggcgcaccttgacagaaccagcagcaaaactatattgttttacatattttggagttattttgctgctgtatctgtcagcacactgtcagcaaactgtttggaagcaagactcaatattttttcttgtttctcaccattaaggctaattctatatttgccaaaaatcagtaaaacaaattaatcaatttcaaagtacaacaacataatcatactttttattagtaaaagattacattaagttccaagtttttcttttttctttggcgaagctaggaactgtgctaaagcaagtacttattgtcacttccattgtctaatctatgatttccaaaaaatgtttgatacttaaacaaacttactagttacagagtgcaattttgtttgaaatagcaatttgttgttataatcgtttattcttgtctcaagtttcagttttatggtaatataatttctttcacttgacataatgctttgtagaatcctgcaaacaagagggagattcg

SEQ ID NO: 87820 - DNA, 849 bp, Citrus clementina
  Intron number 1 from transcript clementine0.9_000218m (loc us clementine0.9_000218m.g) derived from phytozome v7.0 (c hr-ID scaffold_34; pos 2251881 to 2252729 reverse strand)
agattgctttgacagtaagtcatgcttttaatacttcccatttttttttgtttttgactttttttttccagataacaaagagctcaaagatggtaattttgttaatgtttcggtgggggtgaaatctttgagattttgttttgtttgacatttggtgggatgctgaatttttttttttgacttttattgattttatccgattttttagatcatttatctgtatataatctgtgttttttttttcctctcttgatcgtttctgtgttctttgaatttttagctcggtacattttgagttggtaaagttagcaaattttttttaaaaaaaaattggataagctactaaactcatttgttggttgttttttttttttttttttcaattttatcttcatttaagtcggtaaaaaatttgaacttttgttgggttctgttcatttgtttatgcatgatttatcattttccttatattttgaatttgtttgtacactaatgaataaacgtgctttgatcttcatttctgagatatgagttgttaagaattgtatattgtatacaaatacaggtgctttgaagacttagtcattgatcctgagtttctgaggcttgtttatccttgtgagtgtgctagtgaacaaatactaaatataagcattggaagtgccttttatgtctagatttggttctgaaaataatggcttgttgtaacctgtagtgtattttcatagaagtaaaccattttggattttttttttataagttaaaatttttatggtttatgcaaattattaagctgaacaagtttggacctctttcagattccaattgctggagttatatttgtatctg

SEQ ID NO: 87821 - DNA, 437 bp, Citrus clementina
  Intron number 1 from transcript clementine0.9_012793m (loc us clementine0.9_012793m.g) derived from phytozome v7.0 (c hr-ID scaffold_46; pos 1191192 to 1191628 reverse strand)
aagtgaaccacgctttgttaaggtttgtgagattttgagttcattattttatacaaatgaaaacattttcatatttcttgtgatttctctttcatttaattagaccccagaatcgaatctatatatattgtgttttaaaattagcttcaagtaatgggttgtttcctttgattagaggattgttggggcttttttaattatttctatttatttcagtttgggttttttaagccatcagtgctaacaagagacatacaaattttatgtatcttcgggcacatattttttgttctgtttgtttccgagaaaattaatgaaacccggttgaatgaatagattgatttaaggagtgacatgagacatgagttctagttgctaaaagtgaaattattttggtttcaggaatttttgtgcttgtactgtggtattgtagaaag

SEQ ID NO: 87822 - DNA, 873 bp, Citrus clementina
  Intron number 1 from transcript clementine0.9_012050m (loc us clementine0.9_012050m.g) derived from phytozome v7.0 (c hr-ID scaffold_26; pos 2085316 to 2086188 reverse strand)
gcgtatcatcgagccgttttgcttgctaactataggtaaagtttgtattttttgattgaatttgttactctgaaagtggtttttgctctggattaattcaatgcttgactgtgaagtagtataaatgagaaagtggatccggtttaagttaatgtgtagcattttgaataaaaattgaggatgctaaaatgagaggttggggtagcttctagctggtaaaggtatgggaaaatgggagcttttctaaaggctaactcgatgtttcaatcaccactgtgagtgatttagacaacaaactactattgcttcttcgtggatgtgcagttttttctgtggtaatagattgatgttcttattgccgagtgttgttccaaaatagatacaataggtgcatagttttagtccaagtggatcatttttatgtttaagccattttacattggggcttatctagattgaatcaaaatagattttgaaaatggcattcttcttgctgagtgttgttccgaaataggagaaattctagaatacatctgttgtaccatgttagccatacaatagcaaataatgtcatgacatgtatgcatttattttgtaaactatcatgcaagtggtggttgtattaaactcaattacacatgtcatgcatgcattaattggttgtaatacaacagatgtattctagaatttctcccgaaatagatacaataggtgcatagttttagtccaagtggatcatttttatgtttaaaccattttacattgggccttatctagatcgcatcaaaatagattttgaaaatggcaacctctcacgcttatgactgattaaataaaggtggcagccaaaacagtcttcagttggtgaagaag

SEQ ID NO: 87823 - DNA, 357 bp, Citrus clementina
  Intron number 1 from transcript clementine0.9_021996m (loc us clementine0.9_021996m.g) derived from phytozome v7.0 (c hr-ID scaffold_55; pos 894939 to 895295)
actctcctcaaggtcatcatcctcggcgacagcgggtcagttgttcaattacatgacttcgttatttatttatctaatttttagtatttttctacctaggtttaccgtttccgtacagattagtttgatccttttgggatcttagttgaacgatagatgatccgatgaattatttgaatttttttagcataattcgatatcttcacgttcttgcaattctttagttgttaatacaagggatctttattgtataattcgatttaattgaggagttggattagtttgtttgttacaattcggttacttcgtgttaattctttttgatctctgatgtgcagggtgggcaagacctctttg

SEQ ID NO: 87824 - DNA, 616 bp, Citrus clementina
  Intron number 1 from transcript clementine0.9_031486m (loc us clementine0.9_031486m.g) derived from phytozome v7.0 (c hr-ID scaffold_9; pos 4359179 to 4359794 reverse strand)
acttgcaggtaagtatttgatctttcattgttattattataatttagacttatgaaataggcacatgtgtaaaaagagtatccccaaagttagggatcaacaatatatagctttgttatgtgtagttcggatatctaagcctaaaatgagtcaaaatgatgtttttagaaactgttttcaacaacaaagttgaaatcaacaatatatggctcggatgttgggcgcagcaactggtataagagtcgtcttgtgatcggatatgtggatgaaaatgtgctataattctattgaccttcactaggacgctaggtccttaggggaagaatgtaatattccacatcactagctactatgagtgagtttttgagttaatctataagccatgcgttattgtaacttagtagacgcatttgaggctgtgtccaaaacaggaaatatttatttgttttgtcaggtatggactgttacaaatgctgttttgaaaaatcatagaatgcatttggtaggaggtgatgcattaggtttgtttctgaaaacagaaaacgggtttcttctagtttaggcgtattgaaattttgatgattttgcgattgcaggtgccaatttcagttctgtt

SEQ ID NO: 87825 - DNA, 1018 bp, Citrus clementina
  Intron number 1 from transcript clementine0.9_002714m (loc us clementine0.9_002714m.g) derived from phytozome v7.0 (c hr-ID scaffold_22; pos 2396030 to 2397047)
taaaacttgcgaattctttcacagaaggtttgtttgttctttttttttctcgtttttctgtttgtttgctgagaaaacgatggaataaaaagaaactaggatagtgaatatttggttattccaataattggaaaaggtcttttttcacattagagctcgttaacatgcacgtgcaaaattgtggcctgcttgttagtttatcaagtacaatttgttttaggggccttgttgaaattttataacttgttatatattttcagaatttgtttgtattttatttaaattggaatatcagttcttattagcacttttattaactttggggtagaattcaagtaattagcaggtaataaagatctttcagggaaaaaaaaaaagaaaaaagaaaaaagaaagaagacaagaccttttgggtttattagtcatttagttgatatttccatatgtcaatgtaatatctatttagatacgctcaaatgaccccatcttataatgagaacgtatataacccattctggtctggtccagtagggaatgaacttataatcatggaatcaacctctatttctatgaattgttttaaaattgttctttgatggttgcttctttggtaacatgcggtcaattggctttttagttccaacccccccacccccgggactgcattaactgtttctaaaccatacaaacgtttgtatggaatttcatgaagttgagctctgtgctcgttttgacatggcactagtaatttagcatattgagattgaagagaatcgtgctaactctgcctcttgggaataaaattgaattgttaatgatgagatttctagtctcatatctgtagaagagcttactgactgagagaaaggcaacaacagaaaaaatcaaaagaatgttgcgtttagtgcatgaagctttcctggttgtttgctagaaagaaagtgaaataaacttaatgtttcctggttttataaatgtaccagaagtccgtaaaggaaagaagatagctcagtggttc

SEQ ID NO: 87826 - DNA, 711 bp, Citrus clementina
  Intron number 1 from transcript clementine0.9_029341m (loc us clementine0.9_029341m.g) derived from phytozome v7.0 (c hr-ID scaffold_6; pos 1168028 to 1168738)
acgccaaactcaagtagacataattgatttataatcttttatactaagaacccaaaaagaaacatttgttatggtataaattaacaaattagtacaccaactagctagagtttagccgcaactacaggtccaatgaaactatcggaccaattgtcattgtttccttcgaacactgtcctaggtttacccgcaactcaaggtcttaaatattgagtaactcagaaacattgtaattcgttaatcaaaatttattcaaaacgatcggccatataatttccgtagactccatctagggagtctggtaagtcacatttttaatttgcatttcaactttgttcgtatgatctacttaaattttatatttttgaatatattcttctcaattaattaaataccgtaactacaaacacattatatatatatatatcaattagatcaataaagtatcctatctcttgttatgtatgcaagtattttttgaaaatcacactgtatatctcaattagaagtttctacactatacctatatctttcctcttcagccacatcattgacgtcgctatggcctggaattttaatcctatcatttcaaatagcatccccattttcatttcgataatttcactagttgttgtgtgttggcttatcaaaacattcacaaaatctcgatctatagatctgttaccaccaagcccaccagctctaccaatt

SEQ ID NO: 87827 - DNA, 234 bp, Citrus clementina
  Intron number 2 from transcript clementine0.9_006492m (loc us clementine0.9_006492m.g) derived from phytozome v7.0 (c hr-ID scaffold_32; pos 830499 to 830732)
gggcaaagaacttctcagtatcgaggtgtcactaggtattattattttttaagaaatactattttttaagattctcattttcttttcttgttcacattaaacatactgtttttttttttttaagtttttaatagattcttatcgttttaatttctttaactatgaagggcatttatttattttgatagttttgagtttagtttgtgtgtatgttgtgaaacttgttaggcatag

SEQ ID NO: 87828 - DNA, 864 bp, Citrus clementina
  Intron number 1 from transcript clementine0.9_029176m (loc us clementine0.9_029176m.g) derived from phytozome v7.0 (c hr-ID scaffold_62; pos 593285 to 594148)
tcttgcctcaacagcattgtgatatttgcctaaaggtaacatcttttctgttggtttttttttcttgagtttttgtttatttgatcttgtgttatgtatacataagttgtttggttcttgagaaaaagtttgacaaaaagtaatgagatgaaaagttttttgcttttcattaatctctctctgtctcttaatcttttcttttgttatgtgatttgtttctagtattaacttttttttttctttttgatgaaatttcaacttgaaaaaaactgattgttgttctaaaattcatgtatatattttcatgtaccaagtgcttgaaaaagttattaagagagtgaggaacgttatttttgttcttttcctacttcttacaagtgatcacacgatatggttgtttgtaaataagtgcttattaattttattcttttatttttccctagaagaagcgcttattaattttattcttttatttttccctagaagaagcgcttattaattttattcttttatttttccctagaagaagcgcttccatggggagaatatgggatttcctggattaatcaatccaacaaacacctttaacttctatgaagggatgaatgtttatggtgctagagctgcaagaagtgctttttatgctggccaatatcatgacaataattttcagaaccaggttaatctttaagcataaagcaatatgagtgcagtacaatatgtatctactggtccaactgataattcattattaatttttatgatgacacgattcttcattgattttttgaccgttttgtgttaaactggggggtttttctgtaattagggcacacaagcggttttgattcacagaaacggtaa

SEQ ID NO: 87829 - DNA, 510 bp, Citrus clementina
  Intron number 1 from transcript clementine0.9_007421m (loc us clementine0.9_007421m.g) derived from phytozome v7.0 (c hr-ID scaffold_125; pos 465936 to 466445)
ctgtcgaagccgctgaggccaccatcaaacaacaggtatcttccctctttctccttttctgttttgttctttcttaatttcaatgtgctttcttactaagttaattgtaatgtattgtgtggtatatagcggtaagctttccgtcatttctttaaaaaaaaaaaaaatcatttggatgtttgttataagctatggtttgattattttttcacagatagaagagaacaatttactgaggactgagcttcacaaaaaaattcaggaactcgagaaatatgtatgtccctcttgtttttttttgttttcttattgtagctgctggacaacggcttttcctttttctgttatcatttatttttataaagctgacttgttttatctgatgcaattaattaatatttttcatattttgttctcatttcatgaaccatgaaatttggcagaaattagaggaatcaattggtcgaagacataatattgatacttggaaagagagtttccgtggacctt

SEQ ID NO: 87830 - DNA, 633 bp, Citrus clementina
  Intron number 2 from transcript clementine0.9_015890m (loc us clementine0.9_015890m.g) derived from phytozome v7.0 (c hr-ID scaffold_32; pos 1118899 to 1119531 reverse strand)
gtgacattctattggaaggattaccagcacatcaggtaggatggtgagttccccagggtaagcttcaaagtaattgttttgtttcttcaacatttactttcttcttgtctgattgtctgctcaaatggtcaaactgatttagaaaacaaaataaataaaattaaaaaaattgttattgtaaaatcttcgggatagctaattaacaattcttcaaatgctgctgctcacttaagtttggaaactattcattatctagaatgtggaaccttttggttcgaatctctatttgttgcttcaaagcctccattgggcaggatattgtatgtctataaatctatgactggatcgttatgtctcttatccctgccttagatgcattctatgtagtgattttttgttgaattctaaactacaccggcatggctacatgtatgagcaggggaagggatgtaaaagaaaataattgttccatttctgaacttctagtggaattcttatagtctgggctacaagattctttggctcctgcactgtaagattgttttgatctcatttttactgcaacttgccatctgattgatctgattattgcttgcagcaaggaaaagtgcaattgagatcaacaacaacgac

SEQ ID NO: 87831 - DNA, 762 bp, Citrus clementina
  Intron number 1 from transcript clementine0.9_015890m (loc us clementine0.9_015890m.g) derived from phytozome v7.0 (c hr-ID scaffold_32; pos 1119644 to 1120405 reverse strand)
gcccgatcatttctccgacaaaacccacgtcagcggttagaacccttgtacatttacaagctttgttctctcaatactcgaaagttatgcgccttttgtcttgtaattttagctcgatagttccttaaggctcccaacttttatttgttaactcaaattgttcataatgtacgtgcttcttttcagtaattttcttttaatgggaaataaaagttaatactttctgagtaattttctaaaacgttatatgtttttgctgctaggatacagattagatagtgctgttgttacttcagttcagtttataatatttaatgtgcaaaatgtgttgtttttgcctatatcgtaaaaggccatggctaaaattgaaactttggtttagttgtagcaataaaggaggttttctaaatgtgattttcctccaccccctttttatctgaagatatgttgaaaaaaaaaaattgatactacaggtaaccattgtgatttcatgatatttcaagaactttgtgtgggaacctcaaaactaagattagaacaaaaccacataagtgagaataatcaaatgcgagatcattgagtagttgttcatatattaggatttcttagtatgggttcataaaatagataaagagtactcagggagggaaaattttggataaatttgttcgccatcttgttgcattttaactgactctaattgaagcgagttcttttactgaaccagggaagttggcttctcttcttcataaattggaaaag

SEQ ID NO: 87832 - DNA, 990 bp, Citrus clementina
  Intron number 1 from transcript clementine0.9_025213m (loc us clementine0.9_024176m.g) derived from phytozome v7.0 (c hr-ID scaffold_32; pos 1781958 to 1782947)
aggagcgaaaagcctggcgcaagaatcatccccacgtatttgataattttttttaaaaaatttttcctttttgtcgttttaaccgctcgctattttcagttctgtgtctctccattttatttgcacaaatgttgtgaggtttgatttcctgttatagggttttgtggccaagcctgaaaccaaagatggttccgtgaatttgatgatctgggagtgtatcattcctggcaagactggggttagtctttcttttactgagagaatgaaagttgtgattttttttttttggggggggcggatggggggcgcctttgtataaagttttgatctcgaagtttaaacctttgaatgattcaaggtactgtgtattagttagggcttagaattaaaagttgttatatttttcatatattcttcaattatctgtcaatgtgaggctatcaatgatgttttttaattgtattaccttttatacagcattgtctgatctctgcccttcggggattactgtacagttttgtagttcttatcaattttattcccctgtttcttgtcccgcggctcttttcaagatgcccagtaatttggaagatgtagtctcagtttaaatttgctggatgctccaaattccagtcttgtctaaatgtcccatcaactaaaagatcgatattgttgattacgtttttgagatgcaaacaatatcagatgattagtttaacagacagagtggagatactggtgccatttgcttgtccactattgaatctccaatttaagacaattttatggtgatttacaattttattttttttcccccactgaaaaaaaaaaagaggcagggcttagctttaagttttcagggatgtgtatggttactttcttgttagtacccatagtgattacaatgagatgttactgcctcatttgaatagtaccatccttcttaatcttgcagactgattgggaaggtggctactttcctcttactct

SEQ ID NO: 87833 - DNA, 567 bp, Citrus clementina
  Intron number 1 from transcript clementine0.9_006244m (loc us clementine0.9_006244m.g) derived from phytozome v7.0 (c hr-ID scaffold_34; pos 2094939 to 2095505 reverse strand)
ttggcaacgatttgaagacggtaatttttattttattttatttctttttgcattattttctttattaacatgtaacgacattgtgctgtgcttaatttttaaaatatagtagttaaaatatttggaacgaatcgtgcacttacttatactcgactgcaagtgattttcagtatcaagaattagaagccttagctttacataactcataacgaaccttcttttggagggcatttgggatttcgattgatttggtctacaaatttgatatgctgggcttaaaggtaaagaattttatagattatatggttgtcatgagcataaatgatttttacttggatagacataagaaagggcttgaagatgtacttagtttctttgactgctgtccatggcacgcatttcagtaaccactaggaattatatttaattagcttcagcagcaatgaggtagaacattgtttggtaccataataagtgcatgtttttgctacttcctcggtacatatgtactgataattctatgatctaattgttgatgtaaccttgttcttaatgtagcttctgcaa

SEQ ID NO: 87834 - DNA, 606 bp, Citrus clementina; identical to SEQ ID NO: 81541
  Intron number 1 from transcript clementine0.9_025983m (loc us clementine0.9_025983m.g) derived from phytozome v7.0 (c hr-ID scaffold_73; pos 270037 to 270642)

SEQ ID NO: 87835 - DNA, 843 bp, Citrus clementina
  Intron number 1 from transcript clementine0.9_018190m (loc us clementine0.9_018190m.g) derived from phytozome v7.0 (c hr-ID scaffold_17; pos 1867648 to 1868490 reverse strand)
gggttttttccaggtataatgctttagcaaagttagaaaattgtttcgccagaacatgcttgtttgtgatcaagaatcgagaaatatgcaaattctcaatcaaataggcaaaattaaaattcatatttatttcttaaacccacgtatcattgatgttagcagatcatggtttcactttccggtgttgtctgtggcttaggactgcagcttgtgaaaagaaaaacttgtctctggtttatttattattgactttctatactgctttacctttccccctccagacatgggttaattagctatttcattcctaaatgtcaaacacgcaatatgtattaaaaagacggtcttgagaaatttcacctcctctgcctcaatagcttttggtaccttatgagaaatatgcttctgtcaaaattttaaaagatatactatcgtaaattgtgtaagacctcttagaaaatgtactcatttctgtagtcaatgttgcaaatttactttaatttaaagacaattagaagtaacattgagattatttgctgttgtatgatttttcaaattctaggtgtgaacaaaccacaagaactttatgctcattatagttattctagaataaccgaaatttctccgatagaatgaatagaaaacacctgtggaaactaattgttgagaagatttaaatgtaacaaatgcttttagccatctttgattgtaaatcttatctctaaatcagtcagataagttgcaatctgtcttaataaaacacctggactattgtgagcttagtggcacgattattaaatctttgccacatttcgttcctgtatttttttcagctggtaaatc

SEQ ID NO: 87836 - DNA, 682 bp, Citrus clementina
  Intron number 4 from transcript clementine0.9_030613m (loc us clementine0.9_030613m.g) derived from phytozome v7.0 (c hr-ID scaffold_55; pos 383084 to 383765 reverse strand)
caaaaggcaaagcgcttctggatacatttactctgtacacgcaatgtgtggttactgtttggagataaaaaaggagattaattaataaagaaaatgaaattattgagggatttgctgaagagttgcgtgcactcctcatttttctccaccactcatcttacttgcaaaatgcaatgaccaaactatcctcgccaaagcctagacatttacttgtgttcaaaggccatttaagggagacaagtacaaaaagttataaaggatagtaagcagaagaagaaaatggaaaggggagggggggggggggagaaagaaaaaagggaatggggcgttatctagggaggaattttatttttatttttttttctctctttctccccctaaaaaaatctttcttttacactctattttacttttatgtaaattatgcaaaaaacttttgattttaaggcaatgtttattaagccacgtgaatttgaaaaagcatgaataaggggatgattttaacacattaattcaccaacattaattggaaaagatcagttgccacttcgaatcagagtaatttcttcggcaatagccaaatattgatatttgatcttgacactgtagttaaatcaatgtaactgattttgtcatttgatccccagtaatttttaacaaggaagacgatattggaattaat

SEQ ID NO: 87837 - DNA, 797 bp, Citrus clementina
  Intron number 1 from transcript clementine0.9_033207m (loc us clementine0.9_033207m.g) derived from phytozome v7.0 (c hr-ID scaffold_9; pos 1059015 to 1059811)
gaagatctaaaagaactggtaatataataatattcacaaccctttcatttctctcattatcatcttccttcagtacttaaactcatgcatatacgcatgcaacagtacatgttattgttgttggatcttgcttgcttgcattattttaagctcttgatagagctttaatggctgatatctatttgatatactggaccagtcattcattttggtagacattaacggagaatctcttgaacctgaacaacttgaaagtattccttcttttgctttttctttttttcctttttgaactccgctcacaatttaaaaaaatcggatttcataaacatgtatgcagatgaattttcttgaacagaaaggaaaaggttttataaacagattgattaaatagttgattatcactgaagatattgatcaagtagttgataatcagtgaacaaaaggccaagctttcggttgcatgcatggtaaaagaaactatctatgtaagacgtgttatgattcattggccacgtagcctctctgcatatttgacatatttgaatgcttcaatgtactgtacccagatgcacgtactttgattaactttcaaattattattgaacactaattcctgaaggacaacgattataatgaaatttgaaatggctttctgttatatgctaatgtagacatatttgagattaattaattatatggtgggatggacaaattcatgtgaaactaattaattaattttaattttcaatctatttgaagggactgtgtggactgcaagtgcacatatagtcaca

SEQ ID NO: 87838 - DNA, 524 bp, Citrus clementina
  Intron number 2 from transcript clementine0.9_020952m (loc us clementine0.9_020970m.g) derived from phytozome v7.0 (c hr-ID scaffold_19; pos 1480704 to 1481227)
tcgtgtgttcgaggattcattgctgcacaaagtaggttgcttgatttgactgtttctaaattttgtttatttatttattgattttcttcttgtacctgttatttgttcactgttttcaggttcttccaagtatttctaatcattgtagttgaattcactgttaaatttggtcttgattaaatacatgtagcaacttactctttgaggatcgagagatttgttgttagtctagccgaagtagttgatctctcaagatggattttttttgcaaaatgcaaactatttagagatgatttatttgtagaattttgcctaacgtttactgttaaatgttggaatgacaaagaaacttgtttacagatttttttcatatgtgttgcattactttactttcctcctgatataattattcatttaatcttaatggtttctccaattttttttttcaactcacttttcttgaaggttactcactaaattggttgttactgcagaaagtgatcaaggggtcctccgctcagttc

SEQ ID NO: 87839 - DNA, 944 bp, Citrus clementina
  Intron number 2 from transcript clementine0.9_021880m (loc us clementine0.9_021880m.g) derived from phytozome v7.0 (c hr-ID scaffold_17; pos 357296 to 358239 reverse strand)
tgtctcaagcctggactttctttttccttgatcaggtaaatagggctcgttttttgcttgcttttgatgacattcagcttgaattgaaataatttctacatgattcctttccttatcttaattagctcttctgttaagctttcaacacatcttgtgttaaagtgtacatcacatcaagggtagtgcatgattggaattcgaatactcacgtgaaaatgctagtttgacttaaatttattgacataatttggaccaaaaactgagccatcgtttacaagttgtttcgttaattttatgggcattttagggttttgattgtcttatggaaaaaagtagtgaaaaaaaatttcactttattatcatgctttaatataataaaacaacagtttaatatttttctaattttttattactaatattacataaacaactattaatatttataatcagataattcttaagattattctacattcaatttatggaaattaacctaaatcttcactcttactaatatttggggatataatattttgtgaaaaagaaaattgtctctactcaattatttttaattgaggaaggaaatttgagttcccataaatactagtactcactaaataatcttcttcttatccattaccaccaattacatgtaagtaagaaacccaaatcagggaatcttcgtccatcatagttctcaataacgagaaacagatccatataggtcatccaaattctattatacaatttgttgaccagatacttaaattttttagttttaaaaatcaagttaaaaacaacgggtacgaaaactcctttagtgacgatgatcaaaccctaattttacttcaattatctaacttttgtcaaaacaagaatcaaaagctactgctaaattcatgaacccagttgctcacttacttgattctggcggctggagccgt

SEQ ID NO: 87840 - DNA, 607 bp, Citrus clementina
  Intron number 5 from transcript clementine0.9_002262m (loc us clementine0.9_002262m.g) derived from phytozome v7.0 (c hr-ID scaffold_9; pos 892733 to 893339)
aaggttagcggcttagcgctctcctttctttttcactgtccaaatcttacactaggcgccattattctttgttgtcattttcttggaaatttaataaagcacataaacctttgccagacttctaagcaacatccgaatcacatcatatcaatatgtctgcactttcttatctgatgataccttttgctgatattaatttccttttcattccttgatcaagcgtttcttcttgtcttggtgtgggcaagtctaatttggatgattccatgtcttcatattttatcgatatatattaccaaattgatggagtttgtttgtcttcagaccaaaggaaaaaaaaaaaaaatcctcatattcacatgaaatttcactttttaatcaagaacaataagatgcaaaacaacatgatcttgtcccaaggtgtatgattcatacaatacttaataatcttataatgttaatattcctaagggattcagatgttaattaatcaaagcttttaattggtttgactaccagtggtttcagactcaagattaacagatgtaatctgtctctttttacctgtacagcctggtccggattccattggaatcgttgctatttc

SEQ ID NO: 87841 - DNA, 201 bp, Citrus clementina; identical to SEQ ID NO: 81807
  Intron number 2 from transcript clementine0.9_006094m (loc us clementine0.9_006094m.g) derived from phytozome v7.0 (c hr-ID scaffold_32; pos 329164 to 329364 reverse strand)

SEQ ID NO: 87842 - DNA, 820 bp, Citrus clementina
  Intron number 1 from transcript clementine0.9_031790m (loc us clementine0.9_031790m.g) derived from phytozome v7.0 (c hr-ID scaffold_9; pos 2701872 to 2702691)
aagataagagcttaaggattctgcatttcgctcgggtgtggtgaaacgaagaggaagagaaaaggactgggaaaaagaaagaaaagttgttatttgtctacgtttttctgtttttacctgggtaaaacgacaacgttttatggagaagtaaaaagaaaaaaaatcaaacgaagtccttttggtttaactttcgaggtttgatccgcggtaaatagcagaactcataaatgttcatgcatcgtactattcctaaactaaaaataaataaataagtaaaccaaaaaaatgattcgtgggtgtactaagaagtattgcggcacatgctcatgtgcaattcccgaaaccgttgcccgtttgtcgtaaaagccaaagtcaacctcaacacctgcgacacagcttcatgcattggctgtccgtctcggttcagttctgtgtcattgtttctttctcttgtagcaactcaactggaatttagaaaggcaaagtcttacaacaaccttcttcagtttcagaggttagtcttccaggaattatactcttcgatgcttttcaacaacagatggttaagaaaccatcatttaaattccattacaactcgtccggaacatactctagagtacagtcattgtcttttttatgtaataaaaactctttacttgttctaatttttgcatccgggtcgtttagatttttgaattgcagttggcggtcgttgattttcctacaggaaaaatgccctctctgcttcgggctctttggactattgttgtaggcttgtgtttgttctttaacttcggcgcctcatttgaggataattagg

SEQ ID NO: 87843 - DNA, 812 bp, Citrus clementina
  Intron number 1 from transcript clementine0.9_026435m (loc us clementine0.9_026435m.g) derived from phytozome v7.0 (c hr-ID scaffold_34; pos 1282252 to 1283063 reverse strand)
tccgatccgaccgtgaactccgcggcaaactccatgtatatatttcaattctcccttcttttttttcctcccttttggggacaattttatatgtacgacggatgcttatacgaattcttgaacattggcacgtgggtttctggttatttgattatagggttcgtgttatgaattgggtattcaacaacttagggttttagtttagttcttattgaagaagaaaaaaaaaggctttagcataaaaattattacgattttttctttttcgaaacctaaatgtagtgtcgctggctttaatggaggcaaacaaacacacaaggatgtaaaaggttaccgtggacagagattgtttaatgtggttttagtgctaacttaggctccttataagtttaatgacattgtgaaaaagaatgaaaagtgatctattatcttatttattttcttatggaaattaaaggttacttgtgttgtcaggatgttgcttggaaattgtgtttagggttcgtgaagtgatgagtaatgaaagactgtgtttaatggaagttatagtttggaccgatttcttctaagactgattttattgctgagggcacagttgtttgagtttatttcttcgcagatatgttggtgtcaatacgaacataaatagaagaaacttgtttgaaattgtcttgagcatgaatttttggagcaaattatgtactcagtaatgtagccgctgcaattcagtaattacgcgttagttacttatctcttaatggttactagagttctgatcatttctgttggtggcgatctggttttgcaggcat

SEQ ID NO: 87844 - DNA, 822 bp, Citrus clementina
  Intron number 1 from transcript clementine0.9_022405m (loc us clementine0.9_022405m.g) derived from phytozome v7.0 (c hr-ID scaffold_773; pos 335 to 1156)
ccacacttatttcctaagctccctcttcccctcaggttctgtctatgtctttctcttggtaaatctgtacgcgtaggctagtgtgttttaatccagtttatgtaacatccaacatcgctagcgaattattctctgaactaagttataattcattggttcttctacttattaaatagacatattttggattacaaaacttaataacaactgtgtgctcaaacagttgtggaccaaacacttaaattggagaggcttagttcaaaaactttgatttaatttgggttgctttttttttttaattgtttacttgaatacattttaagtcttataaacttaaattccattactttattttaaattctaaataataataataataataaattatttattttaaatatatgaaagtatcttttttctaagtagttttcacaaaatattcaaaaacaaaataatgtgactactgaaatttaaactaaaactttaaaatcatcaaataacattcttattattaaactacaaatcttttattatataaaatatatttcatattttttttatttaacactttcataagggacttgaggtacatttaaaagaaaattaatagataaaagaggttgaaatccctcatgagccttagttgggtccacccatgtgcccaaaacagataatatctacttggttgttgaaccaaagggtatcttattgcactttgggttgtaaattatttatttatttggcaaacaatgagaagatcaagttaaaccttctaatatcgcaacttctttctattgtagagacaccttggaagtttactca

SEQ ID NO: 87845 - DNA, 782 bp, Citrus clementina
  Intron number 2 from transcript clementine0.9_020080m (loc us clementine0.9_020080m.g) derived from phytozome v7.0 (c hr-ID scaffold_48; pos 1050582 to 1051363 reverse strand)
agcaggaggtcaaggcaaattttagtgagtctcaagtgagtggttctctctggtcatgggtgatattcttgtttggaattgttaattgcttatattgaaattagaagaaaagaggaattgaatatagtttgagggttggtgtttgactttggtattgattgacttagtttaatttagtgctctgtcactcagtagtttgatgattaagattaaatttcactttgataacagataggatttatatctgactcctgatgtttagttaattactgtaataagtagtcttttttcatcttgctagctgagtaccttctaattgatctttttattgttttgtatgctgtcatgtatttgcacttgaacaaactctccctccctgattttttttttttttttatattgttttatgtggaggtggtatcttatgaattgcttttggaatctttagtcattaatttctagacatgctaattaaactttcctaagtatttgagaagtcaacactttttagcctttccgttgttcagggaaacatattgggtatgtaaaattagagcaaaagttgtcatccctcaactagtgctcgatgaatttttcagagtattttaaaatcaccaataaattgcagaatataatttttttctggtaatctaaagttgtatgcatttatcttcattctcctctgtttatttgtttcaatttgagctcagtaatactcctttcctttccttacttgttatgtcttcgcttttcttcatgtataaaggattggctggagaaaa

SEQ ID NO: 87846 - DNA, 636 bp, Citrus clementina
  Intron number 2 from transcript clementine0.9_033801m (loc us clementine0.9_033801m.g) derived from phytozome v7.0 (c hr-ID scaffold_36; pos 232851 to 233486 reverse strand)
tgttggtaaagctagaaattttgtttcgtgcattgctcggccgagttcactatccagttgccctggagatattatttgggctctgtagcaatgtgttgggtcgttcggatcttaaagattaatagcattaataatctttacattattaaaccaaacagtttaattttttttttcgaactttaaccaaatttaggatccaaagttaaaacatattttttgtagtgtgtaataattcagtaggcgatgctgttcacttaatcctattagtccataatttacaaagagttataaaattattctatcatgtgtttaggtactcaccttatcatagacacgagcacttactagtttatcttctttcatatatattacaattaattagttaattatttcttccttctaattaagttctaattatataattgtgttttctctatttaatttgtttttctagccaagcagtaatatatctttggttaacgaaatggatgtggtctggcaaaatctctgttgaaggtcaaatacatattttttgaggcataaggtggcagaaaacatggtagaggccaacataacctaccacgcgaggaatatttccaagcatatatcaccctggttaaagctttgaacttatag

SEQ ID NO: 87847 - DNA, 736 bp, Citrus clementina; identical to SEQ ID NO: 79325
  Intron number 1 from transcript clementine0.9_021020m (loc us clementine0.9_021020m.g) derived from phytozome v7.0 (c hr-ID scaffold_9; pos 448501 to 449236 reverse strand)

SEQ ID NO: 87848 - DNA, 265 bp, Citrus clementina
  Intron number 1 from transcript clementine0.9_033637m (loc us clementine0.9_033637m.g) derived from phytozome v7.0 (c hr-ID scaffold_80; pos 266016 to 266280)
gtttttgaccaatcccaacttgtttctgccatcaggttcgtttcttgtcctgtttcatgaatcataatatcagaatctttcatctgtattctttatgtgatgccccgtgtagcacgatgcgtaatgcacaccttttgtcttttaataattagcttgtaagaacgtttgattaattgatacatttccgaaaatacgatgtcattttcttcacattttgattaacgatgcaggtattgtcacgagcattccgtccggtacgttgtta

SEQ ID NO: 87849 - DNA, 465 bp, Citrus clementina
  Intron number 1 from transcript clementine0.9_003448m (loc us clementine0.9_003448m.g) derived from phytozome v7.0 (c hr-ID scaffold_22; pos 2455132 to 2455596)
cagaattcaggtttttttatttactcttagttccatttaattattggaaaatttgagagaaaagacaataatgatgtggtgaataacctgacttaaatggtttccggttatcaatattttgaatcttcttttaccttaactcactgtatccagtgcctcttctgttttgacgcacacaaactgctatgtttggctggcatttagaaaaatctacctatgtacaaattaggaacttctatgttgattcatataactgaataccaagctaagactcgccaagtttcctacattagccttttttattatatatgcatattactgcctgtttgcttgtcaacatgacaacatgtatactgaatgtggatatgttcccatgttttactttctgatcatggttcatgtttcctgttggcatacttgcacttcattttactttacagcctccctgctaaattcacgaaaggg

SEQ ID NO: 87850 - DNA, 629 bp, Citrus clementina
  Intron number 1 from transcript clementine0.9_004420m (loc us clementine0.9_004413m.g) derived from phytozome v7.0 (c hr-ID scaffold_19; pos 2146958 to 2147586 reverse strand)
gcagcagcgacaatcgctcccgctcacgctcacaggtataacttctcttctcttcttttctttaaaccactgatcgtttcaagaaacctgtcgtcgtccatgttcttttctcggtaagtccttcttcttggcaatgccacttttttaatctatcggatgcctcatttaatggatttgtaattgcactgcacattgtactcacttcgatttctactttctctttttaataatttaattccaatttcattattattgaaattttgttacatgattaattttggatctatattttgatctaatttaaaatatctagtgtgttaaaatattttccatagcaaccgacaatgcttgattctgttaatccgctgtcagatccccccccccaatcatgagcaagagcaaccaagaatttggaaacagttgttattatgttgccgtacaagttgttatacaattgcttgcttttttttttttttttggttgtttgctctttaattgcttttatgtcatttctggctgatgtactgtatttccagtttggattgatcagttgttgagattatgaaaatttttcatttcgtggactttgaatagagactgtgcggagaatttactctgttgttgaacga

SEQ ID NO: 87851 - DNA, 580 bp, Citrus clementina
  Intron number 3 from transcript clementine0.9_033109m (loc us clementine0.9_033109m.g) derived from phytozome v7.0 (c hr-ID scaffold_6; pos 3941786 to 3942365)
gttgtctggctaatcaggttgattgaaaatttacattttgaactaagttctataggactatgagatgagaaatatggtagactgactttaacacagtttatgcccttgtaaatttcagtaatgatatacttacaacggttagtatataccatcactacagaacaaaaaaatttcataacaagataaaagaaaattccactgtaagacaagttttttttttccctttctcttagagattttgtactaattactatacatacattattattctataaattttactgtttgagattttttcgtgtattagattattgctacaatatgatctatgcccttgtgaattctgttgttaaatagtggtgtcactttacttgtttttccaaaaacatactggttactgtcaattgtgtagttcccatttgatcttctgttccctcttgtcatatattttttatctggcaatgtttgttgattccttttatttgaaatgaaattggctgctatcaaaattgatcagctgcttgacataatgactaagatgcatttcttctctataataggtggtgcatcctgcagacct

SEQ ID NO: 87852 - DNA, 748 bp, Citrus clementina
  Intron number 2 from transcript clementine0.9_018135m (loc us clementine0.9_018135m.g) derived from phytozome v7.0 (c hr-ID scaffold_6; pos 6283874 to 6284621 reverse strand)
tttggcaaaaagaaggcaacagaagtggctcacttgtaaatccttatctgcccatcttctcaactcctcatctcttattactgccatgcaactgttcgttaaaaatacttgtactattactattgctggcacttctctttttaggtcaagtggtttctttgtcatggtaatagagctaagttgtagagttcaattctcctgttgtgcagactctatatttcagttatttcaattttgatttcttagcttgcttctaggtgcatctgcatgctctcttcttcaaaatttctcttatctcagtcacgtctcatgtgaggaggtctgttgggacttggttttaataccattgttggacccttacctattagtttaagcttttgggtcaattgttttctctaacaatgtgaattgttgtttcttcagcattttcatttggtgaaatatctaaagaactctatttacaacttgaagggggtgtgcagtcattgaatttgtttgcgtttctagagtttatagagcaagatgttgcgaatatatttgtattgaacttgtgtttgttgttaaggattcagaatataaaatataagatcattactaatggaattatcgtggcaattggttcagagaatatcaatgtaaagctttcgtgtactttatagtttagtttcttgcttctttttgttcttatattgtggaaactttttatttgtgttgtgaaagtgtcatgatattcacagggtgtggaaac

SEQ ID NO: 87853 - DNA, 870 bp, Citrus clementina
  Intron number 1 from transcript clementine0.9_007290m (loc us clementine0.9_007300m.g) derived from phytozome v7.0 (c hr-ID scaffold_55; pos 94834 to 95703)
gatcaagattttgcggctcgcttgcagatcggtcggtaactttctttcattttttttttaatttttgagaatttttattttaattgacggagatgctgttgttttatttgtttatttattattattattctttttgcgaagatgattctactttctttcattttggtgttgtaaataatttgcatttgtgtatattttcctctttgactataaatgtgatcatgcattgtatattttattttatttttatttttttgcagcaaacgttgaggatttgctccggctgttatttatttatttatttatataatatttttatttttaattttgatcaattttctagggtgggattgtgagtttcagctttcctgggaaaattgaattcataatgcaaaagaggaatttgtgtgaattgacatgcaacaattattaatgcaagaaggatatatcagtttttgtgtattagcagaaatgaattcttgggctatatattatttggcaataaatgataggattgcattacttgcttctttatgttggcaaaagtgtgcggcttctgctgaatcttttgtgcagttacgtgttatatcaaattgcaatagctaaattggcaattagattttgtttgttttcgaaatggggatgcgtgatcagtatatcatgcagtttggaaggttcttaaatgtgaaagtctatatacgtctaagtggacatgtaaccgtgttgcaaatttgtatgtatatgtaaatttactcgcatgtttctgcttttttcgctcataaaaatttgtatgtaccagcagttggttgtagttaatatttctgtcacttttcaggttataccgcacttccagggaagttggctgtgcgg

SEQ ID NO: 87854 - DNA, 558 bp, Citrus clementina
  Intron number 1 from transcript clementine0.9_013328m (loc us clementine0.9_013298m.g) derived from phytozome v7.0 (c hr-ID scaffold_22; pos 2004193 to 2004750 reverse strand)
tcttctccaaagattagtaaaactcctacaacgtggtactaaatcaaatcgcttttacaattttgtttttacttttcaaattttcttatggtacttcttttattcttgtgcttgattttattttattcaaatctactgttttgtgcatacttttctgggtcagccgtttaaaacttcgtaattcagagaggaaaatggtgtatagtagtttactctacatcatttaacaactagctgacaccgattctgggggatttattttttctcgctccaattactgaattcaaggaaaaccgatgaaggcaatatgctgaaattatcatgttttatccataataaacttcgtttttccagtgaaattttgatgggatggctccaaatctatcgtagatttatatcttaatgaataccttgggtcgtttagataatgaaactctgttgctagtttatgcattatgaatccgactagaagttattaaatgtcttaaactaataaagttttagtccttgctcacggctaaactcttctattttaccttgttcaatgatctgcaggaa

SEQ ID NO: 87855 - DNA, 842 bp, Citrus clementina
  Intron number 1 from transcript clementine0.9_002589m (loc us clementine0.9_002589m.g) derived from phytozome v7.0 (c hr-ID scaffold_32; pos 420652 to 421493 reverse strand)
ggtgcgttttacgtcctcctaaattttcatttatctttatctctgatcttaatcctatttatgccgcatcttaattcgctaatgcagaattttctgtctcgaaattgccgttttcaagctgatccgttgttgcattagttattaatctcgttttcattaaattggaagagttacaacttacaatacgttacatgcgttttgttttttcatttatgaatggccttattattattttttttttgtcccgtaatttgagtaaatttaatctgatgtgatgtgattgattgatttgcaatgatttgatgttgattttagagttttgagctgtgatttagtctttaaataatgaatttgaagatttttagctgtttggatcaggaatgaggtgtgttaaggaatttttgtttgttcggttcctgaaaaagaagataaggagatggaaagaaaatataaggttaaaatttgtgtatctgatttgagcctacttttatggagtatgttctgggagtgtcagagtgattagtcatttcatacttaaatattgaaagagttgacatccaaaaaattatatatacaaagagttcctaatgtgatcggtttctgaatattctacattcgaattgatatggaaaaggttcggtgttatcaacaatttttttgacagaaaaatgattgtcattttgtttaaatttaatagagttaatgtctagggcttctttttttctattttttttttctgttgatttgtcttctatgtgagcatgttgaagtcatagaaactgtaaatttcattttagttactaacatgtgtacatgtttggttttccagcaaagggcgaaga

SEQ ID NO: 87856 - DNA, 550 bp, Citrus clementina
  Intron number 1 from transcript clementine0.9_010942m (loc us clementine0.9_010942m.g) derived from phytozome v7.0 (c hr-ID scaffold_34; pos 1411165 to 1411714)
ttcgctactgcagtgcttggccttgattggcacaggtaactgtgctgtacataaagatataaatcttttgtggtttgtttgattctgctggtcagttttatattttaattctttttggatctaataatgttgcgaggcagcctctattgtagaatggaagtgatgaccaaggaacttatcattttgtttttccttaatcatctttcaaaatccatatttactggtgaacttagctcaaaagtactgatgaccaaggaacttaacattttcttaattgtcaaatcattgtagctttaatgtccctgtattcatcacaaaccgtatggaacatttatgactttaaatctggtgttgattaatgtgtaatgttcaaatgaattatcttctgcatctctaggtttttctacttcccttgagttgagagacaatacgtttcagtttttagctatttcatctttgagtatcaccaatgctttaaaaacaggactattgattggcttggcaatgtgcaacagtgatacagatcctctgcctgatactggtcagtggt

SEQ ID NO: 87857 - DNA, 661 bp, Citrus clementina
  Intron number 3 from transcript clementine0.9_027946m (loc us clementine0.9_027946m.g) derived from phytozome v7.0 (c hr-ID scaffold_9; pos 1543589 to 1544249 reverse strand)
agaggctcgaggtatgtaattgctgattcttgtatcctgataaggactcttccaaacttctatacttttgtgcaatttgttggatcattttatatacgcattgtccttgctatatagaagatgctttttatacagaaaaatatttttccagttgatatattgtaatgtgtttataactattctagatagtatcactggtgagttcttttgagttcacattttatttcttttctttgactatgtgaaatcagagatttatgttttcataatgatggagattcatagtgttggccttgattgggtaagagtgaaggctatgagctattatgtatcctacatgctgcaaatgattttagctattatgaaatttcttgtttatatgtttggcttatttctctttctttctttcgttatttctttctttctttctctctctcactagtcacataactgtacaactctgtttgagttaaaaatttctccttaacaactagtagtttcttgtggaatatactatgtatcgtcgattgtcagagctggtcatctaacaatggtcattactttggaaggtttaggattatttgccacaacacctatttactgacacatgttgttggtgctcttcatttactaactaacaaatatttgcaggtgtgtagaa

SEQ ID NO: 87858 - DNA, 568 bp, Citrus clementina; identical to SEQ ID NO: 82453
  Intron number 1 from transcript clementine0.9_013301m (loc us clementine0.9_013301m.g) derived from phytozome v7.0 (c hr-ID scaffold_6; pos 6269031 to 6269598)

SEQ ID NO: 87859 - DNA, 817 bp, Citrus clementina
  Intron number 1 from transcript clementine0.9_023059m (loc us clementine0.9_023059m.g) derived from phytozome v7.0 (c hr-ID scaffold_6; pos 4642322 to 4643138)
ggaattcgttttgagaaactcaacgatcagtcagggtaacactgtctgattatacttttttctagttcaagatggtatgcttgacaaatgacaatcattatgtcactctactgtggtctacatgagatgtttatttgggaaatatacagctattaattgacctcccggggtgtcttcaagaccctaactaacatcttagtggattgttgttcagtatgcacatcttttcgctcctaggcacctatgctatttattaccagtgtttaagaacaggtcgagttcaggaattaatttaagttgcacatctgccttgttcagttacatacattaattgattaaatatctaatattgtcaagtcatttatggaacatttaagaggttgacgagattgatagtgccacccttttcttttccttttcttttctttgtatatgaacgatgacaacttgaatgtgaagctttgaataatggataaactcccaaatgttactagtggcttatacacacattttccagacataccacctgttgggtatctggaaattcctctttgatggctatatttaagctttcagcagatagcatgtcagcaataaagtcattaagcatttattatgtttttacaatgtgattccttcctggtgtaatgctattattcactgtagaattacattttatttagaagtattttttacatatccactggcgtcatatagagtcctatcaaaataaagctttgaaaacctatgaagtttgattcgcatgccatacaaatgcacaattagtttgattgcctagagtttattatgagcaggt

SEQ ID NO: 87860 - DNA, 805 bp, Citrus clementina
  Intron number 3 from transcript clementine0.9_001261m (loc us clementine0.9_001261m.g) derived from phytozome v7.0 (c hr-ID scaffold_34; pos 419010 to 419814 reverse strand)
agaaggtattgtgcttgtgttagatgcacctatgttcattcttgtagtttcatggcggtatatgggcatatggcctttcttactaccaaatgttgtctgcaacaagaattttagcttcatggtgggaaaacttattaggtgaagaatgtatataagaggtattagtctctgagaatactcagtggaggacataaaacctgttttagcagccttctgcacagagagtttctaaaaattagtgtcttgagcactctgtacagaatgttgaaatctctgtgcagtgagttgtctgtctgtgtttctacaaaatgtggatgtcagtgggagaggactcatcaaagcaattgacgagctgttgtgaagctcagtatatactgtcgaaaataggcttgaaacagtttcaagaactttataatttttgtagctgcgtacctgcttgtttgggttatcttgggcctttgagaatagctaatagtactttccttctagttcccttgacgctgccctatatttgcactcacttgcctgagaggagaaaaataatgttcagatttgcaaacaaaaagaaaattatcctttataaaatgattgacatgaaatcacttaatgttttgtgaatgagttatgctatgtgtcctactggcttagtttcctatcctattcattcattaagggtactttgaatatcgtaatatcctttatctgcattttgctttttcttttgctgttttagcttatcaagctgtattgtatcaactgcttttaattgtgtttacaggttaagatagaaaagttggtcacagct

SEQ ID NO: 87861 - DNA, 142 bp, Citrus clementina
  Intron number 1 from transcript clementine0.9_016279m (loc us clementine0.9_016279m.g) derived from phytozome v7.0 (c hr-ID scaffold_26; pos 3119683 to 3119824)
agctaaaggtaatgcacgttcccactcttcttttatttagtttttttttggtttaatcaatttttccattttgcagtagctcagtttcttcaattagtaactttttgattattttgttatcaattttgcagtaattaaaaag

SEQ ID NO: 87862 - DNA, 996 bp, Citrus clementina; identical to SEQ ID NO: 78264
  Intron number 2 from transcript clementine0.9_016279m (loc us clementine0.9_016279m.g) derived from phytozome v7.0 (c hr-ID scaffold_26; pos 3119888 to 3120883)

SEQ ID NO: 87863 - DNA, 827 bp, Citrus clementina
  Intron number 3 from transcript clementine0.9_016279m (loc us clementine0.9_016279m.g) derived from phytozome v7.0 (c hr-ID scaffold_26; pos 3120959 to 3121785)
gccgttgttgacatttatatatttgtttgtggttgacttgctatatattaaaagttaccttggtgttcatggtccttgagtccaagcacgtgactgtacttaatttaatttacttaagtttttgttgcgtgaatagtgtttgatactcctttttcccttatgatttgtaaataattacacacttgtggcctatgaataatgaaaaatgggactgtgttaaaaactgttcagggtttatgtgatggtaaaagggaacataatcaaaccagtttattgccatgtggtacagttcatatgctactaggtgtatctcaattagaacttagtttgtcagtttgggttttatgatcaagatggataaaaaaaatgtttgcttcccttcattcttttctattaatatcaaaatgcagttagcataagttggaattaattagctggtggccacttgtttagatcctccgtagctggttttggattttacacttggctgactaaggttactccattaccatttgagctattggaagtggaagatgcattatacttagattttcctggatgtcacattccttttgaaaatattgtgtgttacgaagactgaggaaatacttagcgatacatgtttgtaaaatgtgattttcttctaaaagcatataatgttgggatttctcctggaatgcaatttttaagattgcttctggtctttcaattgttatcttgactagtttagttgtatatgtacgtggtgtctgttgatttggcttctctatcgtaactgatggattctttgaatttacttatacattttatttcttttctttctccag

SEQ ID NO: 87864 - DNA, 761 bp, Citrus clementina
  Intron number 2 from transcript clementine0.9_025350m (loc us clementine0.9_025350m.g) derived from phytozome v7.0 (c hr-ID scaffold_34; pos 2324867 to 2325627)
gctcggtggagcctttgccggtctccttttcttcagtcagtctctgcttatcctttttcttttattatttttctggaagatttgattgatacgctcttgctttgcttagatttgttagatatcgacgtgcagtatttgcttttcatatatgaaatgtcttgcttttaaaatttgactgtcaattatgggaataatgtgcggcttgcttgaatgaacttatgttgaactactcaaattttggtttaaatttgtttccttttgctgataatgaaatgtcttcatgagccgctgctgttatatttctttttgcacgtgttgcttctgtatctgtccccatactctgtctctttcagtttgtgacttcctcccttaacctaaagaataaccgttcctctgttcttcttgctcctagaaaaaagaaataagcttgttttgtgattagaatagtgtgtatattagtctgtttcctctaggtaaatatctgctctgcttcttcctgcatttgcaagtaacatacatccccattattctggcttttgttgaaatcatgacacagaagggaagaatatcaaattagtggctcatgtgatatttgggaaagtttctttgcatgttcgtttactgatcactttggctctggcattttggaaactggtgtggtagtttgttggtttttaagttgatgtttataaccttcccaaattaacaatcttaaatttaaaccagggagtccggtgactcgctgggcatctgtagctttt

SEQ ID NO: 87865 - DNA, 826 bp, Citrus clementina
  Intron number 1 from transcript clementine0.9_018562m (loc us clementine0.9_018562m.g) derived from phytozome v7.0 (c hr-ID scaffold_22; pos 2152013 to 2152838 reverse strand)
ccgtctccaaggcaactactacttccaagagcaacgtgagctcctatttaatcctagatctcttttcctctttattctaataattttaaaaacccgtttcctcttacaattgtagactttatttttaggttaattttctgaaaatgatttggttttttttttttaagaaatgacgagcagataacgttttgcttgaagcattaagagtagaaaatttattaatgcttgttttttaattttcctggtcgatatggattggtggattatgtgtttgattaatataatctggcgtttgattttcgtgaacattggatgaacttttagcttacgttaggtcaaaatgtgcacaggttcaaaacgatgatatgtagatagcgtgtaaacatttgaaaagagagccgtgtttgtgcagatattgagttagttgatttgtgattatgataaacaattgaagctatggcattgctagtaattctttttttgatcgctcctggatgttagaatttttatatgactatgatgagaagatgtgggaatcataattgatggacttaattttaaacagaggactaaacatcaagtgtgcttaatcagtgaggtctaatggaacatgatgcatcaattctttaaggaagaatagctgaatgctaagggttttcttacctttctaaaatgttcctattttgatttttgcatttcatgttaatgcatgacttgctagttgtaattcacaattagatttgctgctctgctctatcttctttttgtctatctaacaatctaattaatttattttcttgttttagtgtctaggcatcgaactctg

SEQ ID NO: 87866 - DNA, 902 bp, Citrus clementina
  Intron number 1 from transcript clementine0.9_008498m (loc us clementine0.9_007217m.g) derived from phytozome v7.0 (c hr-ID scaffold_6; pos 6468268 to 6469169)
cagagctacactcctgctttctctcgccaggcaagcacttgacttggccttttttttttttttttcaaaattatatactaaccgatcagccttgctactctttttgtatctgagaaagtttgttatgcgttctgggtactgttctatccatatgaatgttcaaaactcagttttattgaaatatttggttaatctgagggtgatcaactgatcattttgggatagtgtttactcagctgcttgatttcgtgtttttttttttcataattgagatgatgttgtgtatgatcgattgactgaatgcagctatgacattacatgtttttctttcgtagagctgtcttgggttgttatgaatttttcagtctctttgaatcaaaggtcttttgttctcttaatgtcatttaagatgtaatatatgttgtttaacggtgctagcttttcagtttctttagtgttccaattctgcactttgggaaatttttttcaatgtatagctgaaaggaaaggtttgtgaaatttctaaacaagggaattgtatgccagatgagtgtggggatgaagagcgttactgaccggcttcgtgattctggccttttacggactcagggtcttattggagggaaatggattgatgcatatgatgggaagactctggaggtttggagaaaaataatttattttcttctacaatgttcttcttaatttgcaactatattgggttgaatctttgactacttggagtcctccatgtcagaactttttggaaaacacaaaagacttagtagatgccgtattatgcaagtatattggttccatagtgtgtgtttttataacgtcaattaaatgtatttcattttatgacaggtccacaatccagcaactggcgaagtgatagcaaa

SEQ ID NO: 87867 - DNA, 842 bp, Citrus clementina
  Intron number 2 from transcript clementine0.9_021730m (loc us clementine0.9_021730m.g) derived from phytozome v7.0 (c hr-ID scaffold_34; pos 771826 to 772667 reverse strand)
tggtaaaaaattgaagcttgccatttgggacacgggtgagtatcttttttattttccttccattttgtgactgctacattcacttgcactactaatgtgctgtgtaacttatatatcaagaggaaatatgctgttgaatgtatttgttctttttgcagttttttgttgagaaggcattgaaggtttattgtttatatctagaggtttataatacatcccaatttatcgccaaaggctgttggctttcttaagctagtgacctgttttaccgagaagttatggtattttatcctgtttgaatctgttgtcaaaaaattaagaatgcatgtgattagaagaaggttatagaccattatgattgaaactagattgattgataaacaattcaaaggtaaacattgaacatgggagattcagttgagagggtaagaattgggaattttagccggcaaggtcacatctcattatacaaaaaaattgggaacaaattgctcacaccgaaggaggagttagagagacttcctgtttgggccataggatgaaatggtctccaatgagagtgcctctcccattttcctgtagggtatctctaattctgttgcagggtacttatttttatctcctcttatgatgattcatgaggaaagctattctcgcctgttttgctatggtttttgcttatatacacgacctcaattaaagagttataattgacaattttaatagccttttcattcctgctaaaatgatactttcttttatatatgtaacttgacgaatgtactaatctattctgccttaatgcagctgggcaggaaagatttagaacactaactagttcc

SEQ ID NO: 87868 - DNA, 459 bp, Citrus clementina; identical to SEQ ID NO: 87028
  Intron number 3 from transcript clementine0.9_018913m (loc us clementine0.9_018450m.g) derived from phytozome v7.0 (c hr-ID scaffold_32; pos 36057 to 36515)

SEQ ID NO: 87869 - DNA, 766 bp, Citrus clementina
  Intron number 1 from transcript clementine0.9_000028m (loc us clementine0.9_000028m.g) derived from phytozome v7.0 (c hr-ID scaffold_9; pos 2862928 to 2863693 reverse strand)
ggttgcttatgtaagtgcttctaatattatctaatttagttgttcatcgttggattttgttcaatttttgtgttatatgattcagtgttgtgtactgtttgtttactgagtggtttatgggctagtgagtagtgtctgatttgatggacatgaggtactggaaagagggtgaatttgttgattcttaattgacaaatgtattttgtttaaggaaatgtttggaaagcaattactttgttttattgattgatacgttatggcattttgaaataaaatgtggttgctcctatgttgttgcttttgtaatttgtaacttgcaatatccacttagaagcttaatgttgatgaatcatccatcaacttatacttaagatctactgttttcacttcgcagcagaccccagcacgatacccttagtgcatttttttttttttttaaagaatgctgctcttgagcaaaactgtatctttgatcttattgtacattgccttttttgggctatttctagaatatggtggaaatgtgcaaaattgagttatagtttttattcaattgaacactgttttaaatttcttttctttaatataatcatttcccttcccttgcagaaaggattgagctctatctaaagcaggatagccatagttttcatatcatcttaatgtatttactattgtactatataagtggatacctcgatttccttgtggaactactaaattttgcactgactctgtttactgctgcagaaattgaaagttactt

SEQ ID NO: 87870 - DNA, 566 bp, Citrus clementina
  Intron number 1 from transcript clementine0.9_008070m (loc us clementine0.9_008070m.g) derived from phytozome v7.0 (c hr-ID scaffold_80; pos 625510 to 626075 reverse strand)
gctcatttccgggtcaacaggaaaccagatcaaaggtaaccgttccacttgtactgttctaatctgttgcatgcatttaatcaatctttagctgatgccaaaagtgagttccaatgtttctgttttgttgattcctttgattgttttaaggttgtttaatcattggttcttgctgttggaaatgctatcgattattcgctctttgtggactgtggttgtaaattatgattaatacattggctaaattaagcatgaatctttagagagacatggtgctacccgttgtagggttttgaggcatgtttcttgatgtccctacactttgatgacatgaagccatcctcgtttgactggtaggttgagtggatttttcaccagacaattaattatacttgtagtgggatattttttgtgagtgcagatcatgttctaaatcatgtgccacagcaaccttgattagaagagaagtttctttattgttctgatgtgttgcttgaatttgccttttttaaccacctttattactttcagctcgggaacaatttcttgggtcttttccattgaag

SEQ ID NO: 87871 - DNA, 632 bp, Citrus clementina
  Intron number 1 from transcript clementine0.9_013606m (loc us clementine0.9_013606m.g) derived from phytozome v7.0 (c hr-ID scaffold_46; pos 437298 to 437929)
aaagcttccgctcttaacaaattcctctctctcaggtactctcttgctctcaaatttttttatttaaatttgatcatatactaatgtgtataaatttgtttggtttcttttcttcttcttctttttttttttttctcgaattcagctaaattcatccgaaccccgaaaccccattttttctgtccgttgaagcactgaagttctctcattttatcatacatttatgggttgtcaattatcgttaattaatgtcgtttctagatttagcaaaatttgtatggattacggatgtaaggattcgtatgcttgctttgcgtttgtgcaattgtattgagcgatacaatctgtacatgtagtatttactgatttcatctgtgcggtgtgattttctgtatccactaggtcgattttacgagccccgcaatcagttttgtgtccatatagtcacttaggtccaccaaaaccgataaatccttcgtgggtttggagaaatgtgagtcatggaacagtgaacctggtgatttcggaaggaaagcctaagtttgaaacacatgaagtccaccctcctaagaaggagaagtggcagaccaaaaagaggttcaagttgaagaagaagagagagaagcagaaga

SEQ ID NO: 87872 - DNA, 1016 bp, Citrus clementina
  Intron number 1 from transcript clementine0.9_031718m (loc us clementine0.9_031718m.g) derived from phytozome v7.0 (c hr-ID scaffold_2; pos 1594932 to 1595947 reverse strand)
tagagacggaaggttttaaatcctcactattgcaggtatgtcttctgtagctaacagaggttcagttactgattcctgtttcaacattgtcatattaatgaactgatatcactcgaggatgaaatgttttgaaaagagaaacagttcccttcaatttttttatggattctaaaattgagaattttagatatgtgtttcttcactcatcatgaaaggacagcatgatcatttcttcccacaccccgcaaacaaacccccccccccaggcgcgcgcgcgaaaggagaggtagtgggtgggcgaagccaaattaatattttagccccatacctcccccaagatttgaacatgggtagccagccaaagaaagttatttgaaaaccagtcagccaagcccctgagggcaaggacagcttcagctgcttgatatagttaatattgtacattagatacttcgaagcttgagcttgattcagttaatacatattattacgtacttcgagattgaataattttcatgtgccctttaatgccatataggatgtccaaattgtggacttttgttgttggcttatttattactccttttcctaagatgcaaaaacgaaatgcatatttagtaccatgcattataaatacttctggcagcattcttttataaggtagtggagtattgttcacatgttgagtgcggacttcttgtccctcctctatgtacaactcctaatatgcttactttgtttctgagcaaaaaattgtcgacatgttgatacatgagcttacatattctttaggcctaatagcctttttctttatttattattttgtaactgagatatccttgattgagaaggaagatactcctatatatgacttcatttattgttttatggttatggctttaaactttgatctttgttctcatatcacagtatataatcactgtcctgtaaggttacattttatattcttttctgttgtaggttcggggctcaataccactcctctgggagcagat

SEQ ID NO: 87873 - DNA, 688 bp, Citrus clementina
  Intron number 1 from transcript clementine0.9_029255m (loc us clementine0.9_029255m.g) derived from phytozome v7.0 (c hr-ID scaffold_59; pos 118917 to 119604)
tcatccatctcttataacccagcttgcaccctcaggtacgagccgccaccatgcaacccagcagacttcacatccccgtcacactcttctcatgtcgatatggcttccccaaatcctcccaacactgctttgcattcttgtagccagccacctgccaactacaaaccctagccaacctccttcacaaaacctagttcttttgcgatttctctaacccaagcccaaacccaatcaatagaaaaaagagcctcagtttatagacgtagcacaagtagcaaaagaattagagttttgtgaagtaacagctggccagaattgaaactaggttattaaaaaaaatatattgtcttagtttgcaatttatctgtaaaatcttagattactactactcttatctaatcacatttcatgtttccatagaattatgttaagattatttcgcttttgatgattgtgttgaacaaacacctaagataaatagtaggagcataattgttgtggtgttttgaagaaactattaagatatacaattttatttcaagttgctgggtcgcacaagtttagttacatttgtgatataaataattgtagatttttttttttttttttttttttggagaggtaatgattatagattttcagttcatgccttttccttccagtttccaatcatatatcctgcatttag

SEQ ID NO: 87874 - DNA, 485 bp, Citrus clementina
  Intron number 1 from transcript clementine0.9_004907m (loc us clementine0.9_004907m.g) derived from phytozome v7.0 (c hr-ID scaffold_147; pos 91035 to 91519 reverse strand)
agtttcagagctccacaatttctcctcactctacggtaagtttctctctctctgtctgtttctttgcttggtccccagaaactgaaagaaaataaaagaaacaattttttggttaagaatctataataagtgttaaaagtggtaaagatgaagagggttgatgggaattatagattttgaattgtatagatttctttttaatttaaagttgattaattattgattgatcaaaattgtttttgactttttggtttctttgaccccccttttaaaacaaattgttttaagttctgtagattctgataaaagtgggtcttagctttttgaaagaggtaagcttgtgtttgaattagaaagaatttgggttcctaatggtttagtttttgcttcttcttgtatgatagttgatcgaaattagtggtggtgttgattttttttttttttttggttggtttgttctctctgtgatattggttttaggagaa

SEQ ID NO: 87875 - DNA, 629 bp, Citrus clementina
  Intron number 1 from transcript clementine0.9_018967m (loc us clementine0.9_018967m.g) derived from phytozome v7.0 (c hr-ID scaffold_6; pos 6216339 to 6216967 reverse strand)
gttgggaaaagcgactagacttgaaggtattgcttttttttattaattttctaaactggggttgtttgtttcttgagaaagtataatagaaaatgaacagaaaatatgttttcaatttgaattgtgccaaaacacgtcaatagtcaacttctccataaatggttattcattcattttgcttattttctaatctgggttgttctattttttttatgtttttattgttgctctgtttgctatggaattctatgctttgttgtttaattgtctgtttggttgctgtgaaaccagaggaaaattcttttttttttttaaaggtaattaagcacttaaggaatcaacttttttcaagtgcctcacttttcccaccaaatcaattgaagagctataaattttctttatgcaaaagttatgtaatgatcctttgttcatttaatcattctttcatgtgatattttagaagccttggtaatttagatattgaattttccactttcatctttaatttcagtcaattgaaccaaagagatcaatcacacatagtgcattattttattaattagactaattaattgtttttttttttccaatttttggttattgcagtcaggtaaggtctatttacaaag

SEQ ID NO: 87876 - DNA, 1043 bp, Citrus clementina
  Intron number 1 from transcript clementine0.9_035489m (loc us clementine0.9_035489m.g) derived from phytozome v7.0 (c hr-ID scaffold_36; pos 2003805 to 2004847)
ttcttgttcaacgggcaatttacagatttggaaaggtatgctttgttcctcagaaaatgtcggaaagaaaatcaacctttccttcatatgtatatttaattttgttcaaacccacattattaattttgcttagctgcacacatagtttatgcgtacattcatgtattttactcagaaaacgagagtaaaaatgtaaaaataattttgtgtcaattttttttccctcctgcttggttcttgagaaaatggggaagagactaaagtttaagaatcttgctatttttggcatttggatccacatgttagttattacagttaagcttcagaaggttccaatttccaaggataaagattttgttgctgataagatacaaagggaattgcaagaaactgcgtttagaatcttggcaagtctgtaatattactctggttggttgcctagaaaatgttttaaaaagaaaggttttttttttttaattgaacttaatttttgttattattattattattattattagggacccgcaaagcaatctggcccaagagttgtaagttttaagtaaacgagctaggtgcatctttctcatcttcttttaatttcggacccacagcacaatatggtgtttctcatgttagttacaaaaaaattggaacagagtttgcaatcactctctgtttgttgtccaagaaagttatggaaaattgaagaaacaatgtgatctactgtggcttgttcacttcgttaaatcagtgtgataaaattgggaagtgaacaggtactcttgctccattgattgctcaaatatcagtataaaaaaaaatgacatagctttaatttttgcccctttatggagaatgtgacattgacataactagtatgcatagttaaatcagtttcaaaaggttgagatgataacattttcattttcttgctctattgttaaatgcgaaacacaattgccttttcattttgctttctttgctctcttcataattggagaaataatctgatttttatgtttatttttttgtagtggttgaag

SEQ ID NO: 87877 - DNA, 507 bp, Citrus clementina
  Intron number 1 from transcript clementine0.9_032462m (loc us clementine0.9_032462m.g) derived from phytozome v7.0 (c hr-ID scaffold_9; pos 1086121 to 1086627)
atcccgaagtattggtacgtattttatttattttactttaaggagataaaaaaaccacgtattcattgttatgtttgttcttataaatttgaatttcaatagattaagctcatgttgcggtattttctgcttaattttttaaaacacaacaattaaagtcctacgtaaacactcaccattactattagcagctgctatgtaagtaattttactggttatgaaattgaatgccatcggtacttggatggaaatgctgggtgtaccacttttagagagtggagagtgcgtttatgcatattataccatgtgtcgatgagttaaattgttacctattttaatcgcaaatatttgctgtgaagattggaaattaaatgtcgatttgtctataaccagcagccaaaaccattgtttaggcatattctttgttgattcattttgtcaattgttcttgtgtcttatttgcaaaatattttttttcttttgtacatgctgcagaatattgcagaa

SEQ ID NO: 87878 - DNA, 516 bp, Citrus clementina
  Intron number 1 from transcript clementine0.9_023972m (loc us clementine0.9_023972m.g) derived from phytozome v7.0 (c hr-ID scaffold_19; pos 233090 to 233605 reverse strand)
ctccttattctccaaatccacacggcagtaacaaggttttctctctctcgcaatgtgaaaattatattttattatatgtttgagctgatgtgtttgcggtgttctcgaaatttgagaatacatcttgcttgtaaattctgtgggtatgctggatgcctgatgcgttattgttcttcatttctttcctttctgtggtaaaacaattcgttataaaaattcttcctttataaagaaatgcttcattttgcatactcgattgcttcaattaacacgttctttcgccaattggctaatttttccccttttttttttttaacaaaaaattatttattttgaacgtggacaaactttcatgatactagttttttcctaatttctaatgtctttgtttcttagtccctttttttttttttgcccaattaaaaacttgagattgatttctgatatattccctttgaatgttttgttcttttctttgcagtgagtgccaagttcttaaggggatccatcttagaa

SEQ ID NO: 87879 - DNA, 599 bp, Citrus clementina
  Intron number 1 from transcript clementine0.9_012431m (loc us clementine0.9_012431m.g) derived from phytozome v7.0 (c hr-ID scaffold_9; pos 2243338 to 2243936)
tcatccgggttgcaccaagcaaggctattgaggtgagtgatctgccttcgatattgtgtttctgatattcatgtaatttaacccaatactttattctgtttaattgatacactgctaagattagtgatacacacacacacgcatatacatatacatatacatatattttacctatgtattaaaaaggacttgggactctttttataattgctctgaaattctgtctggtgtattttgcttttggtgttgtttaacccaacatcccatgtagggagacgttgattttgtttctccttcttattgttacattccatttcttcaagaaaggttttttttttaattttttttggaaaaaagaattacctataattttttcaagagtagggttcagtgatcttgaaattattgattgtttgtttctctctgtctgacttgttgacttaccctgtatataatctccttttggcagtttgctttgttatttcattggtatttataagtctattggtttgtgatcaatctaaaaagtgttggctaagaagttacatttgatgtttgtgcaaaaacgttttctggtggtaccctgcagttgtttgctt

SEQ ID NO: 87880 - DNA, 820 bp, Citrus clementina
  Intron number 4 from transcript clementine0.9_033844m (loc us clementine0.9_033844m.g) derived from phytozome v7.0 (c hr-ID scaffold_26; pos 2159023 to 2159842 reverse strand)
caactggggtaaggttttcccatggtacttttaagacactcatataacttataactaataggcatattgatatacttctatcttgaatatgtttcttcaatatttgcaacagcttatagctgcattagcaaagaagtttaatgactgcgaatgcatattagcaagtacttccaccaacagctggcccgacaattcaaaagtcaaatttgatcagtgagcttctgaacttcagctactagttatacattcagcttcagatgaacagatttggtatgaaatattttatgaaacaaactctataattaagtaggatggtctcgcaaaccagcaatcgatgtaaatctatgcaataatgggaaagcatgtgtccggtcttcctctaattgttatcaaagggtgtggtgattcaaattgaactcctgctatgtgtttaatgaggagcaatcagttttcaagcaaaagcttatcagattgattactgcctacagttcttgtattagcatagattctttatccaataagaagtttataagaagagaaaacaggacagacacccaaaagagggaaaaaaatgagaaaaaaatggagaaacgttatgtctcaatgtcattgcaaatgtaaaatatctatgaagtaaaacaaatccaaaaacaacgcagttcaggagaaggtcaccattcagagaccaatggatttttgcttctttacccagtaaggcaatgactaaagttacattttttattatgatgaattaaataaaaatatatataaaaccaaaataacagttccaagagaaacagtaaattgacactgttgagat

SEQ ID NO: 87881 - DNA, 155 bp, Citrus clementina; identical to SEQ ID NO: 78530
  Intron number 1 from transcript clementine0.9_001461m (loc us clementine0.9_001461m.g) derived from phytozome v7.0 (c hr-ID scaffold_9; pos 598082 to 598236 reverse strand)

SEQ ID NO: 87882 - DNA, 906 bp, Citrus clementina
  Intron number 1 from transcript clementine0.9_019385m (loc us clementine0.9_019356m.g) derived from phytozome v7.0 (c hr-ID scaffold_32; pos 642296 to 643201 reverse strand)
atcaaggctctcactacaggttttcgtttccattttttcccgagaaaatatgcaagaagagtttgaatgttcgtttgttttgtttttattttgtttggtgactttctgttgtttttgcttcagtcgtgtttgtttggttctttcggaagcaaatgtcttaggaaacgaagaatttttttttttcaatcctgaaaatttttagtgtttttccgtcgtttttgtttcgctttagtttaatgccattcgtttggttttccgaagcaggtgattgtttgtttccggagaaaatggaagaaaggtctatgttttgagaagtttacttttattttttattttttaacgtctcgttctttcacgaggaaatattcgagaaaaattgaaagaaagttctgtattttgaacttttagcgtctttatgttgttttggtttctgctgaattctgcttgtttctgaatttgttcgttttctatggcctatgagttccccgacgtattatctgtgatgatgaaaataaaaaagatttggacttctaaaaatttttgtttgccggttgttttcaagaattcaaatgccgtttgtttttgacatttttggttttctacggctaatggtcatttgttcctgagaaaagttttgcattttaagatgtttaatgctttggctttagtgaaatgtggcttgttgttcaatattttctcggtatttattttatttagagtggttcttgagataacaatgaaaatttttagtctttatttattgttcctctagtgaaataaacattgcagcagggtttacagttgtatgtttttgagatgtggattatttatttgatatctttctatattgggttgttggaaatgtgttgtttcaagagtttaacttgccttttcgttgttctgcag

SEQ ID NO: 87883 - DNA, 559 bp, Citrus clementina
  Intron number 1 from transcript clementine0.9_034989m (loc us clementine0.9_034989m.g) derived from phytozome v7.0 (c hr-ID scaffold_34; pos 1393612 to 1394170)
gtgggcaaaacttagagctgcaaactccagaagaggtatcttctaatagtgcatgcacaagcacacacgcatcatattaattgttgcttgttttaatttattaccatcttctatatatcattgacaacgggacaatcatcatgagttttacccaaatttatgcttcttccatgaaacaaattttttcataaatatatcgaaataaagtgaaattttgttatactgatttctttttcttttttttgtgttctttcgggtacttgttcctttttatcatatcaaatttatgtataagacataagaaaaaaaatgtttagaataatttacttacataaaatttgttatttattcaattatttgcatatatttctcataggttgcttgttttcctcatctcaaattacatgcatgaaaagatttcctcatctcaaatttttatgtaccatgtgtatctttgatgactgaaatattatttattcattatatttttattattatctatatatatcttgatatctataacgtcagttgatattttctacacatatcttaatttcag

SEQ ID NO: 87884 - DNA, 733 bp, Citrus clementina
  Intron number 2 from transcript clementine0.9_024045m (loc us clementine0.9_024045m.g) derived from phytozome v7.0 (c hr-ID scaffold_34; pos 2162394 to 2163126 reverse strand)
tatttgttccttcttgcttgtaagtgttttttctttgttttattgcttatgcaattcttaatgattgatccccagtagttcagattctcaaatgtttgtcccactaattaaatttgaagatttgaagatcaagatgccttgcattgtgtttgtttgatatatgaactttctaattagtttcatttgaacttacaaagcattttagtttcttttttgacgtaattgtagctttgcctgctaggtgtttgaacttctgggaatatcgatttactaggctttcccactagttgaattcttttttttaaaaaaaaaatagcatggatttgatttttgtttctgttagtgtggtttttagggtatgtatcatttgcaatagttctaaattgatacaactagctatgaaatgtaaagccttcttgcacttatataacttgttgttttgctattttatgtccatctgaagctttatgagtatttggtttccaaatcatttgcaagtattggttgccaattgcacattctctgtgtgtaatgggtgattgtattctgagcacctctgtgcaaataatacatgtttttttatacttctcgtttaattctacaaagaagcatttaaatatgagtattcatgttgaaatttttggatttttggatgctttatgataatctgatgctatttaggcaatgttttcttgtagtggctggtgtgtattttgctgagaatctcaatcgg

SEQ ID NO: 87885 - DNA, 881 bp, Citrus clementina
  Intron number 1 from transcript clementine0.9_009192m (loc us clementine0.9_009192m.g) derived from phytozome v7.0 (c hr-ID scaffold_17; pos 1737699 to 1738579)
cagcaagatcagacaaagaaggttactttctccctctctgtttttctctttggtgaattttttttcagttgatagtttagggtttgagtttttgtccgtttgattgctgggaaagtttgagaaagattagatctagtggaaaggaaatttgtgaaaagaaaatgaaatattgggtaccctcttaaaagtaactgaatatttgtttctaatttaggttttcccttttgggaaagtttagccaatgtacatcacttatcatgattttattttgttgtatttttttggtaatttttttttcagtcccattttttcggatagcactcagcatatctaaattccttgaatggtcttgatgaaaaacagtttttctaatatgatttacttagatgtgtgttttgatgcccttttggttatgccggactgcaatttcagggaatgaatttagcttccgtatcatatgtatgattcttcactagggctgtcattaggctggtatcactttctggagcctgaatctttttcctaaatgatttgattatctagaaactggtattattattttctgtgtctaaattgttttcagtctagagaaggttgctgtctcctccctctggtgcatgattggattcttcatgctctaggaatttgaaattgttggtgttagagttgtcgatagttaggctctgtgtttctctttctccttcacctgcttgtctgacttcctattctaatttttaagcatacatgtggaatttgtcaaatttctttggttcttattatttgatgtttctagttatacaagtcttggcatataggtctaatgtttttcttttccttgtttatcattcaggaactgaaagacaaggactttttcactgagt

SEQ ID NO: 87886 - DNA, 327 bp, Citrus clementina
  Intron number 2 from transcript clementine0.9_009192m (loc us clementine0.9_009192m.g) derived from phytozome v7.0 (c hr-ID scaffold_17; pos 1738953 to 1739279)
catacaggttattcctttactcctttttatactaattgaagtatattttgctgtgttttttaggcggcttatgatatatgacacatatgacaatgatttgctgtccttttagcagctcaagtgccaccatttcatttgtgattctttctttcattttgattgtgttttgtttaacttcagttatttctttgctggatccactttttattaagttcatggtatcctgggcttttaatctttaatatactacgggagggggaaaaaaaaagaaaagctcaaaatatgttgacagttttctgattcttctttgttgtttgcttgcagcaa

SEQ ID NO: 87887 - DNA, 950 bp, Citrus clementina
  Intron number 1 from transcript clementine0.9_018123m (loc us clementine0.9_018123m.g) derived from phytozome v7.0 (c hr-ID scaffold_17; pos 1687327 to 1688276)
acatttcaccgttaaagcttcttcttcttcttcaggtaaatttccattagactcctccaaattgctcacattgccttacttttctgctggtaaaaaatgtcatttatttatttatttatttatttttttgaacttctatatgcaaatgggtttttgtaagaaacatattgaactgagaaagtgtgtaaattatacattttgggattacaaaaatttatcagtggattcatttacatgtagattggttaaaaagatttggctactaggagcattagagaaataaagttaaagacttgttgagtatgcagaaagttttgaaattgggaaattttcgaatcacaagttgaaattttgggaaaaatgataggcgttgtacatttttcagattttaaaccatcatgaacacaagttttcacgaaaatgtgagaagtaaatttagaaggtattttaacttcggattattttacattggtttacaattaatcgtggaattttgttttaatgagagtattgactgacaattttaccgtgaaattggactcctttacagttgttggctttcagcttagcagtttctttggttatgttagattcaggtaaagaaatacagtatgagcccaaaatttcttattgttgtattggacaaggtgtgacttgagaaattgtccttgtcaaagagctaagaaattttcttccttcatgtcatttgtagctagaacaaacacacaccaaatttatgtgcatactatgtaataagtttaagtagtgacatcccaacttcagattacatatgtattgtatagagctttaatagggtacacaaggtactcacaattaccagttgatatctctgttgatcaaactgatccccttgcgagctgccgtgaattataatttctcttttcccacttgcagttggaagtgcagagtacacggaggaacctgtaact

SEQ ID NO: 87888 - DNA, 725 bp, Citrus clementina
  Intron number 1 from transcript clementine0.9_011740m (loc us clementine0.9_011740m.g) derived from phytozome v7.0 (c hr-ID scaffold_9; pos 666839 to 667563 reverse strand)
ttctcggagactcgctctctttcagctcggtgctggtaagcaccccgcacctcttttatcttattttccatgcttataaccctttagtgaaaatgcccatgtttcccattttggttatttttatggcttgtcatattgtttcttgtagttttggattttatcttttggggtttttgtctttgcatttgaaaatgtatgtagtaggaacgggttctcatttaatgactaattatcgtttcaaaattgcatttttattaatcagtagcaaccagtgcaaggtatgtgcagaattgtttgagaacaagtagttcatagaattacaagaaattaaattagttaatgtttagtactctctagtatggcaaatttgtggtcttggtttttgtggcaatgtaatatgaatgcaagctcttatagaaactgatttggcagtgttgataagcgatatgtgtcacattttgaaaagagtcaaagaaaattaatagtgtaggacatgttgcaataatatgacattgtcacatgagtttttgtataggttgtataggagtttttattccttgtattattgtttaggtgatcagaaaatcaaacctgctgactgccactgatttctgctttacatattcgttaattgaaggtgtcaaattggattttttcttctctgctaatgaactttatgtggttgtgtagctatcccgcagtcacatttgtttggtgcaaaagca

SEQ ID NO: 87889 - DNA, 571 bp, Citrus clementina
  Intron number 1 from transcript clementine0.9_025556m (loc us clementine0.9_025556m.g) derived from phytozome v7.0 (c hr-ID scaffold_54; pos 483549 to 484119)
gccttttgattcagactcatttgaactgtttgaaggtatctatctatatgcatctccctattgatcacttttatatgtagtatttttgttctgtatttcatatgatgagttgtttataactgtacgggtcatgtgtgtgctactgatcactgactacattctttctaaatttgtgcaaatgtgatagcaaaacaaggcttttgagagttgggaccatcaaacaacccgcatattactggtttgtttgcatggaccacactaattaattaaactcaaaaaatccaagctaaaagatcaccaatgttgtcacaacccaaaacttttattaactcggacgctcacccagagatatatacgtatattttttttctttgttaactgctttctcgtttctttctttctttttcttttttaaataatttttcagttacattatgacatttttttttccttttgggttttggaagattaggttattggcaaatagatatcatttattgtctctttctgacaagcagttttgaaagtgtcttcaggtgagtttaggtgaagtaggagaggttggcacaac

SEQ ID NO: 87890 - DNA, 836 bp, Citrus clementina
  Intron number 2 from transcript clementine0.9_026345m (loc us clementine0.9_026363m.g) derived from phytozome v7.0 (c hr-ID scaffold_19; pos 2673786 to 2674621)
gttggacctctgaaggtaattcctttagcttttatgtatgtttttatttcagtgttttgagctactgcttgatattcaattatttttttatccgggttttatttgtattcggtttgttggttgattgttgatttgattttttatgttgttttgttcatttgatctgcttttatcaatttgactttaatttgaaccatggaaattggtcactgtggtcatgtaatattttggctatggagtggggtgttgttttatagatcattgtatgtaggcgctatttaatctgcacataattttatcttgagggtccaattaaggttcagttcactgaaatttgtgcttgaattagggaaggctgtgtttggactagaaggccacagttttaagatgaagagtgtttcctctttagtcactcaactcaaaccaattgtgtttttgggcttattttgaattggtaatttgatcaggactactatgttatcttaaacacatatgaaattaggattcccttttgagaatacttgatcttcgtattgaggtgatttgacatttgcaggaaattcacgtctaaacttgctttcaatcatactcttctctaggcatttaaactgaatcataaattaaatgaaaactaatgtgtgggtcattatccagaagaaattaggtgcaagtaatagttgaacatgaactccaaaggtcaaaggttttacaatctttttgcctctttatctgaactatttcttgtctttaccaagattggtaaacccatctctctatctctggcgtacaatgaaagaatgcatatcctttccttttgtagggcaagacaagactag

SEQ ID NO: 87891 - DNA, 813 bp, Citrus clementina
  Intron number 2 from transcript clementine0.9_002339m (loc us clementine0.9_002339m.g) derived from phytozome v7.0 (c hr-ID scaffold_26; pos 1000653 to 1001465)
aagcggcagtcaagttgtcaggcaatccttctgatgtacgttattctatgcctaaaaaatgcttataacaataaatgcacgcacaattgtagaattttgctatctgattcaaggttggtttcaaaatggtgaaagatcaccctactttcatcttaaagttattaagcagtggtaaacttgtacttaaattagctatacatacaaattatatgtctctgtaagtattttccatcttgtggatggaggtcattgaaaactaaatgagagattaaaatccaattattccatcaactccacttggaactttatcctgtttataatgatttgatattttcgaattttagccaaatgttaagacatttggagctatatggaaaatggtgcccaagatatttcttaatcagaaattttactatcttctgtgtttgattcctgactaatggcatcttttcctaaggcacatttgactttagatctatcctctgctctgtcacagagtctgttcttaatgttttcaacataagtgcattaacttcagatataacttaaccactggctgaagttagaaatgccattagcctaacatgttagttttgaaagcataatcaatgcttgaccttggtgccactgttcattgcgaatcatctgtttgatggatatggctttttgattctctcttctaaattggaagttcttaaacttcttgaatatgcaaataaattatttctttcaaaaatattcaactactctctaaatgatttttctcgtgattttgaaggtttaccaacctctgggtgatatcaagctagaatt

SEQ ID NO: 87892 - DNA, 888 bp, Citrus clementina
  Intron number 1 from transcript clementine0.9_030183m (loc us clementine0.9_030183m.g) derived from phytozome v7.0 (c hr-ID scaffold_116; pos 542183 to 543070 reverse strand)
gtgggtccctgatgaatacgcccaccacaccacacacaaattttactctaatatacaacgtggaccaaaatttaccggacaaaataaataaaataataaaagacagggaccgttctattttcacaccaagtttcagatagagcaacttactttgtggcccaaaatgaatataaaaataaataaaattaaaaaaataaagcatcttaattgttgaaaaaattataaaataaaataacgtcacaaggacctggtagtctggtagcggtttaaattgtaaagtgcttgttatatgtcagttgtcttcactctaaggtacgccccagcggccaaaagaactgaggctttgattgaggttatgatctttcgaaatttacaaatctgtttctgggttcttcaatttagtggattgctgatttgggttcgtgtactttcaatttttaatttttttcccggtaaccacaaagacttgcgttttagctcaaaaagcaaggtatccaattccaagtttttttttttttttgggtttgattttgagcctagttcgttgttgatatatactgctatatgtgtaggtttttggtatgtttgctgattgtctgtgtagagcaacagttctgatctttgctgaaatgggtaaaatttggttcttgaatgagagacttgaaattgtaattacggggaatcatagttgtgatcgcaagaaagttaattatttgattttgatatcaatctgtgtgaagctttatggatgattgtggaggaaaagaaatgatttctgggtttttgaaattcaaggtttgagtttcaattttttataaatcatggatttgcatgctgagtgtaagtgatatttgtagccagttttgggtattaagtctagttctgtcc

SEQ ID NO: 87893 - DNA, 955 bp, Citrus clementina
  Intron number 2 from transcript clementine0.9_006404m (loc us clementine0.9_006404m.g) derived from phytozome v7.0 (c hr-ID scaffold_46; pos 1645572 to 1646526 reverse strand)
gctatagaatttccgctggtatgtatttttctcacttattcctcttgttaaatatcttgcaaaacccgtccaagtctttggagcaagagaaataacaggttgcagctcttgtacatggtgttatgtcaggtggtcacttggccttttcctttatttcgtaaggtaacagaaggttatgtatggaaatcaattcatacgaataaaaattcttggaaaagtcatagaacatgattactgtctcttagttagagatacgtccaaactatcgtctcatttgagctgccgcggggtgaagcttactacttctgactagcttttctacttctataatttacgaaaagagctgtcttttttctaaaaaataaaagagtaatgatacagccacaaactcttatacaaacttattttgtacaaactgacgtggcattaatttattggttgaatgaaaatataaattaataaaaacaaatcatgtgggccaagtgatatttaattcaaccaatcttatcatgtcatatcagtttgtacaaaataagtttgtacaagagtttgtggctatatcattactcaaaataaaaatacatttctattacgagagaaaacttgtggtgcaactgtagtaccgtgccatagttgcatccagccgttggatgccagtagaccccaccaattcaagtgcatccaacggttagatgcaactgtggcacggtaccacaattgtaccgtagcctgatccctattaccatggatacaggcagtttttgtccaactattaaaatcaagcatttgcttatcttgatttggacataatcagaaacctatagagataactagaagaaaaacacggaaagccaattcaaaaaactcgtattagttgtcattgctataagatagtaaacatggaattctaaaacagaaatcatttgatgcactaatctttcaaatggggttgcag

SEQ ID NO: 87894 - DNA, 860 bp, Citrus clementina
  Intron number 1 from transcript clementine0.9_009357m (loc us clementine0.9_009357m.g) derived from phytozome v7.0 (c hr-ID scaffold_6; pos 6656808 to 6657667 reverse strand)
attacaggtttgtctgtatgcatctagttttctctttagtttgattccaagaagaaaaggatccaatgtgttttgtctgagtagcaggtaggcggagttaattaattaagtcattaattaaagcgaactcataataatatcacgagttgagtagaaatatgtatgatttgtaggtatgaattggtgtcgattaaatgagcttgagccctcctgtgtcctgtctcctctcctctgtcaatgcaaattactatctagtgcacagtacaagtagtatctggctgaatctcgagtaaaaaatataaagttaagagagaactgttatgtactgttccagatagaacagaggagttagttggggccattgtattgttacgttgtcatcaagtggactggcgtggccccttgtgataacataactactttaattatcacttgtcgcacatgaatgagaggagacatgattttatcaattgtttctttctctgtgaatcctcagcctcaattgtagttttgcctttagatgagctggaataattaagatcatccgatcgaaacctgctgctaggtctcagccatagatagatgccaatgctgctgctgcttctgcttaaggaaccccatacacatattgctttgctcttcattaattaaaagatttaaatgctggttatgttagtaggtaaagcttcacatgacccacaattttttcttctctttcttcttattgctgttgttgtatgtgactgcaacattaatgcatgcgtgccccatctaacaatagggaaaaaaaatgcgtaatgtttgaaaatactgtaaatgaaacaggtacgcagacgggtcagctgcaaaaggcatattcg

SEQ ID NO: 87895 - DNA, 749 bp, Citrus clementina
  Intron number 3 from transcript clementine0.9_033616m (loc us clementine0.9_033616m.g) derived from phytozome v7.0 (c hr-ID scaffold_73; pos 146481 to 147229)
ccacagacgtctatcttcttggtatatatactccgcatttccctcctcgatacatattcatacattatttcgacacttggtcttgaatatctctcattttttaccttttaaatttctaaaactgtctgtttacattttcgacatgaaaagttgaaaactacaaccaaaaaacaggctttttgagttctattgttgtaaaaaggttttgtatgttaaaataaaaacactagaatgtaatgtataatataaaaaatgagaaatatttatatattgttattggtgtggctaggactttcagatatttaatataaaagactaattaatcgggtggagggactcattctacttataaacctaagcaacttttctttattaacaaatgtaggatataacttgacaataccctcttagatgaaaccaaatggactacagtcatcatccgacacacctgtgttattctatcaccacattcccagactactagaatttgacttttataccaatttgttgcaaaactagatttaagatctcaggtatccaaccctaaaaaattaatctatcctatttttaaacctaagtaaccctctttattaactaaaatgagacataactcaacaagtacctaactgtcattctctgtttcgataatgtgactaataatgtgttttattttcttgataaatatgtttataggagggcatactgtggggatagcacattgttctttcttccaaaaacactggaaaacc

SEQ ID NO: 87896 - DNA, 662 bp, Citrus clementina
  Intron number 1 from transcript clementine0.9_021206m (loc us clementine0.9_021206m.g) derived from phytozome v7.0 (c hr-ID scaffold_9; pos 1051354 to 1052015)
tcactttgtccgatcaggctgtgattttcttacgggtacgtttcgattctctgtttggttgctgagaaattaaaagaaaactcccccacacgaaaagtttgtttctgttcggttgcaaagaaattactggcaaatttcctttttcttttctaaagatttcttaatctaagtgattatcagttgtgctagggttttatacttttatcgtcttgttattttgattgttatattttcctttgattccataactcaaagtatgaattagctgattaggtttagctcaaaatttaatttcttttcttttattgattattgtagcaatgattgattctcgggcaaccataatggaatattcctgagaatcaagttttgtgtttgaaaggaggattatttagtagttgttatttttcatgaaaaagagcagcttttcatgaagctaattgaagagttttaacttgattattttgagggattgaactccgttgtctcttttagtttgtggtcatattctggggatgtctgttcatcgtaattaaacttgaggaagtctgaaatttcactgaatatgcagctatgtcttaatatccattgatatcaatgagtttttccattttatgtctgttttaggctttgggtattgcttgcggggagataggtgcgtt

SEQ ID NO: 87897 - DNA, 861 bp, Citrus clementina
  Intron number 1 from transcript clementine0.9_005903m (loc us clementine0.9_005903m.g) derived from phytozome v7.0 (c hr-ID scaffold_26; pos 770419 to 771279)
ctcaacaacaacccaacaatcaaaagcagttccaggttctcttttacattctttgtcatgaaaagttcaagtctttatgactagccagttgcgctttccttcatgttttgcaaattttgtagttattgattggcgatttgattaagcatgtataaagacagctcaacttttttgaatgtttgtgttcttgttctcctggttttggtaaatcatttttttcttactcaatattcaatttttaagacagcccgtttatctattttgctaatatatgaattcggatcaatatattgtgtaggcgtgggtgaataagaaatagctcctattgtctgttaacgttttcattttttgagattacccatttctttgtttagctatttcatgaatttgggtgaaggacattggttaagcatgtgtaattctggattaaaaaaatttattaagtggtgttaaaagttttgattaaattcatgggagtagtttggaagtttattaatttttgaggttttgcatcttaatttgaaatattttgcagtcagttcacagatgcaatcttggcccattaagctgaaaatttaagttgttttttgcttaaatgccagcttcagattggccgtcagttgctgcagggcaatgttgaaaagctattcaattgttatagcagtgtctatttgtttatggagttctgagttgaagtatgtaacaagtcctacttggttttaaattgttaaggagtgaattggatgtcactatgaaaaatgttattatcatttatgctgcatcttgtgtcttcctgccagttgtgttgcttcacattgaccctttaggttgtaatcaggaactggaatcatcatctggaac

SEQ ID NO: 87898 - DNA, 779 bp, Citrus clementina; identical to SEQ ID NO: 78455
  Intron number 2 from transcript clementine0.9_006046m (loc us clementine0.9_006046m.g) derived from phytozome v7.0 (c hr-ID scaffold_26; pos 2726301 to 2727079 reverse strand)

SEQ ID NO: 87899 - DNA, 733 bp, Citrus clementina
  Intron number 1 from transcript clementine0.9_003944m (loc us clementine0.9_003944m.g) derived from phytozome v7.0 (c hr-ID scaffold_17; pos 1704433 to 1705165 reverse strand)
agtccactacattttctgctactcttattagccaggttctgaaaaagcttccctttctttgtcttgcctttctgtttgtagtttttttttaaaattttaatgtaacttaaatcttaatttgtgttttacttgttatttgaaaaaatggagcgcccccccccccccccccccccaaaactatcatcagtagggacaaatcttttatgtgaaattgtcttttgatggttttgttaggattgttgtggctcaaaatgtaatgcaagtttgtggcttgtcatcatgcgtctggtttgtggttgggatgtggaaaattttctgtttttaaggtattctaatgtagttttcagagggctaaggatttaactttctgttcatgagtaagaaaatatgtctttgatttgtattttttgatctcgtgcggtgtttgtggtgaattcatctttttcattcaagcttatttgacatataagaaaatttgttgttttatcctattgagtgcattgtaaatcctctacggtactttgattctttgttaggatttgatggggtatgaatcttttgctgttttatcttatgtttatattgtttttcttttgatgagccgttgaaaaatagaactcagcttctaggttggaaatttttgttgtacttgtgcctgatattagtagtcatcttcaaacgcaatgaacaatgaattgatttttattacctttgcaggttgatattggtggca

SEQ ID NO: 87900 - DNA, 734 bp, Citrus clementina
  Intron number 2 from transcript clementine0.9_009196m (loc us clementine0.9_009196m.g) derived from phytozome v7.0 (c hr-ID scaffold_32; pos 506109 to 506842)
aggaagttgcaattaagcttgtgagtgtattgaatttgtgtattttgtaagaaattatatggtagtaattgtttgcttgaatatcagctaaaaattgacctttttttttgttatgttagtttgctagtagttattaattttgttgttgtttgggttttgagggtaaatattgtttttttttttttgttgaatgatggacgaagaatgcgatagtgagtgagtgagagtgagttgatgaatgattatgtattaggaaaatttaagcttgctttaagagattgagaatgaaatttaagcttgctttaatttgttaccgcaatcctttgagggcggaaaaaggggtttttttagttctgccaatgacctttgcttattttggagttttcttaagttaaaattgatgcaagattaatccaggttttgtgtaaagttaagccagcgtggtagtcacacttgtcaacaataatctgttatgtatcttatgagatttagttgagggattcacctaccatgtcctaacagtgacttcaatgattttgggttcaaatgttgaaggcagtttgtgcttgcagaacttcattgttgataaataaaattttcactatcttttcttctttgttttgttatccgatttaactgtattagttttctttctgttctagtatttttccttcttgatgatattgcttgttcccaaattcattaagtctgatagtattttctttcataggaga

SEQ ID NO: 87901 - DNA, 395 bp, Citrus clementina; identical to SEQ ID NO: 82007
  Intron number 1 from transcript clementine0.9_019649m (loc us clementine0.9_019649m.g) derived from phytozome v7.0 (c hr-ID scaffold_6; pos 6375937 to 6376331)

SEQ ID NO: 87902 - DNA, 655 bp, Citrus clementina
  Intron number 3 from transcript clementine0.9_036033m (loc us clementine0.9_036033m.g) derived from phytozome v7.0 (c hr-ID scaffold_36; pos 207071 to 207725)
tgggtgcttaaggaattcgatatctttgaggatcagtttgttgtgaattggatgagattaatattcaagattatgaatggagaagatgatacaatttgtccttttaaacatgccattagaacattagtttttttttaaaaaataaataaagtgtattttttcattttatttggaagtttaaatgattgtagggttttccatatttttgctttgctgcttttgtgtgaataccatgtaactctatgagcaacattgttttaaggtagcatgctgtatttgatgagtatatcttgctagctagtggttatcagttctttctgttatctgttgttaagctttcacactattttgtcggttgtagattctcatttgcatttttgtttctttctgtgagtagtgcactacatctgatgtgctaatggtctttcaacttgcttttgattcaataatggaagctttggcatttaaatttccatagtttccattagattcaggggagccatgtcagagttttgtaagaggagaaatctttagatggctttgtgtcaaaatttacttttaaggaattctcattttcatttattcccaacattttatgtcctccgtccgtttgtgttcagagaaaacgttgaaggccttaaaggagaaggcaaaa

SEQ ID NO: 87903 - DNA, 504 bp, Citrus clementina
  Intron number 1 from transcript clementine0.9_021965m (loc us clementine0.9_021944m.g) derived from phytozome v7.0 (c hr-ID scaffold_32; pos 2278530 to 2279033)
cattgaccgattcgaattgtagcagctacgtaaaggttcgttcttaaatttctttttattttattaattttggaggaaacttaatatttttatacgggtttgcgggattttatggggtttttgcttttacgaactccacgagtcttgtcttcaagccgaactgctagagctgccaggtccgacctctgccttggagttgagtgtgagcagttgctgcctggccaggagaggtgcgaaacctacgtggcatatcatacatataaccatttttttttacaatttctttttttgggggggaaaaagttcaattcatgtattacttccagtaaaactaggttcattgcgtaaagagggccgttttgtagaaatgttataaccttgtaaaaatattagcaattcaatgttcatattcttgttttgtttgattctccatatccatatgcctgttgttgacatattgtctttgttgtttatctttttgagcagtactttccatctgagaag

SEQ ID NO: 87904 - DNA, 449 bp, Citrus clementina; identical to SEQ ID NO: 77951
  Intron number 1 from transcript clementine0.9_007568m (loc us clementine0.9_007568m.g) derived from phytozome v7.0 (c hr-ID scaffold_32; pos 1978351 to 1978799)

SEQ ID NO: 87905 - DNA, 237 bp, Citrus clementina
  Intron number 2 from transcript clementine0.9_028726m (loc us clementine0.9_028726m.g) derived from phytozome v7.0 (c hr-ID scaffold_32; pos 736113 to 736349)
ctggctcaggctgccttgaaattcatcctggagtggtatgtatgttcttattttaatttttcgttttggaatgtgaaaagggaaaatgattaatgtgaaattcaaggggccaattttgctttcatgtgctgcaacaaagttgcctttacccaccacaatcacaaacaacaaatggccatttgattctttgtttatttttcttcctaataataagttatttatcctttgctctttcag

SEQ ID NO: 87906 - DNA, 550 bp, Citrus clementina
  Intron number 1 from transcript clementine0.9_028822m (loc us clementine0.9_028822m.g) derived from phytozome v7.0 (c hr-ID scaffold_46; pos 1630177 to 1630726)
tcttgtgcaggccagtttgtttcccttcttttctccttgttatttattaatgggaaattatcattcatataccctatatttgttctgttatcaaaaatactacaacattttgagggtgtatcaatcgtctacccttagttgacaaaatgtatcagccgaccaccaaaccgttagttgccgtttgaaagttaacggagttacagtgaattgacgattttacccttaaaaattatcacttgtatacccttaaattctctttttatcacttgcatacccttaaattatcacttgtatcatatgaaaagaccaaattacccttctgacgtcatcatacttaaacggcaactaacggtttggtggtcagctgatacattttgtcaacttagggtggacgattgatacaccctcaaagtgttgtagtatttttgataatggagtaaactaagggtatacaaatgataatttccctttattaattaacgtttcaagaattaaaatttttcatgatcaaagttgttttttttttcctttttaatttattatttttcag

SEQ ID NO: 87907 - DNA, 517 bp, Citrus clementina
  Intron number 1 from transcript clementine0.9_027914m (loc us clementine0.9_027914m.g) derived from phytozome v7.0 (c hr-ID scaffold_9; pos 5806009 to 5806525 reverse strand)
tatcgggttatatcttcaagggaaccaactccaaggtatgatcaatgagtttaattaattgatgaaaattaataatgtctcacttttattaatcctgtcagcctataattatttaattctattgagtaaattttttttatctctcttcaggcaaaagctttttttatttcatttttttcttcttgagcgcctgttaataataagttaaaatagttaacgtgtatgttactcatacgttcagacgtttatttaggcatgaaagtaagcgttttgattttggaaaggaaagtctaaatcctagccttagagcatgtttggttctgcttatctcgtcatttgacaaaaactttatttatttatgttttcataaattttttttttatttcttttcaggcaaaaactttttttagttcctttttttcttcttgagtgccggttaataagttaaaatagttaacgcatatgttactcttggattttaggagaaattccagaggagctcgggaatcttgcagaa

SEQ ID NO: 87908 - DNA, 586 bp, Citrus clementina; identical to SEQ ID NO: 81769
  Intron number 1 from transcript clementine0.9_012199m (loc us clementine0.9_012199m.g) derived from phytozome v7.0 (c hr-ID scaffold_32; pos 438044 to 438629)

SEQ ID NO: 87909 - DNA, 567 bp, Citrus clementina
  Intron number 1 from transcript clementine0.9_019432m (loc us clementine0.9_018164m.g) derived from phytozome v7.0 (c hr-ID scaffold_32; pos 219330 to 219896)
gtcagttttcgacctcctcaagcacccaactcaaggtattcacttaaagttcttttgtttgattgaaaatgaaacgtaaagcaagggaatttatgaatgttttacatttttttttaattgaaaatgaaatgataagcaagagaatttaggagagttcttttttttttattaaaaatgaaatgaaaagcatgagaatttaagtaaagatgttatcttttttttcttttttttgtgatatcgatagtgtgaattctgttcgtttgagatgagtttagtgtactgggaagtgttctcatgttgtttatggtatcttttgtgtggttttagctctgtttggtgtttgggaaggttttagaaagtgaaaaggaaaatgggtttgagttctatggtttatgttgtcttttttataagcttgacataattcagctcatagctaagaaaataattgaaaattttgacaaagttagggtcttacttggttaatagttcagtggaacttaaagctaatgcaaaagataatgattcaattttgattggaatttgatgcaggggtggttgcaaatttgg

SEQ ID NO: 87910 - DNA, 855 bp, Citrus clementina
  Intron number 5 from transcript clementine0.9_002853m (loc us clementine0.9_002853m.g) derived from phytozome v7.0 (c hr-ID scaffold_19; pos 91412 to 92266)
caaaatagcactaaagagggcgttcgttgcaacaggtcagccatgcacatccccgaccccctctaatctatgagtgctgatctaaaaattattacaccatgcggtgcaatagaccatatctgatagctttcctaatcagattggataatttctgttatataaaaatatttaaggatagactaaaatataaaacataaatgttaggaaattccttactatattaaaataacagaaattctcatatagttataagaccattcactgtttattgaaccaaaatacaatatagccaagagaaaacatgaatcaaaatacaagagcttgccgcattgaatatggtgtaatatcttttttggattttaacaaattacatgatttggcacataaatacatatgcaaaatttatagtaagttaggatagtattttgatttctaagaatttgtatcaacatgcatttttgaagattaaaaaactcatatttattatatatgtacacatttaaattaatcaatgctcactttctttttattacattacatttatcatgtatgttcaaagattgctgcataaaactcttgttttctcttatcgttttgtctttacagaaaccatttacttgatgatagaataaactaacgtacgtaaatttggcaaacaaccttcaaataattgctgattgttagattgtatctatgttgttagaatatgtcacagtcttctttcactgtatctgcacgcagctacctgaaatttagattttagaattcattaattcaaagacatatgtatcttgacatgttataattatgttaatttcaggaaactcataggagcaagatacttcaacaaagctt

SEQ ID NO: 87911 - DNA, 782 bp, Citrus clementina
  Intron number 1 from transcript clementine0.9_012964m (loc us clementine0.9_012964m.g) derived from phytozome v7.0 (c hr-ID scaffold_19; pos 2047617 to 2048398 reverse strand)
gccgacgataaggtatactttttttttttacttttttttccgctgaaagaacaaccgatggaaacaattttttttttttttattatctgaagcttggttttttgtggaaaagaaagtgattgtgtagagtttaggttttctttttctttttcttttattttttagtgaagcaaatgtaaatgtagcacaaactgttgttatttttgtatattttgagttgagacgggtggaattttggaagatttacgtttttcttcagtttattatacactcgtgaaaatttggttttttgggtgaaatttgtagcttctgcgttggcgatctggctttgttagcttaccggacaacttccttattaattttttctttttcttttttctttagtttgtctagatctcagatcttctttgttgtatggatttgcagataatgtttttttccccttttcttgagtttaattatggtaattagttaatcactctgtttacccgatccgtgctttgagctccgttcaacttgtttttcaaatgattttttttttgtttctggtgcttgtatggatcaaacttgccttacttgcttctattaaattactcttggatttaatatgttcgatatacctgttacttgtgaatgatcgtcgactttcatttcatctgccttctaattttggtactgtaaactaatatgagacatcaaagtaaatgatttttatttccgactagttgtcttctcgttgagtacatgatatgaaattgcccttgtaaaatgttttgcaggag

SEQ ID NO: 87912 - DNA, 807 bp, Citrus clementina
  Intron number 1 from transcript clementine0.9_020480m (loc us clementine0.9_020480m.g) derived from phytozome v7.0 (c hr-ID scaffold_19; pos 3956915 to 3957721)
ctttggtcttcttccacctcaaatcctcctctcaggtatccatgcatgcggtgttattatgcgtttaaagtttgttccttgttgcttgtcaattttatgcgcatgcactggctagtcctaaaatttagctatttcattgttagttacttttagcaacaatgccggatgagtatgtatggtctttgttttaatttttaggcgtttatttcacttgtaatggtcggcaaggttaagtcgtattattggaccagtactagaaaatttgatcatgttactgctatttcagataactttgattaatataagtaaaatctatgttatgtcattgtttcaaacaaagtgttaggcttgagaaaggcagaggaaattaaagaaaatgaatgatgatcatttttttctattgatgtatttaacggggatgtgaaaatgatatttaatattaatttcatacatttagttagctaatgtaatatgaaagagaagaaactgttcagaaccattatactatttcacttcttaaattcctattagtatgataattttgatttttttttttatcatcgtctgacgtgtttgatcacttgattatgcatttgtgttgacactcctatgtggtttctctattcactttttcgaaagaaaacttaaatgcattaccatcttatcttgttttgctttatacttattttgaggggctagaaaacttccacttgtttttgttgggattatgtggtctctagggcataataatttatgctttaaagacatactcatgtatttcttatcattttaacagtgcggaattcg

SEQ ID NO: 87913 - DNA, 682 bp, Citrus clementina
  Intron number 2 from transcript clementine0.9_020168m (loc us clementine0.9_020168m.g) derived from phytozome v7.0 (c hr-ID scaffold_172; pos 39762 to 40443 reverse strand)
ataaggttagaaagaaggcctttttgttttaaggctgtgtaggtgtctcttcgtgggtgatttaatgaatgcttatatttggcttcgtagatgtctctttgtgggtgattagtgaatgcttatatttgtttgatgaaaggtgtggcagaagttgtagaataaaattatgttttgcattctctgttttttcttttttaatttggtaatggagttttttgttcggcttgataacccatttgcattttgagcctgatggggttagctgaatagctggttttgagtagactgtgatgctttgaacttgggaataattgctttgaaggttcgattttgtgcaaatgcctcattcttgagctgtaatattcataatcttgagagtaacttaggtgttgtacaggtgtaacctcattcatgatgttagtctttttatctgtaatcatgaaatgcttcttagttgagactttatttttcaaaagaattttggccgcttttgttttctctttaacctttatatatatatatatatatatatataatcagttattcccttatcttatttgcaaagggcttaataaaagatgagaatttgtttttgaaacatatttgggagcataagatatttgcacttgcttggcaaaactatgcgcatctgacatctttatgtacatcatcagggagctcc

SEQ ID NO: 87914 - DNA, 999 bp, Citrus clementina
  Intron number 1 from transcript clementine0.9_019715m (loc us clementine0.9_019715m.g) derived from phytozome v7.0 (c hr-ID scaffold_26; pos 1976499 to 1977497 reverse strand)
ctctctttaagtaattttcttccgtttcgccgcgggtaagatggttaattttttttactcttgtgatttaagatttggtttaatttctctttaattagtatcttcggcttgaattgagttttgttttagctgaatcagctgatgtaacgattttgattccaatggaaattataaattgttttaggttagggttagagttaggttcagggttttctgtttggttgctgaggaagtgtgggaattgcgtgaaagtgaacaactttactcaaatcttcttaattctgcctaaatttgagtttatgtttctatttttcgtttccttgtttttttccccctccattggatcttgatcaggagttgggcaaatattttttgtgtaaactttgctgaaattttaaaattcgttttgtaggtcaattgtgtttattagcacttgtttatgttgtccatgcctgatgtatgtctttttatctcttttgtggagaaatgtatttgcagatcaatttttgcatttttttttttttgctatttcgtagaactttttttttttttaatgtttttacacagaaattgagatgtcagctaccctccagctgatttaggtgacaggttgagatgttcatttctaggtataaaagtttggcattttatgcattattctttagtcataaagttagaggatcatttgtttgggcttgaagctgctcttgagaaagtttcaatagctgtaattctctgctgcttggagattttggccataaaggctgttgttactttggagttttggtggttccttattcctttgcaacctttttgtatttttacgcctctttctttgtagatcatctcatattgcactaaaacctcacatggtagatttccagaaagattactgacatatatttaagttcctcccgttcttatttccatactactgtcttgatttgtgctttcatgatttcttcctcacagtatttagaaccttctttgcagggtcag

SEQ ID NO: 87915 - DNA, 373 bp, Citrus clementina
  Intron number 2 from transcript clementine0.9_017629m (loc us clementine0.9_017629m.g) derived from phytozome v7.0 (c hr-ID scaffold_36; pos 162003 to 162375 reverse strand)
ccatccactttatcaagctgcaaacagctgcgagagttatctttatcgtccaattatttttctgggaccataccaaaagaaattggcaacttgacaaaacttacgaggttaaatcttcgacaaaacaaactccaaggtaggatcaaagagtttaattaattaataaaaattaataatgtctccctcttattaagtctgatagcctataattctttaaagctatgagtaattgtttctcaatcttcttcacggaataatttttttatttcatttttttcttcttgagcgctgggtaataaattaaaaatgtttacgcaaatattgctcctaatttttaggagaaattccagaggaactggggaatcttgcagaa

SEQ ID NO: 87916 - DNA, 702 bp, Citrus clementina
  Intron number 1 from transcript clementine0.9_002722m (loc us clementine0.9_002718m.g) derived from phytozome v7.0 (c hr-ID scaffold_22; pos 2729971 to 2730672 reverse strand)
ttaaaccctatttgtgtctcttcttggaaaagtgagtttttgtctttgttttttcaattgatatttatttttatgcgatcaatttattcattgagatattttcgtgaatgtttccagcttgattaatttgagttgttttgttatctttgactttgatatattaagcttaattctgagtttgatgtgtgatttgatgttttctgtttcatgcttgaattagatgatttcattactgattttttttttttaatcaagtttgtgtaactgatgcaaaaaaaaagggaaaaactctgcagaaaccataactgccatgagctgtttgagtcaaaagtgtaatttgctttaagttgattaggtgggctgctactgattttgtaaccagaggaaaattttaagaacttcattttaacttgatagctgatgttaacgctgctgtttctaacagatttcttataagctttagatccttcagctatccccagagtgcagtatttgacttacagaagtctgatatctgagtaaaacaaaggtttgtatggtaatatgattgatttactttttccccaaacttgattacctgtttgaaagttgagaattctgttcatttcttgtgaaattagttctttttttgttattaaatcttcttctcagacttgaatttatgtttaaactatatgttttggcagttgaggagtttttggg

SEQ ID NO: 87917 - DNA, 566 bp, Citrus clementina
  Intron number 1 from transcript clementine0.9_029330m (loc us clementine0.9_029330m.g) derived from phytozome v7.0 (c hr-ID scaffold_19; pos 556650 to 557215 reverse strand)
cgccggcagagtcttcagggctggtgacaaaatctgttaagttctctctttgctatgcttggaagtttctactccttttatcagaaactaatttaaccggtagaatttgtaagcggtaattattattttctttcattgccttttttggcaaccgaatggagaataaatttgaaatacaaaacaatatttttattataatttatttttctttgatattgaaggatcctattcctagctttcttagtgagcatacgagtgtcaatttttcttcaagcaactacgacattgacttgtgattagtgggttttgatataaaaattataattccttctgtttatgactttattctgattttcttggttcccatctaattaaatcaacgtgacgtgactcattgagtcatgtcatggtttcaatggtatttttgtttttaaatttatttttaatagaaattacatgggattttattaatttcactttcgcatgatattcgcgggatgctgtgcctgtgttgtgggtgtttggggtcagggctcgcctactccccggcgcaggaaagcattgct

SEQ ID NO: 87918 - DNA, 693 bp, Citrus clementina
  Intron number 1 from transcript clementine0.9_027105m (loc us clementine0.9_027105m.g) derived from phytozome v7.0 (c hr-ID scaffold_26; pos 1520664 to 1521356)
atctgaattagtctagaaagcaagatgaaaatccaggagaattacaactctgttattgtgccatattcttgtaatatgtatacttatacatatgtatttaaatgctagaattttattacaacagaaaccagtttagaccatgaagcctcatataatagcaatatcagatgaaactgcagtagccgatgactttggcatgaaactgctttggtcagaagacaaaatcattaatcattgttttaccttattacactgctgaattaatcaattaccatatcaactgctctagcaatgggagcaggccgaaattgagtggtgaaattgagttccttaccgtagatagcttgttcagtgtaccatcaatttgcacaaagtatgcctccaggagcatttctagctcttcaacatcgaggtgcttgctaatagcactgtgagtggtactagtgcgtgtcccatggctggcccggctatgtatattttgagtaaacagattgtcgtgaatgttctctgtgttctgaaaatctgcttcatagctagttgatcccccagttgcttctaatgagatttcagcagtagtcctgaaacaggacaataaatttagacgcatggaagggaaaaaaatgaaaagacagttaacaaagaaaaagcaaaattttaggtgcctgttattcatatttgattgaagaacttcat

SEQ ID NO: 87919 - DNA, 834 bp, Citrus clementina
  Intron number 1 from transcript clementine0.9_009303m (loc us clementine0.9_009303m.g) derived from phytozome v7.0 (c hr-ID scaffold_59; pos 873802 to 874635)
gctcatatcagtggccttgttgctgctcaggtatctcatcttctcagatctgcatttgctattttaactcactggcaagttggataattataaattggttttcttttttctgattgtattgacgtttggatcttgcttttaacttatgctttgatcttgtaaacagcatgcgagctagcttagttagtaatatttaagttgaattaagagatctgggatcaaatctcaaacatggcacacatgagtagagagtagttttaatttactatacatgctatggttaaataatttttttttttaaagaaagaaaattctatgcaggttttgtaatggatctaggagatgtgaaatctgtaatgtattggatgattgaaactcatttgttttggtgggatcatggggtggattttgtttcgttttaattaaatatgaatgagatctaatactattttaagtagagtttggttggatttagctgttggtgaaatttcagatctattgataggatggtataagaaattatttgtcctctaatattgagtaagaactattatgccgacaccaaaccccgtaagtttggctttgattataaaatatttcctacaatttcaatcttagcttgaaagctagtttattgtcatgtgtgcaagtccagctacaatcctgtgataagttcaatgttgaattaattgcgtctttgggttcttgcagctagtggtgttgtagtatttttcatataataaaattttcttagattgtattttgtgtttggtgtaatgtatgtactttttgcttgtaggaagctgcaaacccctttgagtactgtcacatagt

SEQ ID NO: 87920 - DNA, 370 bp, Citrus clementina
  Intron number 2 from transcript clementine0.9_033562m (loc us clementine0.9_033562m.g) derived from phytozome v7.0 (c hr-ID scaffold_6; pos 4228731 to 4229100 reverse strand)
aaggttttccattttagtttttcctatttaaatttagttttttcttcagcatattgaacatttttgtaattgcttttgatgactgtgttgtgtgtgtgtgtgtgtctagagagagagagagaaagtaattttacaataaggaactcctttatgttaataaacgaagggacaagctaaaagacaagcattttgagattaatcttctgaaattacttaaatgaagataaagatgatattgttgcatttggcttctagttttagtttggtttttgaattaattctttgttgggtaatgccttaattatattagccactcttgtttgtgaggtgtggttgacagatcctttcttttgttgtttcagattcggaa

SEQ ID NO: 87921 - DNA, 762 bp, Citrus clementina
  Intron number 2 from transcript clementine0.9_008732m (loc us clementine0.9_008732m.g) derived from phytozome v7.0 (c hr-ID scaffold_19; pos 3030934 to 3031695 reverse strand)
ctgtttcagctgtgcctttctttgtcttcttcaaggttctttttctaaattttattgtttattttttagcttaattgaggtattggtttgcttggttgttattcttgtttatgttttatagggtatatgagatgaagtataattatatcttgtttacttgaatctctaaggtattattctctgtttggttttacagatacggcttgaatcgttcaagtgggagggtttttgtggttgtttgaaactaatgctcattagcagtttagcaaagggtagaaattagtgttgttggttttacttttaggcttttcactttatctttgttgattgtggcatatagtctcctgttgtggtctgtagtgtttgattaaattttgttaggcttttttttctttttttgggttgggtttatagttagatattctacttgaactaggtgtggatcattttgtaatccttccttagatacattagcaattattacaagccactgattctttcgaattgggtctagaggatatctctgtgtttatgcatctcaaggaaaacagccaaccagtcaattgtatgtgcaaatactttttgtagtcgataagctttcttctctgtctaggttttggtttctttcaccgatgacaatcttttaggtattctatttgtgtttatatgtgttcgcttagtaattgaataattgtttaatgtagttgcttcactcacctattgctttttaactgaatatctcaaatgaatttgcttgatagg

SEQ ID NO: 87922 - DNA, 895 bp, Citrus clementina
  Intron number 1 from transcript clementine0.9_011323m (loc us clementine0.9_011323m.g) derived from phytozome v7.0 (c hr-ID scaffold_19; pos 563050 to 563944)
tctctctcactgccaccgaaactaaaagcacacaggtttcaatcttcctcttcgactactttctttcttccgttttcattcattttatgtattaactgtttatttatcattctcatttacattatcgatctttcgataaggtctgctctgattgagattcgagtgtgagcgttgtttggattctgtttgggtttgaattttggagtgttttatgatttactttttaattatgatgtagaaagttcttttctttttcttcttttttttatttttatgtgtttttttttttcgttttatttcgatttagttttgctcgttttgatgtctgtaaagtgtatctaaagctgctaaacttaagctggcaattacttttgaaaattttttcaggacttcattgtcattagagctttgaatctgattacaagcagagtagctttatgaggttttgtgtggtctaatcagtagtaacctgtttagtcattagtgtttcttttgctgaaaatggggttcagtttttgggtgaatactgaatagttggtaagcttgaactttggtggttcaagaggatatgtggctggatgaggaccttgccttttaatttcccctcacattttcaaattttaagtatatcgaggagggaaattcccaccctaatgctggatttcgttcttagctttggcaagtaatcatcatggcgatttggctttactcgccctcagagttttttttttttttttttttgggaataatgtcgagaatgattatgaatatttagttatccatttgttttggttatattttgtttattgttctcaaatattttatgagatgccacatagaagattaatgccctgtggtatgatgtgccaggtactgatttttctgctccacccat

SEQ ID NO: 87923 - DNA, 929 bp, Citrus clementina
  Intron number 1 from transcript clementine0.9_032610m (loc us clementine0.9_032610m.g) derived from phytozome v7.0 (c hr-ID scaffold_46; pos 1695588 to 1696516)
tgcaggctagttttttttttttttttgttaactattactttgtaaagcataacttttttcgtgatcaaaattatttactttttcagatgcaagactcaattttgttataaatgtgggggaaagtatccgctcggatgttcatgcttgagaagttttccatgcaactgcaggagagcatttccaattttattcatcgcgggaattatattttttctagctcttttgatgaatttaagaagtaagtagttcgaaaattttcttatagtttcaatgtttgtatactcaatattattattatttttagactcgagtgtcgattggtagtgtctgatcagacctgaatttttggtgccacttttattaattgatgctgttaatgccatggatgacgcgggagagaatatattatttaaaagcgatgttaccttttgagtttacagtgaaacacattacttgtttgatcatatgattgagagaatgtgcgtgatacattgcttagtgcgttgaagaagctgaaaggccactcatctccttttatgcaccaaatttaccacatataagtacttaatctgttgcaatttattgtagctgaagatgatcgcaggactggccgagatcaaagctaagcttcttcttatagctgtgagtcaatctacccttttttttatattttaatttattacaatccttctattgttgcttacaaagtttagtaataactgattgttccgtacttgattctgaagtttaacaatggatgattctatgacatttactctgctaatcagaatttattcaagcgcagaatcacagtatttgatatgtttatatgtttttatcgtaaggtttggtaggatttcaatattgactcagaatatgttttggaactatacacaaataaatttcagtcataatattatgattagctt

SEQ ID NO: 87924 - DNA, 648 bp, Citrus clementina; identical to SEQ ID NO: 83461
  Intron number 1 from transcript clementine0.9_033916m (loc us clementine0.9_033916m.g) derived from phytozome v7.0 (c hr-ID scaffold_48; pos 315045 to 315692 reverse strand)

SEQ ID NO: 87925 - DNA, 938 bp, Citrus clementina
  Intron number 1 from transcript clementine0.9_029369m (loc us clementine0.9_029369m.g) derived from phytozome v7.0 (c hr-ID scaffold_26; pos 1369501 to 1370438)
cgatatttttggtcctcataataggtggcattaaggtttaatgtatttaaacagcgtaaaataaccatattaattaaatgctaatgagtttatggaaagtagctattctctaattaattcaccaagtcaattatggctatttttcgaattaaaagtattttttaaaaaaaacatttatcatatctttttctttcaattacgtgcatatctgggttgtctttaatcatataagaataaaatgctgtatgtagtcttgtcattttgattgtcagttgtcgcacaagtataaacgacttgacgctcctttttaataaatgtgaatgacaagtcgttcattaatatttattatttatataaggactaatgctaagttacatgcatgtaccttacacccctctcacatgaatagtgaatgatgtgggtccactcactattcatgtgagagggttgtaaggtacatgcatgtaatttagagggatccataagatatgttctttaaaaaaaaaaaaaaaagattctgattgatttaattttcaactctgccgttgctttccaggatttgaagctgctgctttatcctatgattacacagccagcattgaggcaagctttttctccatcaaatcatctttatccttcattgtcaaacattaattaattttttaaatacatatcaaattcctaataatcatcatcatcctattcgaacaacgattgctacattctataaaatgcgaaatttacatggttgttagcaattgctaaattcacaagaagggctccggccatgccaaagttcggaaaatataagggtttcaattgatatgcatccaagagtacaatcatgaatcagaaaatatcttttgcttacatttttttattttcatctcttcactgattcagtgtttggaaaagcctcacaaacctcaatacggtgg

SEQ ID NO: 87926 - DNA, 716 bp, Citrus clementina
  Intron number 4 from transcript clementine0.9_021574m (loc us clementine0.9_021574m.g) derived from phytozome v7.0 (c hr-ID scaffold_26; pos 2436153 to 2436868)
gttggtgtgctcgcaaattcaatcaaggtatgcaatggcttcaagcattgaagctaattgagatgctaaatgcatgtcttctgagtgtatgtggttaatttgtgtgaacttggagttcttttattttgttgttacaaaaaaagtaaatggggctccttactttttgtcaatttgtaacattcaaagttatagttgtcgtcaaaaaattcttgttgccttggtgagtcctttttggtttcttaatctatccagggctagacctacattgtcatagtgagatatgggccattgtgttttgtttctcaaattggagtaatagccaattttctattgcttttatgatctagggacttgcttttgaatttcctttgtgtgttatgttttgctctagttaactgaagagaaccagaaatcctgaagttatgcgcttttctcttagaaaactcggtctattaattattgccaatgagacaggccttgttatttccttgattgaaggtttcttctgtattgcaaatactcgtattcttgaaattctattcccagtttctttattccatttgacaaccagtttgtaaattgttcctaaggttttgtaatactatatggcatttttattttttgaagagcagaaactggtagctaataataactaatacctatgacttatttatcttcttcttagttcagtttcgacctttggagctgtattggac

SEQ ID NO: 87927 - DNA, 878 bp, Citrus clementina
  Intron number 2 from transcript clementine0.9_006817m (loc us clementine0.9_006817m.g) derived from phytozome v7.0 (c hr-ID scaffold_76; pos 679818 to 680695 reverse strand)
gtcgctgctggtaagttcatttgctcgtttagttcaattttcaggatttttgggtttttttttaaattcttttaatttaattcctatattgttcttaaaataaatcttgcaagccatattaccaactgggtatgttctggattgaagtaattggcttttaatccgcagttatcataaaatggaatcgctagcagttaggtttaagttgtttctaaaatcaagcactttagctaccgctgtgcttttaagattaatcagttattggatgttgtaattactgatcctgaatgttcatgtttttaatttattcgtgtaatcaatatccgtttagtttatttatttggtcaaatttgcttaaagccggactgcactcttggaataattggtgctgtggaaaatgacttttagcttatctcttttgtttctttacgttctttattataaagtgtttctcatatcacagctgagagatttttccatgttataagtttatgttgctgtttgatttattattaaacctttagctttaaatactaatcagatgctaatgttggagtccttgactgttaaacaattggttcgagtaattaacaagaaagcagaactaggtcttgtgttccgtctggtttcattgaaccattagctactagctttaaggctttaagttttaagatcaagccagcgggtaaacttaacttaggatcattaatatatttataatctcaactgttggaatttcttagcatgctcttgttagttgttaattgaagtgcatattgcttgtagatgaatatcatgtaggtcttggagtttccagcatcacttgtaatcttatagctgttaattacactagactttccttccatttttcaggatta

SEQ ID NO: 87928 - DNA, 841 bp, Citrus clementina
  Intron number 1 from transcript clementine0.9_012365m (loc us clementine0.9_012365m.g) derived from phytozome v7.0 (c hr-ID scaffold_9; pos 1922143 to 1922983 reverse strand)
tctcctgttcttctccgtcttcttcactctaattggtaactttctgcaactctctttactctttttgttttttttttgaatttttaattattgggttagttttaattgtttatagcttatgaatattattggattgatcgctgaaattttttggattggaatggctttccaacagttgttgtttgtagttatgaaattcttgttttcataattctgaaattataaccgatattttcctggtagaaaaattgtgattttattttttaaatgagaattcaattaaactttcagtttgttgatttttaaactttatttgatttctaaataagggctgatataattctctacagcagtgataattttgtcgtgtgtatttgttaatttactatggtctctatgtagattgtaacaattttgattatcatcatcatcatcatcatctttttggaggaattggtttggagtgaaatttctttaatctttatctttcttcttctgaacttgttttgcttatgtcaatatgggaattcgctgttaagttcatgccgccctctgcatcaaatttgatctctcacgtaattcatatgtaattagtacttgtttatttctgtcatgctgattaaggttttcgtgcacacttttgttgaatcatgctgtgctttccttggatttgaaagaccatactgaattttttttagtagaagatctgtgtatacttttctgacaaagtaatgaatactgtcattttacctcgtctatacggggttgtgttgagataagactgaaaatatctgttatttttccagatcccaagaaagtacaagcatttactggaacttat

SEQ ID NO: 87929 - DNA, 885 bp, Citrus clementina
  Intron number 2 from transcript clementine0.9_024474m (loc us clementine0.9_024474m.g) derived from phytozome v7.0 (c hr-ID scaffold_46; pos 673534 to 674418 reverse strand)
tcagtcggcagcttattcagaccatttcggtgagttcagttcatcgctgcttatctgacaatctttctcatttgctcagagtttctagggtttagtgaaaatttcaagtttaggatgtatatgacctttgtagatgtttttgttggtggtttttcttttttttttttctttaattttttaatctaagtaagcagtatacctagcaatgtatcctaatcctctagaatgaaagcaacgacgagtacattgacaatattttacaagagaaatcttagtagagaatagaattttaatcttttaatgtctctttttgttctcgcagaaaatgaatggagctatgggaatgactgattaatttgttgcactactccatataacagtaggtgttatgtaataggaactgaatgaaataatttatcctctatggagtctttcaatttcatctagaaaatagttttcggattttgatttcttttcgctttctctgggaagaaacgtgtttatgaatggagcaaatgcatataagaacattacttttgagaagaaaaaaggccttagttattaaggtgtaaagttctgtatgctaattgaacattatttttacatttttatcagacgcgacatcaggttaattggagatttaagaattttcaggttctcaatatttgtaaatttagtcttcagtgatttgagtttgttgtcttgtgcattaatttggcggcaatgttttctccttgatctgattgcccagttgatttatttgcaaagctcagtcaagttctgttacaagttttttggtgtcttaaatgatatatttgcattgatacctagtggaggaatatggttgaaacaaaccgttagtgtcatattgtattctgcagtttc

SEQ ID NO: 87930 - DNA, 1019 bp, Citrus clementina
  Intron number 1 from transcript clementine0.9_032454m (loc us clementine0.9_032454m.g) derived from phytozome v7.0 (c hr-ID scaffold_9; pos 4611710 to 4612728)
tactgacacttcgtttctgacacttcgtaaaaattgtcagtaatgttatacatttggatcattttttccatttaacaaatatgtatcataaatcactggtactaaggtgtcagtagcataaaactcagtaattactgatactttagtatcagtgataaaaacaaatataattctaattatgtttttacttggactcgaactcaatatgtccgaagttaaaattttaatttcaaactacaaaccacttgtgtgcatattttctttgtttggttaaaccgtatataattaactacaaaccctttgctataatttaacacaaaattttcgatctccctccaccaaaatttgttccctctcaaacaaactaaaatccaaatccctaaaattccaagtgcctaaatccctaactctccctaagcgctaaccagcggcagcccctctctaaggccttagtagcacgcacgatgacaacggcacacgcaacccacgcggcggcggcggcggcggcagcccagcgggtcgcaccacacactgcagtagctcgctcactttcactctctctctgaaggcacacacagcagcaacaacccctgtctttcacgctcgtttagtcgctctcactttctccgtctctggtcaccatctcaccctccagtctaaattattgcttttgcagccgcgttcagccgtcgccatcgcgccggccgcctgagacagtgagttgagattccactttttaatttatcctgtgaacagtttttattgctcctgatttcttcaatatcatgtgatgtcttatcatttacatttttcgataaacatacttgtgctcgaattagctttcatttgaatgcattttattccatctagtccatgccaatgccattactgggctcaaacaagtctttcttactttgttctgacataatgtttatgatggattattctgcgcttaaagcttcttttttctcgttatttctgcagctattgccacagttgtcacagttgctgaaattctg

SEQ ID NO: 87931 - DNA, 950 bp, Citrus clementina
  Intron number 1 from transcript clementine0.9_022399m (loc us clementine0.9_017933m.g) derived from phytozome v7.0 (c hr-ID scaffold_147; pos 144609 to 145558)
tgtggctagaacaagaaatttcaagattagtttaatcagcctcattattttcattaatgacaattgaataagatttttaaaaaaaattcttctctttttttttttaatgtgctttttgtttggattggaattagaatttcacatgcaattgcatttcctgacagagacatatcaatcaattggatatgatatgcacatgcaatgtttattttattcatttctatttttcgtaaaattcacagcactctaatgtaatatgttatgtatttgttgggtaatgttgcataatttattaggcgtttgtggggatgcaaacagcttacatactgtggacttggctgattgaaggccggccaagagccacaatttcggcgcttttcatgttcactttccgcggaattcttggttactccacacagcttccgttgcctcaggtacattttcaacctcacttcatgagttcaactacatttttcacaccaatgccctttattgcttcgtttgagtcatcatggaatcaatattttggtttggttgccaagaaaagaaaatttagtgatttaactagtagtactttcttgggatattattaaaacaaagggagtagatacatgcctgtaattggtaagtaatgaaaaaattatctacggtaaaccgtgactggtgactacgaatgtataagttaatgaaagagtgtctatgtttggtgtaagcttctagaaattataggaaaatagcttccaatggaaaaattaattcttaaaagggacgagattctctcttgatttcagccaagactaaaattttgtagtgtacaatttctcgtttgtggtttctttgggttacattcaatagcataagcagtgtattatagctctattgacgattcagtcacttgttgctcatcgttctcagggatttttgggttctggcgtggattttccagtagg

SEQ ID NO: 87932 - DNA, 777 bp, Citrus clementina
  Intron number 1 from transcript clementine0.9_031327m (loc us clementine0.9_031327m.g) derived from phytozome v7.0 (c hr-ID scaffold_2; pos 2610130 to 2610906)
acgccgctgagcaaaccaccgtggttgttgtaagtagttgttaattaatgagccaattaaaggtatttaaacctgaaaggttaaatttctctcaaaaacaaaaaaaaaaaaaacttgaaaggttaaatgacaattagtgttacatgttacatcgcgacctgattgatgtatctaatttgaaccatacacatgcggcacccaatttagagtaaaacttgttccagaactcataataggatcaaatgaaattaatgtttatgtttttcagttttagcaagcttatagagtaatagttatttacatatctcataattttttagcacacaagtttttcacaattttataaataatttactgtgctcttttatgaactcataattaaaaaaaattataaataatctcataattaaatatttttaaaccttggaccaaacactttttggggggggggggtctgaatctcttaggaggagaggccaaatttgcattaaaaccatccataagtaattaattaattattgatggcagttttgatcagctagctgcgaatgaaaaattattaactgtttaatagcagtaaatttagatggtcaccagtattattgaaacaatgcaatttcacttgacattgctttcttctcaaattgtctacttgggctaagaaattcagttacatatcgctttacatggttttcaatttcttcaactgcatcattaataatggggttccactatcttctagttctccatccgtaatcatacaattgttaggcgagc

SEQ ID NO: 87933 - DNA, 677 bp, Citrus clementina
  Intron number 1 from transcript clementine0.9_017958m (loc us clementine0.9_017958m.g) derived from phytozome v7.0 (c hr-ID scaffold_6; pos 998460 to 999136 reverse strand)
aggtatcattgttcttttgggcgttttatgttaatattttttaatagggagtttaatttgttaaattagtcgtactttagtatcaagggtttattgtactgtacttgtgatgctgcaataaaaattagggttttatttcatattattagtgtaaaattcattgccttcgtcacttagcacagccaagttctgatgtgttttgtgaattggcttaaatgcaaggatttgttttctgactggaattcttttttttttcaataaatatatttgtcttttacaaggcaatggcatttggtttgttcttgatgatcatttacccctataaatgtactctcaactgtgttgcttgtatgcctttagactctcattttcagttttcaagctttcgtgtagaatatcaaattgctttggagaagcatgtgtattctgtaacatgcacggtaaactttaatagtctcaactaattaatttggttggctttgtagtgattatgattccaagaatttgaatgctttcatcgagctattgtaaacttatgcaccccacttaccacccatctccttccaatttcctgttgtgttgggtttgcatcctcttctgaagtaaaccgagataaatctaatacggatgctctgcttgcaggttcttggtgttgaaaggacagcatctcaacagga

SEQ ID NO: 87934 - DNA, 421 bp, Citrus clementina
  Intron number 1 from transcript clementine0.9_002951m (loc us clementine0.9_002951m.g) derived from phytozome v7.0 (c hr-ID scaffold_6; pos 697952 to 698372 reverse strand)
aatttctgcaagcttagcttggctgtctctttcaggtacaaaacaatgaatattaatttccttcttgaattttatttgtttcatcttcatttcaattgctttagttgattttaaatgctattcttgaaattcgtacgctttagtctgttcttacctactaaatttgaaatgtgttttaaatcttttggtctctactgaaacggtcactgtcttgaatgtaattaatgttattttcataagctgtatcatgcttggacttgaaatttttgacacttgactacttttttttcacatgtaaattgcctgaaaatatgctaaatgtggttcaataactccaatgtgcttatctgagatagatgtttaagggagtcagcgtactcatttgttttgtttttgttgcatctccaaagcatattcaaat

SEQ ID NO: 87935 - DNA, 712 bp, Citrus clementina
  Intron number 1 from transcript clementine0.9_010197m (loc us clementine0.9_010197m.g) derived from phytozome v7.0 (c hr-ID scaffold_36; pos 335547 to 336258 reverse strand)
cggccctgtcttctctcattcctctaatattcttggtaattttattgtcaatttatgttcgtttgatttggatatctttagtattgtgatttcttctttttttttgtgttttctggttctgtgtatctttaatatgattcatataatgagtaattatatatgttatggtaaaaaaaaaaaaacttagattttttttttgttggggataaatttggagaagcattttgtgtttgtatggctagaattcggtgagaataagaaggtcatgggttttctgcaattcaaaagtggaaaaaaaattgaaaatctgccgaaactgaggttatttgtgtaggggcagttttggttttatgggagtgtttcgatttaccaccgtgaagtttatgtagtgtttgccttgctttgtcttttgagttctcggggagattttccaagaagagtctagttgattactcgacatgatgatttctttgtctatttctcatgatttgtgcggtagtaattgcaaattattgaggaggcttctatgttacagtcttaacatttcatgtgaaaatacactttttgattcattcttcgtaattgtgtttgttaagaaaaagataaactccgattatttttactattattgttttgtccctcttttcttgagtatttgattatgatgaaaaaatgtattcttccttgagcctctgcagctcgggagaaagcc

SEQ ID NO: 87936 - DNA, 949 bp, Citrus clementina
  Intron number 1 from transcript clementine0.9_010392m (loc us clementine0.9_010392m.g) derived from phytozome v7.0 (c hr-ID scaffold_22; pos 564890 to 565838)
gcaagtaagttctttcttccgttcttttcacattttcctgcttttatgatcttttcatcctacccaccctctgtgcattaacgtccgtccgtaaaaaacatcatcaccagattcagaatcaaatccggatcgttgctgttttttcatttctaatacgtatacgtacgtactttccgtactatcaattaatttctctacaaatgtccagctcttttctattccacaataaccagccggccgactgtcatctatgcaaatattaattcacttttcagtttcatttgtgtatattttcacaaccatattgttacaattttttcccatatacttatcttgtttttttattactcatataagattttcaatataacgaaaagccggaagaaattgtaattaattgctattcagaaatcattgttaactaatgatattatgtgtgtgtgtgtgtgtgtgtgtgtgtatgtattctagccaataatggtactaaccgttaattacgcaatgcaaccatgacgacgacacctgtttttcatttttatttttatcaagcttaatttgtacgggtctatgcttcacaacgcaccaagtcaatgttttttgaaaattcaaaaaaaaaaaaagcaaaaatttcctagttgactaagcaaaaattgaagaatattctttgaattagaatattttaatttctttgaaaactgaaagaattttgtattaataaattaacttagctaacatctagctagctagccagccagccagccagcctagatcatgaaattgaatcctgtgcaatgacaaaatggatgacgcaacaccatgtttttcagttaagcgggagatcgatgcattcatattttatattgctgggaaaattagttaaacaaattttaatttgggtgggttggtgggtgcaggccgaggtgaaattcctgggaaaattttctcatcc

SEQ ID NO: 87937 - DNA, 957 bp, Citrus clementina; identical to SEQ ID NO: 83098
  Intron number 1 from transcript clementine0.9_026484m (loc us clementine0.9_026484m.g) derived from phytozome v7.0 (c hr-ID scaffold_55; pos 637593 to 638549)

SEQ ID NO: 87938 - DNA, 795 bp, Citrus clementina
  Intron number 4 from transcript clementine0.9_013002m (loc us clementine0.9_013002m.g) derived from phytozome v7.0 (c hr-ID scaffold_54; pos 1328403 to 1329197)
tcgggcggcactttgtgttcagtggagtcctaaaggtactggaaccctattgtttacttaagtattgtttttcattcacttatcttgtccaaatggcatgtaagacattgattgacagagcgagctcagaactggattaagtttacatattttagacttggaaaataaagaaaataattactggaaaaggaatatgtacatttttgcatgcggttctggtggttttttgggttcgtgagaagaaagtttagaacaatctagcaatgtccttctgtcatagcatctggacgttagatgaaatttggatggaacaaccagacttgttcatttttattttgattaacccttgctggtccttgggagatggccaacccagttgtcaggatgcaggggggatcaagaaacttgattcataggggacaataccatagtaaaaaataataactcacgaaattcaccctaatatcaaattttgtttacaaaattgcccccactctggggtaatttttccagaactttataggaaattaaagggaatttatttttgagtgggttcaattgcccccaaaccctgtaatataaatccgcggctgtcaggatggctgccaactcttgtttacacatttagagttagaaaattaatgttccattaaatttttatatgaatttctattataaaatttgactgtaaatttaagttttttcttaacttgacaatgatgattaattctaatgagttaccaccatttttatctctcagaaaacaagtttgctgttgggagtggtgctaaaact

SEQ ID NO: 87939 - DNA, 901 bp, Citrus clementina
  Intron number 1 from transcript clementine0.9_020782m (loc us clementine0.9_020782m.g) derived from phytozome v7.0 (c hr-ID scaffold_26; pos 2875699 to 2876599 reverse strand)
ggcatccagaacgacggctgaaggcgtcctttaaggtgggtactataaaaaaattgtttttttttaagtcttgatttgttaattatttatgagctagcttttagttgcattaggaaaatgttataggttattgtttgatgatattcattccaaacgaaaaatgtgaacaaatatattaaactctgttggaaggttcagttgtttagtttaaatgaattcgtaagctgcaaattttaaatccatgtggcctgtaatccttgcaattagaagattagcaacaatatagtttatgttacaagctatggcttaactacacaatgcctagtttttacatttggaaggaacatggatcattattgcagtacaagtaggttgaaattaaagggtggtgtcacaggacggggatggatatgaatacttcttgaacagataatatatattagttttgcccttttagtttaggatgataatgcaagccaagtgtaggaatttgaatttggcacctcaaataaaatttgccaagacttaccttattctggaactagcgtgctgcatagctgacatagccgttcactatccctttgggatatacttctttgttctggttttatttgatatgtttactcattttttcagttttccccactttcttcgtataatctcccaggaagctttcatttttgtgaccacttttagtttgccaattttctgatgaatatttggggtcaatctctgaaaaaccaaaatcctgaactatattttcttaactgtttatatagtgtcctcttattgttttcatccagttacaacatagtgaccaagaaatctcatttttgttttgattttgtgcctatgaacttgtacaggcttttgaagaagctgagctccccaggctgaagga

SEQ ID NO: 87940 - DNA, 604 bp, Citrus clementina
  Intron number 3 from transcript clementine0.9_019676m (loc us clementine0.9_013348m.g) derived from phytozome v7.0 (c hr-ID scaffold_6; pos 3930380 to 3930983)
gttccctggctaatcaggttgattgaaaatttacattttgagctaaggtctagaggactataagatgagaaatatggtagactgactttaacacagtttatgcccttataaatttcagtaatgatatacttactacgttttttttttttttttgaattctactacggttagtataccatcactacagtacaaaaaaatttcattacaagataaaagaaaattccactgtaagaaatttttttttctttctcttactgattttgtgctaacttttatacatacattattattctataaattttactgtttgattttttttagtgtattagattattactacaatatgatctatgcccttgtgaattccgttgcataaatagtggtgtcactttacctgttcttctaaaaacatactggttactgtcagttgtgtagttcccatttgatcttctgtccctcttgtcatatatttttttatctggcaatgattgttgattccttttatttgaaataaaattggctgctatcaaaattgatcggctacttgacacaatgactaagatgcattttcttgtgtataataggtggtgcatcctgcagacct

SEQ ID NO: 87941 - DNA, 716 bp, Citrus clementina
  Intron number 1 from transcript clementine0.9_013768m (loc us clementine0.9_013768m.g) derived from phytozome v7.0 (c hr-ID scaffold_19; pos 264148 to 264863 reverse strand)
tggtttgatacggaggacgagtctaggtacgttattttgcgggtattttttataatttgggaacaaaaaagaatgtttctttttccagtcttttaatttttattgattttatatggtaaaggttataatttctgttcatttagataggaaaaggtgtttgcttttgtaaagcatataaaggtagaaaggcagcctaaatggtgtacgagagagggaaaaaaaagaaaagaagaaggcatttttagataattttgatttttgaacgtgaaatttggggaaaatggggagaggacgaattttggtttatttgagttatttttaagtttagttaaagtgtggaggttgtgagttgtgaatgtagtagtttattagtattaggggtgcaattgtggaagtgtttgttttttggtttgaagatacatttttaagactgaaggcaacaggggtttagctatgaagtggggaagagagactgtggatggttgattaactgttttatgggattgttattagattataataagtgaattttattcattcattatgtgagttgactgcatgaactacttccttgtgtggttactctctctgctgtattatagtggcctataaataataaattctgttactagtatcttaatctcatcttcatttcttgaaaagtcaaattggatgattcttctctgtttccagttcatcttcagacagtgatattc

SEQ ID NO: 87942 - DNA, 647 bp, Citrus clementina
  Intron number 1 from transcript clementine0.9_004796m (loc us clementine0.9_004796m.g) derived from phytozome v7.0 (c hr-ID scaffold_80; pos 809977 to 810623)
cgccaactggttctcttctcctccttctatttcacgtatgtgttctttttttcttttttttccccttggtttcttgtttgtttttaagatggacccagatgatttttttattctcttgcatgaatttcaagtttgcatgttatattttgatacattttagtaaatgcttatatgttgattttttatttatttttctgcttaagattcgcctttgatcattaaatgcgacagtaatgtaaaattttcacgagttgatcataaactggctcgaagttttgacttctattgtggcatgtgaggttgacttttgaagtgaggttgtatatgttattagtgattcagtggctatttatgtgatcaaatttgatttttgttgatgtcgtgatgctgtgtattctggtatttaagcatgctaactagtagctcttcggctaacaaaccacgtagataagcactatttgtagttttcacatcatgactatttgctagcatttttgccttacttttattgaggttgttccttttaatggatcctgtctcaatgtattgaaattgtcctgcttttttttgccatctcatcctctatctgattaatttgtctccatatccatgcacagattctccagttgcagcttcttcttacatta

SEQ ID NO: 87943 - DNA, 969 bp, Citrus clementina
  Intron number 1 from transcript clementine0.9_024910m (loc us clementine0.9_024910m.g) derived from phytozome v7.0 (c hr-ID scaffold_80; pos 184892 to 185860)
aaggtgtcacccaagaccagctctccaaatttcaagtaccatcttttgcccccaactcttctatatgtttacacatgcatgtgtgtatttgcgtggttcggttttgtttatttgcatcatttctctttaaaatttgaatctttattgcagattataatgacccagattgggaattttgttaatgtgtgttaagactttggaacagtagatttgtagacagatgatcatatggttacaaatttagaagctttatgagaattgtgttattacttattagaaaaccagtatctgttggcgcttgtccattttcaatcttctgattgattctgaattactgagtcctttcacatgttgattatgctcgttgaatatttgctttctcagtcgtgtaacttttctgagttagagaatcttgatgaggtataggaattcaagctcaaagcttttagagtttagctaatgaaacttaaaaagattaggataggaccaaatggggttaagaactcacacaagattaggataggaccaaatggggttaagaaactcacacaagattaggataggaccaaatggggttaagaaactcacagatttagcctaaagatcatgtttctgttcaaagatttctgccaacaggggtttgcccttgaaccaggtcgaaagaggttggcaggccttctctcatgacattggaatatgaaggagggagcagcaccgaggatgctctatgtctagcataaaacagaacatattaatgataattctaaattggccactgtgatctagaacgggaggttgtcactggtttggacttttgtaataatgaaaatttcttcttaaagtaatttcttatatggagctttatttgctaactgcaatcttcctagttttctctaacatttgttattttcttaatctcatttgaatatgctaggagctgcataggaggcgcttacaaataaaatccaa

SEQ ID NO: 87944 - DNA, 675 bp, Citrus clementina
  Intron number 1 from transcript clementine0.9_004101m (loc us clementine0.9_004101m.g) derived from phytozome v7.0 (c hr-ID scaffold_9; pos 363239 to 363913 reverse strand)
cggccactacattactcattttctctttcttatctgtgagacactgccattatttgatgatcttttgttttaggttctgctgttctgctgtttgtttccatggaaaataaattcccggaaaatgtgataagtgcttttttttaaaaaataattatttggaagtatataatatttcggggaaaattgacaatgaagcgtttaatttttacttttctatttaatttatcttctgggaaaacaataaaaaattttctatttcagttttttttttttctgatgatgatttcagttggatgttttgcttagtctttattttttttcctcgcactgtcatattactgaatttcttgtgttttttcagccagttagctttatttgtgggggtgcagctaagaatatattgttcttttggattatttggtatgggttagcgaattgcttaaaaagtttgtgaaaactgttttcatctcaggggacgatttatgttgcttgtttaatatttttcatgggattgatgtctaagttaatttgattttcccgttccagtggcttataagcttgttgtaaagtgaagcatgcactttatttcactgaaattttgtgtcttacatattgaaaaggttcgttgctgttttttcaggtttagctttcgggacaggttctatttaaaattta

SEQ ID NO: 87945 - DNA, 739 bp, Citrus clementina
  Intron number 3 from transcript clementine0.9_027733m (loc us clementine0.9_027733m.g) derived from phytozome v7.0 (c hr-ID scaffold_9; pos 6020956 to 6021694)
gcagttacgttaattacctatctaagcctttggtggtgagggagttctccatctacttcttcttttctaaacattgcattgtaccgcacaaccgtgttttgtgatgttgtctataggttgtagtgagtggtgttttttttttttttttcatttcttccttttgttgctgatgttagaactttgctgtgcactgttgctgatagatatcactttttcttttgcttcattcttgtatttttcataaatattttcgtatacactcattaatggttttcctatccttagtctagttcatgtcttctttggttattgtgtcaaagtcaaaaggctctctggttagttggtctgctaaattactgcttgatggagtacttgtttccatgctatgtaggatataaattctatctttgtatctaatttagaaacaaaatttatgaatggctatttacatgattgttcagtattttgtatccttttattttagttttcatatattttgtctagatcttaacagctgcatttgttgtttttcaatggagtttagtttctcccccccccccccccccacccgtaatcactggttggaaatgcaagggttttgggggaaaacccctcccattttttacccgctatttgcttaccctgttttctcgtgtattttacacacttcaataaagtgactttgtgctttcactgtatgcattcttcaggtttggaatattcaaccccaccattgttt

SEQ ID NO: 87946 - DNA, 200 bp, Citrus clementina
  Intron number 1 from transcript clementine0.9_032246m (loc us clementine0.9_032246m.g) derived from phytozome v7.0 (c hr-ID scaffold_158; pos 127592 to 127791 reverse strand)
cttctctttctctcacctcactccccccgtcttaagtaagcctaatgttcatttatttatttgtcttcgtttcttacatggttgattaaaaaaaaaaaaaagaaagaggaaaatgatataaatatatgtgatttatttgaatatgaaatttgtttattgattttaatttttaataattttgattttgaagatttgagaaa

SEQ ID NO: 87947 - DNA, 966 bp, Citrus clementina
  Intron number 2 from transcript clementine0.9_020161m (loc us clementine0.9_020161m.g) derived from phytozome v7.0 (c hr-ID scaffold_6; pos 188506 to 189471)
aagtgaaactcaaggtacatattcttctgtttggtttaatatatatgattatgtaaatggtttcgtagttcttagtttgaatttgattttaaattttttgtttgataataaaatgaaatcacatctctgtttttacttcataagctgtcatctgttcggaatcaattttttgtgttgttcatgttgaattttatcaaaagtgatcactaaaacttgtttttctcaactttatgtttgatctctcagtttgtttctcgaatcttcaattcaatttcactagaaatttactagaaaattcaaattctgttctgtttggacctgtttcgttttgaattctcgtaatcatttgaaggctcaagctacttaaattttgttaaaacattttaattagcttcgataaatttgtaattcacttgctcatagatgtgatctctccgtttcacctcaattttgagcattgtttgctcataatctttgttttaacttgattttaaaaaatgattttaagattttattttcaatttttagctctttcatccttttatcatttatttttctgtaattaatttgatttctcttcgtttgaatacgaatttaaattgtttgcttttagttctgttctgagatgtccgctgtttggattcgtatttcggtttatttttttcaaaatttttattacgaaacttttacactctaatttatagaagtcaaatttaaatttgaattagatttgttgctggaatttaaatttaatttcacggcaagtatgatggaagattcaaattctgttctgcctttgaatcttcattttgaatttcttgtactcttttgagtgttcaggctaaattatatgcttctccagctcataatttggttcgtaaatttattattattcatctggtgtttgtaatctctctgtttgaatttaataatttcatgcatttttttcctcctccttctcaggtc

SEQ ID NO: 87948 - DNA, 907 bp, Citrus clementina
  Intron number 2 from transcript clementine0.9_028654m (loc us clementine0.9_028654m.g) derived from phytozome v7.0 (c hr-ID scaffold_9; pos 6240317 to 6241223 reverse strand)
aaacgggacaaaacctagtaagcattatgacattattaacaaatacaattacgttaatatgtgtgtatattgatatctgaattagataatacatatggccatcttatctaaaagtttatttgcatatgcatgatgtgtgtgtctttatatatagattacataaaaggaaaataataattcattatatattaattattaatttcttccataatttgatttcatattaattatatatgatacttttaagtatatacatgtcattaatgataatgatacttgtcatatatgcattatgtaattgccttggtttggcttatggatggcgttgattgagaaagatttttttattaggatttagtgaatattggctatacatggtacgatcaagttaagcgttgagattattttggttatcgagagccttcacaaaggaaaaaagaaaaaacgaaaaaaagaaaaagaacaaaagaatgtgacttccatgtgtaataaatacatatttaattggatttatatctttctttaatgtagttgttagttattaaaagtatgtcttatcctattcccaaaaaaaaaaaagtatgtcttatcattataacaaatgaattaggatttgtgttcaactaattttgtgtaattagttcaaatcaagatttattttcatttctgattcctaacagtaattgattcagtattcaaaaggtaattaataagttaattttttgtatgcatacgatacatgcaagaattcagtaactctagtgcctgggtaaaagaaatattataagtatgaagtacattacgattactaatatgctcgtcaaatgtacttatttataatttgttttgaaaaaaaaaaaaaattctggcagggcactgtaattagcttcagtaagcaattacttaa

SEQ ID NO: 87949 - DNA, 692 bp, Citrus clementina
  Intron number 1 from transcript clementine0.9_032537m (loc us clementine0.9_032537m.g) derived from phytozome v7.0 (c hr-ID scaffold_48; pos 505180 to 505871)
tttgtcttgtctttgtcagaggattaaacaaacaggtaattgttattatttcaactgcccttcctttaaatttctatataaattcttcatttttttataattgttatgctttgcgtaatgttgaaagcattagaagctaaaacagtttggtggccaccttacctttatttggtagctaatactatcaactaactatttatttttatttgacggctaatatttgcattccatactagctatgaataaaggcatcaatacctcaattctaaaatatagcaatagttgtttcttttttcatattaggtatgaattttcctaggaaatgaatttgaaagaaagtgaatagcaaaaacaaagctcaaaaaatgtaaagaaaatagctactttgtttttggaccttttttaaagaccggattaacaaatggctaaaagcttaaggatctgaggaaggtgttactctgtaaacctttcatgatatggttgtttcacaaaagattatttttataagaaattcttttataagaaattctctctcccgattaaaattttagtaatttttctttttaaacctttatatgttacatttttgtatagtcagtatgattagacagaaatgagaaaagaaagaatccaatagaaacagttatttgcttgttcttttaattacttctgtttgattaatcttgcagaaa

SEQ ID NO: 87950 - DNA, 881 bp, Citrus clementina
  Intron number 2 from transcript clementine0.9_029093m (loc us clementine0.9_029093m.g) derived from phytozome v7.0 (c hr-ID scaffold_17; pos 4023589 to 4024469 reverse strand)
taaccttgaccattgcaggcaagcctccgcctatttctgatttgacagatatcttttactgactcttaggcatgtcaacacactggggtcttgtctatgagttgagtttgttcattgattttgtatatctgttgcaaaaagaaaagtaccttcatccagttagttatattgcttacttatcagaagtatgtgcagatggtttgctggcaatgaagttcctagtggtctatatgtgatccatcataatgcatttgatctgtcatttagatgacatcgtatggaaatctagttttcgtttagcatacgttcctgaagatagtttatcattaactttgactgtcagttgggttaacagatttttttatggttaccattcgcttcattaaactggatccataaaatcatatgctacaatgtacccaaaataaatcaagaggttggcttaatgatgttatctgtagagagtgagaggcagtttagttgaccaaattggttagagattagtgtaaagttttgttggatgcagactaactcactctgtttttcatagccaaaaaattggtagaatgcatagtcaataatctataactaaactaattattgcacatacaggtgaacttagtaaatatatagctgatgataagagaatcaaagaaagttccttgatgaaactcaaaaaactggtctttaactcacaatcagaggaacttatactatctgcagcggggaaagcaaaattgagttttatatactatgcctgcacaaacatcaaagcgttattactaatatgcaatcaaaaaagcctacttgcttttggatttactgaaggaaaatgtacatctctctggttgcaggtgggtgtgataaactcctgagggaga

SEQ ID NO: 87951 - DNA, 610 bp, Citrus clementina
  Intron number 1 from transcript clementine0.9_034857m (loc us clementine0.9_034857m.g) derived from phytozome v7.0 (c hr-ID scaffold_78; pos 992539 to 993148 reverse strand)
tgccacgtgttgttcggcctattggccatctctaggtaacattgatggatggacaaagtccaaatcatttttttaacccatattttttttttcaaaaaccactaactcgaccccttaaagctcttcgatgacaaacatgatcatatcatactaataatcctcataaattgcattagttgttgtaagactacaggaatttaatataattcaatataaagggaaggttccttaatttagagtttttcttttaaaaaataacttaatttttatccattaaatttactgaatcttaaggtagatggatgaaacataaatacaatttttaaatttaaaccgtttatttagttgaaatatattaatttaaatttagattttaactgatataataaataatgtgtcattatttgattgatataagtgaattatttcaactgagtagatacaacataactctatgtaaaatacatgaaatatcaagttactttttaaaataaattatttaagtcaagggaatctcataacataaaaaagagatttaggtggaacttttcttaaaaaattattattattattattacttttcagctgcgcatactattggaaccaccgc

SEQ ID NO: 87952 - DNA, 795 bp, Citrus clementina
  Intron number 1 from transcript clementine0.9_030297m (loc us clementine0.9_030297m.g) derived from phytozome v7.0 (c hr-ID scaffold_50; pos 918966 to 919760)
cttttgaaggcattcgatttatcaaataggcagcggtgagtacagcttccccccacaaatacataggaacttgagttgtaaaaagtaaggatctagcaacttcaatgagatgcttatttttgcgttcagcaattccattttgttggggggtatccgtacatgaactttaatgaaacatgccattcttttcagtctagtaaactatttatttatttatttttgggttatggatgcagctgttagattttattttctcaatgaagttcctttatttatccaattgctatgtcaggctaagcagattttcattaaaaagccagacacatgcttgacatgcaaatttaatattgctgctgttgattgtgcattacttcaaaataacggatctattcagatataaaagtataattgtaaatatttagagtctgaaaatactatttttcttatttcattcattctacaagttacacttaaatagaatgtagaaaacaaactcctaatagatatcccctaattgtaggatacttatctaaacttgaatttaaaaaaatgattatctaaaactttattctgataaaactttaacactaaactaattatctaaaattttattctgataagactttcaaactaactgaaaaatcctaacttcttgacaataataaatacttgtcttgctaactttgatgcatgtgtttctcaaaatgaaagttattcacaaacttcataatgttccttttggtattttcagaatttggttgattctaattcccttcccattgcagcaaaatcaaa

SEQ ID NO: 87953 - DNA, 410 bp, Citrus clementina
  Intron number 1 from transcript clementine0.9_009665m (loc us clementine0.9_009665m.g) derived from phytozome v7.0 (c hr-ID scaffold_19; pos 1239133 to 1239542)
ccgctcttcttgctcatcttcagtcctcttctcaggttttaatttttctctcatctcattctctgtgaaattgtgagctcaggttatcggctttggtgacttaattgtcagtttctcatagttgttttttgtgctaatgttgagtaggcactatcagtctgaccattgattctacgattctaagatggattttttttttttttttttctgttgtaatcagtttctgtttttgtttctgattatgaatttgaatgaatgttactgtgttcttctgtgatgggttagtttgttattccgaacaagattattgcgtttctttttcctcattttttctttcttgataatgaattgtttggtaatttggtttctcttcagattataaggttgtattcaaggaaatccaagactta

SEQ ID NO: 87954 - DNA, 791 bp, Citrus clementina
  Intron number 1 from transcript clementine0.9_003154m (loc us clementine0.9_003154m.g) derived from phytozome v7.0 (c hr-ID scaffold_6; pos 5302298 to 5303088 reverse strand)
agggttcgttggtagtcggctcagatttggacaaattttcgccgaggtggagaattgttgaaaagtcatgcacgtgacattgaaattcaaaaatgaatgcaaaatttcaaatggctaccaaacatttgaagaaaaaaatggaaagttggcaaatttgtcaaatttgccaaatggacaccattgactattggcttaggttaggtggaatagtaaaggggttggtgcaatagtgccattattttccctataaatagatggcacttcttccattcaaaatcatcccaaaattgttaagcttataagtttctaagcttttgagagaagtgagagaagtgtgtctggggaatttatctttcctgcagagtgtgagagtactgggtatatttgggtttctgggaagtgagattcgttactcaaatattgtattctattcattgtttaataaacaattattctttcttgcctccgtggatgtaggtttaattaccgaaccacgtaaattcttgtgtcctttattttttcagtaattatttggtgcgcttgattccgcattccgcgcgcacatcaagtggtatcagagccgacggttcgtacttgggaacaatctcagtaggtcaacagactggcttcaagtagtaggcaatcttcctttgttaacaaccttgtatctatatagatgtcatcggccatttgtacttgggagacagtctattgtaagtagtgtgtatttttgcatgtctaggaaagttctgtcaacaaaggcgataattcaatatacccttggttgttca

SEQ ID NO: 87955 - DNA, 907 bp, Citrus clementina
  Intron number 1 from transcript clementine0.9_028889m (loc us clementine0.9_028889m.g) derived from phytozome v7.0 (c hr-ID scaffold_46; pos 818060 to 818966)
tcctccgtttgctctactctgactgctttgtaactgtatgtctctttatcattttttcctttctaaattttgccctttttatttctgatctttacttatcattttgttttaactctagagaattttgattagaaattgctttttactagcttggttctttcttcagaagcacttggcagtttttccgggagaagctgtttaaggaaatactgaaatgcttctctattccaagcaatagcttcttggaaaagaacatgatatgtgtattttcattgatgctcggctgtatagaaacttgctatcgtcttattataagctgattttacgggaaaatgatgaaaactcttttagtaaattagtcatttctctcctcacttttcaaaactcgtcaaaattttcctgcagttaaaaaaaaaagggtcaactttcaattatttatttctactattttatctctgaattgatgaaacccacaatcgattgacaaaaacttctaagacagaaattaattgatgaaaatttcaaaagacaataattttttttaaaatactttagaacatgagaaaaaaaaatgattaatttcggcttttgatcattttctcctgattttaccaaaagcatgcgctgtgaacgtggtttaatgctaaagaaaacaattaatgctactgctataagttacggctgacctaaacatttttcagaatttgccccaattattaatttcacagaacatggccttggcgtcgccggcaagcatgcccagcaatttctatgtttctctttaataacgtaactatggttaggttaatttgctcaataatatatgtttcgcggtatcacaaaaattttacctatgcaattgaatgttaaatttatggtgatgtatcgtgatttgctaaatccaggg

SEQ ID NO: 87956 - DNA, 708 bp, Citrus clementina
  Intron number 2 from transcript clementine0.9_015037m (loc us clementine0.9_015037m.g) derived from phytozome v7.0 (c hr-ID scaffold_9; pos 3463323 to 3464030 reverse strand)
atccagtaagtctgtttttaaattatatttttggttttgttattttaatttcccttttcctgtttggttgccaagaaaataaaatggattacattgaaactgggaaaatttcgatcgtcttaccaactctttaagaaaataacaaaatgaatgccacgtcattacaatacatgcaaaaagaaaacaagagacagtgctacgtatcatttgctttgttgataacgaaaagcacttaattttgtctggtctccacaacattctttcatcggatggtagatagtgagtcctatattgtcacctaacttttctttttattaaataaagaataaaatgaaaacatatctcatcgaattcttgataatcaggtgcgttatttatccttttgttagaattcttaagccgcatttatttacttttatttgattaattaaaaaaaaaattcacgcgataaaaatcaaacagaaaagacatgtatacagcgagagtatttaagattgtttatcgttcataaacatttttttaataatgtagaaaccctcagtgggtcattataaagaaatttggaacaacatataatatgattttagtgctttatgtgctttttttttaaaaaaaaaaattgtttaaagtgggttaaccgtttatatacatgataatggtggttggggtggttaatgatgataattttgtttaatgatgaaggaacaa

SEQ ID NO: 87957 - DNA, 734 bp, Citrus clementina
  Intron number 1 from transcript clementine0.9_017019m (loc us clementine0.9_017019m.g) derived from phytozome v7.0 (c hr-ID scaffold_73; pos 62020 to 62753)
tctctactaatcttgccaccgctgaaaggtcctacttcttagttattgtcctttttccttgttttcgtttcgttgaatcttcagtttgttcgagatatcattatgtacttgaagtgattgaagaatttgctcttgattttgatccataaccagactccgagatatcatttttttttaaccatgtcttataagttcatacggtctcactaacaataacctttctgtattgagtagccaaaaagattgtttttggactgataatccatgcttttcaagtttatcttgcacattgtacactgaagctgctagtctgttgactaaagaatttatgttggcaatttagtgagctgctgcactcagcaagttaggaaaagtgggtaattttgatccaatagcagtagtgtaccagaaagaatatgaaagtatgcaggttaccatttgaatgctatttgctttttgtatttgctattgtaaggccagagtttttttgaagtttcgttttctttgatcactcaaactttcagccattgaatcatcctatgtgtacgtgtgcgtacggcttcctgtgcatgatcatgtgtgattatataggtgtatattggttgagtctttcaaattactacttcagacaatagaattctctttaaatttctgtttgccaccaattagcttccccatgatgtttttgcatttaacattccatgatatcttatgcaggctggtcagagctgctc

SEQ ID NO: 87958 - DNA, 647 bp, Citrus clementina
  Intron number 1 from transcript clementine0.9_021403m (loc us clementine0.9_021380m.g) derived from phytozome v7.0 (c hr-ID scaffold_32; pos 1423362 to 1424008 reverse strand)
caaaaaggggtacctttatttatttgttttcatttaaaaagatttcatttctgttaaattttctgctgatttgaaataattaccgctataatggagcgattgtgcgtgatttatgtgatgggtattttataaaacgtgtgattgcttgattttattggctcaatgggttgcccttgatgggtttatgctagatcatgaaatattgtttcgatgtgtgcgtttctttgtttaatcaactagtgttatgtggaaaatcttaattttttttttccagttatcaattacgctagttattgtgaaggtttctgaaatttgttgatgaagagagaaagttgggcccttttttggggtatcaaacagttgatttgtaattatgcattttgtgtgacaagtttagttgcaattgcgaagattaaaagaccaaatgatgcctatgtttttgttctaattgagatatttttgtgagaattgtgttaaagaagtcaaaaagttattattttgcttgatatgttactttcttttgagattctttttagggtttaggttgaatttcagctttattatctttttgtggatctgggtttctgatggcttgacctattgccattgtagtgatttggtgtagcagaggaattttaaagtgagcc

SEQ ID NO: 87959 - DNA, 967 bp, Citrus clementina
  Intron number 1 from transcript clementine0.9_013596m (loc us clementine0.9_012723m.g) derived from phytozome v7.0 (c hr-ID scaffold_26; pos 1280118 to 1281084)
tgctcagagcccaaagtctggattttttgtttttggtgggtttggtgtccccgttttgtttgattgagttgtacctagcttaacataaaggatattaaaggaaaacaaaaatcttttgtgggactttagaatcgacacgagtgtatgttgaatcaattttaatgtaagagaaaattatacatagagttgtcatgaacgttagattttgattggaaagaaagcttgttttatgtttctggaaggacaatatgattggaagctatacgaatggcactcaatgttggtatcggagattataagtataaggtgaatgagaatattgaggaattgcagatgcctagcaaaattagggagattttccttgacgtcatagctaacacgggcccttttaatatctttaattctggaggaagtatttgaaaatttttcttataacttttgtggtaatgttttggaatatggtagaaggtcgatttgaacttcagaatgtagaaattaggtatcttcgctgagagcagaagtgcagaaatgagggttgtgacaatgagtgaagagtgagtgtgagcatgtagatgaaggagaataggtaattgttttgatttagtaagtgtagaatctagagcggcgtatggactagtagaaatagtatattgttagcacttgcgaatttgagagtctatgtatcgaattatactcatgaaactagatttccaatgcttgttttaccctcatctagctttcgttctttgcttttgggattttgctcattctcacagagaagcttgcataagaggatattgtggccatagaaaatttgggggcactgatttttaacaatctaatttgagattcttctaaatcgttctaggagctctgaattaactccatatagaagtaagatgattcatgttattacttctaatttcatgttattacttctaattcattttgtttctctttcgtagtg

SEQ ID NO: 87960 - DNA, 351 bp, Citrus clementina; identical to SEQ ID NO: 80331
  Intron number 2 from transcript clementine0.9_027632m (loc us clementine0.9_027632m.g) derived from phytozome v7.0 (c hr-ID scaffold_6; pos 2413324 to 2413674 reverse strand)

SEQ ID NO: 87961 - DNA, 253 bp, Citrus clementina
  Intron number 1 from transcript clementine0.9_027632m (loc us clementine0.9_027632m.g) derived from phytozome v7.0 (c hr-ID scaffold_6; pos 2413820 to 2414072 reverse strand)
aaacaactcaacttgcagttcataaggctctcaaggtagattaatttctgtaaactccttaattattgtcgtttctccttcttcctcttgatattcaatccaattcatgcaacacccttttacagatacttcatttgtgtttggtttctttcttgggggtgttttattttacctttctgaaccatggaagcagtgcattcacaagtcaaaactagattttgatgtaagtgttgatttttttttttcaatgcag

SEQ ID NO: 87962 - DNA, 490 bp, Citrus clementina
  Intron number 2 from transcript clementine0.9_004424m (loc us clementine0.9_004424m.g) derived from phytozome v7.0 (c hr-ID scaffold_54; pos 410890 to 411379 reverse strand)
ttgtacagctagagataagtttgaaaaatagcaaggtacttcccttctttcacaaagtctcgactatctagcaactcatcttcttttccgctttaagcaatgctctattttgtttgatacattctcttaatcaacttaacttagtaatatcatactagtggatatatcatgcataataactatttccttaattttacaatcgagaaacaaaagctgacttgggctttgtatcagtcactgggtcagtggtagttacaattagcgtgcaagttcacacaaagtttgatagatatttctgtgtatggaagtgctagacgtgtgaaaagtttgattgttgttcttaagttactgttgtataattctagaatcagtttatttgttaatgaaaaaagttaaactacattttttttttcttggttaaactacatttttttttcttggttctctgttagtagcaacaacaacttgataattcttcataccagaaagt

SEQ ID NO: 87963 - DNA, 622 bp, Citrus clementina
  Intron number 2 from transcript clementine0.9_018567m (loc us clementine0.9_018548m.g) derived from phytozome v7.0 (c hr-ID scaffold_6; pos 6431871 to 6432492)
ttcttttggccagagtcttgcatatccgcaaagaggtaataatctagggtcctctgaggttttacaattaatttgacaaactattgttattcttctggatgcaatatgtctgaaagactgcaattgtttaaaatgagttccttcatgaatttgttgataagtttgcaagtgaactttgagaatatatgtttcccaacataaaaggaaatgcaatgaagctggatgattttacctatatgcttaattgatttggtgctttaatattagtgaaaattttccttactaagcttgttaaattgattcagcatgtatatggtgttggcttgatttgaacataacttgaaacttacactgaaataagtttgtttggtcaggcatactgaaaacatcatttttcttgtccaaatagtaaacgaacaaatttgaaaaactttttgatattgctagctcgtacaatgctaatttggattttccttctaaagcaacgtgaggcacgattgttctttatgagtgtacttgtgttagggtgatgttttgcctcatattgacactgtattttgtctgcaacgttaaattgagactcagcatgcatcttgttgcattgatcttttgcagtattgtg

SEQ ID NO: 87964 - DNA, 444 bp, Citrus clementina
  Intron number 1 from transcript clementine0.9_006110m (loc us clementine0.9_006110m.g) derived from phytozome v7.0 (c hr-ID scaffold_22; pos 1924499 to 1924942)
tccacgagcttgacgtcgttacaggttcttttctctttaatttattcccttgcatgcgtcggtctgtctcaatattgattgcctttttttttttttcaaactttttctagtttatcaatttttttaatgtattttatatattttccctgcgttgtttcttcttttgttttgatttgccgaactttcaactctttaagtatttttttttttaatcatgagtgtgaagagatggtttttatcttccggatcatgtacaacattcattattctgcagcaaatatataatttcacatgtggttttggcgttttgggtggttattgatatgtcatgatttaattttattggtttgttgactgtacttgtacatacttctgatatgatgtacaaaagtttctcagagtttcaatttctggtcgccacacaggtaagggagagcttttaac

SEQ ID NO: 87965 - DNA, 695 bp, Citrus clementina
  Intron number 1 from transcript clementine0.9_020502m (loc us clementine0.9_020502m.g) derived from phytozome v7.0 (c hr-ID scaffold_19; pos 1571242 to 1571936)
ctcaatcttccttctgcatcttttgctaagtccaggtgatttgcaatgccttttagcgtttaatagctgcgtgaaaatatatgtaatttttttggcttttttttttttttttgagcataacaatatccacaaatagaaagacattagcaaaatgcttacgctgcatgcttagcttagcattgtaattctacaaagcagagccgagccttcatttctgattggtctctgatggattagctcaacaatttgatcgagtcatttcatctttgatttctaatctttttcaatattttgtgcttgcaaccatccaataagtacaacattagaccaataatatgctttaaataattttgcttatgttaccagtaatcgtatacattatattaatgcctcaatttaaggttaggtttcttagctttatccatttacacgagtatctttagtttttcctttttagtgtatttttttttaatttttttggggcaaactattaagttttccagtactgacatgggagggaacacttgcatcttagaaagattgcggtgagatttcttgatcttgcattattctttggcctcaaactcagcgactgatttccattctttcatccacggacagagaaaagaatagaactcattctgcttttgaattcttcaggttcaagtgttgcagaaaaactacaattggaagca

SEQ ID NO: 87966 - DNA, 905 bp, Citrus clementina
  Intron number 1 from transcript clementine0.9_005872m (loc us clementine0.9_005872m.g) derived from phytozome v7.0 (c hr-ID scaffold_19; pos 3569573 to 3570477)
tcactttctaagttgattgtgatttccaccgtcgggtatactctgcttgagctacttttttccccttcttttttggatgaatcaaactaattcctatctattttttcgttaattaagctttgccagttacttttagcttcggtttttctcttagatttgttctctgcatctaatgcttgatctgtttttttttttatgaatttatcttttttttggtttaaatttcatcatgtaaggggagcatgtgcaaagcaaaacaaagcatatcttttttcttttttgataagaaaacagagcatatcttatttaaatgataacaattaataagtgtagattgtaattttgaaaattttataatgtttagttgtgtaagctcaaatttgagtctgcaaatttcgtgggctggttcatactgtttgattttaatcttacagttgcatatctgatgtttcaaaagttcatacatgaatgattttgcgtgtttccggagtatttaccttttcttctctctgttttattctgttgcttcaattttcatctattaagcatgtttttatgatggggttttggattttttttttgtctcgactctgttctgtttcttcattttcatctactgtgcatgtttttataatgtggtttcggcaatctgtagagatctaagattaattgataaaactagattcaacacaaggatcaattgctgaagcatagtattttctgaattttgtcattgcttagttatatatgtagcagaagctaagtatgagtttagtcaagaattttgaattaacagtgttcccggagatggaattatgttttcttctaaattttcattttcctctggctgatgcttattattgattgtttcagtggcggcagccttattgcttattctgaggcaa

SEQ ID NO: 87967 - DNA, 815 bp, Citrus clementina; identical to SEQ ID NO: 82393
  Intron number 1 from transcript clementine0.9_017836m (loc us clementine0.9_017836m.g) derived from phytozome v7.0 (c hr-ID scaffold_6; pos 6132897 to 6133711 reverse strand)

SEQ ID NO: 87968 - DNA, 388 bp, Citrus clementina
  Intron number 1 from transcript clementine0.9_026781m (loc us clementine0.9_026781m.g) derived from phytozome v7.0 (c hr-ID scaffold_17; pos 2617800 to 2618187)
aagacttaccagctgccaagaaaagggatagtcatgtacgtttcataattacttacttgatttgtattatctgctttcaaaataatagtcacgcatctgctgcgtagtctttatagataagatggtcaaaatcattacgaaaaattttgtttgtttgtaaactgttttaattgcttataatttgagtgtgtatatacaatatatatattgaaattaaattgcaacacaggggacataaataacattccgatatctgtgccgtttatgtcgcctctgtgtcaccttttgagctcgatatcattatttatatacgtataagctcatggacacccttcgcttaattattcatatttttctttcttcttttcttctgatgagatgacagagt

SEQ ID NO: 87969 - DNA, 718 bp, Citrus clementina
  Intron number 1 from transcript clementine0.9_013767m (loc us clementine0.9_011150m.g) derived from phytozome v7.0 (c hr-ID scaffold_80; pos 16271 to 16988)
taacacggcgagcgtttgtgcaagagctgaagaaggtgagcttcttggcagcgcctcttgccggggtaactgtttttcagttgcttttgccggctgtatcaacgatgatggtgggacaccttggaaaactttcgcttgctagcattaccatcgccacctctctcaccaatgtcactggcttcactccactcgtaatttttttttcttaatttttaccattaaaatgcccttctatatagggcgttacttttgattctattttcttttctttactttagcttgactttcatgggtgatcagagcaatcaacttgataaaatagtaagggtataacaaaggtttttcatcaaacaaacagttttatatacgtatttagcttaaaagctatagctgctaggaagcaataccaaaaggagtctgaatatataattcgctataccattccactcaccagagcgaataatattttcatgttctgcttgagtttgaacaagaattatactctaactaaccattttggtgtgctactgtacttaactagatttgcgataattgcttatatgtttcttctttatttcaatctgttaagattagcctgcaacatgatatcttagtatttgtgtttctgaatcagtacaaacttgtcaaatacatgtataatgttgacgttaactttaaattttgaacagtttggttttgcctgtgcattagagactct

SEQ ID NO: 87970 - DNA, 445 bp, Citrus clementina
  Intron number 3 from transcript clementine0.9_031236m (loc us clementine0.9_031236m.g) derived from phytozome v7.0 (c hr-ID scaffold_6; pos 3850047 to 3850491)
ctctgggtaatgcaaaatatacttcatccaatatttaaaagagcttttgaatatcattggcaatagagtgcggcaaaagattcgtgaagaaattagagatccaaaattttgtattcttgttgatgaagcacaagatgaataaaaaaaagaacaaatgactattattttgagatatgttgattgtgatggatttgttggtgaacaattttttgaagttgtgaacgtaaaagaaactagtgcatcaactcttaaaaaagaaatatataatgtccttactcgttacaatcttttggttgaagatttacaaggacaatgatatgatgacgatagtaatatgcgaggtgcatggaatggattgtaagcactatttcgagaaaacaatatgcatattatgtacattgttttgctcatcgactgcaacttgcattagtgaaagtttccaaag

SEQ ID NO: 87971 - DNA, 618 bp, Citrus clementina
  Intron number 2 from transcript clementine0.9_022028m (loc us clementine0.9_022028m.g) derived from phytozome v7.0 (c hr-ID scaffold_6; pos 3485079 to 3485696)
gcaatcaggtttgcttcttcttttttttttagaacatatatattttatttgatttcaggtttaggccagaaaagtagtttttatgtttttctattttttcttttgagaaatttttttttatgtttttaaccagttcgttactgttatgatgcatatataattttttgagaacgaagtcaaaataattcatccatgggtttcgtataaaaagttggctttcaaattaaagcacaagggctttttaatattaaaagaacaaaaattaagcacaaccctaaaacgggctcgcagagtttgtgtgtgggctgtcgcagactcccagatgatatgttacaaaatttatgggggttgtattcgagcgctgtcttatgtatcgatcataggtgtttttcaaagcaattgcttcttgatgaagggcttgtgctttaatttgagtttatagaagtaattgtgctgctaattaggtcagttactctgctagtacgctcatgcttcttgaatattttcgagagctttatccagaaatatatttaaagctaacatcttagtggagtttgatgttgatttttttcttctatggtaataattaatattgttgaaacaatgataatcagattt

SEQ ID NO: 87972 - DNA, 726 bp, Citrus clementina
  Intron number 1 from transcript clementine0.9_001664m (loc us clementine0.9_001664m.g) derived from phytozome v7.0 (c hr-ID scaffold_26; pos 3133796 to 3134521)
tttgcaaagctctggaggtcttatcttctttctatttcctattctttctatttcctcttctttcatgttttcatggttcaaaaagtctaattttaacctgtcttgctataactatgattttggtggaagagtgcttgagtgaaagcattacgatcgaccaaaatgtaaaggctttttttttaagaaatacatcctaatcctttttaacatacgagacactgataatatttcttccttttttttgttttaaataagttttaaaaaaaattcttaatctattttaatatatgaggacattgattctaatctatctctaaatgctctctgtcttttaacatcttttcctcatcccatagtgcttgatgtatttgacatgcagactgcttgatgcaatgacatcatactctacctttttctgttcctcggtttcctattgtttatatttcctaagaatccttgtatattttctgtttttttccgttttgaatattttgtttgggttttgttttcattttgattgtaacaacgttgacttttttgtttctttcttcttttaaaatctcccctacaaaaggacctttggaaatgccaatggttatggtttcgcttattctattgctctttgatgcttatgaatctcagaaagtacttcttccatcatattctggtctaaattagtatttatttgcaggctgttgatctcaggagttcaggaaatttcagcac

SEQ ID NO: 87973 - DNA, 284 bp, Citrus clementina
  Intron number 1 from transcript clementine0.9_007537m (loc us clementine0.9_007555m.g) derived from phytozome v7.0 (c hr-ID scaffold_19; pos 359169 to 359452 reverse strand)
acccttggaaaaatctcagaaatttggattttgaagtaagcccattaattttcatccaaaattaggaaaccccattatccccaatattcggagccagaaacttttcgtacttatctgataaatttagggttctgttttactcaaaatctttgtttttgtttcttctgagtcaataaataaatgccagtcagtctgttggttgttcttgtcgttgcatttcaagaaattctaacatttgcttctaaacaggctctcgtaatcgtaagctcactcaactttgagaa

SEQ ID NO: 87974 - DNA, 670 bp, Citrus clementina
  Intron number 1 from transcript clementine0.9_018743m (loc us clementine0.9_018743m.g) derived from phytozome v7.0 (c hr-ID scaffold_34; pos 465761 to 466430 reverse strand)
ttctccacaagaactttccagtttttagcatccgggtatgtttagttaactttctttattatatattcatatttgctgcatgcttcttttaggctttttacctggtgggtctattgagttttcttttatcttgctttaaaaatttctgtattgtggttcatatattttagttttgtctgcgcaaaagtttagacctttgagctgttacgatatttgttgaacttctgcatgttaaggtttattacgaattgggggactggaagagcttctgttttctgttatagtaataaaacatgtcttgaaggatgtttttgtgaagtttgttcgtttatttatttttattattgagttttagggataagaatctggtgtgcaaaattcaagtatgatgatgcctttaataatttatttgttctttttgaattgtcaacttagcgtttctggcactgagagcaatgacgtaatggattaataatgatcaatgtagaatttattcatatagcagagaaactctcttagcttctgatgaatttgctctttcggttgtaattattttagctttttagttgcagactttgatttactctctcctcttgaatgtatcgagtctgaaatccaaagttgatacaaagctctcgacttttttctctagagcattgtcctggagctg

SEQ ID NO: 87975 - DNA, 375 bp, Citrus clementina; identical to SEQ ID NO: 87563
  Intron number 1 from transcript clementine0.9_016332m (loc us clementine0.9_011292m.g) derived from phytozome v7.0 (c hr-ID scaffold_26; pos 876438 to 876812)

SEQ ID NO: 87976 - DNA, 544 bp, Citrus clementina
  Intron number 1 from transcript clementine0.9_004304m (loc us clementine0.9_004299m.g) derived from phytozome v7.0 (c hr-ID scaffold_32; pos 1050927 to 1051470 reverse strand)
gtttcagtaaacaatcgagctgtgttactcttcaggtttggatgattattttcgacaatgctttagccattctttagggtttatatttttcgatgttatttaggttacgattttctattcatttgattcacttcgtttaattactttttatttgggtccgggcgtttataagtttttaatttttatcattttttaggtcaaagtttattgcctttggaatgattgttttgtgtgggtgccgagaaagtccaggaaaagcgaattaatggttttttaaaatgtaaattttcgatttcctcagctgccaatacaaagttcatgttttaatattgtttgtaagagcaaatattaaacccttgcatcgttgataccaaaatttggattttttaagctttacaattctttgaagattgaacgaattaataatcaaattttcatttttaatgttgttaaaatgcatctttggtagattagggagtcagagaatcattctgtccttaactctattgttttttttaaatattttctaattagggataaattc

SEQ ID NO: 87977 - DNA, 837 bp, Citrus clementina
  Intron number 1 from transcript clementine0.9_028880m (loc us clementine0.9_028880m.g) derived from phytozome v7.0 (c hr-ID scaffold_80; pos 547317 to 548153)
aggttagttttaagtatataagtgaaaatttgtcttttctgagtatgttgactggttctcgttttgttcagtaattttatgtgattggtttctgtagattagatgctttaattagcttaggataaagtttagtgtctgattatttatttatttagtgttttttttttttaggcttgtcgatgtgggtttctggtgtagtggttgggtaagtgattggcttagaaatttattatatgatgggattttgacttggacggtggaattctttgacttattgtttaatcgtgtttcagttttaaagacattctttcattgcccttgctgtaagacaatgtaacagcaatacatttaagcatggtggtgttttgcgggcttaaaaagcagggacaatggttgaagatgtaaacttctcagaaagaatgaagtagagttgtaatgttactaaaacttagtaggcttcttgtgtttttgattcccttcataaagcgaattgataagccattcattttgaattttaatagactttaggttagtgatgtataaggaatgctttgtgaagttaggagtgtgttttgacattttaaaaacttttggtttagtgatgtctgtaagttgcataaggtcatttctgctgcattcctgtgcttatgggcaagttgcatacttgctaagagttattagtttgtgtatgcatatttttcttttgtaattggggggcaggcattgccgtatctatgtcttgttgttgtgcttagtatttttctgtttcagtttcagtttcagtttctcactctcatctgctaaccttttcctcagctttttgaatatcaatacaat

SEQ ID NO: 87978 - DNA, 560 bp, Citrus clementina
  Intron number 1 from transcript clementine0.9_025335m (loc us clementine0.9_025335m.g) derived from phytozome v7.0 (c hr-ID scaffold_55; pos 1121332 to 1121891 reverse strand)
ttgttctctccacagtgctctcattgcttctcttggtatgtatcatttgatcagtaataatgttaggttaatcacaaattcattataaaaaatattttttaccaaattgataacacataatgtacagtatcaatgtgctgagaacaccacacaacccgaacattattttgtatttacattcaacaaatactattttatcacatcagctttaagagtagcttaattatagctagctctggcattactcgttttgattcaaatgattttcgaatctttatcatttgcatggttaatatatagatcctctctctctctttttgttttttttttattaattattttccatatgtgcagtttgccaacatgatagatgcaagaaaagacctgggagacaattggagtattgtcgtgaaaaatcaagacatacctggggaatcaactctaggtctcgttcccgaagatcaaggctcgaccatctctaaaaccaaagcctattgccatacacatgatgattctgagcacaccatggagaagcctttgtaaataagaagtttgagctg

SEQ ID NO: 87979 - DNA, 313 bp, Citrus clementina
  Intron number 1 from transcript clementine0.9_001147m (loc us clementine0.9_001147m.g) derived from phytozome v7.0 (c hr-ID scaffold_9; pos 3207691 to 3208003)
cgtcctctcacccccccccccgcttccggtcgccggtaatccctcatactcccattcttttcagttttatattacagcaggataaagaaaattgtaattgcatttcagtatttgcataatgtgtgaattaaggtctctttagtttttttattctttcttaaattggttagggttttttaatgtgtgtgtttctagtttacgctttttgttactgttacattgtagggtttttttgaattctgaattggggaaaggaagttgatgatgtaatttatgttgttatcagggggggttttctgtgaacttcaatagt

SEQ ID NO: 87980 - DNA, 521 bp, Citrus clementina
  Intron number 1 from transcript clementine0.9_021413m (loc us clementine0.9_021413m.g) derived from phytozome v7.0 (c hr-ID scaffold_9; pos 3601467 to 3601987 reverse strand)
gattttatttgcccaaattctccttttgtaagaacttggtttcttcttcctttttcccttctaattattctccttcatatcaatttatttattttcatttcttaattgtatccaatttaaaatttcttatttattatttagtaatgctgtttaataaatgtgtcctaaaagttgagtaactgactaatagactctgcctgtatacaattttaactcttaacgcttattttgtttgcacagaaaagcaaaaggaattcaaagctctgtttgtttgctcacaactgcttctttagaatcttggactttctgttaattatacttgagaatttgattatatttggtttaaactaaaaggggtttgctgaaaactttatttgttttggttattgaatagaatgttacatgattagtgtattgtgaaagaaagaaaatttggattttcattaatatgactctctgtggttgatatggtgattatcctttcctttttttcttttttttttcctcctggattgtcaggt

SEQ ID NO: 87981 - DNA, 393 bp, Citrus clementina
  Intron number 1 from transcript clementine0.9_023375m (loc us clementine0.9_023375m.g) derived from phytozome v7.0 (c hr-ID scaffold_19; pos 1307224 to 1307616)
gtcactttcagggtacgttattgctctcacttcctagatctactgataacctttaattatatgagcttgttttacgatttaaatttgttctcagatgaaaaaataaaaagctgcaattttttaggtgtttgtaattgattagttagtatgccctgcaaaaaataaatttagctcttttgtaagccaaagggggagcagagttttgagctatttggtagaactcttcattttgtatgagctataattaattgggggcttcatgtggatcatatccgtttgttatagctatgttttctttagagttattagggattttagggtgtttgttgatgggaattcgttatgggttgttgtgcagtttcaccagtatcaggttgttgggagagctcttcc

SEQ ID NO: 87982 - DNA, 819 bp, Citrus clementina
  Intron number 3 from transcript clementine0.9_023375m (loc us clementine0.9_023375m.g) derived from phytozome v7.0 (c hr-ID scaffold_19; pos 1307860 to 1308678)
cttgccattaacgaggtatacctcttatttttttaacacatttcacagggtgctctgttgcttatttggtagttgttttcattaggaagtcagtagttacttgtgtgattatttattgttgttgtgctttagccttttttggccattgttaaaattctatcgtgcatctttaatacctttatagttaagtacatgtttattcgtatggcttagaatattctgtaaattctctgttgaaataagaattgttgccaaattactttgatctcttgtgttgagtagttttatttggtagttatctggtgagaatttgatatgtgatctgatcatataaatcttgcaactgcaaactaaatttttctgaaatcatttatttgataatttattatggattcttatttgactgcttatctctattcacttagtgattcagtgacttactgattaaacctaataggataaatgagcaattgtgttggtaaatgttgtgttttgtgaattagattctcaatttaataggcttcttgattggatcacatgtctttcaatttgattcaagttgttctgtttatgtgccattattaggtcttcatcccatattttgagttatgcctatgcatgtgtaattttgattagtgaagactgcaattttaatgcaactttagttgcttcttgaattcttttgggcttgattagttgctgatttcgggtttttgctattggaacattaaaatgtacagatttcaagggatttccattaatatctaatcttaatctcttgcagatttttgagaagaacccaaccaagatcaagaacta

SEQ ID NO: 87983 - DNA, 754 bp, Citrus clementina
  Intron number 1 from transcript clementine0.9_005953m (loc us clementine0.9_005953m.g) derived from phytozome v7.0 (c hr-ID scaffold_19; pos 3590282 to 3591035)
gtcttgctgctattgctactaactgcaagtaggttcctctcgctcgtcccctccctacgttaatttttttccaaaattctttgagattttttcttagtagctttctttacttttcctaaaatgcataatttcggattctgattccaagtactgaataacataggattattcacttatttggtaaaaaaataaaaattaaaaaaataactgtaaaccatgcggtgttaattaaaaaataatactataacatcatatatatagttttacagatagtatatctttattttatctttattacgtcagaaatttcaattcaaatatcactactctatccaaaatcctccatcccaaaagtttatccacatctcatcttgttggatcaaaaaacactctgaagaattagtttactacttcatatctcatttggtatattattgtaattttcttttttattttttaatttattcctgtgaagttcatgtacgccagtacaacacatcccaacattgcacccacatggttatcttgatggttgaaactcccaacagttctcttttcaagaaattatcaaaatcactaaaattaacgtaaaacccaatacggacccaatagtgatccccgcaactgcaccgtagaaggactactgtttttggctttctcattatttctcatgcgggattttgcccatcgtgtactgtaaacttctgaactcaatttgtatacaggaatttgactgagcttgacattcaggaga

SEQ ID NO: 87984 - DNA, 922 bp, Citrus clementina
  Intron number 1 from transcript clementine0.9_000139m (loc us clementine0.9_000139m.g) derived from phytozome v7.0 (c hr-ID scaffold_32; pos 792121 to 793042)
caacgccgcgtgcttgagcggcttgccattactaggtgacgaaggattttttaaattttacttcttttatcttttaatattaaggcgttcgtggtaatgagagtggtagttttttttatagtaaaataaaataaaacagaattgaaatttataagtgatctcgcatctcagaattgttttctttgttagatttgtggatagttcgttttgttagtaagtaaaacaaaaatattggaaattattagtgaaacttgtgagtaattgagttgtttttttttttttttttggctttttgatttgttaacttgattattatttcttagcgagagtagtgtgataagatacagcttgtgaactttaatgttatagggagtttttcttgacaagtcatggggaaactagtttttcttgtcctatgtgcacatagatattgggaatggtaaatttaacaagaatttctttgtttgaatatagactttttatttgcaaatgttgctgaagatggcaaggtttgaaattcatggttttcacattttaattcattcatgtatggcttatccaaagatgaaacatgtcaatgattacagatggaacatggaagttgttagttcaactgtattttttcgtgctaaaaagagaagacaaagttggtgcaatgatttggttagaaattggtaatagttattttgtttgttaatgatagttgaatgtttgctctggactttgagatcttgataaaaaaaatagatttctttatactggattaaaaaaaaaaggttattctgggctaattgcgatgattaagttttaaaattaaaacctattagcttgttccaaagctatcaattacagattgcgatggcttttaacttgttgggtaattacagatcgagtggaataacacaaagtcagcttgctaagg

SEQ ID NO: 87985 - DNA, 737 bp, Citrus clementina
  Intron number 1 from transcript clementine0.9_024422m (loc us clementine0.9_024421m.g) derived from phytozome v7.0 (c hr-ID scaffold_6; pos 4856156 to 4856892)
aactcggcggcgattttgagttaaagaagaggcaggtaaataataataataataataataataataaaagatcgtagctttttttatttgtacgctttgtttacaaggttttctgaagagaataattttgcaagcagaagcgaccgtttgtatgtttatcaaatctgaggaatcgttgctctaatttcgtgacttcatcgatgacatccccttgaatacgatgaaagataacatggatgctaatggcattgatgaatttcaatataaatttcttaatgggcaatttgaattcgtgttcttgtgtttacgtgattggattttattggttgcggatgatatatgctgtctcacaactcaagctttttggatggttatgaggactttgcaaggacgtctacaaaacaacagttcatagatagatgttaattttagaacttagaagccagtgattagaacaaatcatctgaatatttcatcttgtttgtctgctgttatattctcttgtttattttgatgcaatgaagccctggttcctggtgttggaaacccacctattgaattgaagaaataatgatctgcctcgcttatggaggcatatgctggcagatttataatttattagctggactagctgctaatattatatatcaacttctactttaaactggtttcattgctgatctgaattctatattattacaggttccagggaaaagatttggctctggaggtggcac

SEQ ID NO: 87986 - DNA, 567 bp, Citrus clementina
  Intron number 1 from transcript clementine0.9_030562m (loc us clementine0.9_030562m.g) derived from phytozome v7.0 (c hr-ID scaffold_9; pos 2016795 to 2017361)
gttgatcaggtactgttccagtcccacttcatttggttttccatgtaaattgtcaattgaacttgcttgcacttgttgtagagttgacaaattatgttgcggtagaatttacatgaataagctttggagttttaaggattcatagggattcaaaatttgtttttactcgatatattagcaaatatccagtaattgtggttgtttgtatcgtacaattatatgatctatcacatgattgctcaaaacatggatatcactttttctgtcctgtttattcactttcttgcactgactcgtatgctctggtgatttgctttagttgattaattaaggctttcgaagaccattgagttgctcaattggggctcttatccgactcctcatttgccccacttctcaatcatagggtctgacatcacgaaatgctcattgtgcttgatttaataagaacgtactttgtaaaatgctattgctagtggttttattcattgttcattttcctttttgctaataagtttgctaacttcttttttgcattggttccagattaaaagagagatatccatc

SEQ ID NO: 87987 - DNA, 320 bp, Citrus clementina
  Intron number 1 from transcript clementine0.9_033638m (loc us clementine0.9_033638m.g) derived from phytozome v7.0 (c hr-ID scaffold_19; pos 1668301 to 1668620)
gggcatctttcaggttagtataaatttttataattatttcttcttacttatttggacgtgatgaatctatatgatgaacagttttttttttttgttctgattttgaaggacaggtcagtacaaattggtaattgttttatatatctatgatttcttgaaaagaagtttcaagaattattggaacacgctcaaaacaaaaagttcaaataattaacaatatataacgttaaaaggtgcacgagtattattaatatttgaaaaaacggcctaacaggttgtcttattatgttttgttatatttatgatgtagttggtgaacc

SEQ ID NO: 87988 - DNA, 572 bp, Citrus clementina
  Intron number 1 from transcript clementine0.9_005763m (loc us clementine0.9_005763m.g) derived from phytozome v7.0 (c hr-ID scaffold_34; pos 808829 to 809400)
tgctgttccctttggaggccattttcttgcattaggtatgtgactgaatttgttcaattcttgctcttccatgattggttttattgttctgacgtttatgtttgtattgtttgtctgcaataacacttctttggacataaattggttgccatattgcatataatcttttctattcaaagatgaaattcctcaggttctggcaaaagtttgttcatgtcagaaaggagaattttttttttattggtccatctcaaacataggctttgacatgtcctatttcacggattgatccctgactaatcatggattttgaaaattttcacacaattcgcaagtttgtaaagttcatcattcttcaaaggttaatcttgcacttgcatcattatgggtagatgctttgtagttcatacaattgccagttgtttggcaatacatggatacaaatttctttgatctcataacttgtggttataaacgataaaataattctctttcagtgtatctactgtaaaacctgtgtggccttttgtgtggcagggttcaaattctgtggtacaactttccttccttga

SEQ ID NO: 87989 - DNA, 1028 bp, Citrus clementina
  Intron number 1 from transcript clementine0.9_024670m (loc us clementine0.9_024639m.g) derived from phytozome v7.0 (c hr-ID scaffold_9; pos 3043695 to 3044722 reverse strand)
tcccgagtgtgacggccataaatcagctgcttgatgtaggtttgggtttctaaaattcaattttttaaaaataattaattgctgttacattgatcaattttagagtaaagttttaatttttattatcggaataaatagaaatgtattagaaagtggtaggaggggcaagtttgtagtttgacgagggaactgaaagtcttgtcgagtgaccgtagaaggaaataagaagtggaaatggcaaatcccaaatcccaattcagtggttttaattcaagcgttattcgtacatgtactggaactcttaagtgattgtggtattgatgaacgagggagtatgataacattgcattgtgaatttgatgctgttcagagaacagtacaagccagagttgagcgtaataaatcaaactcttattagatcatagcttctaacagcttcatcttcatggttctactttatagttagtaatggggagagttgttaagatcctttttagaaaatatgaatgcgtgtttatgcctgaatttggcggctgaaattgatgttgagttgcaaaataacacttttagtattaaggccaagtaaattttatcgcaataatgttgggcctggaaactctagttcttttctgcagacaatagagttttatctgctgaatgcctcatgcggagactagagagcaaccgtttcttcttacaaattttaccacgaggtccaagacatgcatattaaaaatagacttcctatttgagcttgttagaaatgccattgtccattctgtaggatagtaagcatagtacacattaatactttttatacaccaatatgcttaatttaactcgtaattcacattctacaatgctttcatccgcatcatgcataattttacttggttatgcataattcacattctagtcggcttgttatggtgttgatgattggacgaaaaattctatcaaactcgcgtcacgaattttcatatttctttgcagggcttgccgttagctgcaggaaataatattatatt

SEQ ID NO: 87990 - DNA, 742 bp, Citrus clementina
  Intron number 1 from transcript clementine0.9_007990m (loc us clementine0.9_007990m.g) derived from phytozome v7.0 (c hr-ID scaffold_9; pos 3819095 to 3819836)
agattgaaagacatcagcttaaggccataatccaggtaaatttaaccagtaaattaatctcttgaaatggtataataatatgtttgggattcgatccccactcatatatacagataaatctagcagggggtttgattttcattcgtgcggtagttttctttctttcttttcttttttttaagggtatgacttaatagtagtttttcaggtataatatactaactacatgtgtacaaagatatatgaaaaggaatttgagttttaatgatccagtggagtagttttcaagtaattcgttttttttttgggttgtcccaaaaacccaaaaaaaaaaatgatggatacatctgtaaaattataaaaaaaaaaatgaaatgaagctccttgtatgatgacttaggatagggatcgtaatccgatcatgatttaaccaatagttctccttgtcggtcacttatatatcattaagcaaagaaagaagagacaaagagaggaaaaataaaataaataaataacaagagggttctgatccaacgatttaaccgataactgtccaacaaaataaaatatgactaacaaaaaattgtaaagaaatttggtgtctgtgatttaagctataattgtcaaagaaagtaaacatcatgaatacaactataattgtcaaagaaagtaaacatcatgatttgtatttttattttgaattgtaggacctattaactgctggaactgacacctcggcact

SEQ ID NO: 87991 - DNA, 658 bp, Citrus clementina
  Intron number 1 from transcript clementine0.9_028698m (loc us clementine0.9_028698m.g) derived from phytozome v7.0 (c hr-ID scaffold_9; pos 407640 to 408297)
ccttcacttgtggtcagagatacagtaagaaattttctctctctctctctttttcttcctctttctattaaagaaaaatccattcattaaaattttttttttcttttttttgggaattatttgatttttaatatcggaaaaagttggtttgacaagaaaacacttaagtctcaaaaatcagcaagaaaagggaaaacccatatgagaatatcttttgacaaatccattttaaaaataatacacaaagtaaaaaaaaaaaatcaaaggggtgaggtttttcatttatttaatttttttatacacagtttctaagatagagtaattgtcttgtgacttcaagttccaaaggatcctttttacagaagatcaaaatgaattcaaagtgaggggaaaaaaagttcttgatgatcttcaactttcttgggattcccaggcatgcgcaagcagcattggtcagaaacataggatcatatatgcacatacacacattgtcatgatcatgcatctttcctttttattatttttatatttgcttcccttttgtaaattgcccataacaaggcttggcgttggccatggccacaacccataatgtgtgtagcttttaatttttatttggatgactgaacatctacaggtgcacgtactgccacaagaa

SEQ ID NO: 87992 - DNA, 1019 bp, Citrus clementina; identical to SEQ ID NO: 78941
  Intron number 3 from transcript clementine0.9_024481m (loc us clementine0.9_024481m.g) derived from phytozome v7.0 (c hr-ID scaffold_9; pos 1155810 to 1156828)

SEQ ID NO: 87993 - DNA, 689 bp, Citrus clementina
  Intron number 2 from transcript clementine0.9_014041m (loc us clementine0.9_014041m.g) derived from phytozome v7.0 (c hr-ID scaffold_46; pos 596660 to 597348)
ggctggtaaggattgttcgactgagtagaaccatttaagaaaccagcttagtctttgagcatgttcttgggttttaacaaaattatgtttggtaacggttgttttttcgctttcattaataaatttctcactttagcaagttcgcttgaaagaaagaagaacaaaacacacacacatacatatattgtgtctttctgtagggaggacgttattcattaaaatagaaaaaagcacaaatttcaatgcattaaaaatatattttttaaaatttttttattaataattaaagtgagaatattctcactaaagaatcaatatacacacacccatacattccatattggtcatagcactcacacaccacacttttttataatcaatttaccgaacatttacaacttctggttatagtttaagtctatcaaataccttgataaactaattttcctgaaagctggttatttgagaattttgatctataattgattgatcatttgaactctgaagcaataccaatcaaacatgccctggtaatgcacaacattgtgacataagctttatgcatgattatttatattcttttgaaattgtttgtctttgttgtgtatatatttatctccgttggaagccaatgcatttatgttgttattgaaggaaaattctcattcgaaaacgaaagccttcacacc

SEQ ID NO: 87994 - DNA, 876 bp, Citrus clementina
  Intron number 1 from transcript clementine0.9_026389m (loc us clementine0.9_024161m.g) derived from phytozome v7.0 (c hr-ID scaffold_6; pos 5932407 to 5933282 reverse strand)
ggatttgttcactctcttacacacaggtgcctgctttcaacatttcctatttcaatatttagtccacaaaattcattttttggttcacaattgatgtgggacttttttaattcatacagagaatgtatgcatttgctgcatgcttgcttgctggcctggtctgtatgttcttggtatgaccatttatgctcttttcatttgcttattttatcaagaaaacaaatgggtctttgtgtttatatgaaatttttattatttattgtcttagctttttggaagcaagaatttcttgtgaagagctgaattgctgataagcaagccacaaagcagatcgctgactacatattagattcataatagttgatgtgcaaaacttatagtgtgctggattatgttcagagctagcaatcttaagttagtgtatagaaatgttattgggtgcatatctctgatactcaaggcagagttatagcttaggcaagatagttgtgtagttcccggaagcagtaatgttccgactaggagatctattttgcctcaaaataaaacagaaaaaatcttcgtattgtgggtgctaattggttcaactagtaaaatcgcctattatggtacgggaggtaaagttgtaaaatttagtttgcggggacagaattttggaatgttataatgagaaattgctatgatcaaagtaaaaaatgctggatttaatggaaattaacttctcaaatttgcaatgtttaatagagtcatgtgaattttttaggtcagttgataagtggactgaaattttgaaatttggtggttctactactttttctcataactttggcttcttttgcagtcaataattgtgtttgtcaggcccatcaaatttgc

SEQ ID NO: 87995 - DNA, 711 bp, Citrus clementina
  Intron number 1 from transcript clementine0.9_003662m (loc us clementine0.9_003662m.g) derived from phytozome v7.0 (c hr-ID scaffold_2; pos 9326023 to 9326733 reverse strand)
gcaagcagtttgctgctgaagagatttcggcccaggtaaataatatatgtgagatgaaatgtgttgtatttttaggggtattgttgaatttttgtttatgttattttttttttttgtttagtttgctttggaattacttgtggtttttttttatttctattgagaatttgagattttggaatgtgttgtttgggtgtttggattgggtgctaattagtttagtgatggtttttagtttgagttggaaatttctggttttaggaagtgattctgcagtgaaagaaaatgtaggtgtctgcatcttgttgaattttggtttttggattagggaaataggttttggttaatgttggcttctatatggaacaataatttcttcttgcaagttgaagagacaagtacttttatgttgattagttaggtgtgtcaatgggtggttctataaactttgtttacatatttagggaattttgtttggcagcagatgtggtcacactgaagattggttttcgaagacattcatatatgtgcatgaatacatgtgaaagtgtgaacaatttgtattcacatgcatttgtaatctgtgatatgcgtgctggctatgaattaataaacaacatgattacttcatcttaattggtctatttgaagggtaccttatatcatttgtttactctttgttactgatttaggtcttgagaaagcttgtcg

SEQ ID NO: 87996 - DNA, 720 bp, Citrus clementina; identical to SEQ ID NO: 87155
  Intron number 1 from transcript clementine0.9_014324m (loc us clementine0.9_014248m.g) derived from phytozome v7.0 (c hr-ID scaffold_26; pos 2004712 to 2005431)

SEQ ID NO: 87997 - DNA, 506 bp, Citrus clementina
  Intron number 2 from transcript clementine0.9_005852m (loc us clementine0.9_005852m.g) derived from phytozome v7.0 (c hr-ID scaffold_6; pos 4273018 to 4273523)
cattgctttgaattgcggcctcatcttcgtttccggtatttttcatttctttgtttatttcttattagaggtctttttgttcttccgcaatttgatattaatattaaaatcataacttacttacagtttcttttcagtgctttgaaatagccttaattgatagattgaattgaattccaaatatatggaaatggtttttgatattaaaaagccttttttggggggggggggggggggatgagcacatgataagtgcttttctaacaagcacttttcgggcaacaattgatgaaaagctatcttcactattcaagtgctttattgagaagcttaagtgagtttacactatgcattcttacatgtaattttaagcgctttctaaaaatgtgcgtgcttcctacaattgcatttaattcttgatccagttatttagtaggatggcacattgcttgttatatgttgaatcaaaacacactgaaagtctgatacatctttgtttgtgttag

SEQ ID NO: 87998 - DNA, 752 bp, Citrus clementina
  Intron number 1 from transcript clementine0.9_012765m (loc us clementine0.9_012765m.g) derived from phytozome v7.0 (c hr-ID scaffold_62; pos 1334659 to 1335410)
tctgcttcagagctaggtatttgctgacctctttatgttactccataatgagaatttagaagtgccactccagttagattacatgttcccattttttttattgtgtgatttgttcacgagttcagatattgaggtgctcctatctgcttgaacagtgaatttttgctgcaacttgagtttttttttttttttttcttacctttatgattattgacttactttactatatctgaatatgccaatcaaggaatgaaaggcgagcctacgacaaagatagtggtgctagtcatttctgccgttgctctgttggccgtggtgcttatatctggctatttgatccacaaacgaaggagaaacatagcaggtaaaataactccctttgccttcacatatttattgccatttgtttgaacttttacgcagcagttttcattcaaccaatggttccgatagttttctttgctttcttcattatgagttcttcaatcaaattctttaccaagtagatagtattgaaagagcatatcaattagacggggactgttaaatgaatgaactttaataaattttttggaaaagaagaaccttcgcatcaagaacaagaaaatggaagtttccattttaattaagtcctgtatctggactgcatatgtttctttcggttagtactgtccattattatttctgtgaaaacagaaactgatcaggaaaacgaagatcaaaacattgacctggagctaccactatttgaa

SEQ ID NO: 87999 - DNA, 863 bp, Citrus clementina
  Intron number 1 from transcript clementine0.9_005124m (loc us clementine0.9_005124m.g) derived from phytozome v7.0 (c hr-ID scaffold_34; pos 2284405 to 2285267 reverse strand)
gaaggtctgcttattgctgcttctctaaccattatctctatgttctggttaaagtttttactctttttttttcctttttttttttaatgagattttgatctttgtttgatttctgcgaaagggatgtttttattcgggtagtgagaaataggaatgcttagctgagtatgcttatttttatcattgcgactgctgttgaggttattttaaattttattttgttccctgtatcttcctctcgagtttctttgtatttggttaatttatgataatatggttgaatttaatagagagatagtctcgcggtttgtacttcatttatgtctcaaaggtttccttttcattaaaaaaaaaaaaaagttatggttttatgggtccttgagagaatgtatccaaggagaatactttttgatgaaggcctctattcaagtgcttggaatatccttagcagttggatggttctgttctttggaatacattgagtgttgagtgggtggaactgtgactttgcttaccgtgttaaaggtttgctgctgtttaaacactcctcacaagtttaatcatgtcctgctatgcctgtggaagccttaaatctaactagttgtgaaataatatttactttgccatctagctcaatgcattgtcaacatgttcctgtctgcttgcctttgaattagtttccataattggcaaaaatgtcatccctacgaaacttgtatcctgtttaaagtttcatgcaactctacattctgtttgtttaatgaattttgagtatggattttgcgcattagattgcattcttaaggtctggatttggctgactgttgtaacttattctattggctcttatcttggaacaggtg

SEQ ID NO: 88000 - DNA, 690 bp, Citrus clementina
  Intron number 1 from transcript clementine0.9_012959m (loc us clementine0.9_011623m.g) derived from phytozome v7.0 (c hr-ID scaffold_80; pos 634416 to 635105 reverse strand)
ttattagagctaaaggcaaatacaaagggtatgtcctcgttcttaatatttacattaactataaaattataaaaaggaaacatttacatgagagtctatgatacttttaatatacaaatttattttaatttgattcttataacgtgtatttatttttttataattagttgaaacatacacatgacaagaatccaattgaaaaaaagtgtatgcaccatataaattttctcaatatttgtgggatatttagtattattttataaatactattttttttaacatatctatatatatatatcaatagaagtgatagtactttttaattcttgtaaaaggaaaattaaatataccaaaactcggttgttactatttttacttgttctaacaccctcttttcaatatttcacatgcacattgtttctgttttcagctcacaggtttttgagttagaaaacaaacgttattctcattttcaaaaacaaaatttcaaaaacaaacacaccgcttgtttgctatcagtttttgagaaacgcttaaaggttgtttttccccttttctgaaggaaaacttgcaaaagttcaagggagacagaggtgggtatgtgttgcttcagcaatgtaataaaagacatgaaaccaaagccatttgatttcagaaacatataccagcagttcaaggttcaccgctacc

SEQ ID NO: 88001 - DNA, 303 bp, Citrus clementina
  Intron number 1 from transcript clementine0.9_009409m (loc us clementine0.9_009409m.g) derived from phytozome v7.0 (c hr-ID scaffold_19; pos 905246 to 905548 reverse strand)
cttgtttttgagacaaaaaagaaaaccccatctctgtaagtgttctctcggtcttataactcaatttaacatatctgtcaatgaattgagcgtctcagcctctcaatggcgtttcttgtgcttaatttttttttcgttgtcagttaataatgatcttagtcagtggctagcagaaacatctttttctcaatgagtttatggtgtttttcttaaattttctaaaaaaatagtgatttttaaggatcttccctttgatttatattgctgattttgtttataatgtcaccagttgtttttattcat

SEQ ID NO: 88002 - DNA, 926 bp, Citrus clementina
  Intron number 2 from transcript clementine0.9_012585m (loc us clementine0.9_012585m.g) derived from phytozome v7.0 (c hr-ID scaffold_32; pos 459665 to 460590 reverse strand)
caattcggatccaaacggcctttcgaggattgttggtaattgggttcttcttctctttctgtttcatcagatttccagaactaatatttaattatgtgtgcaactgtgtcaaatttttatttaatttaattttctaccatctgttctggttcaggaccgtgacctttagatgtgtagaaatagtttcagttataggtatatgcattgaaaagaaaattttatacaactacaatttttggaattttgttatataaacaatcgtctaggcaagcttagctttggagtaataagctggtgagatttctaattctacatagttggtgaagatcaatttttgacaaatgagaaggaaaatagctcatgattttggtcctgtatgtatccgtatggcctccattaatttgtttgagtctgttgacccatttcatagttgtgtggaaaaaagttggatttggatttgtaaggacattttgtgctgatatggttgtataatatcttacttatagatgaggttcatcatgttgcttcatcttaacgagaagcgtgagaggtcaaagaaaataaccagatgttttattcaggtttttctgaatatgcaagtttgttgaatgtaaaatccagaaacaatgttcgtttcctagtgtgctgtcctcttttcctctttctaaaagctgaaaaaacagaagagtcactatcttcaagtgaactaaaccatttgaaagatcggtctggaaaacagccattgtggcttaatcaatggggtgtcgaagtttatcagtctattacacaacagtgagctatgtcatagaatcttacgatacttatttggagaagagtcatgtgtgctttatagttttcatcttttgtgtgtgaatttcgaaatgattgcaggcaagacgggccttcagggccttgaaagctgtggt

SEQ ID NO: 88003 - DNA, 647 bp, Citrus clementina
  Intron number 1 from transcript clementine0.9_021940m (loc us clementine0.9_021537m.g) derived from phytozome v7.0 (c hr-ID scaffold_22; pos 1871377 to 1872023 reverse strand)
gacgttgatcctcgtcagtacgaacatattgtaagtcgttacttttactctttttttttcagcaataatttaataaaataatgaagatttttgggtttatgatggtctaattattactttgtattaattttagtaatgtttgttcaaatcgcatgtgatggtaaatttgctgacttcttgttctggttaatgattgaaagttagaatccctactttcgtgtttattgctttgcttcaatttgaaatactgtttacatttttattttgttctatcatctgtgaatgtagagctagggtcatgttgctggtcgatgaaaatggtttatgtggattgctatgttattttggcaagtattcgaagcttttgagagtaatttgtcgatatttttgaaacttagataagagaagtatgtattttgtgtaaattctgatagtggtttatgtggcttacggtagatgagctttgatgtcagatacttagattgaacatgggacttaagaattaccaattgtgtaattgaatcaatgtgtaacaagacttctcaaaaaaaaaaaaaaaatacttcagattatttctatcgatcagtatttggttgtgatttactgctgcatttgtgccagcgtaaggcttggccaattattggaaa

SEQ ID NO: 88004 - DNA, 454 bp, Citrus clementina; identical to SEQ ID NO: 79398
  Intron number 1 from transcript clementine0.9_015493m (loc us clementine0.9_015493m.g) derived from phytozome v7.0 (c hr-ID scaffold_26; pos 3360829 to 3361282 reverse strand)

SEQ ID NO: 88005 - DNA, 505 bp, Citrus clementina
  Intron number 2 from transcript clementine0.9_000431m (loc us clementine0.9_000431m.g) derived from phytozome v7.0 (c hr-ID scaffold_34; pos 1971779 to 1972283 reverse strand)
ctgaggcagctaaaacttggatttacccaggttagttaggttaaatttttactgttccctaatcagatgcttgcattttgtatgccctaattacttttgtttgaaatgtgggatcatataattgttttataaatgcggcttaatgcgtttgggttttcatgaacaatttgaaattgtaattaatttttttgaatggatgttgaaaagcaaatcactagttttcaaatatatccttgtgtcgaggatacgtgttatacaagtgattatttaagatggtaatatgactttatttattttatttatatttaatttctctactgttaaataggtaacaaagcatatcaattagcatcttctttgcttttcagcaaattatgtccttgatatcattcaaagatctatcttgtggcccattatacaaaaggattgtctctgagtttgtttttatgacttatctttccttttcttattttattttattttttatttcctttttcattagtta

SEQ ID NO: 88006 - DNA, 974 bp, Citrus clementina
  Intron number 1 from transcript clementine0.9_020196m (loc us clementine0.9_020044m.g) derived from phytozome v7.0 (c hr-ID scaffold_34; pos 5457 to 6430)
caccagcagccaagaaggtaacatttctttttttctttttttggggggggggggtgaaatctatcaattgttgggttggcttcttacgtttttgctaatatttagtggttaattaaatgggaattattatttgaataatgacaaaagaatggtcaaagatgagctcgccggctgttgctcagtcaagcagcagtgctatttagagatcaagaatcttttttcagttttctgttcctttgcataactgatgagcatatttcagaatttaattatttttagttaatgaaaaaataaagactgaggaatcaggccgatggtgaatatttgcagataatttcgtaaactcttcataacaccagaaattttgtcctagttttggtagttgagatttggtctctttgttgcatcataactctctgttttcaacttaaaaattcataaatttcaaccgaagttggtgagggagcggcattaattattactcactacatcatctagattttccataggctttctgccaaaaagaagaaaaaataataataacaagagtaataatggtctttttttttttaaaaaaaaaaaaagaataatggtctttttgaaaattcatgtaataggtattatttcttgctaatcatatttctaattttataattaataataaacacagcatgagtgtttacgtgtttgtccttgtcattcatgtcaacacacgcatagaagatagaagatagaagatgtcttctctttttttctctctctctctctctctctctctctctctctctctctctctctctttcttgaacagtaagcactaatcaaaatccatatcattattattaaaatttcgacagttgctttcttattttgtgccttttttttctttacttttcgctggaatcagccataattcacactccaatattatttagcttttgcagactctttcatctcaataaagtttgaagaca

SEQ ID NO: 88007 - DNA, 768 bp, Citrus clementina
  Intron number 2 from transcript clementine0.9_031774m (loc us clementine0.9_031774m.g) derived from phytozome v7.0 (c hr-ID scaffold_22; pos 821876 to 822643)
gcagcttttggtaagcagcgtcctatatggtacaagaagtacataacaggctttaatttggtgttgatcatgacttacgtgcaattcttttttgttttttaaaaaaaatacaaattctcataaataaaaaaaatacaaatttggtaaacgacagtcaaagctatatatatatagagagagagagagagagagtaagcctcataagacggtgtgtgattcgttggagagctgtaatagttaaatagaaaaattaaacccaaaaaaaaagacaaaataattaattaatactttaacaccattccttcaggctatatcatttttctttgttgaagacagatgaatacggcttagtcgtaacttgagactgaaaaaagcacataaagcttaaaagcagtaacgcgagtgaaccctcatcatgatcaaccaaaaccggcaagataggatcacggaaaatctctccaccagctgaaaagacctggattacctttacagttactccatcagtattcaccttaattgataatcaatttcttcggatcccgaagaataagccaaacccaacttcttcatcatttccctatcaacaccataacaaacaagggaagctgcttgcaaagtaccttatatatgtcctaaataatcagcttgaatacaatactggcttacctgcacttccgtttaatgaaacacaaaaggccaattaataattaacgcatgattgcgagatttttaggtgaaaaacgagggaagctgcttgctcttttccca

SEQ ID NO: 88008 - DNA, 466 bp, Citrus clementina
  Intron number 1 from transcript clementine0.9_005125m (loc us clementine0.9_005125m.g) derived from phytozome v7.0 (c hr-ID scaffold_6; pos 6355331 to 6355796)
gcttcacttaaggtgcccatttttcataaaaccttttctttgcaatttcatgcatacatacatgaaattttgagttatcaatcgaataagttttgcttgatttgatcatattattgtatgtttgcataaagatttgaagaaagaaaagaattagggtttttggaaattatatagttgttgaagagaatctgtgtcttcgcattttcttagattgatgattgagtgatgaattctggttttcgttgagtaaattaattgatagagtgaagaactccggtttggtgtgaaaaaaataataataataagtcggtttttgattactttatttattttcaaatgctattattctgaattttattgtattctattttaattttaggtaacatgactttgagtaatgtgagggttctcaaaatgaaaggaaaaattattactttctctcttatttgaatgctttttcttctag

SEQ ID NO: 88009 - DNA, 1016 bp, Citrus clementina
  Intron number 2 from transcript clementine0.9_020179m (loc us clementine0.9_020179m.g) derived from phytozome v7.0 (c hr-ID scaffold_34; pos 124020 to 125035)
cttctccttcaaccctttcaacaaagaaagaggtaggattcttttattttatccccacacaacacatactttcatttgaagttgacgacatgcttcttgaaaataaactccatttttcatggatatttatttatttatagccgttttgcatatatttaaaagaaaaaaaaattctttcaggaagaaattatagagaatcaagctcacacaaaattgttctatttgtaaattaataagatggattattttagtttttatatcaacttgaagccggtatgtttagcttaatggggactgagtgttcatgttaagtagatgtatcaaagtttattaaaatgcaagcttttagtaatttttttttctttaatataataataaaccaacaggaaaagatatagaaaaggctcctaccaacccataatcaacgggatgccggtgaaaattaatgtgataggcaaggatatattacgagagtcaattaaggacccatttttccatgattgaagaaacttaaacatatgactagaatcgtcattatagactgtgcatggagagattacaaaaccatgaaaaggactcagttataagttaattaaccatggtatatattaaacctctactaattattatattatattatattatatacggctagtaattacgtataattttaattaattattctatgcgtcttcttggaacatgacgattcaaagcatctacgcagtcataaaatcagctcaaacccttcgagttctcttcccttttgttttccaagtaaattggccgaaaaacaagaaatatgtacaatgccatgttaatcaacgagagagaattattaattggctgggagaaccaatgggttacacacattgaatggggtctcctcttctgataatattaatgatatagcttgcaattgcctaaatttgatgtttagtgatttattttagttaaattgaaaatcttattttgagatgtataagtgggcgcaggaatcgagagtcaacttgatc

SEQ ID NO: 88010 - DNA, 247 bp, Citrus clementina; identical to SEQ ID NO: 81048
  Intron number 1 from transcript clementine0.9_004312m (loc us clementine0.9_004312m.g) derived from phytozome v7.0 (c hr-ID scaffold_55; pos 1042963 to 1043209 reverse strand)

SEQ ID NO: 88011 - DNA, 610 bp, Citrus clementina; identical to SEQ ID NO: 82868
  Intron number 1 from transcript clementine0.9_006565m (loc us clementine0.9_006565m.g) derived from phytozome v7.0 (c hr-ID scaffold_22; pos 679071 to 679680)

SEQ ID NO: 88012 - DNA, 788 bp, Citrus clementina
  Intron number 1 from transcript clementine0.9_008579m (loc us clementine0.9_008579m.g) derived from phytozome v7.0 (c hr-ID scaffold_80; pos 651805 to 652592)
ctgttcaatctgccaagtctctgcctccggaatctgtaagtttttttctactctttaattccttcatcacatacgcattactttttaagatctttgtttttttaaactaaaatcttgagatcttttactaataccgcctcgttaatcatgttcctttaggaaaatagttatctgttttatctcctttcatcctttctttaatataaattagaaaataaattttagcggctgaacaaactgccacgctgaaaaaaagaaaccaaacaaggaaccaaaatgcaactagcttagtctagtggcatttttcttaaaagttttgcatgcttgctgacgcttgatggttggtcctacaacataacagctgggtttgaatttaatattaaaaaataataaattttctctttagaaagatagagaagcaatcacaatccaacttgaatattctcaaataggaaaaacaaaaattgttgtgaaaattcaaagaatcaaagattccccccacgcgattaggaaaatgggaaatttcttagcacatcaagtttgagtcatttacaccgagagagagagagagagagagagagagattgaacccgatacgtctttgtaactcctgtccgcccacctcataaataataaaaataaaagaaaaagtccaaaccttgcagttattgcaagctgtgaatttgttgtcatttggtgtcaattgcatgccacaaaacgacgttcctaattttttttatttttttgtaacaggctagttttgtgatagcgaagatctcagcaatttg

SEQ ID NO: 88013 - DNA, 419 bp, Citrus clementina
  Intron number 1 from transcript clementine0.9_027699m (loc us clementine0.9_027699m.g) derived from phytozome v7.0 (c hr-ID scaffold_110; pos 452042 to 452460)
gctgcgaccccgtttttgatcttatagctcttcccgtatgtattgcagctcacctcagctcatgccaatttatgtgatgtttgtataattatagatgattattgctgatactgaatgttaagctaaataattcgttcttaagtcatcttcatttaattttcgattgaaaatgaaaaaataataattttaagcaaagaaaaatatagaaaatgtttattttgttttaattttcagggatttccttattgtggctcttatcattcgttatatggtcctagttaaatatttcaaattgttgtagtcagtgaaattcttttcgatatttattctggcatgtatatttttcctttcaatttcttttgttgctgattctttgattgattatgttatatccttttttgtttcccttgtagggtggc

SEQ ID NO: 88014 - DNA, 678 bp, Citrus clementina
  Intron number 1 from transcript clementine0.9_011555m (loc us clementine0.9_011527m.g) derived from phytozome v7.0 (c hr-ID scaffold_130; pos 242971 to 243648)
gaacgggcacaaagattgctacttatcaagaaaaggtctgattctttttcatgtaaagttttgatctttggttggtttgagagattatcaaatgggtttatttggtttatgatctgagcttgattctgggatctgggttttttttttttgttttgttgcctactggtagctggtttatgctcatttaagggtttgtgatctatatgattaagaatgagtaatcggattcattccaagatttgggattttgtctaaacaaatggaattttaaaggccgacacatgtgacttgctggctaatttggtaataaaataatgaaaaataataattttatattctttccttggtcccttgtttgattttccaaatgcatcatttttcgttttcttgtatggtatgtttaaaatatttaataaccctcttcctttccttacaagtccacacatctttaaatgtatttaaatatgcatataacattatactttaatgtgtatttaattcattatcgccggttttgatgcttcttgctcagatcaacaaagccagatgttttgccaagcttcagtttctttgtgttttggcaattaacatgattggccctggttttgtatactgattttcttgttgaatgctgatctgacagatatattttgaagtgtaatttggaattctgaggga

SEQ ID NO: 88015 - DNA, 939 bp, Citrus clementina
  Intron number 1 from transcript clementine0.9_028519m (loc us clementine0.9_028519m.g) derived from phytozome v7.0 (c hr-ID scaffold_48; pos 1233639 to 1234577 reverse strand)
aggctgcttctaatcaagtcgatttccaaaccaaggtaaaaattccctattaggacactaccgttactgatgaaggtcttaaatttaattgaagtagatgacatcggctatcaattgttttaagttagtacgttgcgttttagtagattgtggatcattataaagacataatgttagttttagcaataagcaatgggatacccttaattgcttttacgtctctactagtgattggacatgtattctgttgtttgctgatactttattccgaacgaatggttgcaaccatcatgtcctgttgaaatggaaatgagtagctagaaaataaactgtgcaaggatctgagtagctagaaagcaatgttgtagcttgttttattgatcaaattggagaattgctcatgaccatcttctttggcttagaaaatttagtttgtacatttagctttcttatgcatttagcttgcggcatgaccttaggccagtagatttttctagcatgaaagttgttttgggtcctcagtttttgctcaattttcttcaaaactgaatttaactgattgtggtatgcattgtttggaatttgcccttatcattgaacttggatatgaatacaatactatttatggcctagttttatttatttattttggagcacatgattcataattaatcttgtcagaatggcgttacagaatcatgaatttatgtaggatagagtgaaatagagtgaatttgttaaaatttcaacaggtaccttttgagctttgctttgccggtgctttactttgcttgtagtgttcatttagttgcctgaatgatgtgctacatgctagttccgcctcgttgtttgggcattggtatgacgaatgtgctcattttctgttttttctgttgatgccatatttaaaaggctgctgaagtatatagagaagtgaac

SEQ ID NO: 88016 - DNA, 692 bp, Citrus clementina
  Intron number 1 from transcript clementine0.9_013218m (loc us clementine0.9_013218m.g) derived from phytozome v7.0 (c hr-ID scaffold_19; pos 677439 to 678130)
ttgggtggtaagacttgggccagcccatcaacattgcatgcggcccgtacttgtggcacaacatgggccgcgtagatgctttgctaaggactaagcctttttgaagtaaaacacagtgtttttctgcattcgtttgccttttaatcgcaaggacgacttgtcgtacgcttgaaaacagaatggcatcaataataacatcgggtcattttctcaacaggcaaaaacttcatgattcaaatgtagtaatcccaatttaagttttttagagtttaatttaagttgataatttttgaaataaatgaaataaacccaaagcacgggctacacgagtgcaaagatattttttaccaagtatgaaaacaaaacagatgggggctaaaaggaagattccagaggtcaatcgtacgcccggcagatcatacagcaaaccaataaacttgaattaccaatttcaaaatttccctgcctcaaattcacaaggaggacaatgatcttgtttgtcttatttctttaattaattaatggctccaaagtccaaattcgtcagctcacttgtcgtctacgtgtcaagaaaacaagtgtccacgtgtctgagtgcaaatttcaacaaccaatattgccctcaggatcataacagagaacgacaataaatacgaggacaaagtcgtctccaaactgcacattaacacaac

SEQ ID NO: 88017 - DNA, 857 bp, Citrus clementina; identical to SEQ ID NO: 87544
  Intron number 1 from transcript clementine0.9_026762m (loc us clementine0.9_025310m.g) derived from phytozome v7.0 (c hr-ID scaffold_19; pos 2753721 to 2754577)

SEQ ID NO: 88018 - DNA, 782 bp, Citrus clementina
  Intron number 1 from transcript clementine0.9_013117m (loc us clementine0.9_013117m.g) derived from phytozome v7.0 (c hr-ID scaffold_66; pos 173764 to 174545)
agaagattaaacgcttttcctttgcttaatcaaaggtatgttcctttttattatctgtcctccaattttccaaaatctttcatatgaagccactgtttgttatttctgtttgtttcaataaaggtagaaactaccccccctccccccctttttttactgatgtagatctgctgctatacatgcatatttctttgtttggattaatctctgctttcagttaatattttggttttgaatcagcctgactcacaggttggtttctggaaatctgtcggactagagaatttttggcaatcaaatggcctttttactttttgtttttgcagtcatatgagcctctaaaaatcatttgtttgatctcgaacatcttttttaaaaattattggcattgttcagcttttaataaaatgtgatagtaggatctgtgataagtgtcgttgatctgaaattgctattgccccaatagttacagtgattattatatggatttaaacatgcttaacaagattcaaatggtaaatgatcagtctttggcatgtttggttaattatcagaagaagtaacaatcaagaaatggattgtttacctatttatatcatgtgacgaatggattgttgattttaattttttctggggtgttcatatttatctgtgaatttcatactgagttaagcatgtcctacttgaaaagattttgttttatctgtatttcttttgattgttttaagtattttttccttctcatctcctactatgatttctcttttctagaatcataaaag

SEQ ID NO: 88019 - DNA, 788 bp, Citrus clementina
  Intron number 1 from transcript clementine0.9_012209m (loc us clementine0.9_012209m.g) derived from phytozome v7.0 (c hr-ID scaffold_22; pos 351146 to 351933)
aagcttttggtctggtttcagccactcaaaaaagggtaacgttttacaactcttgtgttgtccgttagtgtctctttccttaattttgttgtgcttgtggtagtggtgggtaattatataatatggtgtatggtttcttgaattagtaagacaaagggagtacagaaacccattaaaccttttgacttttgagtaagcattggagaggaagtcattacatttacatgtacatgctttaatttagagccattttaaacaattaagaaggtggaaactctaaatttatgaaatgcatgtaaattgatggccttttcagtttgaatttgatgttaatacacaagtagttgatgaagaatgagaattttggtttcacatgaaagatgatcggtcctttttgagttagtacagcattttactctattgcttggcagcattgataagacatgttgtataatcatgtacttagcctaagggattggtataaataaagtgggagggaggcgtcactgcttgatcgaaagttcatgtttaggggtcaagcgaaataagataatggattgccttcatttatgcttgtgctgttatgaaacctatctcacaaatctagtagctagtaattgtaccatagtttttattcctgggctcattgcatgtatttatcacgtatgcatattttatgaaagaaaattagtatcttttgatatttcttttaagaaaatgagcacatgacgctaggttaattcacttatgtaggcaagtgcagatagttctgcagttgtgaaaaaggt

SEQ ID NO: 88020 - DNA, 697 bp, Citrus clementina
  Intron number 2 from transcript clementine0.9_012209m (loc us clementine0.9_012209m.g) derived from phytozome v7.0 (c hr-ID scaffold_22; pos 352868 to 353564)
ccaagctgctctacctggagtcaggagagattatagtaagttttttcttctttccccggttcttttttatgtatatacctatagtgtatgttactatttactagtatgctagcctttggggtttccctgtgtcatgaaaatgccattaacacgcctccttcatgcaggctattatgcagaccatgaaggtgaactgagaacagagttaggatgggagaacatttttgtttcatgacaataattagaatcccatcaatcaaaagtgtatattttagttgactgttccatgcaccggctgcatagtttcaccattcgagctgttattagtctgattgacaccttcatagtgatatattctaaatatatgtcaagctggaagcagctattaagttacaatacatgcaactaacattgactcaaaagtagtttgtcatgacttctaattgtttaacctctcatgtttgaacaataaaattaatataaatcagcaacttaaatagcctctaaggttttaagttttataagaaaaaaaagaatgcatcagaatgcaatttgcaataaggcacagtcaatgtctctcttagtgcactcttttatgaacaattacaatgcagtttggtctttctttggattctgacaactgataacaattcttcatacttcatagcaggtcacttcagttgtgagattgaagcgg

SEQ ID NO: 88021 - DNA, 700 bp, Citrus clementina
  Intron number 2 from transcript clementine0.9_000582m (loc us clementine0.9_000582m.g) derived from phytozome v7.0 (c hr-ID scaffold_19; pos 1643506 to 1644205 reverse strand)
tttggctgctggtacaggaattgcagcatttctacgtaagtgcatatgatctgttcctgaaattattacttcaacagtcgtcttttctttttctttttctttttttaagaaaataaaagttgagttttttgtttttaaattttttaattatgcattccgaatgaaactatacatgttaatgaaagtcaccattatataccactgctattcctaaccctttcagaattttttctttctttcttttttcttttttttttggccaaatgaaactgttaacgataatagttgacacagggtattatgcttgttctgtcaggttgcgagtgcttgattttgtggaaagctactgtaaatagaagttattttttttttaatgaaacttgaaaatgcttttagtaaaatcacctattcatccaaaatgaaacaaaagaaggtttaactattggtttgatcaatatcaaaagcacctgactaatgcaaaacaatcatttgccagtctggagtacttagtaatggcttgttctaactcttttttcccccttttttttttcttttctatggttacaaggcttgttatatcttaaatgaacagtttctagtgctggctgctgcattactcaaacgaatttgaaacaaaatgaggtgtaatatattcaattatttgtatttgttctgcattattgcagaggtgtcctgttgg

SEQ ID NO: 88022 - DNA, 627 bp, Citrus clementina; identical to SEQ ID NO: 78229
  Intron number 1 from transcript clementine0.9_004163m (loc us clementine0.9_004163m.g) derived from phytozome v7.0 (c hr-ID scaffold_9; pos 536943 to 537569)

SEQ ID NO: 88023 - DNA, 626 bp, Citrus clementina
  Intron number 1 from transcript clementine0.9_015166m (loc us clementine0.9_015166m.g) derived from phytozome v7.0 (c hr-ID scaffold_80; pos 254172 to 254797 reverse strand)
ctgtcagcttgctgggtcaggtcattgtttttctctctctttatttttattatttttattttaagcttgattggtactgaattttattcatgcactgttaatttgttgttgcatctggtgattttactctttttttttttttgtcaatcttgaagcttaattggtttgaattcttttggcaatatctgatttgtatagttcttggcttagtaggttttttttttttttttttggctttactttaaaggcgtcatagcatagacactgagcgaatacagaaagaaaattttatactgcatcttaaagaaaattaacgtggatgaatctctgcataattttactctctctatagagctttgcttatctctattctttactttttatttcctttctattaatctgcattgattccaacaggaccatattgccatggaaactccttaggagttcttatattgatacttggcaaagtgtctatagtgtaatgtgtttaatttgtaatggattcgggacatagttgcgcttctctttgatgtatatcagctgttggaagtattgatagtctttttgtttgtggatctcaagctgacttcattcaccttctttaattgtgcagggtgaaagtg

SEQ ID NO: 88024 - DNA, 880 bp, Citrus clementina
  Intron number 1 from transcript clementine0.9_003856m (loc us clementine0.9_003856m.g) derived from phytozome v7.0 (c hr-ID scaffold_32; pos 1831747 to 1832626)
ttttttttccatatcgatcggttgattccgctcaggtaaatctctcttatttgttttcattctttaaaaaaaataaaataaaatactagcgttgagttattatttgctttggtttttgatttataaaaccagctagaaaaaaaaaatgcctggttaataatcagctcatgtgtggacgcgtttttgtttatctgctcacctttctgggtaagaaattacgggtccactgtagctcgtcttgaaatccttgattttttttcctttatctaagttttcaaaactttttaacgcttttgagataattttcaatattttaattccaacttctgctgttgttccaatatctgctgctgctgttgatttatataatgtaattgttgcatacttgcgttggtatgacgatgtagctgtaatgttcttgatgtttatcctttcaaggaaaaatttaaaattttttgagctttgatgatgtacatttatatttgtatatgtggatgtccgtattgaccgtaaaatattgattgattgatcgattagtttttcggtttacttaggccactactgctttcttatgtttctttgtgaaatcgataagcctgttggcataatcgatggctgtttatggtccatcttacagtcatattcatattcatgccgttgcggtctaattgtatgcatgtcgatgaatggatgtatgaagtttttcatattcatatcgttaaatcaagctgcttgtgcaattaggtcaagttgtcttctatttaatgccttttatatggctgcatcatctgggagtttgtttaccagcaaaaattaatgttgttctccttgttttactgtggcaggtttgctgtctttttttttggaacgagaaagagta

SEQ ID NO: 88025 - DNA, 412 bp, Citrus clementina
  Intron number 2 from transcript clementine0.9_034065m (loc us clementine0.9_034065m.g) derived from phytozome v7.0 (c hr-ID scaffold_9; pos 3221919 to 3222330 reverse strand)
aatccccagttgggtcaatcgccttgccagaattggtaagggcaaatttcatggctaaattttttgttctggcaattatatcatttgattgaatttcccagttttgagtagcagaagaaaagataatcgtaacttaaattcgcttttaacattattgcaatattgtcgtgattattctgttagtaagatggacttggatcaagaattaggcctagaaattttgtcaatgaaactttttttcctgcattttctttgaaatttatggcgcttagtgatgtgtttgactgagacaaaactagtatatgttttctcatatatttcaatttctgggtttgtttatgattctcattttgacaatatgcttatttcttttacaggttttttctgcaattgtgttcttccggctacttta

SEQ ID NO: 88026 - DNA, 344 bp, Citrus clementina; identical to SEQ ID NO: 79139
  Intron number 1 from transcript clementine0.9_015330m (loc us clementine0.9_015330m.g) derived from phytozome v7.0 (c hr-ID scaffold_9; pos 2238433 to 2238776)

SEQ ID NO: 88027 - DNA, 693 bp, Citrus clementina
  Intron number 1 from transcript clementine0.9_012483m (loc us clementine0.9_012483m.g) derived from phytozome v7.0 (c hr-ID scaffold_2; pos 1270236 to 1270928 reverse strand)
cggcgccgcttgaccgtgttaagcttcttctacaggtgttgttttctatttagcactcaccttttgactttgttttttccccacaccacatgtataacgcttctcttgcaaaatgtgattttttttttcttttttggttgccgtcataccgttacgtttcaagttgttaatgtttatgttgcttctagttttgtgtaaaatgtgataaatgtactattcaaaaaaaaatgtgataaatgtagtctacgaatttttaaattttgttacaacagaaaattctttcgattatttgcatatagttcgccaattaatcttgtcaagattttgaaggatatgcatttttttaaaatttaaattttatgtacagaacctccaggctccagtgattttattttgcagctctgtgtgcaaagaattgaacaagtttttatcttgtaccaattttctgcgcaaaagagttgttggttcgaattttgacaaaatgctgacacctgcaatatagaaggctctttatggatgtggccactgatatcttaacatttccactcttattgatggctgaatgtgaatgtagggcacagatttattgggaccatgcatctactacttgaattgaataattgctcactgcttaaaatctaatttaatttgtctgcagactcacagcatcagagttgggcaagaaagtgccaa

SEQ ID NO: 88028 - DNA, 314 bp, Citrus clementina; identical to SEQ ID NO: 78764
  Intron number 1 from transcript clementine0.9_009999m (loc us clementine0.9_009999m.g) derived from phytozome v7.0 (c hr-ID scaffold_26; pos 2698537 to 2698850)

SEQ ID NO: 88029 - DNA, 692 bp, Citrus clementina; identical to SEQ ID NO: 87371
  Intron number 1 from transcript clementine0.9_026302m (loc us clementine0.9_026290m.g) derived from phytozome v7.0 (c hr-ID scaffold_9; pos 2081373 to 2082064 reverse strand)

SEQ ID NO: 88030 - DNA, 884 bp, Citrus clementina
  Intron number 1 from transcript clementine0.9_035053m (loc us clementine0.9_035053m.g) derived from phytozome v7.0 (c hr-ID scaffold_34; pos 1922789 to 1923672 reverse strand)
attatcttttcgtggtgagtagtactgtactttctctttcgatcgatcacagagaggcaattcatgatttacaaaattacacatgctgtgagatgcctatggatttcctagttgcacattttaaagatatttcctttgtttataattatttttgctttcaagagcttctttactatatttttagctttatgcatccaggatggagcccggctatgtcctaagcagccacggccccttttccaaaaaaaaaaaaaaaactcaaaatcaattgagagatagaaataactattcacatttttgcctcgagataggtttttattctctggctcatgctaattaaggtttattttccttttttttattattattatggtcccgagttttatatgtagttcttagacttggcctctataggctttgtttctttccatcctggggtccaaatgtcacacactctcatgggtaattaaaggtctataggcaggcattaggccgaatactgaaaatttaaaaagtatgtatttctggggcaagacgtaaaactcttaaagttcgctgggctagagaataaaaaaaatctataatttggattgaaattataaattatccgaattaaaaataaacatttttgtgaggtgctgctctagcgatcagtctctagctagcttcatgcatacctgagggacggggaatctatgcaatatcgtattcgattggctattgaccatttcttcccattttaataacgataaaaaaaaaattgaatcgcataaactaagaaatgtgaatatcgataaatatttttcttctttttcttcgcataaggatatactactgcataattaattttttgtgtaggtaaaggaggcttcatatacaaggct

SEQ ID NO: 88031 - DNA, 241 bp, Citrus clementina
  Intron number 1 from transcript clementine0.9_025259m (loc us clementine0.9_025259m.g) derived from phytozome v7.0 (c hr-ID scaffold_116; pos 59833 to 60073)
tcagcagccaaggtaaaagctttggttttgaattcagtaattgagcctgaggaaaaagaaaaaaagaattagtacatgatgatttctggtcatctttgatttgggtctttgatttctgttaatttaacttaattttctgggttagtttcttcagatgtgcttatgcgttattagttaattacaaaattaaattttattaattgtagagctgaaaagcagaatagagaagtatttggggggt

SEQ ID NO: 88032 - DNA, 817 bp, Citrus clementina
  Intron number 1 from transcript clementine0.9_019369m (loc us clementine0.9_019369m.g) derived from phytozome v7.0 (c hr-ID scaffold_19; pos 570175 to 570991 reverse strand)
atatctcttccatcgtacaaggttcggttttggaattttaatagttaccaacttattattatctacgtttatgtttcttcgttggactctagttttttttttctttttttttaatttgttattattgtaatgttttgcttgtcccatcattaaatttacaattttgtacgcgggttttgtaaatcaagggcaatggttcaattcagagtcgatcttgcagttatttaacggattttatactctagatgggattttattactgtctgttgtgatgggcatcctcattttgtttttatctttgatttgctgagttttgatgtttttgattaatttctttgtagctatttggtaatctgtgggaatcgatttttgatttctgaaagtaccatacaaagttattgaatgtcatacattccttgtgtaatttttatgtcaagtaaaaattgataatgccttaacgtctatgtgctagcaaatttaaaaatgtaaagcgatgggtcacttatgaggttacttgatggtttgataaatgaacttaaagtttatagttggtcttcagtaattttatttaccttgttttgtgttgagaacttttgtgattggtgccaaatggattagtggcttttttgcaaatgtagttgttacttataactttcggggattttattgcttgcaactgtaaagtactgcctgaatttgtttttgctttaataaggttattgaccatacatatattataattaaagatattgtttggctgacatttttgtgtgtccttgcaggcacattgttttctttaacctctaagacatcctag

SEQ ID NO: 88033 - DNA, 983 bp, Citrus clementina
  Intron number 1 from transcript clementine0.9_016797m (loc us clementine0.9_016797m.g) derived from phytozome v7.0 (c hr-ID scaffold_19; pos 2816505 to 2817487)
actaagtacttgactttcccacacaggtaaagtaaatcaatctttctttcttttctttttttttttcccaatttttttggtttcacttttctggtttgagtatggatgtgtgtgataatgagaacgtgaaatgtgggaagtcgagattactgatgtgattgttaagtttgctatattctgtggaattgtttgtttcagacagaatgttgtagaattgttttgtgtggagactggattgattttgaatctgttgtttggagggtgcttaattttggggaacctgtggtttgggacagaatgtagtttccgtataaagagttttatatatttttttttctagaaacttttttgctaaggcctaattaaaaaactcaaggtggatgtcgaacattgcatacatatagtgcaagttgatattttgtcatttttgtttgtgtaaaagttttatgtgagagtcataaagctgtggtctaactatggtgattttgatgaatttatgcttaattgcttatagcgtacatagatttacaatgtagattaattcagtttgatcgtgactgagtgaatgttttgaaacctgacagaaactgtcggaatgagtaaattgtttctaaatttgttttaaatggttcatttttcattgaaactacccaaatatatgcctttgctattcctttaaacaaatgatagaaacgccagtgtgatagaaatatagaaaagatgttcgttgtaacctgagttacagactttacctccagattgaaatatatgtggataataataatcctaccatatgtgtgcaaaagcatgctatccagattccaaatgcattccctttatgatcttgcttcttgatttgcatatctacccttaaactttacatatcgctgagggcatgatttttatgcaacatatttgaatgctgatgtatttatcttcctatgcacttactgattctgttgaacaaataaatgatagatctg

SEQ ID NO: 88034 - DNA, 398 bp, Citrus clementina; identical to SEQ ID NO: 78121
  Intron number 1 from transcript clementine0.9_002290m (loc us clementine0.9_002290m.g) derived from phytozome v7.0 (c hr-ID scaffold_22; pos 648698 to 649095)

SEQ ID NO: 88035 - DNA, 808 bp, Citrus clementina
  Intron number 1 from transcript clementine0.9_031225m (loc us clementine0.9_031225m.g) derived from phytozome v7.0 (c hr-ID scaffold_9; pos 1992046 to 1992853)
caggctgtttttgctggaacagcttcttcaggtacaacatcactttcctcctttatttctctattcatttctgattcaatcacagccagaaaagttcagtggcagtgccataacacgcagaatattataaaatctgcaagaacagtaaaccatactataaacagattgttaacagtaaaccatactataaacagactgcttcccttgtcggcaaagaatcaaaagatcgactggtttttttaatgtaaaaatgaaactttttcaagtgctgttgcataaagtttaaggaaacatagctctaatgtgcatgtttttgctttttggagaagtttaaagttgcatcattgcatgcttgagtctgggaaaagtactgtctaaaatttacactatcaggaatacgaaagacatatgcgcactttcactatttttcaaaacatgaaagaacctcagaatagcgcactcatcccctgttgtgatatcattttatatttatttcctccaatggcccgatagtgttttcgctttccaagaagatgctgaaaggttgcattgcgatttgccatatagttgataagttaccaatttatcataaatttggtgattggaaagagttaatgaccttgtgaaaccattagacatgtttcctgtggccaagttagtaccagaccagctgcgtcccctgcctgcatctagctcaagcaattcatatgacaacttttaaatttcagcgcatgtttcatcctagattcattagatcctttactctgcaacaggtgttctcgtttccatcttgaggattataacaaag

SEQ ID NO: 88036 - DNA, 906 bp, Citrus clementina
  Intron number 2 from transcript clementine0.9_012779m (loc us clementine0.9_012779m.g) derived from phytozome v7.0 (c hr-ID scaffold_86; pos 494960 to 495865)
aatttgcttatcaatatctctccagaagctccaaggtattctacatatattacatacacgcatttctttagacattttagtagtgtttagggttttgctgttaggtttatggccatgtttggttctttgggagataatacaaactacaaacaatgaagtaattcatgttcctctttcccgttaagctatctttgtttttcctctgaaacaactcatgcttatgatcacaagatggatcatggtagttattatcacagtgcaattgagaactgattggtaaggccagctctaatgctgtttttgtcatttaagtgggctgaaaactcaaaatggcatttgcttaaatttaatatcataagtattattgagatttattctacaaaattttaatgttatttcagtgggcaggcacctcacgtctcttcattcatgtacacatctttacttatcacaacttgtttaaacaatgtacacacatcttgcacttaatttggtgttaagatacaacttaaataactcttaaccctgttttatgtcaggctaaaaagttaagcttcttgcatggcatgaacatgcttgccctagctttaccttttcctcagcttttttgaatcaaaattttttctaaccgtcaatactcgtaatgatcccctttggcttattcctatgttatttagtataacgatagcattatcattccgtaaagattatccagtgctttttcttttctcctgctttccactttgcttgtcttgataagcaaaagctagcctcctttgccttttatcatacattatgacattttgcgttgcaaatagcactttttttttttcagttgcttgatgcattttatgtacatcacttcacttttgaattttgattattaaccttttcttctttgccagg

SEQ ID NO: 88037 - DNA, 776 bp, Citrus clementina
  Intron number 1 from transcript clementine0.9_005553m (loc us clementine0.9_005553m.g) derived from phytozome v7.0 (c hr-ID scaffold_19; pos 1684930 to 1685705 reverse strand)
acgactttcgccgacagtgcttcgattcggtttgggtaagttctttcaaaacgcttaaccctagctatatcacaactttttctctttatttttaatcattttacgcgtaattttgatcactcttatgatttagtaagtttccgagtttcgaattgaagaaatagaagttttcgagttctgatatcttgattgagtgtataaatatacgcacttttggtatactcttgatatttgatatgttaatttatctgggttggtgtcgaatttggaggtttttttttactcacttattgttgactgttgttggggggacgcgaaaccctagtttatttttcccttctgtttgatacttggatttggtgaaattgagttgcaagatttattattattgttaaaataagttttgggcggtgttatttcttatttttctattgggctttgatctatttcgacctgttgtattactagaggatttgggtgcgaatggtctaccaaaacgtagctctttcccttctgtttgattctttgggtttggtgaaattgagttgttggatttatggctcttcactaaattaaactttgggctttgatctactttagccactgttaatattaccagtgaatttgaggtgcgatctcatttcctgagtgtctcttttcagaacccagagtgtaccgataacattcttcgccataatcatacgattctgcatctaatggctcttgagatgcttatctgttgtaaaatttgtaacaggagtcttgctgagtgatcc

SEQ ID NO: 88038 - DNA, 896 bp, Citrus clementina
  Intron number 1 from transcript clementine0.9_024664m (loc us clementine0.9_024664m.g) derived from phytozome v7.0 (c hr-ID scaffold_73; pos 116287 to 117182 reverse strand)
tacaataattccccaggagaatcctgtggttacaggtactttttcttttccttaaaaatcttactcttccctcttccaattcaagaacatattgtttaagctaaacctaaattaaacaacttttatgttctaatatattgtctactctggatggtaactttgtttctatgcgtcaacataacatcttcttgtcggcaaattcatgatcatatatatatatatatatatataggaaaccattaaggggagtttatttttcttagtatcttgtttgaattgcagttagaattttgcttctttgtttctaaactaaatgatttttttttttaaaaaaaaaggcaacatattggtaaagtctaatttagtttttagttccttattttttaagatttgaaccgaataattaattaaataaaaaattaatcttttaaccttgggacaaaagagggaaaaaaaattttgaaaatcttgttttgttttcaaatatacatgtaaagactagtttaaaatctaaaatataagaatttgtttgactctttactgtcttacgtagtgtttagtagcttctccaaacccaaaaagtaaaaaaattgtaaataattagaataaatcaaggaatttttgcatacccccaacatgccaagattacttggcatctgcaaaaggcaaaatattccttgcttgtggttgaggatggatagccgtggaaactttttatgttaaagggcatgtttatggcccaattgggccgacagatgcttgtgccctgggcccaaggcccatgcaagcaataattcgatgcggtggtagcaaaaaatagtatgtccgcaatgattttacatggtgccactttttctgtagacactgataagcaacaaaacgtacgcccaatactc

SEQ ID NO: 88039 - DNA, 790 bp, Citrus clementina
  Intron number 2 from transcript clementine0.9_022200m (loc us clementine0.9_022200m.g) derived from phytozome v7.0 (c hr-ID scaffold_19; pos 2303187 to 2303976 reverse strand)
catatcttccaattccattccagcatttaggagaggtgcatctttgttgagatttctatttattttttttttcaataatgtgtacaaataaacgcatgctttgagtttcattagatatctaatatgataatggaagaatgtggtatttttgtgctttgctggaaagaaagaattttgacacaagtagttgagacaagggatctgcagctgttctcactttgtttgattacttttgctttctttagtttgtagaatttcacgtctagtccttagttgtttccctaggaatggttcttctgcaagagcaacaatattgatctcttgcatagaaatttctggacttcttattagctgtatatttccagagaagaggcttcttaattttgtgagtgcaggtattctttggattttggtacaactgcattctgaaggtctcaggctgttgtttctttgaatttaaaagcctaaacaatatccatcctcaatccccagtaaaacagttaaatgagactggataacaaaccaaacctcatatattctcttattacctgagactatttcattgtgaaccttttttcattagctatcatgatgttgaacatctaaattttatgattcttcatactctccaaacttttggaagatttctacttatgtcggtctttcttaaagttttgtatttagtggtgtttatagtatgcatttagtgccttaattgtgattattgtttcattagcaataattagctgatgaggttgcagggtcaatacctggtgtctcttttgagcaa

SEQ ID NO: 88040 - DNA, 947 bp, Citrus clementina
  Intron number 2 from transcript clementine0.9_030948m (loc us clementine0.9_030948m.g) derived from phytozome v7.0 (c hr-ID scaffold_2; pos 3834525 to 3835471 reverse strand)
ttggctcctttttcgaacgccttgacgctactaaggtaaacaacaataaacataattttttttcctttttctgtgttattaaaaaattcagatttttcttcttttttttttttttaagttttttctcttgtgttgttgagctgaaaaatctgtgccgtcgaatgaggtgtacgcattttcttcttgtttttttggacggtggtgatttatgatcgagggtcttttggatttttgttactgagagatggcttggcccagaacggcctatttgactctgttaaccgaggccattgccggcccacgtgcaggcccggctccgtataagcagaaatcatctccagtcacattcgagcccttgtttatctatattttgttatctatatataattttgagtttcagacgtaactaacggtctgaggttgaaaaaaataaattataataaatataatttacaacaaccatgagcaaggatataagcttgtaagaattatcgaatgcaaataccaatatttaaattctaatgaagaatctactggctaaaagacaaaaaagaaaattccgctattatgtattttagtgcatctgatgtttgtatttttttgtcttttagtttggtcttcaatctttattttattacaataaggaattcctcaatagaccaactcatccatattttgctaaaaatgtgacatatttttcgtcactttgtaatttttggtacaaatatctgtctgtgtttaatcagaatagagacatgggtttagacaattagtctttttgatgtggttatataacacaagaaagtttcattccatcacttttgtaaccaatctgttatgattcttatttctaaatttattttcttttgtattatattggaattttttggacataaatttcaaatcctgcaggaaacacccgattacagaaggattgttcgacaaca

SEQ ID NO: 88041 - DNA, 891 bp, Citrus clementina
  Intron number 2 from transcript clementine0.9_006545m (loc us clementine0.9_006545m.g) derived from phytozome v7.0 (c hr-ID scaffold_34; pos 1873881 to 1874771)
atctgcagggaggttggtcctgttgtgtcattcaggtcagttttccaattttatttttttttttggggcgggtggggggttatttttatttttttttagtcagctcttgtcattatagtttcctgatatgcttaaactgccatgaaacttgtactatgagtttaagattatttggcgagcgatttaagttaggtgagataatgcatcaagtgcataaattgaaacccaaaagaagaaaccaccttgagtcaaagcattacaagtaggttttgtgattttgtcattatatgcttatgataatatgatagaaatagtccatgctcttgatattatgtcctttagaaccttttttttattaactgtaatcttttagtgttgttcattttgatattttctggcttttacttgatgttgctaagattcatgcccaactcttttgatttcctctgttctttcttgcgttactgttttatttcagttttaccccaattaatttgcttaaactgttggtggaatgagtttgtgattgttggtaagaaaactataattaattcattgaaagcatttgaaaaggatgtcccacttttcaagtcaattgcatgtaaactatgacgtcccatgtgtcaggatccctgtttcataagctatatacttatatttaattcgagcaatagttaaagctttttatgaactatgctcgttgtcaacctataaatttgatataaacttgaaccttcttggcaacatagaataagcgctgattatactctgggtttgcctttatttttaatttcatttttctttatcaaaatggtaacctgttggtttaaactatttctgtttcctttgctttcagattagttattgatagagaaactggaaaaccaaaag

SEQ ID NO: 88042 - DNA, 447 bp, Citrus clementina
  Intron number 1 from transcript clementine0.9_021972m (loc us clementine0.9_021972m.g) derived from phytozome v7.0 (c hr-ID scaffold_6; pos 2614877 to 2615323)
ctctttccctcgccgtcgtgacgacttcttctcaggtagtcgtcttctatttcccgtccccagccctgtttcttttaaaacgctaatcttattttgctgttgaactaaaaatgcttggcggcgttttagtgtgacagagagaagaaataaactaaaaacagctatttttactcgctatcagaaaccgataattccttttaaacgctaatcttatttttctgctgagcggctgtttggtgtgacagaggaagaataaactcaaaagagctattttacttgttattggaagcagatagttcattttttctaaaatgaattttgaaaaatataattctaagaaataatcgttcgttaataccatttgttggaaacaggccgatgagtttgattagattctttctcttggtctctgtgatagtaattgacatttattttgtggtgcaatag

SEQ ID NO: 88043 - DNA, 534 bp, Citrus clementina
  Intron number 2 from transcript clementine0.9_007281m (loc us clementine0.9_007281m.g) derived from phytozome v7.0 (c hr-ID scaffold_55; pos 263237 to 263770)
aggttgtaagtatgattccatcgtttcaatttttcgcaatgagttaatccattttttacatacgaatctcttttaatgaaacctttattttgagccatacagtgttgattggctctatttcaccattcttgtggtactaatctagcccatttaatccgagataaatcatattgataatacccgcttaaccagtgttctcatggattccttccaaaatttcaaaagggtttatgtttaattggtaattagggattccgtatttaaaaaaaaaaaatcttttatttctttcttaagaaatagagatgttccatgatattgaataatgggttttcaatcgttctttcattgttattgaaaatattgattcttcatatttttgttgtataattttgtagtcatcctacgattagagatctttgtttattttatttataaagtgtttgatggggttgtttgtttgataagtagtctcattttgattctcgtgatttgattgcagaccttagcaccaccaaggcttgagagaagaagagt

SEQ ID NO: 88044 - DNA, 921 bp, Citrus clementina
  Intron number 1 from transcript clementine0.9_016344m (loc us clementine0.9_016344m.g) derived from phytozome v7.0 (c hr-ID scaffold_32; pos 1825642 to 1826562)
tcaaggtacttcgaatcaagtttctgttatgactttttattttcttgttcagctaaaattctgttgtgttcggggtaaaaatattttgttgctatttctgaagtacactgacagatgaaacggtagtggttttttagtgaatttaaatgcttgaatattttttctgttgtaaaccactgctttggtttctttttaataaaatctggataatgtgttgaaaaaaattgttcattttaactacggttgtagatgtctgaactggaattcatactttttgctgcctattgtttatgtgagaattgttgaaatttgttctgtcggagactcttgctgatcgttgagcatgttccattttctgtgaatatatctctggcagatgttctttattgtagactacgagcaggttgaagcataacttaagatcttaattgtctgtctcttttgctttatccaatttggtagcatcatttcacctaaatttattccacacctgacctcgttcgtactctcttcaattagttgagaaagtggtcaagtctttaacttagcaagcagttagctctatatataacctcacattagtgaaaaatgtcacagttaatatgtacaaataatctacctgtactcctttctcataatcttcttattgtactgctctttgcaacctccaaaggtggtgctatttgaactttggaaggtatttttattcaatttatttttttatctactcatttagttcagaagttgagatggttttactttcttattcatgggacatagagaccaattgatttgtgcatgttataataatccatttgatttgtgcataattgtagttatttttcttgtgttgctgccatgttatctcagttttaacctgctgcaggcctcttttgtcctctgccgaatattcgtcaaatc

SEQ ID NO: 88045 - DNA, 367 bp, Citrus clementina; identical to SEQ ID NO: 82315
  Intron number 2 from transcript clementine0.9_024348m (loc us clementine0.9_024348m.g) derived from phytozome v7.0 (c hr-ID scaffold_147; pos 173574 to 173940)

SEQ ID NO: 88046 - DNA, 1066 bp, Citrus clementina
  Intron number 1 from transcript clementine0.9_027119m (loc us clementine0.9_027119m.g) derived from phytozome v7.0 (c hr-ID scaffold_17; pos 1182042 to 1183107 reverse strand)
ttcaagcccttgaagtgacaccctttagtcctaaggtgagttataatatggactccatttgcagtgttgttttatttgcgtgatgagtaatgatcttatattaatctagtgggcactggtgctgaacttatgatgggcgacactgtcatgtaatactgcctggttaatttacagtttttggtagcgtttgtttttttatttgaaatctaaatgggtttgaatttttttaaaatctaaatgggtctgattataaaaatatgaacgacatgtttcttttttttttttaaatatctgaatataaatggcattttgtttgttttcacaataacaaaaattttaaatttatttatttgacatttatgtccttgtaaattaaaataaaaaaagaggattagattttgtagtttaggaaataaattattttatagagatatttttgcaatataatatttagttgtcattcagacctttttccattaagataaaagtcacaaaagtttactttttccatttagatgtaaatgtctgaaaatcaaacataagtttcaaaaaaacaaacaagcatattttaaaaagtcttaaattaataaaatttcatattttagacatttaacaaacaacatctcagtgtcactagatcattttcctttgcctctcactgtcatattttcatatatgcttgataattattttggcacttaggtgttttagttctgcttttgtagttaattctaacaatgggtactcacatttgtgttttttcacatttaaggcatggcattttcttattattattggggtgcacctgaagaatctattattaattgatgctgtttatttatgccatgttaccggcaattgtggacctctgataagtatcagggcaatgtgagaagaatatcaatttttgacttttcatgcgtgagttgccttgcttgtatggaatttaaacaacttatttacccgctcaattgaatttttcagttttgtttactcttatacggggtttggattatttctttatggaacagagggtaaacagggacggagcaggagaaaggaaaga

SEQ ID NO: 88047 - DNA, 835 bp, Citrus clementina
  Intron number 1 from transcript clementine0.9_022312m (loc us clementine0.9_022312m.g) derived from phytozome v7.0 (c hr-ID scaffold_48; pos 1429554 to 1430388)
gaggagaaaactcagagaaaggtgaccgtctttctgctttctaatatcactctcatatgttttgtctaccaacgagtgtattagcgcatatgagaaaaacttatgctcacttttcttaaagccgttttgcagaaagaaggaaagttgaaataagccaggatattttattacttgacacaaatatgagcattgcgactcgagaaacaggtaacagtaaggaatcatgtttgccatttttcagcttggccagcataactgcagctacagataacttctctggggaaaataagctaggagagggcggctttggacctgtttacaaggtagcaatctaatcactttaactgcaataaacagagtatagagtgttgtgttgaaatacaaaattggaagcagggaaaactaaataatggagaggaagttgcagttaaaaggctttcaagtcagtcaggacaaggcctggaagagtttaaaaacgagatgatgcttatagcaaacttcaacacagaaaccttgtcagactctttggttgctgtattgaacacggcgaaaagattttgatatatgagtacatgcctaacaaaagcttggattgtttcctttttggtatgtgatttttgtcattcattcaaaaaaacgatttgttctaacctgtagcatttatgattacagatacacctcatataattgtttgacgttgtaacagatcccaccaagacaggtcttttagggtgggaaatgcgtgttagaatccttgaaggtgttgctcaagggcttttatatcttcaccactattctagattaagagttattcatagagatctcaaggcaagta

SEQ ID NO: 88048 - DNA, 587 bp, Citrus clementina
  Intron number 1 from transcript clementine0.9_024760m (loc us clementine0.9_024760m.g) derived from phytozome v7.0 (c hr-ID scaffold_46; pos 1600358 to 1600944)
acagaaccgtcaaaaacgaaaaaccctcggcccaggttcgtgctgtgtattactctccctcttcgctagctcagatacttcaaaattatttttatttaagtttcgatatttgttaatcttacttcatgatttttttttaattttatttggcttttaattaaagctctgttaagttcttgaagaattaaataactttggtggcggtagcttgaaccagcataatactgattctttgttcaagactttagaagttagagcttaagggcctgtttgtaagaaaaaattaaataagtacttattctataaagcacttccagtgcctttttctgttcaaaattgctttttagttgaaaattaaaaatgaaaacgagagaatgtatagtaagcaaatcaaatacgggtattttttatatctgatttttacagtctaggttgtgacttgtgaggttgaaagggtgatagtgaatgcttatttgtttatgggcttgtatgtatttttgtatttgtgggaattcatgtagtttctttactttcttctttgtgtatctgtaggttacagttactgctgagggattttgttttttctt

SEQ ID NO: 88049 - DNA, 824 bp, Citrus clementina
  Intron number 2 from transcript clementine0.9_024760m (loc us clementine0.9_024760m.g) derived from phytozome v7.0 (c hr-ID scaffold_46; pos 1601013 to 1601836)
gcaagaagtttgacaagggtatgatttcagatcctcgttgtcggttcaatgcatgatttcattgtctgttgagaacttgggctaaaaaccttggttttgtgttaacataatatcctagacatgcaaaatttgatgattgctcagctggtgaaactacatagtcattgacctataggatgagatgttgagtataattgattttttacctgcactgaatgatgtctgaatctaaactatgatgctagtctcgctaatcagtgaaaagaatgatctagaagaattactagcgtcgtcacatttccctgctctgcacttttttctctttcctacttcgtaccgtacacatttcgaccttgttctagttgatgaagaattcgaggttcagtattgggaagttctcttaaagtatctgaaaattgcttgcaattacagaaaagtggtccacaatgaacatctcaagaaagaattatattatgcttgaacttatttggataaaaaggtttatgtaaagattagatttaagttttcattgatctttaatttggttgtgggctgacatgaagtgatttttttgttcagattcctatttctacataatagagcttttttcttataatgcagtttattttgttaatactgtgttaaaatattttgctctatgatgtgccacacatgtttttagtcttatgctggtagttttcaccaggtgttcgtgaactgtttaacatttaattcatagaatttctttttctgtgcatattggacttacattttgatgtcattgtatagtttcccgcattgaagcacatagtcagaactgtgac

SEQ ID NO: 88050 - DNA, 647 bp, Citrus clementina
  Intron number 1 from transcript clementine0.9_003163m (loc us clementine0.9_003159m.g) derived from phytozome v7.0 (c hr-ID scaffold_32; pos 147602 to 148248)
aaatttcacttcattttcgctctttcactctcgtatcgtatcaaacacgttgaatcattttgatctgtgttagtctttggttgtttcagcgtgctttttattatgtattcgatgaaaatgaaagctaagtaaggaggctgtttcgtgtgtttggtgctagcgctatcggctgtaaagaaacagaaaaaaaaaagaaaaaataaaggtgtttttgttgttttcttaaaacagtgtttgcttattcagaaacagggttttgtgctcatcaatttctgggcttttgtttgattctgtgcttgaaattttaagcatttttttttttctatcgagtcgttcaactgttcgaagaaaagctcagctggtaaaaatagtaatattattatacgtatgtgcgtgtaggttcttttgttttatctgttcagaaaaatattagaatacagaaggacaatatgttgttgggtttttatcttttgctttcatattttgggttttagccggaaaaataaattgtaataatctggcattttctaggcaacgaaacagagtttgcattgctagtatttgcattcaactttgaaatactgatctagatttttttttttttttgggtacttttgcagactaaatctggctctgggtgcttagca

SEQ ID NO: 88051 - DNA, 572 bp, Citrus clementina
  Intron number 1 from transcript clementine0.9_024571m (loc us clementine0.9_024571m.g) derived from phytozome v7.0 (c hr-ID scaffold_2; pos 5350152 to 5350723)
tttgtgatcaactctccgtgtcatcagtagccgtaagccgttctcatctccctctcctgtcattttcttttcagttagttttgagttcagatgcaaaacttccttagcataaataccgtgtagttgtccaaaattttttgtataatgtttctttctctaaagaatggatgacaaaattcaattgaaaagtaccctttgtaatgttaatatgaagagactaatgacgatgatttagtttttgttttacaagcaaatcgttggtcttgcttacctgaactccgagaatctgtcagtgacagtttcaatttttgcaaattttgtgtctttattttaattacttaattttaataatacacttgttcttgatgatgttatgtagtggactttctgttttccaatttgaattaatattaaggaatatgtgtgcatgtaaattgttttgatgtttgccatgttgatgttacatttattagtttattaaagagtaatatttgagtatcctgtaacacttttacttttgcacgatgggttttccagtcaagaagaaagaccagagagcctaaggaggaaaa

SEQ ID NO: 88052 - DNA, 403 bp, Citrus clementina
  Intron number 1 from transcript clementine0.9_008426m (loc us clementine0.9_008426m.g) derived from phytozome v7.0 (c hr-ID scaffold_9; pos 2690866 to 2691268 reverse strand)
caacttcttaccagtattgttttttgtatttttcagttgttcttaaaattaaaaaataaatttctcattatatcaataatcatttcttttgatgaattattcaagccggaatcttggataatataaagaaattgtttttaccctattggtggattttttatctattctatggcgtttagcctctaatctttttctttaattttatcctcctttttgttttctctctcccatttttatagaagagagtgattgctttctgttagtcccgtctctttaaattcaaaagaactaaagctacgagcatgaaaataacttccaaaagaaaaccttacacactaatgaccctattccattttttaattcctcagctgtggaggtttcaaggcagcaactacaagcctac

SEQ ID NO: 88053 - DNA, 828 bp, Citrus clementina
  Intron number 1 from transcript clementine0.9_018614m (loc us clementine0.9_018614m.g) derived from phytozome v7.0 (c hr-ID scaffold_19; pos 3404898 to 3405725 reverse strand)
taggatcgcacaggtaatgctaattttatttttccgatgaaagttaaaaatggttattaaaaaatgtagatagatatcaacttcttttagcatttgatgtgttttttagtcattttatttttatttttttgttattttcaattaaaccgtatgtttattataagataaatgcaataaaaccctttgaggatacttaagcgctctctttgtctaagttaatttttgattttgtgatccagtcattttgttttgaattttttttttcgttttatctttttcttcctatatttttaaaaaagagaggagccatatttgcagtttgttcaataggataataggggcccttgcagtcgacgaaaagtcactatgtaactaaatgatcatctaattgaaggagttcgggggatttagatgcaaatcatgccccagaaattatgcttaaagtcaggatagataatttctttttttttaaaaaaaaaaaaaaaaagtcccttcaaagaaagtgagaaacattaacacgatcaagatatttgctagttgctactctgaatctttcttgggtttgaagcaacgcaaatacgatataactgcaacaaaatgaaattgtttaccttttgacatctgaaatttctgttgggatccatctgtgcacacaatatagcttccgaaatgtgaaatatgcagccagagtttttaaaatctaaatcttgaaattctgtatttcaaggccacactatttcctaatgtagctgcgtaattttgtacttttaatgatctactcttccttgcttttgaatttacagagtcttctagagcccgacgcagcac

SEQ ID NO: 88054 - DNA, 642 bp, Citrus clementina
  Intron number 1 from transcript clementine0.9_008177m (loc us clementine0.9_008177m.g) derived from phytozome v7.0 (c hr-ID scaffold_34; pos 1801138 to 1801779 reverse strand)
ttgcctcttgttcaggtaaatttttgtttctgtcttatgatttgtttgtttggctttgtgaattttggctcaagttttgacttttggtctgctacaaaacattcatttttattcatttgcgtgttatttgagcaactttggttttttatcacattttactgtcatttgagcaattttgggttttgattacattttgctttgtgggtcgtctaaaagggattccatttggttcatttgtgtgttatttgggacaaatttgattttgccattttttcttttcaggttagattgaggtatgagtccaagatgatgttttattgagttttgagtctcttgttagctttctaaacatatacactgtattgtaaattttatttgttttttcatttttctttttctttttttgcttgattcatataacttttgactttttttttttagtgtctgtaacatgctgtagctttctgtgtgtcttttcagaaaccccatccttttgattggggatatgtaaattcatcaaaatgtatcttatttgttgagttggattttcaagattgctgatatctggaatatgattacatactgcctgtgccagaatcagagtttcacagtagaaatttttgaatttgcagttgctgagac

SEQ ID NO: 88055 - DNA, 681 bp, Citrus clementina
  Intron number 1 from transcript clementine0.9_014240m (loc us clementine0.9_014240m.g) derived from phytozome v7.0 (c hr-ID scaffold_26; pos 2751560 to 2752240 reverse strand)
ctgctatcatcaaggttagtatttgattaattgccggtaatatttcataataattcggaagattaattgattaaaacatgtttattaatgaataattaagattgttactttagggtgatttctgtaactatcgtgtttcaacttaacttcaaaatggagattcccaatgttttctatctttaccctcaattacttttaattatagttttgataatatattgttactcctttgacatcatgaaaactctcggagaaaaactcatcccaaccacaaaattaaataataaacgtggtgttacaaaaatatggagagataacgataaaagtcgaaattaaaatattaggggtggcgattttccatttcaataatatgacaaataaatcatttagtaaaatcaggtatggagacaaaattaaaaataaataagtaatgaagatatttaataaaaacaatctacgcttgacaacaattgtatcattatttttaaaaataaattttcatttaaaatcacactacctcactcccaaacaaacagctttttgactgttattagttaacttaatagaaaatttcgcatcatgatgttgttcttttattttattcataaatttatttttttcttagtaagtgaaagtgagttcaagccaactagtaattttataaattgtagtgggttttgc

SEQ ID NO: 88056 - DNA, 349 bp, Citrus clementina
  Intron number 1 from transcript clementine0.9_010618m (loc us clementine0.9_010618m.g) derived from phytozome v7.0 (c hr-ID scaffold_2; pos 2391470 to 2391818)
ctgacccttctccctacaagatcaatcttggcgtggtaatgtgtttgcttctttctcattcagttggcattatcttgacacaaaatcacagatttctgcttttgtaatgactgggtttctttcttcttttattttattgtatgcatgtttgtgtaattttatcttagtgtcttgaattcaagatgtcaatataagaaatgtaaaagtgacaactatgtatatttctcttgccaaaagtgctgttttggcgctaaaaaaacagaaaatggtaataatttattattacttgcttaatctttttcaagttttgatttttttttttttaaatctcggtagggagcttataggg

SEQ ID NO: 88057 - DNA, 548 bp, Citrus clementina
  Intron number 3 from transcript clementine0.9_032321m (loc us clementine0.9_032321m.g) derived from phytozome v7.0 (c hr-ID scaffold_6; pos 4754024 to 4754571 reverse strand)
caccaacattttccgtgaaggtggctttttgagtattaactaactcaatctttcaccatgtgcctatttatcttcttgaattttatgtgtgtaataatttagaatgcttttgttgtatgagtaacacatgtagtgtgtgtgtgtcaagtttgagttttctgcttcccatcaagtgatatttgtatgtaagttgtggcttataataatatgtctcacttctattgtgataataaaataatctgttggatgaaaaaataattaagcacttggtaaattatagtattctactatgagttacggaaacagaatttatgcatttaaaaaatatttgattactaaggagttgtaatttgttgtatgatagattttaagttatctaaactcaataatagacattttcattacaaaggtacttaacaaaaatagacgagattaccaaataaaaaagtttcaaaattagtaaacatgtgatcgatagtaattaattgtggtcttgctaaaattcttttctgtttattgcagttattcttggctttgttggtaaatat

SEQ ID NO: 88058 - DNA, 414 bp, Citrus clementina
  Intron number 1 from transcript clementine0.9_007127m (loc us clementine0.9_007098m.g) derived from phytozome v7.0 (c hr-ID scaffold_2; pos 4394573 to 4394986)
tcacccttgtaatttcgaagaataaatccaaggtgattctcacattctatttaattaattttctgttattttgatttcctttttgggtaaatttatgtctatgaattggaattttgagtaactgtgttgaaattgaggcaatttggtattttggttatgtttaattgaatgcaatgctgttgatttgaattgaaattttgatctaagaagttgacccatttgtgaagactaaaggatggttaaaataaatatatgaataatcatacaagaatctgatgactcaaataatttggtgcctctgaggattgggctgttcatgctgagggttggactgtttttgttttttttttggatcttctagcgtaaggtcacttatagtggagatgaaatttgttttacaggtaacagaaagca

SEQ ID NO: 88059 - DNA, 852 bp, Citrus clementina
  Intron number 1 from transcript clementine0.9_016438m (loc us clementine0.9_016438m.g) derived from phytozome v7.0 (c hr-ID scaffold_22; pos 2313226 to 2314077)
gaagattttcttggtaattagaatttcgtttgtggttgtgtatttttctagagatttggccggttttatgacgagtgttatttgtttactgccagaacttttgtccttatgcgcggcatatctgtttcttttattttctttagtttaattttgatgagaattcaaggattgttcaagagttcatgagctcttttctcaattgaatgttttgatttgttaaaatcgaaagaagtggaggcggagatagagaagtaaatagctgtaattcttggtaggtttatttttattttgatgagaatgcaaagatggtttaagagttcatgagctctgtcccattatttatttatttatttattattattcttagaaatagaattttggtttccttttttctattaattctgaggtgggtattcgtagttgtgatcaaagatataatcaattatttttaagtgcaaataaaattttcttgtgactcgtctataaggagaactgctttaaaattttagctactattggtttagatgttattatggagtatgtgctttttccataactaatgtttgatcaaatggtacagttggtttgcatctttgagttctgttttgatttttttttctttcgtttccttatttcaaggatttcagttcctaaatatttgtttctcttctaatagagtttattagctggctatgttatctttctctggactagtcatctgaatatgactcttaactacttggtttctgggtttgtttgtttctcgtttttcaattatttatctgaatgttgattactttgtttgatcttgaaacaggctctcataggctgtcttgtgttaataactcgatt

SEQ ID NO: 88060 - DNA, 419 bp, Citrus clementina
  Intron number 2 from transcript clementine0.9_032295m (loc us clementine0.9_032295m.g) derived from phytozome v7.0 (c hr-ID scaffold_19; pos 2810978 to 2811396)
tgggatctctagggaggattattcttccaaaggtgatcagcccttgctgtgcttatagctttgctttcttagtcggtcaacttttgcttattttggtcttgcgttcttttactccaatgcaatgaagatgattatgatagacgggaaagaagtaaatgagccaaccgtaatcattcatttgatttactcttattgaccactacatcatagttgtgcatctactctgccgaataacttctcttcctgacttctcgattcttgcacagaaaataaagcaaatgggaaaaaggaaagattattaatgacctctcaaaaaataattagccttattatctatatattcatgataattaagtcttttttcgttttttttatttaatccagagagaggctgaagaaaatcttccaagtctttctga

SEQ ID NO: 88061 - DNA, 950 bp, Citrus clementina
  Intron number 5 from transcript clementine0.9_027496m (loc us clementine0.9_027496m.g) derived from phytozome v7.0 (c hr-ID scaffold_36; pos 2238809 to 2239758 reverse strand)
gtttgctaagctgtgatatagtgtaagtaaccgttattgttacatttttttaccttaatctgtgcaatatgaattaaacttttatctttgattacaagggctgactgtagattatttaaggccttaggcgttttttttttatggggcctcttcttattttgcaattttaattctcaaagaaatataaaattccatgtttaattcttgaattttaatagtaatgaaaagatttttaaaaatttcaaaaacaaaacctaaaaaaatagtcaagaagatatattttttactttcattagaattattacaaaaataaacaaacaaataaagaagaacaatattattttcaaatagaatatttagaatggcagcacatagaaagttgaaatgatgaattgattatcagataatagatatggactttgtattttaagaaactatttttttttcatttttaaatgtactaattttctttgcaaagaaaggagaaagaaattttttatctattgattttatatattataaggttctaagagaaactaaaaggaatattgaaagtcaaatatttaaatgttaaagaatcaagttttctttaggaaactgaaaatgtaaagaatttaattttatcttggaaagactgataataaataaattaatggttaaataatattactaattatatctctttaacattaaggttatcaaatattgattttctataaaaaaaaaattattaattgcagtatagttgttaattataaagatgtctaataagcttttctacaattcataatttaaaaaaaaaaagcctttgctaatcagaaaattattaagaaactactaaaaaaatgaggccttcaagaaatatgggttttaagaaaccgcctcgttcgtctatacttaaagccacccttgttaaattcttaattaatccaaatctttcaggaaggatt

SEQ ID NO: 88062 - DNA, 493 bp, Citrus clementina; identical to SEQ ID NO: 82565
  Intron number 2 from transcript clementine0.9_016074m (loc us clementine0.9_013346m.g) derived from phytozome v7.0 (c hr-ID scaffold_80; pos 52205 to 52697 reverse strand)

SEQ ID NO: 88063 - DNA, 843 bp, Citrus clementina
  Intron number 1 from transcript clementine0.9_020996m (loc us clementine0.9_020996m.g) derived from phytozome v7.0 (c hr-ID scaffold_9; pos 2330693 to 2331535)
tcagctccaaacacattgcttttaacattaagagggtacgtgtttatgttcttgttcactactgttgcatgattttcatcctttcgacaaatttacatcattatataccgtacgtatcggtaaaggctagccatatctagctacatgtttggtttttgattttcgatttttgattttcttggttgattctgaactctctccctctttcagatggtcgccattcatcctaaacgtatggtgaccctagttatcttaccctcatgagatgaggagtctagaattttttaagaccttgtttcatgtatccattaatatttgtgtacgaccgaggttactattatattttcatttattaatcacattaaaatttcttcagaagaaactgaggttgagagagaattctaattttatataatataacgtatttttatataaattgttatatgtcaaatacttaattattatttcacttctacgtagtaatttataccaggactcagtatttaccgtatcaattacaataaaaattttatatttcaagttgggagctgcaattaatgaccatatacttttttttatcttattattgaaattgaaacgtagaattaatgatattggatccaacaacccatgtgttcaaaagcagtggaagctataattgtaaattgctttcagctaattaatatcaaaactctctctctctctctctctacccatgtgtgtacaagtgcaacagtgacaatgtctataactgtcttcatctaatcatgtgctctaatgttataatatatggttaacaataaattaaattcactctcttaatgcaggagttcgataaagtgt

SEQ ID NO: 88064 - DNA, 1047 bp, Citrus clementina
  Intron number 1 from transcript clementine0.9_007608m (loc us clementine0.9_007608m.g) derived from phytozome v7.0 (c hr-ID scaffold_19; pos 62860 to 63906 reverse strand)
tccagatacctcgttaaaggtggtgctgatattaggtacagcagtatatttaatatctttccgctcctccctccctccctccctccctctccatctttcttttttctttctttttcgttttagctacaaaataaaatttaaaaaaaaaaaagctgatatatttcttgcaatgatttgctgcttggtgcttacttgcagttttctggggattatctactagtaaggtttctatactaaacatatccaagttctttcttgataaccacaatctgactcacttcaaaaaagttttatcgaatggtttggtgattttatccctatactgtaggttagaccaacaagcatgagtccaatttgttatttgtaacccaaaaacaaaaaaaacaaaaaaactgaaagaaagctatgtggggagaaatcccacaaacgaatagcttgagttagatgctctaaaagtaagggagaaaaaaagaaaagaaaaggagagtgagtccaatttgttatttcaactttactgtatatgaaaacttattatcttattgcacccatgtgcttcgattttcaacaattcatgacctctttaagccaatttgttctgagcttgtgctggtgtttctgttgaaatgagtttgtgtttgaaatagagagagggcaattttaattgaaaaggtggtagtagttttttggatgcataatgtatcaatgtttgcaggacttctatcaaatttcatgggaggttaatgatacaaatagacatctgatcaggtttctcatatttttcctgatagaatctacttctaaaatcttttcgatctaggagcaatataggtctgagtgccttaatagctgccccctcctcttttattgtaagagcccgtcaataggcaaaagaaactggtaccttttttgcaaaaatcagatgcaaaaacttaacagtgctgagactacttcaaataagcttgaaatttctgtatatatcaagtagtcaagatttctaacatgctgttctattcttatcatgcaacaacaggtatattgctgtaggaa

SEQ ID NO: 88065 - DNA, 361 bp, Citrus clementina
  Intron number 1 from transcript clementine0.9_002309m (loc us clementine0.9_002309m.g) derived from phytozome v7.0 (c hr-ID scaffold_6; pos 6208968 to 6209328 reverse strand)
tttgtttcccgcttagacactcattctatcaccaagttcgtagctttttaactctttgcttgccttcagttaaaaattagaacacgaaatgtcgttgtattctttttttttttttttttggttgcttaatgagctcaatattcatgctaatttgcagaagaggtaactgaaaataaaataaaggctaatgtttaaagagatgaatgtttaatttggaaaaaggatcaaagttgcaatttttacttgtgtttaattttgttccgagaaaaatgtttaaaaaaattgtgaattatgtgaaatttgtgtttttttttaattgtataatttgtcaaaaacatttggattttttattgctttaggc

SEQ ID NO: 88066 - DNA, 697 bp, Citrus clementina
  Intron number 1 from transcript clementine0.9_006519m (loc us clementine0.9_006519m.g) derived from phytozome v7.0 (c hr-ID scaffold_110; pos 159632 to 160328)
ctctataaatctggcttccagacttgggagtacaggtagctgcttttacgtatcaccctttgtttttttttttttttttctcgtttaggaatttaatcaaacacctgatagaccaatcatcaaattcggctgttttatgtctttctattgtgtatgtattaattttacgtgtaatgataagaaccaatgtatagaactcactcttagatgtaagggaaaggtgcccatgagctaataatctttgcatttagatgattattatatttagcacacgtgtggatcaaggattctaacatgtaagatgttatctttgtgtaactacaattacaacctcattcatgcaaattgatttggcatgatatgattggaagagtgaaagtaaaaatagtcaagctgatgtatgaggatagaacgttcatttacattcattcaattatcatgtcatttcagtttctaaagatgtttgcttgctgtagaatgtaatatacacgattcccgttttctattctcatttattaccttgacatagatagttcgtacgtgtagtatcatccatgtaaatttatgatgatagcattctaatggtttctagagaatgagacagtgaattcttttgaaggaattgtttgcgacattgaacatgtttatatatccatttgcagttcagagtttgctcttcggtcatatttgtacattc

SEQ ID NO: 88067 - DNA, 788 bp, Citrus clementina
  Intron number 1 from transcript clementine0.9_014846m (loc us clementine0.9_014846m.g) derived from phytozome v7.0 (c hr-ID scaffold_80; pos 582274 to 583061 reverse strand)
atcactacaagcgcaagttctaccaacgttacatcgttcgtacactcttcctttttcaactttttccatcttgggttttattaaattatttcagattgttgtgaatttttatctccgtttttactttttggatttctgatgttataatgttttgttcttggatactgttaccattaatctatttttgattgtttgaagtgttgtttttattgtctctgcgaactgtattttgttttattttggacatgggatatgggtttgttcaaatgtttttggattgttcgtgttctatttgggatttgggattgcaagttgtgaaattttttatctggcttttagtgttttgtaattggaaactatcgttttcaaaatttgattttgattgtttcaagtcctagttttgttggaattgggaatgagatttgtcattcctgatttgctgcattgattttgtttgtttgttttttgttttttttttccagttttgggtcctggtcatctttggtattagtttcttttgggatccgttcagtatatcataggcatttaagaaaataagtgctaatcatatttgggatggggtttttctgtaactcgttttttttggtatagaatttacatcttgggttggaagatgcttattgatgcttattattcacattattagtaaactttatgttggtttaggagcttacctctgttttgggcaatttttctccccaacttgttagttgttcttatagtgggatcttttcgaaaagcaggatcctgatcttgtggtggagtct

SEQ ID NO: 88068 - DNA, 842 bp, Citrus clementina
  Intron number 1 from transcript clementine0.9_004936m (loc us clementine0.9_004936m.g) derived from phytozome v7.0 (c hr-ID scaffold_26; pos 1311622 to 1312463 reverse strand)
agctttgcccaatttcgttttggtcgatcgtggaggtgcgacccacttgaatttttttttttttgtttaatttgattgttagtttgatttgagaggcatccttttcatcatttggattaaactgattgtttagcttgctttttggttgattgagaagataccctttggatattttagtgtagtttgatgattttttggtgtcggttgttctgggaggtactttgttgattatttggattaaattgatttgttttatcttgattttggtacttttcttaggtttgagaaggtactttcattaatcataggtcagtttggttgctttttgctggtttaggcatttggtgaggtattcgtataattaattttggttatttgggagattcaaggtttactttggtgatagcattgttattgttcaagtaatatttgacacatttgattgttgtgtgaggtttgaggtttagttggtttgtttttggtatattgatttagatcttaaaggggaaagtaccacggtggtactattttattacatatcttgtgatgctttgaggtcaaattggttatttttggtattaatttgaacccaactgcttgtttgtcttgttagtctcgaaactgtctgttcaatactgcgaaattagctgcttgtttgtcttgtaatcaattttcatttatggtttgcaattaaaagacaaaaaaagggaaatgaaggattgcttgcattaaaactgacttgtggtattaagtttttctattatcttgggacatagttcctttactagatcactattttatgtgttgctttccagattgcttctttgccttgaaggtctgga

SEQ ID NO: 88069 - DNA, 701 bp, Citrus clementina
  Intron number 1 from transcript clementine0.9_017345m (loc us clementine0.9_017338m.g) derived from phytozome v7.0 (c hr-ID scaffold_9; pos 530517 to 531217 reverse strand)
ggtcgttagggcacctgaacgacgtcagccgtcaggtataatgtgacttttcacaatcgaaacgaaattatgcatttgtttagtaaaactaaaaaaaaattttgagaaattttttttaatattattttaagtgtcaagtaattgaattgatatcatgataaattttattaagagtataaaataaaacataatgattgcataaccttcaaacattgcaatttagttagatgctaatctttgaaatcattcaattttgattttggttgatagtaataaccatcggttagtttttttttttaataaataaaataaaatattactatgcttagtactaacgtagcagaccggcgggttggcaagttacgaaccgtacggtaatattgtacgcgccactgcacaggaaggcccgccaaatcccagagaaatgcgtgtaaagtactgcaaaaattgaaaacgacagtccaccacttctctctcattctttctctctttatcttcccacatcccaatctcccgaccctagtgatttcaaatctcaattcattacggcaaatcgagacctttcactaaaccctaatcgtagtgaccaattgttggaaaccctaaaatcagtcacattctccaatttaatggttctaagatcaggcccatcttttcttgaatcagcgagttccgattagggtttcgcataacgaatagat

SEQ ID NO: 88070 - DNA, 522 bp, Citrus clementina
  Intron number 1 from transcript clementine0.9_029771m (loc us clementine0.9_029771m.g) derived from phytozome v7.0 (c hr-ID scaffold_6; pos 394404 to 394925 reverse strand)
agaagctgatttccgatatatttccgcgtaatcaggttggttattatttttatttttattttttttggatttttttattttgcacttaaacttgtctttatactctttttttttttttggggggggggggatctcactgatgaaatgttaaaggttagtgcaaattatgttatgcttgctgtttgtgaatctcaattgaatgccttaaacgaattggatacgctaattggccaacctatgctttttcatgttgggttgaaatagatggcaaattttggtttcatttttaatgaactaatcaaagaatttgcactaataatagttagcagctttttttctttttctcctttctctgtcctcttcttaaaagttttagtttatgcatagctgataacgaagttttagttggtgcataactgataatggagtataattaaattctttcagatatatcaaacctaacgtcagggtttttatagtaaatgaatgtaatttgaatgctgctctctatgttttggtagg

SEQ ID NO: 88071 - DNA, 660 bp, Citrus clementina
  Intron number 3 from transcript clementine0.9_019278m (loc us clementine0.9_019278m.g) derived from phytozome v7.0 (c hr-ID scaffold_9; pos 2486605 to 2487264 reverse strand)
gttcaaggtaatatggccttttcatttcttttttgtttagcagtgtctttcaactgcttgtttgtataaatttaagatggccgttttaattctgttagtttcctgacaattatattggaaaacagatctagttttctttttcctattacttaagttatattctttgtagtaactggatggagatagctgtttctggttgagtatggtgatacttgcatcgcccgatggtagaagacacttttctccctttttgtattatattcctttttttctttgactagtcgatgaaacatggttcaagttgacctttcaacatcatgaatgctgttactgttcaaactagtatgagctgaatttcgctggctatctagtttcccattttgatatgtgctgcctgcctatgaatctgaattgcctcctttttcctctattaataacttatgggttttttttttatcaaaatcatatgtaagcaaatacacacacatgcacgcacatcaagaagaagaagaaaatggaaatacaacagacaaccgaatgaatcaattataattaatgcacaaaagcctttaaaattaatgcaatagctattagatcctcatttatgttttgatcttgttggcagctggtcccagctcctcgagactcttcctcttccaa

SEQ ID NO: 88072 - DNA, 375 bp, Citrus clementina; identical to SEQ ID NO: 78044
  Intron number 1 from transcript clementine0.9_001315m (loc us clementine0.9_001315m.g) derived from phytozome v7.0 (c hr-ID scaffold_54; pos 676126 to 676500 reverse strand)

SEQ ID NO: 88073 - DNA, 731 bp, Citrus clementina
  Intron number 1 from transcript clementine0.9_023473m (loc us clementine0.9_021867m.g) derived from phytozome v7.0 (c hr-ID scaffold_22; pos 440322 to 441052)
tttaccgaagaaccctcgcgtcgagctatcgtctggtaaacatttcgcatttcaatttcaatttgatctcaatagctttcagtttcactatcttgtcattttgctgttatcgttatactcgatctgtgtgattcggcgtgggtttttttttttaattgtgtattctcagagattgatttgtagtagattaaggggattcgaggaaaccaaaataataataataataataataaagagaaatgattattgatacagtgctaaccaggcctagcattcggtatttccattttagggtgtgtttgggattgttttgctgatgttgtcaccgcagagtagtcatttgcacttttcatcggcagtattaaaaaaaaaaatgtatggatgtcggataaaattgatgtgcttgactatctctgaacttattgatgtaatttatggattgctcttcatgtcttgtttatatgcccccccccattattgatatcttctattcttggaaattgaatttacgtgttttgttttttaaccttggatgtatttgaaatgctcatgaatgtgaggttaactcagggtgtatgtatctctgctaaacctgactttggaacatttcttttagtgaattgctactgttcatatgctcgtcgtgcctactttcagatgactgttaatttttccatgattatcgtttttgcaacttttctgttaggctcctttttgaagccattggacct

SEQ ID NO: 88074 - DNA, 685 bp, Citrus clementina; identical to SEQ ID NO: 86888
  Intron number 1 from transcript clementine0.9_010972m (loc us clementine0.9_010972m.g) derived from phytozome v7.0 (c hr-ID scaffold_6; pos 4044855 to 4045539)

SEQ ID NO: 88075 - DNA, 810 bp, Citrus clementina; identical to SEQ ID NO: 87438
  Intron number 4 from transcript clementine0.9_023929m (loc us clementine0.9_018246m.g) derived from phytozome v7.0 (c hr-ID scaffold_80; pos 460537 to 461346)

SEQ ID NO: 88076 - DNA, 464 bp, Citrus clementina
  Intron number 1 from transcript clementine0.9_002381m (loc us clementine0.9_002381m.g) derived from phytozome v7.0 (c hr-ID scaffold_6; pos 2614872 to 2615335 reverse strand)
gatcaaacacatctattgcaccacaaaataaatgtcaattactatcacagagaccaagagaaagaatctaatcaaactcatcggcctgtttccaacaaatggtattaacgaacgattatttcttagaattatatttttcaaaattcattttagaaaaaatgaactatctgcttccaataacaagtaaaatagctcttttgagtttattcttcctctgtcacaccaaacagccgctcagcagaaaaataagattagcgtttaaaaggaattatcggtttctgatagcgagtaaaaatagctgtttttagtttatttcttctctctgtcacactaaaacgccgccaagcatttttagttcaacagcaaaataagattagcgttttaaaagaaacagggctggggacgggaaatagaagacgactacctgagaagaagtcgtcacgacggcgagggaaagagcgagc

SEQ ID NO: 88077 - DNA, 304 bp, Citrus clementina; identical to SEQ ID NO: 82316
  Intron number 1 from transcript clementine0.9_004507m (loc us clementine0.9_004507m.g) derived from phytozome v7.0 (c hr-ID scaffold_55; pos 793190 to 793493)

SEQ ID NO: 88078 - DNA, 964 bp, Citrus clementina
  Intron number 1 from transcript clementine0.9_031569m (loc us clementine0.9_031569m.g) derived from phytozome v7.0 (c hr-ID scaffold_106; pos 357111 to 358074 reverse strand)
cctttcccagtgactattcagagcttcttgatcaagtacgctggcttctgcatttgtttatttacctttttattagattacgctttaggatctgtttgatatcgagttcttgtagtttttaactatatatgtgtggtgaaaaaaaaaaaaaagctatagttgtgatgtaaaagttgactgtgtttggtaaatatgacttataaataatattttttacaaaactgataaaaggtgatatatgtttttagtcaaacaattatgagataaaattatttttgctcaaaagctgcggctgtaagagtttaccaggcacttttatatatctgagctccccaattgcaatgccgaagggatccttaaacttgttaaatgaaaagctggagacatttcaaaaccaatttggcctttttgaagctattagaaaacaggcattgggtcctgcttcttgttttatccaaaaacattcatggggtagatagattgtggcaattttagaacaacatcaacaacttttacagtttaagttacagatatgtggatcatatttctatatccgttgaacattttcttggtgggggttttggagacttaaatcaaaacatctgcttttgtgaaatcatcttctctctacatcgaagttgttgtttttgtgtaagaatccttgtgttatagtatcttaggatgattatatttccaaaatactattagctctgcatttagtttaaaactctaaactactgtcaccacatcatattggatgagtggcacctttaagatgagttgtcaaagcagtctaaaaattacacaaagaaacagatcctctttggaacctcttggaaaacacaacttggtgtctctcttgatacaacttgatgtgtatcatctgttctgtagtagttagataataagtatcggagtaggagcatctgcttagtttgggcttttgacctttaaacaggcaaaa

SEQ ID NO: 88079 - DNA, 777 bp, Citrus clementina
  Intron number 3 from transcript clementine0.9_029511m (loc us clementine0.9_029511m.g) derived from phytozome v7.0 (c hr-ID scaffold_36; pos 49026 to 49802 reverse strand)
gaacagcaagaagaggtccattcacataatgtttggctttttgtgtttttcacattataacaaccaactttgatgaatatagcaagttttaaacattattagttaatttatttgaataaatatttttaataggcttttggcctgtatagaaaggcttacgtcttatggagatgttgagtgatgaacgtttttggataattaggatggacgggaaacaaagaatatttgaagaggagacaaacggttttaatcttttctagtgtctatggaagaaaaagatgatttccttggccctacaacacaacactgcaggagtctattctaggaaacaaataagagctgacaagacatgtgaaaaagcatctttgtattcgtaatttccttttagtatgtgagcaatgacatcaatatttctaagaccatgaaaaccactatgcatatgtttgagaaatattacattgctgaattgcctgtgttataggacaaggaaattatacatggacaaatccttagggtgttgaatttcagataatttttctggaaatattttgaatctgaagcttgatactgctttttgggaaagaattacttcttcattttcttacctttctggtttacttgccattttggacgtacaaaattgagcagtcaattgtcatgtgctgttcaatgctgatgattaggctatgcggggacattgtggtcttttaatgtctgtgaatatgttttaggagaaaattgtttattgttgttgatggtagtttcaatttttgcagg

SEQ ID NO: 88080 - DNA, 977 bp, Citrus clementina
  Intron number 2 from transcript clementine0.9_018013m (loc us clementine0.9_018013m.g) derived from phytozome v7.0 (c hr-ID scaffold_6; pos 4418362 to 4419338 reverse strand)
tccccagccacttcaaggtattgtacaaatctgtcggtttaaggatgctctatgttgctttacatttgccatttgatgtggttagcaaatcatttttattctgaatggacctgtagttagtctgtgtcgctaccccaaacagttcagttgattgcttgttagtgaatgcaggatgcagcaggaaattgtataagcaatagcatatatttaaagattatgtaaaaatcatggtcagaaaaaataattctgcggtgctttggtcatttatgttcataagatatgctttgctggaggtcttaattgtcattcattaaagcttgattcttcattgatggctaacttccagataaacaatatactataacttttttttacccctatttttgaacgtatgaattagctggaatgaatagtttcaagagcttatgcaaataaaattgttttgaataaataatgtaagtttttaaagcatttgtcatagatgatatcattccaagaatcacttctcttgcgtgttcatatgaaacttaacaccctagaaattgagcatgataagctttcttgtatgcgggcaagaatacaaagcaatgctttctttaagcagatgcagatttcatttcagtcgtaggttgctagggcttgaaacgatatcctaaatcatgtggcaatctgaaacatgaggacactattttggtcttagaaggaaatctttttaggaaagttggtagggggaaatcttatggatgaattttctaaatggaggatttcgtctctcttttttgctctttcttgctctatctgttttatatttggggtggcccctagtcataaaaaatgttgattaagttctttgtttacattcttatccttttggacactattcaaatttaagttctttgtcatttgttgatgtggaaaatggtcttttctttgttgatgtaggtggaaccaaatttgctagttgcttcatttgtaaa

SEQ ID NO: 88081 - DNA, 656 bp, Citrus clementina
  Intron number 1 from transcript clementine0.9_026832m (loc us clementine0.9_026442m.g) derived from phytozome v7.0 (c hr-ID scaffold_17; pos 3899779 to 3900434)
ttgggttatcgcactgctgcttgtttgtttccagggtaatttttagcattatttattcatttctgtacctttctgattttcttttccttggatcagcatattcatgcaatgaggacaaggacaaagccactaacttgcttttgagcaagtttcagaacacttttagaatttcatttttggcttcttttttttaacttttttggtctctgaaagatatcttaagggtagggtttggttgattttgctcatcttgatttcatgtaatccatgaaatttctgttgcttcagcttaatctgtttcaagtgcgctaccactataaaaattgggtttcatgggttatcaaccaagattttttttttctcctttgatttaatattaataaactgttttaccaatataaacttttgatgaatgcttcgcatttgatttccatatttcttcctgagaaatgttgtaagttgattaaacatagtcttaaatcgacccaaggcattgttgtaatgtctttctattttgataataagccacactgtcatagtagttttatggtcgtaaagatcaatgaatttcattgtttattgtttagtgatggtatgcattgtgttgtgggagtactcttatcactatgaattgtctttttacaggttgaatcttg

SEQ ID NO: 88082 - DNA, 830 bp, Citrus clementina
  Intron number 1 from transcript clementine0.9_030825m (loc us clementine0.9_030825m.g) derived from phytozome v7.0 (c hr-ID scaffold_78; pos 572228 to 573057)
gccgacatcgcccctaaaaccgccgaaaattttaggtattatttattctttgtttattttccactttaatttaaaaaaaatctattctctgttcttgtttggaccttttcaattgctcgcagccgttttataatttttgctgggaacaatcagtttctttagggaagcaactgacactgcgttttttttttttttgtaaaaatactttctgcaaaagctctaaaaactcaatttctgaataatatctatgaagtgcttttcttttctcataagttcatgttgaaagagcgcctatccagaaagtggtttagtcaaagaaatgcgaaattggcactgaggcagataatttaattgtttgaaaccattttgaatggtgtcaaaagcagtcctgaaaacattatgagttctgtttagctttgttgtgagtttataaaccaacatttatgtgtttggaaaatcatttttatggtaaaatgtgcgcttttacaaggctaatatgtttttgaatttttgtacttttaggtgtggcatttagtttgtcagatttgtggttttgttgaagttcagctactcgtttatgtccatgtcatatgtaattggtggtggtatgtgtatttggaaatttgtatcgaagagacaatgactgtatctcaagtgtacttttatgctgctctcccatattcttagcattattagtgccccctcctgttttctttgtccgattttcaagattctcaattttttgttttactgaaatttctaacttaattaattgtttttgttccaacatggcaggcagttctgcaccggcgagtacaggtatctccttc

SEQ ID NO: 88083 - DNA, 841 bp, Citrus clementina
  Intron number 1 from transcript clementine0.9_024830m (loc us clementine0.9_024830m.g) derived from phytozome v7.0 (c hr-ID scaffold_9; pos 1043303 to 1044143)
aggcgttccctctttgaccaggttacttcaatttcattttcattcaataatctctctcacttgtatcacttcttatactcatgatttcacaaaatgtggttattctttcacttaaaactatttaaaaaaaatcaacttttactactgcctatctctatctgttttcataatactaaatcaaaagaagtcaaaggaaaatttatttcaaattttgaattggaatccttaaaattcaatccatttggattctatcatcaacatatggaatattatctgttaatgaaaaaaatattttattttcttcgaatgttgaggagtcaacaaatgttataattacttttaggccgatttaagttatgtgaacgtaacttaagccctcccttatttctatacccatgcgacttattatattatttaagttgacaaactagacgaagattattcaaaaaaaaaaatccagtaaatagtaaaagtagaaaatgcagggagaaaaagtaacaatttccagtattcacgccaccatggttatgagatagatttaagttttaagtttttttttttttcccccaaaaactgttgcacccatagatggtcgttatcaagcattgtctactgcgatgatagtgacggagaatccgtttaaaaagatgcactttttttcttttttcccttcccttttttttctattgaattgtgtcgttttgcactttgtaaggaaaacagtaaacgcttcattttgattcagcaattatatattaattggtagctctgcatggaatggtgaactaaatgataaattgttacagggttatcttgactcagagcagctcattcagctgga

SEQ ID NO: 88084 - DNA, 1004 bp, Citrus clementina
  Intron number 2 from transcript clementine0.9_023102m (loc us clementine0.9_023102m.g) derived from phytozome v7.0 (c hr-ID scaffold_6; pos 3492146 to 3493149)
cttacggcaatcaggttttcaattttattttttaaaatttaaaagtatcttttaatttcttcagtttttaaatcagtgtttttgtcctttttttttttaatggtgattctggatttcatttttaggaaggaaattgataattagatttttgtttgcttaaatggaaagtgatgaccagtgatgtagaaatttttatgtatttaactgtaggctttttaatttcattttatttttgagagcagagcagagaaagtatattagggtaaagttcagttggctggagttaataaatgcatggatgtaagatcagtttgggtttgaattgcagtggttttagtcaacaattgctgtgaaattgaatcacttgtcgttaagttataaagttggcgattagcagttgagtaaacttcagttgtgccttttaaattaagttcaagcacaacaaccagaaatgggctcgtagtcttagtctttgcattgggttcttttcatttgagatcctgttcctgggcgaaatgcttttgtgctcttgaaggagatatttgtttatttcagcttaacactataatacaagtaggccacaatgcctaattgaaaatgttttgttcggacccagaatagtctcaaacttgtaaaccatcgttgcggtggggggcacctccttagctccttgccttcttctcatgattgatggtttgagtgtcccagtttgttgtgctagtgttttctttgaatttcctgagttcactttgaagtatgcttggccagagcacatatcaaacttcttatgaaagttgaactaatttaagggattttgagtggaattctcgtaacctattagtagatgtgttgttgctccatattaaatacaactgaaagcaattctttatgtaatgcattcattttgtttctaaaggtcaggtttatctagaaatataaaactacactattcttgtagtcaaatgtggattactaatatatttgaaacatttgtaatcagattt

SEQ ID NO: 88085 - DNA, 772 bp, Citrus clementina
  Intron number 2 from transcript clementine0.9_026116m (loc us clementine0.9_026125m.g) derived from phytozome v7.0 (c hr-ID scaffold_78; pos 115537 to 116308 reverse strand)
agcctcaacctggcgatttatctgctatactcggtgtattcctcacttccattgctattgtctcactggcaaattctctcttattcctaattcgtgcttttacgcatatttagtcactttcaatctggtttatcagttaatgtgtatgatattgtgttctatttcttggttttctcgcaacacgaaactttttttttaacacttggttgaccatttttggccaattatatttgattttatagtcacaattttttctcatttagtactttttaggttttaatggtgacttaaatcttctttttttaattgtttgagttgaatcttgtagctctgtaaatattaagtgttgggttctcacctgaataaagggctttccttggagtgaaatagtgaaatgaacaatgatttcaattgactagttgtaaagttcaattttttcctaaaatgagcagatcaacaatatattatcatgggcagtgtttttacccagattttgtttggttgcttgcctactagtatgaacactttattgctttcaaaacacatttgctatattaatgctttggtggtaagtttcttgtatgtatatctgtagttatattattttgattggaattttctgtatttaactctgaaactgacttgctggatttaagtaataattagttattttaatgaaagtttgagcatttgtgtaggtatgaaagtaatattaagttcattttgaacaatatgttgttttgatgaatatagcttttgaatgaattttcag

SEQ ID NO: 88086 - DNA, 728 bp, Citrus clementina
  Intron number 1 from transcript clementine0.9_022834m (loc us clementine0.9_022834m.g) derived from phytozome v7.0 (c hr-ID scaffold_30; pos 2678667 to 2679394 reverse strand)
tacttcacagattcaagcacgagtttccagagaaggtaatttagcaaaaatttgcagtttcctctatacctgcatggtttggatataaatttgggtctggcagtacatgctattccttcataatggcttagatatgtatatatatatatatatatgtatatatatattgttaggataaattcctgctgtatttggaagtaatttaagacaaattccatgagaagatatttcttctgtgtaccagatcactgaatttaagcatggtagttagaaccacttaaactatcaaacttagtgcagtgatcagaatatcgccaaacttgggttaaagaaacatgaaaagttagaagtaactactgaagaattagatagagaatatcattcaagtgaggttgaaaggttcggcacgaagattgagaaacttttcttctgttttattttattttctttttataaagtaatcaaaacttgaattattgaaagaaattcacctgtcaatccctattttctttatcactttttctccttataaaacttgaggtttcattgctttataatgcctctttatttaattatttagttattttttctggattattatccacgtgtcttagttattaggagtcaatttattcttacaaagacaaaaataaagtacaagctaaaagcagaaaagtgaaaacttcacaatccgaaattctgttgaaacctttgtttgcaggcaattc

SEQ ID NO: 88087 - DNA, 730 bp, Citrus clementina
  Intron number 1 from transcript clementine0.9_015343m (loc us clementine0.9_015343m.g) derived from phytozome v7.0 (c hr-ID scaffold_2; pos 4775079 to 4775808 reverse strand)
cgacgagaagactttagatcgcttgatttctactggtgagtggcgatagactgatgaatttgcatattaccttgaattcgagggttattttgggaaatatctaagttattgtgaagcaattttcatttgatttataatgtgttttatcttcaagattgatgcatgcaaaatcagtgaaaattgcttctgtaattgtctatcttattatcttgtttccttggaacaggtgaaaatgcttttcagacaagcacttaattagtattagacactcattgattcaaaagcacttgaaatgttttctgatgaagaacttgtagatattttcaaaaaagattaacacataacaacaattaagtgaagatacttttgttttacaaaaaatgtttgttgttctagtttccaaatggttttaccaaattaaaaaaaaaagggggagtttcatttaaaatcctcctttattactaaaaattaaaagtgcacctaaatttattgatatattttgaagaaaaaggaaatagaaatgtatatatttgtaatatctgtctttaacctccagtgtttcttgattctgtttttataaattttattcaaatattaagattttttttttgtcactgtaatgtgatacaagagaaaaacattaggcaactttagggtatttgagattgatatttgtaactttgttaaatatgcaggagagagtgaaacattcttgcagaaagcaattcag

SEQ ID NO: 88088 - DNA, 585 bp, Citrus clementina
  Intron number 1 from transcript clementine0.9_009013m (loc us clementine0.9_009013m.g) derived from phytozome v7.0 (c hr-ID scaffold_22; pos 1532030 to 1532614)
ggtcctactggcggcttgatcgggattctcaggaggtcagtttctttctttgttgtctcttttcttttactttgtgttgcatatgaccctacggattttggctatttttgctgttacattttatcggaggttccgtatgacatttgttatgtgctagttaagttgtttaatttgtatgcaatggttggtatctgctgcgaataggattttgaattatgtacaacaactttaacggtgctgagtttacaatgctttatggagtcgcatcgcattcattttgcttggcttatgttacaagaacatttttttttttttcaattaagcttctgcggaatggattcgcaagagtagatacttagatgagcctacatacttaaatacagttcagcttcagagtacctttcgaagatttttaatgctgtcctatatgatggcattttctgtaatattaaaatggaattatgatgagttagcagcttgacactttgttattttgctgtcatttgatttgctttatagaatgattcctgaaatttcacttccattgcagtattgaaatatacaagcataataaagaagagagga

SEQ ID NO: 88089 - DNA, 777 bp, Citrus clementina
  Intron number 2 from transcript clementine0.9_011232m (loc us clementine0.9_011232m.g) derived from phytozome v7.0 (c hr-ID scaffold_9; pos 2736395 to 2737171)
cttgcagctccctactcaatcattcaaaattcaaggtatctcttttagaccaagtgatttattatagtatttgttagtttaaaaatgagtatttgtttgccaaggtgtttaagcattcatttgctattgaagtcacatgcctgatcaatgtcatcatgccaagtggcaacagtgaactctagttggtgatcattaagaaattatagtccatttcagcaaaagatgctataacttgcatgttgttatctttcagtacagtaggagagtaaaagagtagccttcatcctagaattctacccttaattagataaggggtagatccctcattttttttttttaaaatatggtttctatccagataaccagtttgtttggctgtcaggtaaagtagcttagtcatagtctaaacatgttgtagccctctggtgtgaagtacatgacataaaggggtagatcccttcttctttttatttttaatatggtttctatccagataaccattaaccagtttggctgtcagttaaagtagcttagtcatagtctaaccatgttgtacccctctggtgtgaagtacatgacagtgatgctactagacctcaatttaaatcaaacattaatttttgggttccttttttcaggcattgctatttttatttatattcttaaaattcattgtcttttgctgtataatcatgcatctgtactccagtacacatgacaataatgatgtaatttctatatttaggtgctcccaagttttgtgcaaggcagcagcaa

SEQ ID NO: 88090 - DNA, 752 bp, Citrus clementina
  Intron number 2 from transcript clementine0.9_021765m (loc us clementine0.9_021765m.g) derived from phytozome v7.0 (c hr-ID scaffold_26; pos 1084247 to 1084998 reverse strand)
tttgccacttctaccgagaaaattggccttgcaaagttagttttttttctctttaatttttttattttattcaaatattgtctgattgaggcgtgctctttacacagcgttttgaatagttgaaattggttcgtttcgttttgagaattgcattttcattttctttttttcaattttttggcattgtaagcgcttttcgtacaaatgcacaagtcgaaatgtggctgaacgaggtctatctggaagtgcttttgacagaagcactgtctaagatttataaaatggcctctgtggttttgagaagtgatggataggagcttttttaactgctggatagcattttaattatttcatttattttggtgttagtagttctcttacttgaaattgcttcatacaaaaggactggctgtttgtggcttatttggaagttcttttggcaaaagctcttctaagagcttgaaatggcttgtgtggtttttatttattttttggtagtataagagcttttttttggaagtttttcacataagggcactatgccaattatggttatggctgattgaggcttatcaaaaaatgcttttcacaaatttaagaatttaattttgtaaaaatcactgcactcctccattgtactggtgcaattgttaggtgacttatttttagcttcttggaagtttttgatatttttgcttacattgtgttctggattgtaattgaagattagaatacaatttgatttgtaggta

SEQ ID NO: 88091 - DNA, 785 bp, Citrus clementina
  Intron number 1 from transcript clementine0.9_002361m (loc us clementine0.9_002361m.g) derived from phytozome v7.0 (c hr-ID scaffold_6; pos 5171059 to 5171843)
agtttccttattatcttaggtaagcaagagagttgcagtttgttaatttcctttcgtttgtgtcttattgtgttagataatttttttttcttttaaatgtttggttttggagttctatgagcattttaagatcctgagatacaaagatgataaataaatgttcaatttaaaatctctgtgatcctctgttccttttactagtttgttcactggcttttaataaatagagagtttttactttttttgttttggcagattactttttccatgtcctgttttactgggaaaaaagagatctaattcatctctgtgaaaaagctagtttgatttcttagttttcttttgaatattatatagatcatgtgatctcaataattaccaaaaaaatgaaataaaataaaattagattatgactttgtctctgcattttgataaatatttgatgttcttgttttcttttataaataaatactcaacaaattttagattatggcctttttccccctggaagaatttatggtcttatatactttttgtaatagcatgtactgtggtattaacccggaatttgtggattatgcaactggatatatcatcaactttttctgtcttttagtcataagttagtgatgttgttaagctaaggagcctaacatgtaataatcataagaagttcttgtatcaaacaagctttctccaacacgtcaattagagacagatttaatggttatatctaatactaatatcctcattctgatgatggcaacgacagcgagagaacgcgg

SEQ ID NO: 88092 - DNA, 474 bp, Citrus clementina
  Intron number 2 from transcript clementine0.9_015031m (loc us clementine0.9_015031m.g) derived from phytozome v7.0 (c hr-ID scaffold_34; pos 1758645 to 1759118 reverse strand)
aatttcaccaaaaacggcttcaagtaagctaaattcatctgtgtatttcccaaatttgaaaagaaattgatgtaaacgaatcaaatgatgtataaggatgctgcatttgtttgtttattttgtgtcagttttagaagcttatgatctcgtactcatcttaacaaatttatcgaatgcagacacacggattatttaactcaaatctccttgatgtttcgtagcctttgctatcgcattgattagtatatataggaccactctttttttatcatcattttctttctgaagttatgagcattatagtcaaattacttgtcctaatgatccacaatatcatcatttctgggtaatgattctgtgaaagaacaagttagtgggaatcgtttctttggtcagtacactagaaatgagtagtttttgtttgttaactttttggtttatagagaacactcaaaaaatttcaaacctgaagat

SEQ ID NO: 88093 - DNA, 665 bp, Citrus clementina
  Intron number 1 from transcript clementine0.9_034095m (loc us clementine0.9_034095m.g) derived from phytozome v7.0 (c hr-ID scaffold_17; pos 2358420 to 2359084 reverse strand)
gaagcctactgcttgtgaattgccaaggtaccaatatttattttctgtttcttgttttgcgttccttgcttctaacaactcaaaatttaatttcgtgcagggacttatttatttatttattaagtagtaggatggtcactcgattttcttccctcccatggcaccctagacttcttgtaccattacaaattttttctacataaactgttgtgtgtttcagtcatcaagaataattatatatatacacacacacatgtacacacattaatgatttagtaagcgatggtgctcatcttatagtggtgtcatcatcacttgatgatatttggttaattcataatctcaacaatattcataataagtcataaaattgtgtcacgtattcagtgttcactttatggtgagtactggacgacgtaaaataattttgtgccgcttctgtattttatagatacaagaagcatttggacttgatcaggtatatatacatgcaatgttcacggaagtctgtctagttaagcaaataacaaaacataaagcatgtacttttcttttatttgagagaatttgcaaatatggatatggcggtgcaactgcaattactaagaactctagctttctatctatgtatctatctatatatatatatatatgatgcagattcg

SEQ ID NO: 88094 - DNA, 974 bp, Citrus clementina
  Intron number 1 from transcript clementine0.9_031687m (loc us clementine0.9_031687m.g) derived from phytozome v7.0 (c hr-ID scaffold_6; pos 2133178 to 2134151 reverse strand)
atcttggaatttcaggtttgtttctgcacatttgtatctccttaatgatatatatacaatcaaattggcttgatcaatctcattcctcaaattaccttgattctgttctattctctcaccgatcaatgatctcggattaagctacagctagcggactttcttaggctctctatagcactcttgttgtctaacagcagctataaaatggctggcaaatattcataaccatagtttgagaagttcaagtgattctaccatacaattgtttgatcaaatacctatgttatccctaatatttttgtccaaattattgtttaaattcatgtttacaaatatatatatatatctatttcacagcagttttgacttagaaattttctctactaatctttcctagtgaaattcttagtggtatagacaaaattaatgcaaattttccactactaatcaataattagttacaaaatgaccacacaaaaaaaaatcctaaactccaatgtaatttgtgtatggatggtagaagagttggtgaattttttcataacggcgttctcagcagagttctattgctctatttcttgatatgtttttacatactgtaggagtcaacgaatcccttggtatcacaaagcttgcttggcatgatattgacggatttgaaaatgattgcaaggataattattaatagatttccaactatttgcttttgacagatttcaaggtttactttttcagtagtcctgagacgaagggaaaaatacaaaaacgtgcaacaagtagttgcatgtccgtttcttataaaaaggatcacgtaaacttgaaaacatcaacctacttgtttaattaattttggtgaatacaaaggaaaaagacaaaaaaagaaaaaggaatggataggtatgaaagaatcgtgcatttgagtaaaattttctaccgaatttaaaatattgacttgtgaaggtggagtgacatcg

SEQ ID NO: 88095 - DNA, 280 bp, Citrus clementina; identical to SEQ ID NO: 79925
  Intron number 1 from transcript clementine0.9_029022m (loc us clementine0.9_029022m.g) derived from phytozome v7.0 (c hr-ID scaffold_78; pos 1086256 to 1086535 reverse strand)

SEQ ID NO: 88096 - DNA, 734 bp, Citrus clementina; identical to SEQ ID NO: 79224
  Intron number 1 from transcript clementine0.9_015282m (loc us clementine0.9_015282m.g) derived from phytozome v7.0 (c hr-ID scaffold_26; pos 2744278 to 2745011 reverse strand)

SEQ ID NO: 88097 - DNA, 428 bp, Citrus clementina
  Intron number 2 from transcript clementine0.9_004177m (loc us clementine0.9_004177m.g) derived from phytozome v7.0 (c hr-ID scaffold_80; pos 1077122 to 1077549 reverse strand)
ctggttagctctttttcgcatcttgtttatagtttttatgctgttgaaagacttctgctcaaaggtggttgatcttatatatgcttagcgtgaaaattatagttttttagtttgtcaatagcttattgtaagataaattgtcctgcaaattacgaaatggttttagatattgtgcttttactcaagtttattactgtatcccctattaatatacttctatctttctcgaatttgatgttgatggttatagttttcgtacttctatcaatctacttgtagtgaaagatagaagaaaggggagtgttatgagaggggaaaattttcggtttcagatgcattttcaattctctatattttgtactcatagtttaagcattaatgagcacataatgaaagcatatctctaacagatcccagttatcgggcaa

SEQ ID NO: 88098 - DNA, 1039 bp, Citrus clementina
  Intron number 1 from transcript clementine0.9_032204m (loc us clementine0.9_032204m.g) derived from phytozome v7.0 (c hr-ID scaffold_62; pos 118271 to 119309 reverse strand)
ttccgccgtcaacgtctctttcaaaggcttcactggttagtgttactttttctttgtttatacttttgagctaatttgatttattttcaataaatttcgtattattccgttctgcatttcaatattatgtgatgaagttagttttttggaggttgatagaattttgtacttttctgtattttaattaattaacagtctagagtagaaactttatggtcataacataaatattcattttgttgaatttatacagatccatatttgtacggttcaacttcagattctctgtaatttacaatgattgttgagatctgattctgactgaaattcattgtaattctttgaaattcaatactgtaattttctaaggaggttaggtttttagtgtgtcttagtttaagtgcaggaaggatggctctgcattgtttctgaatttgggaaactatcttaacaaggaaagaaagtaatcaaatgatgatgaaaattagatgctaatacgcagttatttgcctggaacatgtgtaacagtttaaggaatttttagcagttttgctatgaaattttcacatactcgcttgttagtttttgtttatatattccttttgggaggcaataacaatatgagaatatctttattcatatacaaattgatagctatatgactacatcctcatgttggacttttggaatctgtcgtgtggagcagaatgcatagctcttcagtcactttgctttatattcgatttgttttacattgcaaatgctttgtttttgtgcttctgtgaaagagcaggtgatatgtttgagagtgcagaacctgatagatgaactgcaaaatgtgtgtggtgtttgtttctctaaatatggattacatttacaaattagagactaggccttctcataggcacctggtcaaacttgcgcatacaattgttctactaggatttggaactttaagcattgataaataattcataaaaatttgttttgcccatttatgagtttgcaggcgggaagaaagtgtataaggctgtgctgg

SEQ ID NO: 88099 - DNA, 408 bp, Citrus clementina
  Intron number 1 from transcript clementine0.9_016614m (loc us clementine0.9_016614m.g) derived from phytozome v7.0 (c hr-ID scaffold_26; pos 2477748 to 2478155 reverse strand)
gagagaggatagtaatcagagctgtttcttcaccggttagtttacgacatctttcaagttttcgctggatgttttagattctaggtgctgctattttatatctatttggttgcttagaagaaaaaaaaaattcaaattctggggttacgattattgaatttcaattgatatcgattcatttgagctagtgttgtttctaagtgctgtaccgaaaagaagttcaaatttgatatatatgcgtaaaagaatctcctttagctgaagttttagagttaaattaacactcaagagaaagaaattcaatttagggttttcgttttgctaattgagtctctcgaatggagggttttaattattgtagtgtgttgttcaggaaattgaagttttgttagaagaaagaggtgaaat

SEQ ID NO: 88100 - DNA, 662 bp, Citrus clementina
  Intron number 1 from transcript clementine0.9_017947m (loc us clementine0.9_017947m.g) derived from phytozome v7.0 (c hr-ID scaffold_34; pos 1986242 to 1986903 reverse strand)
ttactctctttctccttcgtttttcgctttctaaggttcgcttccttagttttttatatttatttttcttttgagctttcagatctgaaccacacagcaaaagttttcatcaagctaaataatttgacctttgaaattatagatcctgatccatgttcgtaatttttttattgcttttttcttttagactataatgtacacagcatttgcgtttgctgaaaaattaacaaaaagctgtggttgtttatttttttaaattgttaatgtaagtcttatttgttggttggttaaaaagtttctattttggtgctgactgtttcttttcttctttttttccccttaatttttaattttaattaattacaaacaggacaaatgaaatagtcacatcagcttgtaaatctataattgtcattttgtgttcaaattggctcggaggtttgctcaataaatgatttattatcttttatgtattttactaaaacagcaatattggttgaatagacagagaaaaaaaaatctgtaatagtgttctgtgcttgtaagtcttgttttagattaagttggttcatttttcacttctggggtgtatgcttatgttttgttcttgaattgtttgctctgtagatctttgattttgatacagaaagactgattatttg

SEQ ID NO: 88101 - DNA, 687 bp, Citrus clementina
  Intron number 2 from transcript clementine0.9_006915m (loc us clementine0.9_006915m.g) derived from phytozome v7.0 (c hr-ID scaffold_22; pos 2271291 to 2271977 reverse strand)
taacgtcgtgtgcacttttgattgaaattcaacaggtaagatgttcacttttaagagtcttttttttttcttttcttttccctttctattttctttcatattttatatttttttaacaaggaagatttaaacgttttgaaatctgtttagtgaacagtgagctagttctgtaacttgagtatcactaggcttaaacttaagtgtcttcaatcttatgtgttttttgaaataagtgaacaaattgttgatattgtttatctatgatattatttagctatattcaatgtgtaaggtatgtaatagagttaataaacatgaaatgttcaccgggcatggataagcaggtgatcggttttgtctgttttgaggcggtttatgtgagaaacttgctaacgaacttgacagaactgtggagtaacgtcgcttactagtgtacatagcggaaattaggatggtacctttaggagatatcgttttgttgtcctttttgtcgtgactttggcacgagagatttggacagatcaggctttgaattcgtgagttttgtacgtttatcacatggattttatggacgtatgtctgctttatatagtacatatttaatgctacaataattttcgatgtctaatctgcctttaaagctaattactttttccttctataatgtgtcaggaagtaatccattgc

SEQ ID NO: 88102 - DNA, 481 bp, Citrus clementina; identical to SEQ ID NO: 82027
  Intron number 2 from transcript clementine0.9_021440m (loc us clementine0.9_020325m.g) derived from phytozome v7.0 (c hr-ID scaffold_80; pos 999411 to 999891)

SEQ ID NO: 88103 - DNA, 548 bp, Citrus clementina
  Intron number 1 from transcript clementine0.9_025772m (loc us clementine0.9_025772m.g) derived from phytozome v7.0 (c hr-ID scaffold_17; pos 3258719 to 3259266)
ctggtttaagtttgagagaattggaagagatcgaggtgagtaatagggataaaaatacctatatttcttgatttaagtacctatttaattcttatattttaaaaaatacctcaaaaacttataatgataatattacattacattcttatcctatttttttcttttcgtttaatgacataacttaatttgatatattataatttttttattaatatttcaaaaatattgttgtacaaatattattataaaaagaaaataaggatggaattgtggcttatttaacaataaaagtgtcttggaattttttttaaatatagaaattaaataaatatttaactcaaaatataagtaataaataaatatttaccgtaagtaataatgataactgaacacaaagtttgaagagacaaataatgacaaaatacgaaaaaaccatctcacttatcttgtattgatttttttttttaacttactttacaaaattgtatattaatgtatccttgctctttccagctacgtacaagattgttcactgtccttccgtttgc

SEQ ID NO: 88104 - DNA, 913 bp, Citrus clementina
  Intron number 1 from transcript clementine0.9_018715m (loc us clementine0.9_018679m.g) derived from phytozome v7.0 (c hr-ID scaffold_9; pos 5261927 to 5262839 reverse strand)
gtacgtcactcacagaatcttcgtttaattaccaggtgagctcatgatcaatcgatttctcgcattttactttagtttttttttcacaatttacgttaattactgaagaattgtcaaattctgaattgccgtcttaatgttgatgtttaatttgctaattagcaaaatttgattagattaattgtgtatttgtgcaacttatagtgttttttgcctctcaattttgatttgttcaatgtatgccgttaattttacttatgcttggagtaaacgcatgacaatttcggggctattagctagtgaaattgatcgtttaatactttagagtatcttaaagattactaatggaatgttcggcagtagtttctgcgaagtgcttaaaaaatcactttttgagtaattttctctggctttttatgacaacgcttatcaagtgcttttggcaagagcacttcaaggcttcaatttctttattgataatgaaaagcgtctttgtctattgtagctaattattaccgaacaaacactgtagagctcttggttattaagaagtgattgttgttgtgtaaaatatgctcttgaatatgccactaattgatgcttctctcaaggcaatgtccggagaaagacttacccttgatgtctccatgtttcaattttccgcataaaggatgaaatggcttgagtgtagaacttggatggcctcaacttttcatttattcaacgagagatcttagagcaatttatggattgtttatgttttgatatgcaattttggcgtaattgattacatttacatgaatcggcagtctgataccttgatgtttgaaggttcagatttctgatctttgtattttttttttcctcaaactttgcagattccttagttgcccttggcattttcagtaggggc

SEQ ID NO: 88105 - DNA, 732 bp, Citrus clementina
  Intron number 1 from transcript clementine0.9_009146m (loc us clementine0.9_009146m.g) derived from phytozome v7.0 (c hr-ID scaffold_9; pos 1359487 to 1360218)
ctccctgtttcgaatcttcataaattcaatcaaacgtaagttttttttttttttaatttaatcaatttatttaagttcgccgtttatctaatctgtagtgtttgttttccggggtcgttttgagcactattaatgcggcttgcgttttaaggatcctatgatatttccaccatgtatttgattttttttttgtcctaatttattatgtttcgtagacgtggtaattctcatttgatttgttgcatttgctttcatatcacgagctctgttattcttatattaaattgcatttttttattaatttctattttcgaattatgctagattgattgattttcttattaactaatcaatattatagtgtttgaatgctgtgcattagtcattattttgcattacgcgttatgttacctttacatatgataattgtcattgcttaaaaaatttgtgtcaaaataagttacaaagctactacatcagtgtttcttcagatagaaacttttctaagatccatgcttcatctgaacgtatggacatgtagacgtggctatgagtttttcggcattttaggcttgtcaattttatcttgtcctgtgatttttcaataggcaatagaatgcagctgtgatcagtggatattacgaagatgaagtttatatccatactcaatgctgaagttgggttgtctcattgacagattaggttcttacatcgtatcggtgtcctgccagt

SEQ ID NO: 88106 - DNA, 910 bp, Citrus clementina
  Intron number 2 from transcript clementine0.9_011432m (loc us clementine0.9_011432m.g) derived from phytozome v7.0 (c hr-ID scaffold_26; pos 1897876 to 1898785)
aaccaaacgtcgacaggtaagccaactgagacaaataactttaattactagaagtttaatcatgcttattatatatggcctatccttctttgtattttaatgcttaaagaatattttgtattttaatgctcaaaggtttttttttaatataatatttttctaaaaaatattataaaggtttaaaggtaagcactcgtgaaaaattgaaaaatatataactgctagaaatctctttcctataggctggggtgcatgggccaaaacggggcccctgagcccacttgtataggactaggctctgtttctaaaatgagtggagctattatcacacctctagtaatttcatcgggctccaattttgtttgaaacgcatcgactaattaaagaactaaaattattcttttaccactaacattcattttaattccttaaataaccctttccttttcctcctcattgaaaccttaaaaaaaaaaaaaaaaaaaaaatcccatgggcaaccgtaacatttgggtatttgactagatctagaactcaataaacataaccagtaaaccaactttgaagaagcagccaacatgactaatataaccctacactctacttttaatgaaagtattaaatacgccctttgattgctagttttgcatgtaaggaaaaaaaaatatttatgcctcctttgcttaggttcgaacgttttatggctcaatccattttttatttcttttttcagtaaagaatttatttttaaaataatatagggcgtgaagagttttttcaattttaatcaaggttaaatgtgtaaataataatcaagatcaaatctggagccgtcgacctacggaattgcactatctcttttttttttttcacaatcttttgcttattcggcctgacagatatcatatca

SEQ ID NO: 88107 - DNA, 681 bp, Citrus clementina
  Intron number 1 from transcript clementine0.9_021332m (loc us clementine0.9_021332m.g) derived from phytozome v7.0 (c hr-ID scaffold_17; pos 342050 to 342730)
aagcgaggttctgggtcgattttattgacaagaaggtaacttgttgattttctgatagatgtttatgagaattctgtttctctttcagatctaattggtctcttaactaaactaaagtaattagcttgcaaagaagctgaaactttcagattaaaataatcaatttcaagatgagaattctgtttctctttcagatctaattgatctcttaaccaagctaaagtaattaacttatatagaagctgaaactttcagattaaactaaagtaattaacttaatgtttatgagaattctgttctgggttctttttttttattaccaaaaaaaaaaaaaagatccatattgttgatgcaagctgtggcataatcacgattttgattcgacggggctataatacaaatatcataaacttgagtagactatgatgtaaattcagaaaaaaatgtgaaggccaatgatgaggagcaatgaattatgatcaaaatggagaagtcatgaacttgagtttatcataaaatatgcatactactaagaaaacttaaattcagtcctttattttggctctgtaagacttgcacccctcggctgctgatattgttgtcttgagatggatgctaaaagtgctaaattttgtatattacaaataaactttttgatacattattaaaagtaaattgcag

SEQ ID NO: 88108 - DNA, 606 bp, Citrus clementina
  Intron number 2 from transcript clementine0.9_019474m (loc us clementine0.9_019474m.g) derived from phytozome v7.0 (c hr-ID scaffold_19; pos 1366860 to 1367465 reverse strand)
ttcagcctggttgggatttgtttgctccttggaaggcaagttggttttgtatctcttcagtagataatctgtacttgttttgattacgtagactcatatccatgttgaaagacaaccatttgcaattgctggtacaactatgctcacatcttttctcttgtcagtcgttgctctaaaatttcaatctgttcttgtgtcaatccatgtacaaatgcacccatgttgttgtacatggttgcacatgattaatctcacctgtgtttatcttacttgcttacacctttgtttatgacttcagaagtgtattaccaaacgattattgggttaggggttatagtttcatatttggtattaattcttgaaatgatgaaatcagtcgttagtctagtggagttatgtatacagcctttcatattaagttccacggttttatcgttaacatgcatgatgcatcccagaattcaatcctccatcttgattggatgcatgaaaatttgttgtttcatactttcatcttcctgactatttggtagattatgctctgtagttttatgtagcttatgaatttcaggttgataattttggcacagtaaaccttgttgaagc

SEQ ID NO: 88109 - DNA, 859 bp, Citrus clementina
  Intron number 3 from transcript clementine0.9_035038m (loc us clementine0.9_035038m.g) derived from phytozome v7.0 (c hr-ID scaffold_6; pos 4398635 to 4399493)
cacgtaatatataataggttgaggtagagctggtaaaatttaacacaatccgattatctgacacggacatgacacgaagaaatagatatgagtcgtcgaatttaacacgattattaaatgggttgaattcaggtcaacaagattttttccgtgtcgggttcgggttagggttaaagttcttgacccatttacccgatcaatgacctgattatattttttattttaaaataatttgtaggttcttgttatcacaactcaaatattagagataattctctcttttattttatttttttgaaaagattaatataaatacagtattttatttattaaattttatatacatttagagttttaataatataaatgtgtaaaatattgttagacatgtatatatatatatatatatatatatatatatatatatatatattaaaacttcaatagtataaatgtataatattttggtagatatgtacattttgtaatatcgataaactatgtatgtatttacatttgtatgagagtgtgtaaatgtctgatgtaaattttgtttaatatatagatattaagcgggttatagggtaacccgattattttttcatgttgggtttaggtcgacctaaatttgacatgacacgaagctgacacaacaccaacacgacccgatgacccgttttacagctctaggttgaggacaaatgattagaattgcttgattttgtgcaattgtttgaatatgtgggccggaggtcaatataaagtcatgggagcaacaattgaaggacctggaagaaggaaacagaagaatgaaatggactgattgggaaccttccttgtgcttactggaagggtaatc

SEQ ID NO: 88110 - DNA, 873 bp, Citrus clementina
  Intron number 1 from transcript clementine0.9_026164m (loc us clementine0.9_025460m.g) derived from phytozome v7.0 (c hr-ID scaffold_19; pos 998402 to 999274 reverse strand)
cttctccgatccacttctcgtgtcgtgttgagtatgttgttttgtttgacacttctttattttttttatatcatcatcttttttactattaattattttctgatggtttggcattcatctagaaaagattggtttttttattttataatttgggtggggttttgattatgatgttcatctgtttcaaatttgcagagagtcatcgtagcgtcagtttcgccatggccaaaagttcattcaagctcgagcatccattgggttcgttaaaaatttcaattttttcttataaaataaatcttttcattactatttttttattgtttatccatatgcttgttttggttaaccctttgaaatatttttctggtatgatattttcattgatgaggttttgagaaatatttgaaatatccgattttctaattgattttgttacgaatttggcgacctcttgattgatggtggttctttgccaattaaaatgtcctcaaatctctccgcctgtataattccttcacattgtgacatgaaagaatgatttatggtatcttttgtatatactgcaatatgggtaatcgcttggcccccttttttccccttccttaatccttttcccaagaacaaggaacgcataatgtaaagaggcacagttgtttgttaaccatgttaaccccatcccatccatatgttctaacaaacaattgtatttccgagattaccattgtcatggttcttctccagtttggctttgtgtgtgtgtcaaggaattaattgtaatgtttattctgttctctctcatttcttgtctgttatttgttggtataatctcagagaggaggctagcagaatctgctcgcattagagagaagtatc

SEQ ID NO: 88111 - DNA, 226 bp, Citrus clementina
  Intron number 3 from transcript clementine0.9_004137m (loc us clementine0.9_004137m.g) derived from phytozome v7.0 (c hr-ID scaffold_26; pos 3165252 to 3165477 reverse strand)
ataaggtttaacatctgtcttatttgatatgattgctactattgtcaaaaccacttttcatagagctcttcctagataagaaattacttggaagtgcttttccgagaggcatagtttggatttccttgtggtttctcttttatttcttttgctgagcatatgattgagttttacagctaatgattatattttaagtctccttttttcttttatggtgagaagggtg

SEQ ID NO: 88112 - DNA, 607 bp, Citrus clementina
  Intron number 1 from transcript clementine0.9_018980m (loc us clementine0.9_018980m.g) derived from phytozome v7.0 (c hr-ID scaffold_19; pos 3625703 to 3626309 reverse strand)
caagcttgatcctgccaataagctctactttccctgtaagtgctataatttttttcatttttcgaaaaatggtcacgtttaattcctcaaatgaactgctagaaaacgcaactgctactgctagtagagcagtaccgaaataattagaattttactctatatcatttacagttgaaaaacaaatcaaattagaaattagatagcatgaaaaagatagaaagcaagacaaatatttttagttaatgacaagaatttcacgtcactaatgagagaaatttagtaagcccagctagatttgaacaagtttagttagtggaatatgaaaataacttttcaggtgcgggtgctatctagtcgaaatggtaaaatttgttgtgtcgaaaataagagctctgggaagtccagcccgcttatgtgggtgaggaagtgattgggttgctatttggctaaatcataataaaagagaccctcatttatttatttttattagttgcatgcttatttagcaagtttgatgtagcatttcaaatttcggtttatttgactattgtgattctaatttaattctgaattttttcatgatttatgtcgtctattttctttcaag

SEQ ID NO: 88113 - DNA, 600 bp, Citrus clementina
  Intron number 1 from transcript clementine0.9_016221m (loc us clementine0.9_016057m.g) derived from phytozome v7.0 (c hr-ID scaffold_9; pos 1568884 to 1569483)
atcaaaaggcaagaacaataaattcaattactcgaagcaatttatttttcttgtttaattcttttgttatctatgctttcattattttttttaaaattttttacttaaacaattatcttaattttcatgatcgtgtgcctttatctatagtgattcttcatcagcaatgttagtaaatataatccatctgtttaattaacttttctcggtatcgttcatgccccgatcatagctgacatatatttatatatagcacaaaatcgaagtatctatattcacatatataaattgatgcgtatgctagatgatatgtttattaatttgatatattaatctgtttgatcagccttcatttatttgatctttttcattctaataagtacgtacatatgtgtacttaggcatttagcttttgatttacgtattttatttttattttttgaaaatatatatattccttcatctcgaaccgattcttgtaagccgattcttgtttttatttccttgtaattaatatacgtgatctcttaaatataaataattaacttgatctcagattgatcagcgcatagctggcggtggatcaagcgatcttcaatc

SEQ ID NO: 88114 - DNA, 684 bp, Citrus clementina
  Intron number 3 from transcript clementine0.9_002795m (loc us clementine0.9_002795m.g) derived from phytozome v7.0 (c hr-ID scaffold_32; pos 1512164 to 1512847 reverse strand)
agaaaaggtcttttgtcaattccgcatgtaaatgtaatatgtacttggtacgcataaagagacatgtgaacttagcatcaagcgtcgtacattattcattgtatttagatgagaatttgtgtcattgtctgattgttttacttttgtcaataaaactatgttggactaattgtctgtgttttggcattcttaagtagacgagttccacactggtggaggtaatctctgtttctactttcgttagtaaaccctttattgtttaagtattggtgggagcttctgccctctggcaattgcagctcgtctacctttttatgtgagacgcagaaaacgtctcttttaaagtttcagattactatgtttgatgttgttgcatttatcttagttaatatcatttgtagagcctatttccatttcatgtcctgcatttgtacaggagcaaacaacattgccgtaggtgatgttattattaattgttgattgaggcaaggtatcattggggtttgtagggacaacagtttcttttctttttgttttaaatttatagcttttttttttccttaaattctttccactttgatcaatgtattatacatgttttaacgtgctttgcttttctttccatccatttttctcttgtgatgtgtagatacaagaagctcctcagctctgtggatcttacga

SEQ ID NO: 88115 - DNA, 508 bp, Citrus clementina
  Intron number 1 from transcript clementine0.9_000923m (loc us clementine0.9_000923m.g) derived from phytozome v7.0 (c hr-ID scaffold_34; pos 1145702 to 1146209 reverse strand)
ccgaccgtgatattgagcaggtctcctcatcatttttgacatttcttcgacatttttcttctatttttcaaaattctgttttttctctctctctttttttaaactaaaaataatttttttcatcgacactgttgttacgtttattcgaaaccgaaattataaagtttaataatgagtttgagtattctaataatagaataaaatttaaagcgtctatcgtatttctacattacaagtatgataatgatttttatttttggagctaattttgtgaagtaacttacaaatagatatttctcaaagtttggtttttaatttatgtatattaactatcttgataagttcacgtgatatgctttgtgatacttcatgatatctatcgaatgtcactgtgcatttttgatctagagaaattacccgcgaccatttcttgttaacgtaaggtttgtaaacgatcctgctggtttttgcaggcattaattgctttgaagaagggtgctcagcttct

SEQ ID NO: 88116 - DNA, 692 bp, Citrus clementina
  Intron number 1 from transcript clementine0.9_025382m (loc us clementine0.9_025382m.g) derived from phytozome v7.0 (c hr-ID scaffold_19; pos 1538460 to 1539151 reverse strand)
gcagcgtttgctcatcaatccattcaaatcaagttagtttagtttcttctcttttctttactaattttttttccctatccaaatagtcgttagggtttcatgtaacgtctgtcgaattcgattatttaaacacatgcacattattatgaaaaatctaggctttaattcattcgtttccgattcttgatgttttgtttcaatttatcgagactattattttgacaaaatttaaatttttattattagtaattgaaagattaatttaatgttcctttaaattgaacttaattatacttacttcggtgctctgtccgtgattttatttttatgagggtatcgttagagcttaaatgctttcagagagctaacacctaaacaacatgatttggaatttcagaatattttattagataacgtctgttggctgttatttttgaagagttacacacaatgctcttgcttgatccattgttttcgtattgctgaagattgttggatgggttatcttacgtttggagcaattttcaccttgcgttagattttagtttaagcagaatcttagtcatgaaacccgtaattagcctatgttttttcatctatttgtccatacctcgtttgctttggagtttgaattttccctttatttatttttgttaggctgaccctgaactagaagcaattagacaaagaag

SEQ ID NO: 88117 - DNA, 757 bp, Citrus clementina
  Intron number 2 from transcript clementine0.9_035759m (loc us clementine0.9_035759m.g) derived from phytozome v7.0 (c hr-ID scaffold_59; pos 110929 to 111685)
ttggcggaggtcacggatcctactctccatcgaaggttactttagttacgttagaagtgatttaaagttgtttgcttgtttgtttggctgctgagaaaatgcaggaaaatgaatcgaaagtatcaatggaattagtgaagtaggatattttattattttatatgaactgaggttaattatgaaaaatatgaaggtcaataatattaaaagtttaatttaactactcaccaatgaatctgtagtagtgaaattttcaattggaagtgatttgcttttgcttttagcaaaaatgtttagaaaatgcaaggaatgtttgctgatctgtttttgttttaaacagtgactaggtgtatgcttacagaaacatatgaagcttttctattgactatattttctttttctttcagtaatttaccttaggcctgtaagagatctactatatgtgatagatataggtcctgctccttttgaggtatcagtgttgtgcttataaccgctgcaattaaattcactacactagcatcttgctgcatctttttggggactcttttgaagatatgtcagtttcatgaacttcgtacatggaatatggatccacgagacactggatagagtaaatgcaatttgtttgaacataaatatataattgcagaaacatgtttatatttgagctcctttcctttctgtgagcttgcttcgcataattttttttcctcatagcttatctattcttttgttgccatgcttaagcagatca

SEQ ID NO: 88118 - DNA, 475 bp, Citrus clementina
  Intron number 3 from transcript clementine0.9_007388m (loc us clementine0.9_007388m.g) derived from phytozome v7.0 (c hr-ID scaffold_19; pos 2078352 to 2078826 reverse strand)
tggttagtctatactcagctctgcacttgctttattattgaagctggattccattgtgatgcgaaaaagagtccttcagtcaatttttgtgtgacccacctagtggcctttgctattaactattgtaagcgtacctagaatacatattacaggattgagtagaaatttaaaaatgccagccaaaccagtggtggaataagagtatttgactcgagttcaataattgtactggggtatgtttgaatgacttttgttttgtttttgtttttcttcggttaaatagtaacataaggatcttacaacagataagcacaaagccactcacttataagtcagctgccactatttactaaaagctaattttggctcacccccattcacacatactctaatcttgtgggggagtattaattttattatgccttaaagcaatcgctaattgtcttgtttgtgtttatagagatttcttaacaca

SEQ ID NO: 88119 - DNA, 553 bp, Citrus clementina
  Intron number 1 from transcript clementine0.9_030694m (loc us clementine0.9_030694m.g) derived from phytozome v7.0 (c hr-ID scaffold_34; pos 240427 to 240979)
ccggctctattcattatcctcgcagcactcctcaggtatttattttccaacaaatattttcacgttcaaattaaagtcaagaaaattaatcagttggtgcaccgctttgttcgactttgatgactagctaccaattataatattaattgcccccatttttttaatttcttttcttgtttcttactccacacgtaaaccaagatttgcctaacaaccttttggtcataagtcatgtttgttttgctatgctacatgcattttggcttttctcaataaagttatatgtacgtataaagcagttttaccagagaaagaataaaaaaaagaactcaatgtatattgaaaaacgtttaaaatcatcatttgatgactttgtggctgtaacttaaacgcactagaacgtttttgactttcgtctgtcaatatttattgagacaaaaatgcaagacagactcaacttttaccaatttcgtttccgttggcatttagcgaacatgtacattatcattctgcacaaaaatgaaaacgactatgttttcatactctttttcag

SEQ ID NO: 88120 - DNA, 788 bp, Citrus clementina
  Intron number 1 from transcript clementine0.9_018017m (loc us clementine0.9_018017m.g) derived from phytozome v7.0 (c hr-ID scaffold_34; pos 46243 to 47030 reverse strand)
ctctcttctccactccaccatcacttccgtctcaggttccattattctttcctttttaacattttttttattatattatatttcatttactgaagtgcgtatctggttattttgtattttatcaattctttctgttaatgctgtgctgtttgttaattcttagtattgtgtgcatttggtggttaacatagctgcatgattctggaaattgctgtcatgattttgtccagaaatgtagtggttgatgtaagattttcgctgactcaaatagaaataaactttgagttgttaagttgtattaatgaagccgttgttgcctatattctattggccacaaggaacataaagtcaagtttgtggcagaatgtatataggggcaatgtttgacacatgaaattggttcaggtgtgaacgttgtcgagtcgttagaatctgtgttcatgttagttcaagctgaaactttctaattgtgtacatcagaaaggcatattattttaactttagtggacagctgtatgtatagaaatacagaaaattggatgctgagaagagtggttcaagcacatatctaaaagtttgaaccctgatcacatgtgttatgacttgaacttagtttgacacaaagacagcaagctttcatcttcagattacaaaatttgtttgtattaatttcttttgctaatagttttattcaaaggttttcgtatgaggatccattgtcttgttaccaggagtaatttcaaatgtatttctgtgtcttttgcagtggtgttcatagtggttaatca

SEQ ID NO: 88121 - DNA, 792 bp, Citrus clementina
  Intron number 1 from transcript clementine0.9_035013m (loc us clementine0.9_035013m.g) derived from phytozome v7.0 (c hr-ID scaffold_9; pos 1400258 to 1401049)
atagctgggtttcggaatcattactttcttggtgagtttttttttttttttttcgtttacttttaagtgtttcgatcgttctcaacaatgtaactctccatttagtggcgcaatgtgtgtgttttgtattcttaatgaaactatccatggtgtagcatatcttatggtatattgaaactcgcgtttcattaatttaaatgttcatttttactctttagagctatgtttttaatcctagcctatatttgaaattgaggtgtcgtgacttttaagttacaactgttgtggtgaaaaaactcataaaaattggtagttgttataaaaatgacttttaagtaatagctttgacaaaaatagtaaagatattatggatttttcgtcatataaatgtagaataaaatcaactcagctcaaattacatcagcaagtgtttataaactcttcaatgttgtagcttctaagctacggctgtctaattatattaccaaataaaactttagtctaaggaattttcccttggataaaccatctagagattcaatgatcatggacttgtatgtctgcttgtaattttgttaggggatttaatcaattttttaattttttattcatttatttattttgcatttatatctggtaaaaacacattaaactccttgggatcaatgatcattagtcttttccaaattctgatttcttttctgtaacgagttatataaatccctttgacattgctatttcatcaagtgtaatgatgtttgtacttactaatttctgcttgatccatgtaag

SEQ ID NO: 88122 - DNA, 955 bp, Citrus clementina
  Intron number 1 from transcript clementine0.9_009001m (loc us clementine0.9_009001m.g) derived from phytozome v7.0 (c hr-ID scaffold_19; pos 3283371 to 3284325 reverse strand)
gaggtaataaacaagttaatttgcttgttattcttaattctttcgtcataatataataacatataacatgcatccgcttttcttgtccatcattcagccaacgctagtgttaccctgatcataaaccttttcttttaatcagttccttcttccacaaaattgaaaagtgctaatatgtttttcatctcatgcctagtttaattaactaggtaaattgcactccaccccccattgatattgacattcatcaatgtgccccagccaataaattaagttgttagttgaccagcttaaaaataggtgtttgactattttatttgctaattagatttaaaaatcttattctctcatattttggtttcttatgtcttgtgatactaacaattaggagcaaaattaattataatttcaggagacaaccgaggtcaataggtcattttaaaggaaattaaacaatagcggcttggggttgcgttaatgatctacagtacattacggggacttgtttgatgaatgtcaaaattaatttcctttttttttaatccttcgggtgggggttgggggagtttgaaatttaccgtaatgagaaggtggagtattgtattcagttttaaggtttcaaaatctaaaagctcagtgattccctatattaattaaataggcaaccctctcaaaatttaattaaaaaaaaaaaaagcacagccgtcagagagacccactgttgataattaaacagcacacttgctaataaagaattaataaaaaaaaaaaaatcctttgaggatatgtatgattgattgattaccctttttcctcatctctaatttatattttcttcatttacatctaaaatcacgagcctctcgttcatcgcataattggtattgtgaaatttcttatgtattctttatgttctctaatgaggtgacaagattctctgtgtttcaggccctgg

SEQ ID NO: 88123 - DNA, 144 bp, Citrus clementina; identical to SEQ ID NO: 78488
  Intron number 3 from transcript clementine0.9_006148m (loc us clementine0.9_006148m.g) derived from phytozome v7.0 (c hr-ID scaffold_26; pos 3226708 to 3226851 reverse strand)

SEQ ID NO: 88124 - DNA, 1009 bp, Citrus clementina; identical to SEQ ID NO: 87335
  Intron number 1 from transcript clementine0.9_024475m (loc us clementine0.9_024475m.g) derived from phytozome v7.0 (c hr-ID scaffold_2; pos 1183961 to 1184969)

SEQ ID NO: 88125 - DNA, 696 bp, Citrus clementina
  Intron number 3 from transcript clementine0.9_018028m (loc us clementine0.9_018028m.g) derived from phytozome v7.0 (c hr-ID scaffold_2; pos 7602965 to 7603660 reverse strand)
gttgaagccacaagaaaaggttgttgctcggcctggtaagtttgctggcattgggtttcttatatcattttattcttgttggatagtgaaatacatgtacaggacagattttggatcatgtagcttatctctttgcaatgttcatatgtaatgtaatcacagtcaatagtcatacacctgtcttccgaagtcagcattttggtctgtccattacacatacattaatttttttgacgcagtgatctgctttatgcttgatcaatgctcttccattttatgtctctgggtcgtctcatcttgtcttgcctttacacccttttgctagttgggtatgcaccatcatcctcctggcttcagtctgttattcattatttggtataagttaccttcactggctaggaaaatttacttaacactccttgaaaatgttgcttgactggaaattagtttgccattggacccttgtaatagggacttcttgcaatggatatttacgtgcttgccgcttggcatgaggattttgccataatgttgaagtaaagacatggggattgcttcataaaatagacaatgttgccaaaggccatgtccatgatacatgcagttcaatttatgaattttgaattgtaagacttgtcttcttcagttatacagtgatgactggttgaactgagagacgaataaatttcaggttcc

SEQ ID NO: 88126 - DNA, 799 bp, Citrus clementina
  Intron number 1 from transcript clementine0.9_001591m (loc us clementine0.9_001591m.g) derived from phytozome v7.0 (c hr-ID scaffold_19; pos 3143221 to 3144019 reverse strand)
atcttttgcactcctcctgtatcagagagaacaaggtatattaatatcaacccaaaattgacaaaaataggattaaaaatttgtttaaaaatgagaacttgaagctgcaaactgaaccttctggaccaaaacgtatgaaatttggcagagcacagatgttgaatgaaataacttcactgaatttttgacaatttcaggggacccatctggcaattttgttgtaagtagtgtgaagctcaattgtaccagttttctcctaagtttatgataactatttgaacttgatagttttgctcagaaatagaaattattaacagattgtatggaagtttgaactcactggtttaagcctgcttttaggacttgctaaatttggacaatttcatagaacttgtctgatcttgacaacatgcttgccttatgatttaatggcagctgtattgtcttcatcttgtcaatagatctatacttttacttgattatgatcatgctaatgttaaatgtcttggcacaagtttaattattgtctttggctttagctgaattaatggatatttaaaggagaagtagaagacttttgataacaagttttcaggtctttgtggcttcatttcattgtgcaaaatgtttatttattataattcttctgggggaattttgcatttattacatttgtttatgttcatgcaaatctgcttatttaaattacctttaattgtgaaaagtcacatgtttagattttgatatgattcttgaacatagatggtgattactgttttggtgcctacagactgcagtg

SEQ ID NO: 88127 - DNA, 467 bp, Citrus clementina
  Intron number 1 from transcript clementine0.9_015944m (loc us clementine0.9_015944m.g) derived from phytozome v7.0 (c hr-ID scaffold_26; pos 2029925 to 2030391)
tttcgccttggcatcaacttctttgacacttctccgtacgtgttgtttctgttatcccattttattaattttttgataaatagtagcattgaaatatatatttttttaattttttatttgtagttcggtcattatttgttgatccaggaataaaaagattaataacaaaaatgacatggaattagcttagttgttgttggatgtgaaaatgggtagtctgtatgtgttaaaaatgaaatctttatgatgtttttatgtaattaaggggaagaaaatgaattaaaaattgtattgcttcatttagattttatgagaaatatatttgattgtgaaatgggggatattcatttgggatggaaatgacattaatctattcatttgggcagaaaattgcatatgaatgttgtgcttaatttttcgattttaattctaattttcgattctttttctcaatttttgaagatatt

SEQ ID NO: 88128 - DNA, 690 bp, Citrus clementina
  Intron number 3 from transcript clementine0.9_032403m (loc us clementine0.9_032403m.g) derived from phytozome v7.0 (c hr-ID scaffold_22; pos 1758161 to 1758850)
tgctgtttcagttgctgttgctgcttgctttggaggtattgtagaagtgacactgctgacttcatcttcaaagttgttgggatttcctgaacactttgctgaattgcctaagtgcagccctgtattgcagtaggcaatctaaattttgtttctagcatttttaattatactcaatttatgtgcggagatgctttctataacttctatacgattcaccctgaatagcactttcatatctgttgtcctaaggactctgagactaaataatacaaggatatcagagtgttctgtcaaaaattggagctggatagctgaaactggaaggtttgattttatggatatcttgtacatttgaaaaaggctgtgatctgttgattttgaatcttgtggcatttttcatacattcttctaggggtcacggcacttcaaggaatcaatctatgaactgaggatgtcagattagaactagcttaagaagatatgatgatttatggtgacgaaaatgtcagatgatacccctggtggagagataagaaaggaggatgctcatttacttgatgtcagattagttatattgtcaatgcttgtattttttttttttaatttaaaattggaagggaaaatagaataaggtggatgctatttacttgctctttttgcgtctctggagctagccttacaggcagcaaa

SEQ ID NO: 88129 - DNA, 892 bp, Citrus clementina
  Intron number 1 from transcript clementine0.9_022715m (loc us clementine0.9_022715m.g) derived from phytozome v7.0 (c hr-ID scaffold_34; pos 1983123 to 1984014 reverse strand)
gaggttcttggccaggtttgttacttcttaaaaaatttagttgaattgaaacttcaatgcaaagaggaacaatttttgatgaaatgatgcaaagaaagctctttcattgttttccatttcagttcgggttattttttttcatagaaatatgtgaaattgaggtatatttttatatgacagcgaagctggtgggtaaatatcattcaaaatacagtgaagttgacttttcggctccgtttggtacaacttattaaatagagcttataacagtagagcttatagcagtagagcttataccaatagagcttttggacaaaaagccattgggtatttggttgtcaataaaaaacgcacttttgaaccattaaacagtgtgatattttttatattatatatttttagaaaagctttataacctctactcccaaaagctcaaattttgggcttttgctagtagaggtaaattagctcaaattttgctagtagagctaaaaataaccaaacactataaaaaaatttaaaaagtgcttatacgattaaataagcccttatggctcttaaataagtcataccaaataggcacttagagtaactagtttggcttttgaggacataatgattggcttttgtaaatagtcagcagttgccatcgatcatttagatgatccaggaaagataatttgattattactccttgtaaatttctgcaattaaccttttttctgtttagctacagactgatgttgcctaagattcttgaaagtatgataagaatttattgatgctgtaaatcaagctgaggaaaacactgtttctcttaggtgacccttttgttttcttctatttgatggtaactaaagctttttccaccctgaatgcagtccttttgtgg

SEQ ID NO: 88130 - DNA, 213 bp, Citrus clementina
  Intron number 1 from transcript clementine0.9_006671m (loc us clementine0.9_006671m.g) derived from phytozome v7.0 (c hr-ID scaffold_2; pos 6569532 to 6569744)
gtggggttatccagcttggtttggcgcaaaacaaggtgttttttttataaaaaaaaaaaaaaagaaaagaagaaaatatctcaataattgttttggctttggtttgtctaagttgggctttggataacagaaaaattggttttaatcaacttttgagcttttttgttggttggtgtagttgtcgttggatttggttaagaattggcttgctga

SEQ ID NO: 88131 - DNA, 424 bp, Citrus clementina
  Intron number 2 from transcript clementine0.9_006671m (loc us clementine0.9_006671m.g) derived from phytozome v7.0 (c hr-ID scaffold_2; pos 6569821 to 6570244)
gagttgaaagtggtaatgacattctgtaacttatgcttttgtttgtttcatttcttttatcttttctctattttctcttttgactgtgaaactgattaaagtaggctgtgcaattatttgattataaatgactttaaactagcaacatgctctgaaagaagattatcctctccagtagtttgtagtctgttaagaagaggtatctctctttgaggaggatctgcgtctgcccctctcatgtgattttagatttatgttgaattactgaaactgtaatctttaatccctgttcttttgtgaattatgaatggtgctttcttttgtgtgaatgatatttttgttaactgcagttaaccgttttatcttcaccatgcactctaatctcacaggctgtagcagggtttgtatctcaattcttgggaaa

SEQ ID NO: 88132 - DNA, 384 bp, Citrus clementina
  Intron number 2 from transcript clementine0.9_032428m (loc us clementine0.9_032428m.g) derived from phytozome v7.0 (c hr-ID scaffold_34; pos 167051 to 167434 reverse strand)
ccattacaagctccgggtttgtttattaacccaattattcctttttcttttttttcttttttccctttcttccaatataactcacatattgtgacttgattctaatacaaagtttgtggaagcactttcaactaaatggattaaaatggagcggcaaattatatgagacatagtcttgaacatcttttcttaaactgaatcaagggaaaatttacttacacacagcaagcaatttttctattggcatggaaaaggtctaagcaatcggcctatcctttaaagaatgtcatgcaagtttaaccaattgatatgcgaattacgagaagcataagtttgattgatgttgtgctgatattattggttttggcaggcaactaattcaag

SEQ ID NO: 88133 - DNA, 676 bp, Citrus clementina
  Intron number 1 from transcript clementine0.9_031823m (loc us clementine0.9_031823m.g) derived from phytozome v7.0 (c hr-ID scaffold_6; pos 5553172 to 5553847 reverse strand)
gtgacataattgacagccaccctcctttcgctattgtagtgatttaattgccctcaagactcaagcaataaaccactgcccaagaactctagccaagatcaaaacaagtttagatatcaagacaccaacatagattctaattagccttaggtctaagatgattatcacagagtaaacctaactgagaagcacttcacatacacacaagaaacagaatctaacgtggttcgattgtgcatgaaataatctacgtccacgggagaagccatagaaaaagatttattgatgactcaagaagacaattacagagcttctaaacaagagattacaagcaacatgaagaacctctctcacttctcaatctctctctaaagctctcacagaacctctttctttctccttcaacaaccatctttatacccctgatgctgaaacccagattgcacacaatcaggacacgtgtgtaacggcaaataacagattagatttgttcctcacaagctaaatcacgtgctccacttaagtttctccaaaacgatagggggctgagccgtttagctttaaactttaagtgactcgtgactgcacgtgacaagtggctgaaaaactttaatccaaacgaagccgttttggagctctaagttttcgattcattgcactccagtccacaactatc

SEQ ID NO: 88134 - DNA, 652 bp, Citrus clementina
  Intron number 4 from transcript clementine0.9_011021m (loc us clementine0.9_011021m.g) derived from phytozome v7.0 (c hr-ID scaffold_6; pos 6389300 to 6389951 reverse strand)
gaaacacaaaggtcggaatcagtgagttttcttgtgtctgaagttgtgcccattttgttcgtgtattaattatgcttgtcttcgaatattttgatcttaatggaaatgctttctgttgattcttcatctttaatatatttttgagtgtcttattccaaaaaaaaaaaaaaaaagaggaaatggatatgctttctgtttggtacgtaatactggactaaataacaataagcttgcaaaattagtaatgtatggtatttgtctatgactattactttactttgattcatgtgtcaccatagtttatgtgtcaccatctgttactaaaggattgaatttataagcaatgatgcaccttgagatgtatcccagtgaaaactatcagctatctgaatttttgttttcctaactgtttctaatgcgcgcgcgtgtgtgtgtttacacacgataattgaatattagatgatttagacaagtatgactttctgtgagaaatcaatgcatgagctggacagtagaaagaagtgaaggattgagtggcttcacatttcaaaattttattgctgttgctcgttaggaaatggaagaaatcgatatatgtggttgctaaactcatgcaggttttggtcggattggaaggttggttttgcgagta

SEQ ID NO: 88135 - DNA, 989 bp, Citrus clementina
  Intron number 1 from transcript clementine0.9_029095m (loc us clementine0.9_029095m.g) derived from phytozome v7.0 (c hr-ID scaffold_80; pos 671800 to 672788)
tcttcgaggaaattcaggtgcggcggataacacatgtgaagagagggtaataccgtaattatatgtaaacgccgtggcattctcaaagagctaatactatataaagagctctcgctagctcgttcttacgaaaacgaaacggacggaaggaaatcgaaattcgttttgtgaaacagagttaaaaatcaacccttctttaatcctcaaggaattttattattttcttggtctctgaatcgagggttttgcttcttggtttagtgggtttgttttcgttatattatctgtacgtatatcgatttcccttatcgtttgatctttattttatcgtattgtttatttagtttatcggtctatgaatctctgtatgtcgtgttggttggtgtttggttgggatttgatgaagaactttttaacgatgaatccgatcgcgcttgattttttgaagaaataaagatgggatttttatcagattttttgctacaaaattctttctttatcagattggttttttcttttcttgttttctttctttatagatccttacttgtttggtctggtattttaagataagattattttgattgtggtattgattctggtgaagatcgtttcaataccttgtatgaagataattgtttattgaatattaagttcctgcttaaagaacttgtctttaagcttctgttagagatttcttattctccttttggttaattacacaagaaattgttattttctttgattggtgctattgttttcattgctttgctgtttggtttgttattgtacatatgcttgcatatatgcaaatgcttttatgtagttttttttttttttttaaaaagaaggaaactatattctttttaagttctttggttacatcaagttgttttgcctgtgattggacatgggtatcagattcagatctgttattctgataagggtgctgatgtctggtagtattgttcttgcaggagaaaggctga

SEQ ID NO: 88136 - DNA, 693 bp, Citrus clementina
  Intron number 1 from transcript clementine0.9_017326m (loc us clementine0.9_017326m.g) derived from phytozome v7.0 (c hr-ID scaffold_6; pos 2603590 to 2604282 reverse strand)
gtaagctactttaggatttctgtttcttccttcaggtactctctttatcccttcactttcatatgcttctgttttattggttaccaagatagaatttattcaccattatttcttattttctcgcaaaaacaagaaactttatccctgtttcttttttcttgatgggtattttttcgagtttagctatactttgtctgtgaagtaatcaaatacataaacttgaattagaggttttctgcattagcctttataggtaatccttttcccttaatggtgggctttgatgtcgtggcaaaatataatggaagcaaagttacaatagattgcgactgcagaagattcttttgctgctgttgcctttaataattagaaattctatgctttttgatgagcgtggttgtttattgtaagactttgaatgtttttctaattgatgcttccatgttttggtactatgattaaagcttatcaagtcgtacaaacatttgtttaccttgttactttaattttaaattttggtggctctgagttgcactaacacacacacacacacaaaactttatgtttgtaattctgaaatgaacttcaacatttttatctttgagaaaataattctaattgatgtgaaggtcccttatagatatttatatttatttatgatgtgaaggtttacttaattttgagagaaacaaa

SEQ ID NO: 88137 - DNA, 1058 bp, Citrus clementina
  Intron number 1 from transcript clementine0.9_018138m (loc us clementine0.9_018138m.g) derived from phytozome v7.0 (c hr-ID scaffold_78; pos 401009 to 402066 reverse strand)
cattgttactagccgttgctgtcgcgctggtgaaggtgagtactgagttgtgttcattgtttgtagttttgaatttatctatctcttctggcatgtgctggatacgtaagattggaatcaccttgcaataaattcgaagtacttttcctgattattgattttaaattggtgggtgcgtagatatttatgaagttgctttctttatcaataccttcatctagtatccaaaattgttagtttttgacttatctgttcactgttttaagaagaataaataatcattaacaattttttctttttcctttctcggccatgcatataaagacgtgttttgtattttgtaatagcaattagagggtttattctttgttgaatttgatatgcatggttggtttgatttttggaagtaattgacaatttaattgattgggggcaaaaattaaaatgaaggttaggttgttatccactgtgcagttactagttaaactatgatgtctgacccgagccaaatcaaatttcagaatccatccaaagtgaaacattttggttcggttcaattatgaaatttggtttggtttcggttctatttcttaagaaccgaaggtttaagtcctggaccgaactggactgtatactttccaccgctagtttttaccatcgtagccttgatccagggttcctcatttcctgcctcgagaaatccttactgtccatctggtggtccttattcgcacccttgaggggttgttatttcccatctggtggtcatcaccgatgaggtagtatgtcgatcaattttcctgtcaacaatgttgatacatatacatttcttttgttagtcaaatatttgttactactgaaaatgatagtaagactttgataaaaacattttcatttcataattatataattcgattgacagagctcagcccaaacttgtctttaactaaagggccaaccgagattggctcctttttgcctccttattctaattactaatagctgtgactgtgcctttgcccaccagctgctcgatcaaatatttgagccaaaaaaac

SEQ ID NO: 88138 - DNA, 789 bp, Citrus clementina
  Intron number 1 from transcript clementine0.9_033485m (loc us clementine0.9_033485m.g) derived from phytozome v7.0 (c hr-ID scaffold_6; pos 4314991 to 4315779)
ccggtgagtgcaccctcaaactcatacattgatttcaatactgctatattgctacagttgccatgctttgttcattttcataacaaatagcagcggaatcagaattttagtttaaccaaggcagatttaaggaggcctaaatttaaacctaagaggccaaggcctcagcatcaacataatacacagttgctgcgagatgttgaattttgtataaaatgtttttccttctttgcagcatgctcgatagctgttaatgttcaaggtaataatgagatgactgaagctgcatttgatttggttcggcaattaagttagttcgagaatgcatatgatcagaatataatcttgagtttgtttttggtttttaatttcgatcctgttcagacattttctcagaattaaacaagaggtcatggggttccatactctgaacatgtttcatgttctgatttttctataaaagatataatcttgaattttcgtattctatttgttgcctcccaaattttgtttaattatttaattggatggcatgcagcatcaggccttgagttgtcaacaaaggaatttgtcacaatttagacatagtgatagagatgggttattaattcttttatgcgtggaggaaaaaatgaatacttacatgtataatatttatatataagtcatcaagtgaaagagactgcttaggacttttaagttaaattgactaggctaccctccaatagttgacttctttgtaaccttacgaattattattattttccatatacgcaggcttgcaaagga

SEQ ID NO: 88139 - DNA, 998 bp, Citrus clementina
  Intron number 1 from transcript clementine0.9_006642m (loc us clementine0.9_006642m.g) derived from phytozome v7.0 (c hr-ID scaffold_9; pos 2519865 to 2520862 reverse strand)
cctctccttttaccatcactggaagaaaatctgtacttaaatttcatcacattcttacattttaattagttattatcattaaaaaaaaaaaaaactcttcttcttcttcttcttcttcttctctttcgttatttggaaaaacaattaaaaagttctaaagctaagagttggttttgatgttcatgattaaagaaggtggtgatgttgtttctttggctttggtttagtagtcatatccttcaagattgtggcttttgagttttgattgaaagctttacattctttttttttttttttctttttttgattttggctacttcttttttaaaaaactttttcagaacttttctgagctttgatgctttgatgttgaagttcaataagttcagagattttggactgtccactactctttgctttcgactttctctctctttcctcctcatgaaatatttaaattaaatccaaaaaactttttttttcttaatcaaaattctatttgctaataatttttttttttaagttgcattgatccctttttttttgtttttgtttttgttttttgcttgcagttatacacacacacacacacacacacaccctctctcagtatttttttgttttattggatcttgaattttgataatgaaattgtcttcttcttcctctccttcttcttagtcttctcttagtagggtctacgctgtttctgaatttaattaatgtggtgtgttcatttctctttcagctaactccatttttactacttgaggttgtttagttatgcctatttgggtggtaatgtaaaaagcgttttatttttttattttttttatatctcttttataacttataacaaacatttaatgcccaccaaaaccatcatcatcaattttttgttctttttttgggtttaaaatttgggggtggtcattcattgtaataattgaaattaaattgtaggtggcacatttcttgtgtggttcggacccacggtg

SEQ ID NO: 88140 - DNA, 505 bp, Citrus clementina
  Intron number 2 from transcript clementine0.9_015227m (loc us clementine0.9_015227m.g) derived from phytozome v7.0 (c hr-ID scaffold_22; pos 1387856 to 1388360 reverse strand)
ttaggtcagtatttgttgttttatgtgttttcttgtttatttatttatttatttcttttcacattattggttctatttttgggatctttgcaattaatcatagtatttaagttctctccaacactgatagtctaatatggtgagtcgaattatgaattatctgctaaccaagaaaacgtatcagtcctataacatgtgaattcagcagaaacaagttagacctggttaattgggattgcgggtgaggggctaaatgggttaatttggtttgagtttgttgggaattttcatttaaatttactctttataatatcaatgacactgtcttctccattttatattagttactgtggctggggcaacaatcatacacttagtagtatttttactcaaaagttttcggatgattaggtattgaggagtatacttattaagaggctcgacgttctagtttaacataataaaatgaatttcattacattgttcgtaattgcagagtacacag

SEQ ID NO: 88141 - DNA, 612 bp, Citrus clementina
  Intron number 2 from transcript clementine0.9_003887m (loc us clementine0.9_003887m.g) derived from phytozome v7.0 (c hr-ID scaffold_19; pos 2416567 to 2417178 reverse strand)
agactggtagcggcaaaaccactcagattcctcaggtctttcttttcttaattaatttcttatttaagttgtttatttatttttttttttcctctttttgatggatgtggctgggaacatttaaacgaattgcttttctgcagttggttttagtgtctttatactaattgttaattggattatttttgttaattcactcaagcgttgtgtgtctggaaactgtgctgtttacatttggtttctgaacaaattaggggaaatgaaaaacaagtgaacattccagcttcattgacaaccaaacagaactttgtgtgcattttgttgtccctcagagataggtttttgtttatccagcttttcattcatgatccatgacattgccgttgttcaattttatacaaagcagaattgacgattacctaataactgggccaagttggctgtaatctgttttcgagcttcttgctttggaggtctcatctatttatgcattattgtttttggaagtgtatgttattgtggatgttggtcatgacttcttgagattgttcaaactgaatggtaaatgttgtctgctaaaattacagtacctcaaagaagcaggttgggcag

SEQ ID NO: 88142 - DNA, 477 bp, Citrus clementina
  Intron number 1 from transcript clementine0.9_003159m (loc us clementine0.9_003159m.g) derived from phytozome v7.0 (c hr-ID scaffold_32; pos 147772 to 148248)
tgtaaagaaacagaaaaaaaaaagaaaaaataaaggtgtttttgttgttttcttaaaacagtgtttgcttattcagaaacagggttttgtgctcatcaatttctgggcttttgtttgattctgtgcttgaaattttaagcatttttttttttctatcgagtcgttcaactgttcgaagaaaagctcagctggtaaaaatagtaatattattatacgtatgtgcgtgtaggttcttttgttttatctgttcagaaaaatattagaatacagaaggacaatatgttgttgggtttttatcttttgctttcatattttgggttttagccggaaaaataaattgtaataatctggcattttctaggcaacgaaacagagtttgcattgctagtatttgcattcaactttgaaatactgatctagatttttttttttttttgggtacttttgcagactaaatctggctctgggtgcttagca

SEQ ID NO: 88143 - DNA, 481 bp, Citrus clementina
  Intron number 1 from transcript clementine0.9_006717m (loc us clementine0.9_006717m.g) derived from phytozome v7.0 (c hr-ID scaffold_54; pos 1333393 to 1333873)
ggcagcaccactgaatcttcttcttttcaggttttgagctttttattttttttttttgcttctttgggaaatgccaataacagctagagctgataaagtttgaacttttagtaatgttagaactgtaactcttgtttgttactccatttttcttttagctacataacgccggttaaaaatgcagatttttatttattttttatcagtaatttcaattaaatagactttctttgtccttctcattaaattttatgttcaagatttgacggtatttatttggatttgacatctgcaattcgctaggttggagaggaataggatagaagatactgtgataaagagtgttttatgtgaagtatggttagaatttgattgcatatgcaatgatatttacaactggtaactgtagttggtttactcaggtgatgcatttgttcattcattaggtgactgcaaatccttgggatatttctcgggtgcc

SEQ ID NO: 88144 - DNA, 423 bp, Citrus clementina; identical to SEQ ID NO: 86967
  Intron number 2 from transcript clementine0.9_023710m (loc us clementine0.9_021421m.g) derived from phytozome v7.0 (c hr-ID scaffold_6; pos 51733 to 52155)

SEQ ID NO: 88145 - DNA, 974 bp, Citrus clementina
  Intron number 3 from transcript clementine0.9_017359m (loc us clementine0.9_017359m.g) derived from phytozome v7.0 (c hr-ID scaffold_46; pos 563004 to 563977)
agcttccttctatttactgagactacgaattgcaggtaacaatccttatcagtccctcttttattgaacctaattataactaacaacgacttttagatcaagtgattaaagcttcattcatttcatttcattttttttttttttttttttttttttggcaacacaatttatcattgcccaaaaaccatatactgaaactttgaaagtaagcaatttaaaaatgataacttttaattgatggctaatggtgttgtacctgatggccatcaactatccactaaacagctaggcctttcttacgctttaatcaattccctgacaatttgttttaaaaagtttgatgatttcttgatctcgacaacctccaatctgatccaatttgggtcacgtctattttcatcagatccatttttcacgtgaagaagcttattagacagtggtgtagctagaaaaacaaattaatgaacaatggcacataaattttgagcgacataaaatacaaacatcgaagaaaatatatacaatatctaaaattttactatataatacataagtcttaaaaataagaggtttggatttcaagccccactcacgtgtgtgtgcaaatatatattcgtgtgattttttaaataaattttaaacctgaaatatttttaatactttttaagcccaaatttaatttatttaattagtccaatgagagcaaatttataattttactgaactaaaaagaaaatgtctccctcaatttttgggctaagtgggggtagctgcccctccttgttccttattggctttgctactgtattagactagaatgatggcaaattaattaaaattttggatcaagcgatcgatacaacattagttccagcagctgctaacaaaagaacttttaggaagcactttcacagtcataatcctggttctccactaaaataatgtgcactttttggctttactatcacaggctg

SEQ ID NO: 88146 - DNA, 1039 bp, Citrus clementina
  Intron number 1 from transcript clementine0.9_030586m (loc us clementine0.9_030586m.g) derived from phytozome v7.0 (c hr-ID scaffold_26; pos 832440 to 833478 reverse strand)
cgttcagggccaagccccggaggccctggccacaggtctgtaagtcctgctgaaattcaagacaaaggcttcggacactactctttcagccgcattcaccactaattcacaactgttatttgtggttttttttttttttttaattttgttccaatttaattttacagaatatttttgttttatttttatacgtacgtactatatgtaaaagccaatgcctcctgtaaactccattccttctccaatgagatggtatatcttgcttatcacgacaactgcttgctttgccttttttgcttcccaagttatgttctcaaagtaatcttctttagcgggttcaaaaccctcgcattgaccaaagtgagttcgaagtccgtttaatttggactcaatttagtctatactaatctttaaaaatattgcgttatttattcccaatagtgtcatgataattaaataaaaatgatatctcctaataactgataaaataaaaaatataacgtggcggaattatgtggctttttaagcagtagattaaccatatagttttacatgatagtgagcacagttccgtacatcaagtggagtaatcaaatgcataaataacaaattcaccgggttagcgggtaaacccataagtttttgccgggtaccaaaaccccgctgatccctcccgcacttgcctgatgcagtggggcctactaatactatcaaacactaaatggtcaaaattcgaaaccaaaatctgacggagatgctcttctgccgcaagcttcccctcctccgatcgcgaccgttctccgccctccacggcgtcgctagacaggctatactctccccatcgtcatccttccaccatcaccaatcatgttacgcaactaaaaccttaacacgcaacaataaaacacacattaataattgtgatgataataataatggtgatgatgaaaggagaggcaagtggttcactttacctccgtttacttccacaatcgacggctcagccttggggagacagctcgcttgcgctcgaaatccc

SEQ ID NO: 88147 - DNA, 1021 bp, Citrus clementina
  Intron number 1 from transcript clementine0.9_002145m (loc us clementine0.9_002150m.g) derived from phytozome v7.0 (c hr-ID scaffold_6; pos 4095085 to 4096105)
taacgttttcgcgttttccagcttgcaattttaaggttagtttttctttttcctctttttcctctttttttttttaaattttatttttgtttagttttattcaatttagttcctgctttagttttgagcttcttctttttttcttgatcgatctttagaactgctcaaaactcaccgttttgcctttaaagattttagtctttgtaacttttaccgttcgctcagttctgatctccttgtattagagtttaatttaggttaatctgtggattttatcagggcttaacaatttgggacctttttgtgtgtcgtaatcgatttgagcttgatcacagtttgtggttcttgatgtgcgtgattgatgtgaggttaaaattgataaggagtttaattctattagttgcatggtttaattgttaatatgtgttttaagtgttcactaatttggagtcttagctctgtattagtggttcttttggctagctgattaaaatttagggtttttctagctatggttaagaaattgggaatttcctcattaaaggagttcaatgggaataatttggtcttgttgctggttttcaagtcttgatttacttagttaggtgagaagttgtaacagttatttttgctttttaaattttgtctcgttcgggcttgttccatttctaatatttgttgtttgctttgtctatttggacattgtttagatccctacaacaatttgtcgaaagctcaaacagaacataaacattgcactctatttggtcaaagcaagagcttgtagatttgtaataatcttgagttagtcgatgacagtagtgattcaggagatcagatttgagtttctgtttggttggtgaagtggaaatacttagattttctatcgtgatttcttattttatttcattttatttgcattgtctctgtattttatgatattgagggggttgaggtacgtatttattattgaaagcattagtcagggctggctctggagagctatttagactctagccat

SEQ ID NO: 88148 - DNA, 595 bp, Citrus clementina
  Intron number 1 from transcript clementine0.9_010945m (loc us clementine0.9_010945m.g) derived from phytozome v7.0 (c hr-ID scaffold_11; pos 212235 to 212829 reverse strand)
gccactttgtctggctttccttctcagaacatcaggtgaaaagttacttttaatttcgcatactaatattcaacactgtaaataaaattcacgcagcactcttagttaaattttccagatgctaaactacacttttaaatttttttcatgcatcaaattctagacttcttgaacttccccacttttgaactcctataaaagaatttttgcagaattaataataaaagctcccgaagtttacaatatattttaacaaaattaatggtgttctgtcgttttttaatcaatttcaatctcttactaagataccactaggaaaaaaaaaatctcttccacatataacatattcctgtaattaaagagttaataatttatagggagattggaaatttccttactcaaatcaatatataccacttattttgactatttttacaatatttaataactctcctggtaccatcactttacaattggaaaacgagcaatctcccttatttcaattttatgcaaatcccttctatttgaagttactgctgctaattttatgtatttggtaggcttgaatcgaaacttataaacgaaattgctaatc

SEQ ID NO: 88149 - DNA, 778 bp, Citrus clementina
  Intron number 1 from transcript clementine0.9_005737m (loc us clementine0.9_005737m.g) derived from phytozome v7.0 (c hr-ID scaffold_35; pos 1370251 to 1371028 reverse strand)
acggtgaccacactgctgtttctgctcttgttcaggtttgcgcattgcttcaattttattttcatttttatttttttattgtgctattattgttttattagtcattaaattagtcttcaatattagcagaaaaaacttttatggcacgttatgtgatattcatcaattcgagatgagaatggagcaatgaactattctgaaactccatgaaatacactgttcaattgattagtgtagcttaacttcgtattcatgacgtgtaattaaaatgaataatgtctttaaaatgaatggacatgtaatgactgtagcatacatatttcccctaaatattgttggatgttactcgttcttaccttggatgggaaaaaaaggaagagttttttaggcaattatcatatcatcaatgtattttttctttaaggattgtgaattattggcctggattttaccaagtatctgagcctccgtattattaagaaaaaatatatacaattatgatcctaggaaaggagtgttttatagtcttttgtctattttggaagaggactggttttagtaactaaggattgtcaattatgggtatgtatttggcaaaatatccaagaaaataaataaataagtatatacacacaaaattttgatcttgggaaggatttttctagtttttctgtcttgcacttctataagtttctaattgttatgcttcaatgatctgttgatataatcgttttgtagactaggcaggaattacaagagttgttgttggaatcaggaa

SEQ ID NO: 88150 - DNA, 529 bp, Citrus clementina
  Intron number 2 from transcript clementine0.9_035758m (loc us clementine0.9_035758m.g) derived from phytozome v7.0 (c hr-ID scaffold_121; pos 179436 to 179964 reverse strand)
aactgtgaagaagcccactgttgtttttgttttgggtaagcattttgtattagctcttagtagtgtatttgtagtaattttgtctggtaatgtcttttgctttttgcaaatgtataagatatccaaatctcaattttaaataaactgggattcgattgttccattgcattagagttctgttatcgttgttgcaatttttatatcatgtttctattctgcttatctgttacaaagactaggcctcaacacaaatatttactgtttatcccaaatatatttaatatattttgttcaatggtgatacgaagcggaacctaatgacacttttgttgttttctcacgtttgaggtgtatcgcatatccatctctgatctgctattgttttccttttaatttttccaagcttgtgatttctgactttcctcttcatttctattctctgaattcttttgatgcttctatgagttgatacatcaatactattaattgaccaggtggaccaggcagtggaaaaggaacccagtgcgca

SEQ ID NO: 88151 - DNA, 903 bp, Citrus clementina
  Intron number 2 from transcript clementine0.9_000492m (loc us clementine0.9_000492m.g) derived from phytozome v7.0 (c hr-ID scaffold_39; pos 1784884 to 1785786 reverse strand)
gctctactgcgctaaccggggcacagcaagttagtaattttaatttaattatttacatttctaagatttttcctccgtggagccttattagaatatctggaaaggctttggttattcattaagaaaaattcaagaacttgtttagaaatacatctttatcactttatgtacatcggaagtgaaaagtttaggaatctacagtattttcttttatatgactggattcttaatttgaaattttgatttatgttgaaaaagagatgattatgtgagatatacgagtgattgaagaaaatgagagaaatgatcaaacaaagtaagaaagatacatatttattgaaggttacataaaatatttcccatgtgttgcctttattttttggtgtggttgtaggctacgtgtatcggatagtatatcagaggttaatatttaagaagatagatatttataagtaaaaggttacgttaagttttgcccatgtgttgcctttatttaattcatggttaagaataattaaggaatgatcaattctatgttgctttaaatttctcagacagtctgaagtttgggatctgtgattcaaaagctaagtagatctgtgattcataaactaagtgctttgtataggagtggttgcctggtccaaccatttgcttctaaaaccagtgttctggtactactgtctgtgaccgtaccttgtgtctttcttggttttattgccttttaatcctcacacaatgtactacaattatatggttgatatcttttattaaaattttttaagtacattattgttggataaacttactaagtctggtgcaatacaaatttcattgtccgtcttatgtttagtcttctattttacaggttccggcaataaatatcaagggggctgcatcatc

SEQ ID NO: 88152 - DNA, 800 bp, Citrus clementina
  Intron number 1 from transcript clementine0.9_008822m (loc us clementine0.9_008822m.g) derived from phytozome v7.0 (c hr-ID scaffold_44; pos 390557 to 391356)
gctccttttgttacagcctcttgtttccgcttttggtaaattttttttttaactccgacttcaattttttttttcaatttacttttcaaaattaaagcattgtttatttccttatggaattaatttggttgaaattggaattacttgctttgatctattgttgctgcgtaaaatttttgttactgattagaatctattgggtgatagtagtaatttgagtgtcaatttggctttttatatgtaattttttttttttttggcatggttagatttagttgatcctcaactttcagaaactatataaaaataaataaattttctagatttagggtgaatgctagttaatgttgttagtgggagtagattttcgagctagactcagtatattcttgtgctgtattataaatgtatctagctagagtctagacccccaggttgtaatttatcagtagatttaaataatttttttttaaaaaaaaaagttatggtagtcaacgtttctagtgtttcctaatttgtatatgtgcatgatgttcaggctattttgtgttttaaagaaacatgtaattgggttcattcagctgatattcctttgtgctcgaatctgtgcaaagaaacaactgtttgtgttttgacatagttgtgaaattttagcttcttcgtaggttaaatgggtttctgagagttggatgttattgatttgaatgtatttggtagctggttggttgcctccttgtgtggtacttagtccgttgaagttttacgttgcatatcttatgtggtttacttgaattttgtag

SEQ ID NO: 88153 - DNA, 711 bp, Citrus clementina
  Intron number 2 from transcript clementine0.9_024042m (loc us clementine0.9_021523m.g) derived from phytozome v7.0 (c hr-ID scaffold_8; pos 1188113 to 1188823)
atcgtaagtgatttctataagacttgtcttttcattgattcaaagtacgaatgtaccactatataccatgaagtggagatacctttgccaagttaggtgattgtgctaatgattgatggagtcgatgaataaaaattgcataatgtgtttcttcttgctgtgatttattatgatgtaaagaaactccttatgacatcagaactatcagtttgttgagagatgtggtggatgaactgaaccgttacttaatatactgttgatggatcagtgtaggtgtggggatggggttctctagcaggttgttatgatattgacgcagtagatgggatagtcaaatgacttgcaacataatataaagaactacaataactttgctcaaacaaaatataaatattaaataactgtctccggtactctgtcaaatgaagatcaatgaacacgatgagctgatcttctgataaagtgattgacatgttcctttggtcacccgagtcctcaagaatttacatctttcttttgtgcctaagatgtatggtttgagttttcttttgtggatataagttccaactagcatataattaaatatacttgcttccttaaatgtcgttaatactgttgtggataaattgtttgcactctggatctatgtgtagctaatatctaatatttgatgcaggtagaagggaaaacagttaaggcacagatttggga

SEQ ID NO: 88154 - DNA, 773 bp, Citrus clementina
  Intron number 3 from transcript clementine0.9_003987m (loc us clementine0.9_003634m.g) derived from phytozome v7.0 (c hr-ID scaffold_16; pos 2263806 to 2264578)
gttattacgggattgaggtgggtaccaccaccaacttatctagattctttattgtcaatgttgctaatgcatcctttttgatgtagctttgtctcattctatgttaaaactaggttagtttataaatttgtgcttcctgcttttaatggttttcaagtggtagatcttcacggcagcacatgtgatcattttatgaagtttatgattgaggcttgccccatccattgtcctttattgcacttccatggcaaagctaaattaacattaaacttgatatgacccttgttcttcttttttgtgttttggggtttcctataaatgatcatgacgatctgagatgagttgtttaaaatgttacagttataggcatctgagatgttatcagatcatttttagtccaacttccaagatataggatattagatttactgtaaaatcatatctttctcagacatttatatatcggccattgtctctaggattcagtagtcactcctctgggacatgatgatgatcctgtgaagggatcgaaattttggtcaccaacatatctgatatgcaagattctttgaaactacattttatggatttcttctgcctgcagtttgttgaaacacaaaagtttactggaaaggatgatgaatatttttttcctgtatgtatatacaagactattttgttgcctttaggctttaattaatctggatttctttcacgttgccatgcactttctaataggtgttcccatttggctcggtaccattgaaaaccta

SEQ ID NO: 88155 - DNA, 337 bp, Citrus clementina
  Intron number 1 from transcript clementine0.9_004171m (loc us clementine0.9_001780m.g) derived from phytozome v7.0 (c hr-ID scaffold_11; pos 1865887 to 1866223)
ttgtaagttcatttttctaagggtttatgagttgtttgattgagtaataataaggatttttgattggatctctgctggaactgtaaatatctgatgcgatcaagtgaatctaatcgttttacttaagttgatttgattgtaagtcatgagaaattacttttagttgctgcggtttggttcggtaactgctgattagttgagtgttttatattcactaaaattttgctttggactggtgatgctttcagtaattggtgactctgggtatttttttcttctttgtttttgcacaaatttgttagggagctgggaaatctgctgttttgaacagtttaat

SEQ ID NO: 88156 - DNA, 374 bp, Citrus clementina
  Intron number 2 from transcript clementine0.9_019843m (loc us clementine0.9_019843m.g) derived from phytozome v7.0 (c hr-ID scaffold_12; pos 278019 to 278392 reverse strand)
gaactggttgtggaacttgctatcaggtaatggttattaactttcaacccactcaatcattgcagtttattgtaaagctatataataaatgtgtaaagtgaacgaattgctaagacggctaagcctctgcatgaaaagaatttgaaaactttatttattcaaattatattgtttataaataaataaataaataaatatatatatatatatatatatatatatatatatatatataaatgtagttgcatgcatattcttcataagactgcttaaataatttcaagcatcgtcaacaattttatgaccactaataattcttttggttttgtaccaccaattaataatgattagttaattaattaacttcaggtcag

SEQ ID NO: 88157 - DNA, 674 bp, Citrus clementina
  Intron number 1 from transcript clementine0.9_012364m (loc us clementine0.9_012364m.g) derived from phytozome v7.0 (c hr-ID scaffold_12; pos 512361 to 513034)
gtttgcaggtacaaggtcataatttttcaattactgcaatacgttttttttttaattgttattcagatgttgctttttttggactggcttctgctgtagtcaatttgtgctttcctggtagaatcagttcgatctttatcaagcggcttatcttgtgaaagcatggatttagtttgcaacgaaatgtgaatcttactttttgttgctgcgtcgaaatttggattatgttgtgcttgaatcaataaaatttgggaattgagagaaaatatggcttgaattagacagggatcggcattacagcccaacacttgtttacattaaagggtgaaaaagctcatcgctttttggttctagatggtttacaaattctgggtaatcttattttcataccggtggcaaattttgattttgaaattcatcaagtattgaaaatataggacgtgcttgaaagaatattgggtatggggaagaaaagttcatcttttctccattgtacagcggaagggagatgaaaaatcaaaagatacggaaaatatttaatgaatggcttttgtgtttgcgactttcttcttctttttttttccctgaattaacaaaatcattatcgtatttgcacttcattatatgtataattcatgttatttataatgtcttttcctgtagggtcataagca

SEQ ID NO: 88158 - DNA, 441 bp, Citrus clementina
  Intron number 1 from transcript clementine0.9_009664m (loc us clementine0.9_009664m.g) derived from phytozome v7.0 (c hr-ID scaffold_12; pos 4579215 to 4579655 reverse strand)
ggtaatctcttaatttactttcttattaatttttttaattattattattattttttatttttctacgccaatgccttttgtttcttttgatctatgttaaacgttattttcaaaaaacaaacgaaaaaaaaaacttttttgtgagtcttgtaataatgggggcctcctctgttcttttttggcgggtatgtaatgcttattttgaatgtcagcatgatgactttggatcttcaacatcggcatagtggataatgccattgcatttaacgtgctaaatggattagttgcttgtgagaaattaaaatgcaattgaaacaacaatctaattgtgaggcgttgccgccgttgatgtttattatgtatgaattttatcaattgtctttgtcgaaaagctggctgaactggttttggcaatagccggagactggttgcagggtccgt

SEQ ID NO: 88159 - DNA, 611 bp, Citrus clementina
  Intron number 2 from transcript clementine0.9_000603m (loc us clementine0.9_000602m.g) derived from phytozome v7.0 (c hr-ID scaffold_8; pos 2424902 to 2425512)
gactgctcgagatctctgagcgagtttacggttcgtttcgtttcactcgatatgtgtattatcttattgattttatctgttttttttaatcaaatttacgaggcagtttgtgtacttcttgtaagtcgtgtttggcgaaatgaaaattagagtttcttgggcaggatttgagtatttattgaagatatcagcttatagttggcgctgccgaatgcagccttaatgatttaggaaaataaatgaatctttcttgttctaataaattcggggctactgaatgtaattaattacgaatttcaaattttggttaatggaggcttcggtttatttaatttattttctaatgaaacagtttcgttgttttgcgcaaccaataggacatgtaaaaagcattctgttaagtatattaggaaactgtttataagttacgagggtttataactattattagccagcttaaatttggttaatgtccatgtgaggtactaggtgaatttgaagaagaggaggaaatcttctaataaacagtttcaaaaatgttttaagtgcagtggtgactaatgcttgcttattttgagtgcatatagttttcaattgctgcttcacgactg

SEQ ID NO: 88160 - DNA, 828 bp, Citrus clementina
  Intron number 3 from transcript clementine0.9_005491m (loc us clementine0.9_005491m.g) derived from phytozome v7.0 (c hr-ID scaffold_84; pos 851007 to 851834)
aaggccattactgaatccaccgtcactgaagtgaggtgtgtctcatttattcgtctttttctttttggtttatgctttatttcattctcattgtaatcggcttcaacagaatcaaatgctactaatcgtatgtttataagttataaatgctatgcctctgcttaaatttgaaacgacagcagttatagtgtttgccacaaacattcatatttactcgccacataatattaacctatcatccgtcgatcatacttgatagttagcatttccaatctcaatcccaagcatatccaaagaatgtttgttggcaatttggttgctttgatgtgtaagacataaccaaaggttgggattacataatttggttgcgattggttgctgtctttacttatcttgatatatgaatcggattaagtcttaaaaagataatcgtcactaaagggtcttttgttgagatttaagtgttttcctttaatttctttagacatgcaaacttgatttctttacttgtgaaacttgagatatgaatgggattaagtcaaataaaatattatcataattaatgggacgtttgttgaagttcaagtttatatttcttttcctttaattttatgaaactagcaaacttaaattaatggagcatggtgttgcttgttttattgattaaatagaaccttgttttgtggcttataatttataaaagaacatctaccggagtttgaaagagagaaaaacttcaacttatttgtagtctgtttatgtttaacatttagtgttatttgattcaaattaggtttcttcatctggttctttatacggcagagagag

SEQ ID NO: 88161 - DNA, 674 bp, Citrus clementina
  Intron number 4 from transcript clementine0.9_030684m (loc us clementine0.9_030684m.g) derived from phytozome v7.0 (c hr-ID scaffold_11; pos 4620893 to 4621566)
agagggaaactttgcttgggattcttcgtgatcaggttagttcatccctaactagaaaataattcaaatatagaaaattatatgtaaattactactgaaactattatcttctcataaggaaacttagttctaagatattgaataaaagaatccattttaaagttacaacttgaaatatttaatgttttatattgaaatcattgctagtgacatccatgacttaataattttattggttcaaatgttgaagagaccttgtgacttcttgcatcactagcaaagactagcatgtgacaagttattggctgtgagttctctcaattgactccaagcattttcgataaagacacttgcatctatagtaaaatcaaatccatgagactgaaggatgcatgtggaagtcttacagccctaatttagatatttgcataggtttatttctattttaaccttaaatacagaagagaagaacactaacctaatatgaatcatcctaagacccaaaattgcataaattatccttatatatatccttgaagtaggcccaaattccatgattatgttggaggaactttttaattgaggtttcgctctttcttttcatttttctaactatgttacaggtttttggacatgtaggtatctgagccactacgggcgttaatcaacggagc

SEQ ID NO: 88162 - DNA, 858 bp, Citrus clementina
  Intron number 1 from transcript clementine0.9_009842m (loc us clementine0.9_009842m.g) derived from phytozome v7.0 (c hr-ID scaffold_21; pos 2456409 to 2457266)
agagatcccgttattttggcttctggtcaggttagttagtgcctaaatttgtttggtttgctgttctgtttggttgctgagaaaacatgagcaaaaattaaagaaaatttctggtttcttggcgagttttatacaataaggtcttttatagtgaaaatcaatttctttcatttattttcttgtcaacgaaacaaaagttcctttttttttttcctattatcaattttgaacattctaatgttcataatgctgttatttgatacctaataacaatgaattcttcactctatttagccttttttttttcccattggactcgtcgcattagctcaaaattttaactttcttttctccacagctaaatgttgcataaaatctttgttctttacaatgtgagtttattttgctttcttgttttggttaaaaagaaaaaaaaattaagtacagtaccagtaaaaaggttctgatatctggtggtggttggtgaaattaaaacattctgaagaatgtactgtgacctaagaattgaaagtagcaattgcttaattcccaaaaatttattgtattctgtattcgcacatttatgatgtcataattatattatacttgctgctcaagggtaatttaatttactgatttatttaactagtattgaagaacctcgcaaaattacaatcgtagattttaattgttgttaatttgggttccttcatttcttttgttgatttcttgtgcagttttagtgaatgaaattggtcatcatgtgaatcttgtttaatgcatttcttcatggtttcttgactgttttatttgttatttgtttcttgtacagacttttgacaggccatatatacagag

SEQ ID NO: 88163 - DNA, 731 bp, Citrus clementina
  Intron number 2 from transcript clementine0.9_014028m (loc us clementine0.9_014028m.g) derived from phytozome v7.0 (c hr-ID scaffold_124; pos 375542 to 376272 reverse strand)
gagcattcaaaaccgctccgttgtttacccagactgtaattctactaatttctttgtttcttatttatcggttatctcctatatgcatgttcttctatatttgtttaacaattaaaagagttaggataataaaaatggcatcattctctcaaccaagccagctgatagcagtgtttcagaatccttttaagaaactttacatcaatgtcatttgtttcctgatcttcgctagaaaaatatgaataaataaataaactgactagatgtttggttccagagcttaccatttttcttttctactagttaagtatctatattgcttcacataagactaatactggtttccgtttcttggataatattatgatactgtgagagggtatatttgtcgtcttctcagatactttggcaatgtgataggacattctaatgattaattgcagcttgaaatggaatgcattggcatacttcaagtattcagttttgttgataagtaacacatattggggtctgttgctttcggagctatttgaaagataaatgaacaacaaatttgattcttttttattgtgagatattcagaagcactactatttttcttttttcccttttttatcttttggtgttttaatttttgctcaactcacatcttgtcatctaaaactttgaattgtgatcaaataaaaattaataagcaagctcatttttaacagattatcttaatccctttc

SEQ ID NO: 88164 - DNA, 680 bp, Citrus clementina
  Intron number 1 from transcript clementine0.9_013112m (loc us clementine0.9_009296m.g) derived from phytozome v7.0 (c hr-ID scaffold_12; pos 152753 to 153432 reverse strand)
tccgtttctgatttctccgcgaaatcttcgatttggtaactatttttctatatatgtatctatataaatttttccttcttacataaatttttccttgcaacagtcactgcaattctgctcactgcaattctgcttgctgtaaaacaattttcattatttgaattttggttcatgtttggttaattagcgtctatttttccaaaaagtaatgtcaggtacggatgctaattcgttgttattttcttcatttatataattcagttattaaattcaaattaattcagctaaaaaaaatggctaaattcaaagctgaattagcgttgggttcagaaactgtttagctatagtaattatttatgcctttgtttctctcgttccatatactggtcttcgtttctactctctagagcatattcatcatcaaactatctcagattttgtgacgcgtgtcttgtcctcaattaagttaccgtgttctgattcactacgtgaaactttaatttcttcgttcgattttaacaaaaaaggggatacaggtgttgattgagcgttccaaatgagaataagatttcttcatacaagttttaacgttgtttatttatgtgttgttttcttttttcaaataattgtgacgtttgatctctggttgcagcttgaattggagttggattgtggaccag

SEQ ID NO: 88165 - DNA, 397 bp, Citrus clementina; identical to SEQ ID NO: 81558
  Intron number 1 from transcript clementine0.9_018652m (loc us clementine0.9_018652m.g) derived from phytozome v7.0 (c hr-ID scaffold_87; pos 1122401 to 1122797)

SEQ ID NO: 88166 - DNA, 422 bp, Citrus clementina
  Intron number 1 from transcript clementine0.9_029743m (loc us clementine0.9_029743m.g) derived from phytozome v7.0 (c hr-ID scaffold_12; pos 4281951 to 4282372)
gaagaatcccagtcgactatcttggtaatttctttatttattgtattattcaaaactttcaagaaaaagtgtaaagatcgaatctttttaatcttataggttgtttgttatctgggttattattatttgtcttttcctctggtttcaatctgtttggttgctgaaagaacaagaaacgaaaactctcattctttttggtcttattgccaaagttcacagaaatgttgattacattttcttgtatggaaattcttgatttggttgaattatggggtttgtgaatccgttgtgtacaatgcatctcacttttgcttttattgaagaaaactgatttgaactcaggactttactgacttaagcttttctgtctttgaataatttgataagcattacgcctcgggctccctttcgtgcctagttat

SEQ ID NO: 88167 - DNA, 882 bp, Citrus clementina
  Intron number 1 from transcript clementine0.9_000617m (loc us clementine0.9_000617m.g) derived from phytozome v7.0 (c hr-ID scaffold_12; pos 2712455 to 2713336)
ttgtttataagtatcactgtgtggctgaagacgaggtcatcttaattcactcactcacgcacactctaattcatacgcttcaatatttctgtttggttaccgagaaaatgctactaagaaaagtcaaaataaactcttttagttaaactagttcataagtaggatgaagcttacaatttcgactatgctcaaacctttaattttaagagggaaaaaacatccccccccacccccaaaacccaaaaaaaaaaaaaaagctttattacaaatttgtttggggcaattctcagagaactcaatttaaccggtgttattatttttgtttagcttcttttagaaacgtgccatttttattttatttttttgaaaactgagcaagtagttaaatgaagagataattgatgagttttcaaactagatttccataattgtgaactgcggatttctaagaggctgcatttggatttatttgattttcccggggccaatgttttggggtattatgataacttgctctaagaacgtaaacgttgaatttttcagactctgacttccattaattaaaatctatataatttactgggctgtaaaactttatcaagtcaaacgagtaggatttaggaacgacctcagttacaattctggacgtatatatttaagcaatttgaccaaaaggtccaaaaagttggatgttagtcataaataaagtgagaaaacaggaattagtgataatgttgtttttagcttctgatatttgttatccttttccccaattttcccttcgttttgcattccttgtaaaacactatggtttcaagagtgaaattaacttatattttcttgacaggtgatctttttagcactagacgcacatataaaaaa

SEQ ID NO: 88168 - DNA, 427 bp, Citrus clementina
  Intron number 1 from transcript clementine0.9_015194m (loc us clementine0.9_015194m.g) derived from phytozome v7.0 (c hr-ID scaffold_12; pos 2812766 to 2813192 reverse strand)
gttcctctctggcccttctccttctccttttcttggtaattttttttttcctccccccgcttctgctttgtctggatttgtgtgctttcttttatgtgtgtacttcgtactaggtagatccttttatgtgtttcatttttctttgcagaaaattggattcttattagtacagaaaaatatgaaagtttacacctgattgtttgcttgtttagatggaaagctgtttcctaatgagtgctctgtgaaagtcaaaatttttatgtgactttcggaagatatgattgcctctttactaccgatttctatgattattggcaactctgttataggaacattgcatacctttattgaatgggaaaaatatgatgtgtttaaacgtaatctttgaattttaatgacgtctttaataaattcaggaccaagatcc

SEQ ID NO: 88169 - DNA, 628 bp, Citrus clementina
  Intron number 1 from transcript clementine0.9_018425m (loc us clementine0.9_018425m.g) derived from phytozome v7.0 (c hr-ID scaffold_13; pos 2759124 to 2759751)
attctgaagtgggtatggtctctttcttttggatctcttggattatattttcttttgtttcctttttaaactcttgggcaatccattgttaatgtgcttgcatgtaattgaaatctacatcatattttttttgtgttttgattttgttcaagtcttcttgtgttcttgtctaaacaattgcataagctattcatgactgtgcatgcttttatttatggttcagtttgaataaagaaagaattaccttctttgctttgtaacggctaatttgttcaaattcattatttaccttgagaaagtaaatcttgattttgtacttttgtacttttgttttattcactttggttatgctttctctaaattctgtttatttcctaggactaaagcaaaggagaaattctctttctttcgctcccttttgtctcttaattatttcttctaatattgattcttgaaaaatcctgaatgcaccacccctgcaagtatcaagaaagtggaatgaatttaaatcacatgtaggctatatagcattggtttaattaaggtcatgctgtaatctgttttcgaacttcttcatgtcttttgttataattagtagttgtgacgatatttccattgaatattacag

SEQ ID NO: 88170 - DNA, 650 bp, Citrus clementina
  Intron number 1 from transcript clementine0.9_002813m (loc us clementine0.9_002813m.g) derived from phytozome v7.0 (c hr-ID scaffold_11; pos 3391848 to 3392497 reverse strand)
ctccgtgctatatacatcggtaacagagcgctcgcatgatgcatattcatgggactttttggtggagaaaattctctttccatttgtgtggatctatctttacaatgagtgataaaaatactgcttgcttgcaatttatcatgagtttgtaccttcatctaagtccctctttacaaattgagtttcttacttgttaatctttttctttacaaaacaattgcatatagctttaacagtttgatatttaagtttctattctgagctatacaagtcatgcattcatgttccaagttttgtatatcattcatatcagttgaatatctacttggatgttggttacaagttatcctttatatccgatttgctctacttttaggtgaggaattatgtttttatctctgagttgtcatatgagttcataaggtctacatataatttcttgtcaaatgtggactgtgtttactaattgtttattcgtatatatttgatacattgatttgattttcttgtttggtgggatgggatttccatggcgtattctgtcatcaacctttttctttttgaggcaaacaggtcatgggaatctaatcttttatttaacaatttgttggaaaccactattaatcattttattatttttgcagctggcc

SEQ ID NO: 88171 - DNA, 681 bp, Citrus clementina
  Intron number 1 from transcript clementine0.9_012253m (loc us clementine0.9_012253m.g) derived from phytozome v7.0 (c hr-ID scaffold_54; pos 166570 to 167250 reverse strand)
gggtctcaaagttcttggtacggagaatcgcattggtatgtcgggtaatctttttcttctttacgcttggttacttcttgattttaatttaatctttaaaagaaaaattcttcaaaaaattgaagttttacttttaaaaggttcggttcggttctgtcgcgaaactacgctttttttttttttttttgtttaagtggactgttaaaattggctaatacgatagggtttttgggctttcaacgttgtagaggttgtttgctgagaaaatgtgggaaaggagttgaatttttagtactgaggtttctagggttctggtttgcaaaattgaacgaaatttggagtggtgtggggtgtaatgtttgaaatttgttaaacttttttcatttgtttgatgaggaaataggggaaaatgaaagaatctagtatcagtaacctacttatctgaattcaggcgagttggttcactaagtttggggtttttattattgcagtttttatggaaacagaagaaaaattgtgcttatattcttttgaattaaagttgatacattttggcagctgaaaaaacatgattcataggattcacttttcttatctttttcttgttatatggatatcgggaaactggaaagggtttggtttgttgaatgacttgataagaatgtgttctggactttttag

SEQ ID NO: 88172 - DNA, 656 bp, Citrus clementina
  Intron number 1 from transcript clementine0.9_014387m (loc us clementine0.9_014422m.g) derived from phytozome v7.0 (c hr-ID scaffold_87; pos 209141 to 209796 reverse strand)
agagtttctgtaagtgaagattcttcagaggtaaaatccttcattgttgatgcggattgcatgacttttggaactttaattccgggttttgttcttctatgcaatttgatcatgtgggctgatactcatttacttaattacacacgttattacctgttttgaaaaaaaaaagattttgtaaatgttttatatgatctgttggtataatcaagcttaaaatagcttatttagttttgttaaatttcttcattattaattgattcatttggtttttttaggggattcaattggagatgtgtgttgatcttgtgatgtttgtctttctagatgttaaattattattattttttgttatcaatgcttaaaagtttcattttttccttccacttaacctgattcttcagttggttttgacttcctatgtatttttttattggaattttgtctttggttgtactagttattgatgatgcttggagtttctggtcatagattttgagctggaaagtggaaattaattcttaattacttcaatctgcattgcttgttattactactttaatttctttagtaaatgatctagttgttaattgtaaacagttcgccccctttccccaacaggttgttatatcttgagtgtattttgaaaagatcaa

SEQ ID NO: 88173 - DNA, 925 bp, Citrus clementina
  Intron number 2 from transcript clementine0.9_022504m (loc us clementine0.9_022504m.g) derived from phytozome v7.0 (c hr-ID scaffold_93; pos 567039 to 567963)
ggcaaggctgaaaggttgtggagctgctagaagttagagcttattgtggctgttttttaacattctgcctcggttctaactacataggagcctccacagattgtttttattaagcttaatatagatactggtattgatattcatcttgggctagtggtgtatagggccgtggcacaagagtgtgatggggtatttacagctccgggtgttatgttgatgtatatttagatgatattgatattgctgagatagaggccttatgctttgaactagaacttgccattgagttgagtttatctccattagttgttgagtcagactctttgcttatttttcagttgctgtcaacatagcatggtactcttattgagttgttttgattcttttgaattaatttaaagctgcagaggttataatttatatccaaaacatgacttcaggattaggcaagtgtcaagaaacaataacccaacaatagatgccttagctaaatatgctctttggtgctgtgattactttgtatgagtggaagactttccatcatatttatctaatttcctttgacattttcattctaatctaataattcatcttgatcctgatctaatagtaagtttatattctaaaaaaataaatcaaatcttaaaatggtaaggggattaaaaattaatttaggtcagaaaaaattagtgatgtcgtcatatggtgacatggcagaagatcctgtagaaatgataattgtgtggtttgcatgtgaatttggagggctattttgcactctttgaatgtttctctcataacaacagatattaccaaaagaaaaatggtggagtaattagttcagttaaatattaatgctttaaataagattcatttggtttctgatctggtgtatgctccatggaaaatatgttgcaaccagaag

SEQ ID NO: 88174 - DNA, 838 bp, Citrus clementina
  Intron number 1 from transcript clementine0.9_001666m (loc us clementine0.9_001666m.g) derived from phytozome v7.0 (c hr-ID scaffold_69; pos 33720 to 34557)
tgatttccttcgctgctgaagagataaaacaacaggtgatcgaagttacacccctcagattacaaatacttccaatgattttatttggttttgcttttatcaaaaacattatatatttttgctttattttatttatctggtaattttagattttgaaatttgaattgaatttaattaaaaggtgatgtagtaaccacttatttttattttatctcatttatattctcaataactactcatattttggtaacttactataacttccatatctaagaaatgatccaaacccacaattttaactcagcacgaatattcaatggtgatctaagcttttgcagaacactcaagtttgtcaaacagtcattaattcaatgtttagtaaaaaaaacacttctcagcacagaattccatgtccattacttagactctatgaaaaatttcataattttctcacattatttgagtttggtaagtgatttcatataatttcttttcaatataaattttaatttggtttcttatatactctctttgctgaatttgtatcttttatgattcttagattttgggctctaactttttaggatttgatagtcacattttatgccatgcttaaattgattttcatgatttttactacccgttaagtgacttagaatttgacaaaagtttgaaaggaaatctacttcaggattctgttttaattgaccttttagtggaaataagatgcttataacttaatgtggatgtacaagactctccatgaagtctcataatttttcattcggtctggggtgttacaggtgaagcttgtggttggtgtcgaaaaagaagtgaa

SEQ ID NO: 88175 - DNA, 428 bp, Citrus clementina
  Intron number 4 from transcript clementine0.9_016679m (loc us clementine0.9_009603m.g) derived from phytozome v7.0 (c hr-ID scaffold_13; pos 197945 to 198372 reverse strand)
caaccaaccctcgacaacaaatttgtgacattcgtgtaagacatttagctttttaaaattatgaatcttgttttttagtacatttaggttgttcgatcgcttgcttaacctattgatgtatattaatctgatgatatgtaaattatcatgctcaagaacttacagattatgcctgtgttctgatgcttccattataatttagtatactgggccgtttgggttctttaaacaataagctctgctaaaacaatggacaccatgctcattttctcttcttatttggatatatatataatttttttttggatactttgatttatctttagatttatgtatctttggtttccactgctgtcgttaaataaaatggggtgatgctaattgcagaattcttttccatttcatataatttgtagaaaattgccgaa

SEQ ID NO: 88176 - DNA, 614 bp, Citrus clementina
  Intron number 3 from transcript clementine0.9_005919m (loc us clementine0.9_005910m.g) derived from phytozome v7.0 (c hr-ID scaffold_21; pos 3816805 to 3817418)
gtggaagagatcaaattccttctcgaacattgcaggttagatcttgctttaccatgattaatggctatcgtttcataagagcataggattgattgtttggtctatgatgaaaaaagaaaaggaaaaaaaaaattgttggcttcagtttttgctgatctggatatctatcatcttcttctcattgatttttctctgtttgatttctttggtatgctgacttatcatatctcacatgtaatgtggaaaatatatagtatctaattaagtttaaactaattatttacaattaaggcctagcagttgcttgggttattgcttaaaagatttcatgacatggatggatacctgtacttttctggacatataaattattgcacttagagtgatggagcaatatcagcgaatactagaatcagcttctgggaatgcgagggtttctgtcatcagaactggaaatgtggggtcaaacctgctcatgctcttctgcagttctttgtccttctactagactaagtgctgtcattaacattgactagtgaaaattttagcataatttctaggatctataatgtttcttgtcatctaattgcaacagatattacaaggtcacactg

SEQ ID NO: 88177 - DNA, 582 bp, Citrus clementina
  Intron number 1 from transcript clementine0.9_001673m (loc us clementine0.9_001246m.g) derived from phytozome v7.0 (c hr-ID scaffold_84; pos 440085 to 440666)
tttagatccaatacgtaccgttttatctgatccaggtaacgtaacgaattgtgacttttatttttcatttttttggtttagtgttccttttgtttgacgcagatcaggttttgattgttttgattattttttcgagattttgtttgttttgatttaatgttgtgatgatgaatgtgcgtgtaacagacttgcatgcaattcgcgctcgttttgaaattccttctgttatttttgttttgagacgacgatgctttaatgtttatttgcttgatcgattgatagatcgagctgtttattagtgactgataggatcaatctcatgtgttctgtttttgcgtgtcgttttaataataattgaatgcgtttttggactttcgatgatttcaatgctacggatctgatatgaatttgttcttcgtgtgcgttttctcttattaattttcattcttatttaaatttgttattttttatattctctttcagttatttctttaactgatgctgatttgatacacagaatattgttaatgaaaaaaaaacgtatggattagagattaattcgtttagatctttactgttcag

SEQ ID NO: 88178 - DNA, 1029 bp, Citrus clementina
  Intron number 4 from transcript clementine0.9_001673m (loc us clementine0.9_001246m.g) derived from phytozome v7.0 (c hr-ID scaffold_84; pos 441657 to 442685)
aagcaaagctacaaggtcttggccgctggagcaaggttctttttaacccttcctgaaatgcattctattgtaaaatctaattttttttcttatgttccttgggtataaaaagttgagatctagtggcaattgaatttattttgaagaaactaaaagatgtatgaactcagaacctcatttatatttgcttttgctgaaatagatgatatttgaaattaaaaaaaaaaagggctaaataaattatatttaataagaaatatttggcaatgctggagtattgcattaagaatgaaatgttcaaagcctaaatttcttaaaaaactttacaagacaccacattatgactttaaacgtattttgatgtgcaatattttcagttgcatgttaatgctgaagtttttgagaattattgattctataaaattttaaaaatggtttctttcgctcttggtaattaaatagtattttttccgtcaattactttttcataattttttttaacaacattaaatgaatggatcaaatctcatgtataattatcttgtagaggacataatgttatatgtttaaaattatcttattggatttactttccattaaagaagtagtttaaatgatcacttttgtcagagtcctaatccttgtttgatctaagtttattagtctctttttttcttgcacatactgaaacgattagtatcaccacgaaaatgtcttagttaggtgcacgcatgatgaaagaattttcctaagaaccctggaaataaaagaagtttctatagcttaactaggatcaaggattctagagtaccaatccggccatcatttgtattaatgatgttgcattttggctttcatcaagtttgagtctaatgtgattgggcttgtgcattgtgagcagtctaccttttagtgaaaaatgactggcttagcaataaaattgttgcctaaattaatgcataaatgatgagctgtcttcatttcttgatcataggtaccaggtgctgctgaggcttccattaggaacct

SEQ ID NO: 88179 - DNA, 419 bp, Citrus clementina
  Intron number 1 from transcript clementine0.9_007422m (loc us clementine0.9_007422m.g) derived from phytozome v7.0 (c hr-ID scaffold_56; pos 717535 to 717953)
gacaggtgacaaactcacattgaatgatgcttccattataggattaggatgaattagtattacctcttctacttgagtgtgcctagttgttgagtaattttagtcaattggtcagtgttttgctcctgtgtatatatttgaatgtgtttagtagtttctgctttatgtgtatgtattgtaaaatcaaataactcacaaggcatggaccaagtcattaactagatggcggtgttcaaagcacatcttctatttcaagcaaattggtgtcgtgtaggctgtagcaagttgaagtcacgttataagtagggcattcaacatattaagcaaggaattttctatctatagaactgctaaataatctcgaacttcattggaattatttaattcttgctatgcagatacaacaagtcttcaaccga

SEQ ID NO: 88180 - DNA, 973 bp, Citrus clementina
  Intron number 2 from transcript clementine0.9_001817m (loc us clementine0.9_001821m.g) derived from phytozome v7.0 (c hr-ID scaffold_11; pos 2778574 to 2779546 reverse strand)
cgcgtctcattcatcgggctatatcgcctgaggttattactttaccttatgcttattttctgcatttggcctaaaattatagaagtaggaactatcttctggtgttgattgtaaatttataagctatcctgtatttgcattctatgttgtttgttcaacttatactttgttaactgtagaacaacaataagaatggttggaaatgatgacagtaatgggttgtgatgatgactactgtagtaaacaatgagaggtggttgcaacgaccgtgttgatcatattaatgtagatgcagttttagcgttgttgaggattagagattgttagtaatgctgtggtagtcctggcagttatgactgtgatgacaataacagtgaccatagtgaagtggttgctgtgatggcgctaggagtaattgtggtaggcatattgctgctactgataaaagtcatgactctggtgttctttccaaatgttgtgataattttaatgttgagatgtccattagcactcagaggagtttaaattcctcataccatttcatttatatggctaataggttaaccttgttcgccatttctgcatactaggttaaattaccatcttacatactgaaaattaccattaatagaaactctttccaatttctccatctattcaggtcaggaagatgcttaaatggtttgcaggatgatttttttcattgatatgaatgtttttcctttttgttttgtttagctttttttattttatatttttttatatttttgcttctctggtctgcttactgaatggaggtttttgtctggttttgtggctctacatgtagttcaagtcattaaatttgaaatgattatagtctagacttcaagtggctatggtgttggtccttgtaatttgagttcctagagatgcaggttatccatatctgatgataaattttatcttttgcagaatatcctaattacttcca

SEQ ID NO: 88181 - DNA, 722 bp, Citrus clementina
  Intron number 3 from transcript clementine0.9_021388m (loc us clementine0.9_021330m.g) derived from phytozome v7.0 (c hr-ID scaffold_39; pos 1677361 to 1678082)
aagagttgctggagtctggaaaagccgatccaaatgtggtacatagtcatttttgttttgactttgcgtgattcatggttaccatgttcagctttagattacttgttttatcttggagaagagattgctcaacttgattttaactttaatcaattggcgaatggttgtctgctgctatatgcattgaaagtgtctttgagaacatgtttgttgaaagggtttttgagagaatgtgcttttgtttttttttcctctcccatctgaaagttgctttattaaaggcatctatcaactgcttccctttgtgtatttaatccaaacactagaaagcggatataaaacccattttaagcatataagaacatttaccaattccaaagagtttcaaatgcaccactaatgttgcttggtgccagttttgctgatagatgagaatgggcagaaaaatgtttgtcggtcaattacttgtgggaactttgacggaactaatgataagtgtgaattgtgagtgcgaatagtctgttcatgacagcttgttgaaggttatttttttgttttttgaattttaccggaatagagattgattagttagtttgatgccttgcagtttgaacaatttgcttgccagatgaagtggagatgtttgtatatattctgtagacaatttctatgactgataactgatgttacaggtttctggggagcagagagaaagattggcc

SEQ ID NO: 88182 - DNA, 655 bp, Citrus clementina
  Intron number 1 from transcript clementine0.9_006967m (loc us clementine0.9_006983m.g) derived from phytozome v7.0 (c hr-ID scaffold_8; pos 2150755 to 2151409)
tcacaaacaataaagtttttgttgctgctttacatgtgcgtgtttttaatgtttttgcgcctttaattataatcattttaatatctgtcttacattatattcctttgttcttcttcttcttttgctcctttttccatcgaaataaagaacctgcaaaaggtgtgaagattttgtttttcttgtattttataatctgttcaaaggctgtcttttttgtaccttttttcggtttgttcacattatgggctcttatgggtttgaaggaggagagccaaagattctccttcgttcaaaccatggtaaaatcatgcatgtttatgttcatacgtttttggttcttatttcgaatctagtaactgttagaggaaaaaagaaaaaagaagaagaagaagaagaagaagaaaagctacacattgttttgtttgatgtactttatgagggtgatggtttttattatttttgataaagttattagagcttattttttcatcgatcatgatgaagcgaaccctgtgttctttctttatacttggggtttgtttactctttcatgttcatgttttggatgagtaattgtagctggattcattgatggtgggggcggtcttttctgtgaacaggtcaataatttggacttgaagagacaggtgatcaa

SEQ ID NO: 88183 - DNA, 781 bp, Citrus clementina
  Intron number 1 from transcript clementine0.9_008476m (loc us clementine0.9_008313m.g) derived from phytozome v7.0 (c hr-ID scaffold_60; pos 732416 to 733196)
ccagttcaaggctcctccgatccgttcctcattgggtaaatttatcattgctcactcttttgttctttttctttctcttttgtcttgtttctgtaattataatttgtagtttctttctagtggggtttgttttattaactgaaaaaagttatcaaaagaatttttttttggagtacttcgctaatgcttgtacccttgttgttattttgtgggtatatttattatctgggtttcacttcttgttccaagctaaaaggtgtttaatgggctgctctttgcagtgattcatattggtaagttttaggctagttttcatttatttatttttgtaccttggcaatcaaatgctgttctttggtctctctttcttttctttttagtcagtttttaatcattttcttatgtatgtatatataaagaattttcgtagtttgatttggaatctcaattagaatgatgtgaaggtgggcaaaaagaaaaaaaatttgctcaaaaagattccaatgcatgtggtcactggtggaataattggcttttttaactttgtctatattgagttctcgtgttgttcttttttccattggggtaacataatgtgccatcttacaatgaagtgttgtgttaggatacgtcaacttgattacagtattaaatgactctgttcgtggttcgtctaggctttattttgtgttaagatacaccgacttgattatagtattaaattactctgttcgcggtttttctaggctttattttacaaaagtgaagctgggttctcccc

SEQ ID NO: 88184 - DNA, 809 bp, Citrus clementina
  Intron number 1 from transcript clementine0.9_007120m (loc us clementine0.9_007120m.g) derived from phytozome v7.0 (c hr-ID scaffold_44; pos 1248097 to 1248905 reverse strand)
gctaaagaagttcttcaggtttcctatacgaacccccttaagttggaaagatatattgattaaatttttcactatctcattttttgagttcttatttagattgattcattacaatagaatataataatttatgaccttgatatcaaaattttgtttataaaattgtcccaactagaaaacacttttcccaaaaagttaattaatatatatgaaattaaagtaaatttatttttaagttgggtcagttgcccatattctcttgaatataaatccccacccttaagcgaagatgtaatatatgtgtaatggaaattaaattcttttctattgaccagatgggcggattcaaaaataatcaggcctctcttgtacttatcggagtatatattttaaactttttacctacaaaatcttatatttctttttactactaatttaacaataaaatacttttctaaattattcatccaaaaattatagtttctatcttaacttagtatttctcaataactattttgaaaaaaaggctatgacccccgaatgaattgatgaaatagttatggaaaccactttattttgaagaaacaattatatatatcctttttaggacaacaatactcttcgattacccaactgcgcacgattgttagaaaaatattctaagtaagagggtaacaaaggcacatgctttgttttttggttaggcagactactttttttaagttattcgctcaaaaaatttataaactaaatttctggttacatcctgaacaggctcaagatctcgtcttcgcaaaccggccagcaaa

SEQ ID NO: 88185 - DNA, 798 bp, Citrus clementina
  Intron number 1 from transcript clementine0.9_002360m (loc us clementine0.9_001683m.g) derived from phytozome v7.0 (c hr-ID scaffold_91; pos 205480 to 206277)
caccgtctttgcgtgttgttgttagaaaacctgtaagtgattttgttggttttttattcattgattgatcatttctagctgaagaattttgggtttttgatttcttcttaaaatattagcatttttggaatctgaaatgcggtagagttgttgattgtattggtgtgaagaggcatggataatggaattgctggcttcttggatttagttatgaagttctatattttatcgctgcatggtatatattgcatgttgtttgagctgtattctgtgttgtacagtgggcttgaagcttcattgtatgcccagtgataggcagctaagagttaatggctttagaaatggatgcttagcaagtagagttgtgtgttacagaatgattcaccacttgggatgattatattttgacttatgaataccttctttttttgttttttgtttggggtgtgggggaggtgaatgattagtgaactagtcaatctctcatttgtcaaaagtacgtcataaactcacacgaattctactattactttcccttctgaaagcatacatttcctttactattgattagagattctattgcgggatagaaaagtgcacagaatgacttgatactttcttgtcttctcacataaattcattggaactgctatttatatttttcaacttatctattttgcttgttataatggttagagaactcccacttgttctagttgttttgggcaaatctttgagctgacatgcacttccaattgtgcagttggtggttcgactaacaaaggatatagttgaaac

SEQ ID NO: 88186 - DNA, 295 bp, Citrus clementina
  Intron number 3 from transcript clementine0.9_015781m (loc us clementine0.9_011051m.g) derived from phytozome v7.0 (c hr-ID scaffold_60; pos 1131902 to 1132196 reverse strand)
aggtgagcttaacaatctaattggtgtttagaaacgaagtggatttttgaatgctttaattttatccacctagaaatttgattatttgactttaggagttaccatcttaggactcttgtatcccatcattaggagaaaaagagaaaaagagatttgttctaatttctattatattcttctattttccttgatgtaacaacacttcttatctattaacagcttaaaggtagttttgtgattatattttgttttatgttgtctcgtgattgtgcagtcccactttaaggagttgata

SEQ ID NO: 88187 - DNA, 433 bp, Citrus clementina
  Intron number 1 from transcript clementine0.9_022318m (loc us clementine0.9_021552m.g) derived from phytozome v7.0 (c hr-ID scaffold_16; pos 764233 to 764665 reverse strand)
gtcttattttctggtctacttttttattaaaatttcgtggtattattttcaaatttcgcggactattaattctgaatttgctcgctatagaattagaattagaatagaagatgatgcttgttacgattccactcaattattttgctgccttggttcaataatattgttcgtttctgttcttgcttacactgttagttaggataatggatatacagtttgtaaaagttcaaaattgacttatcactaggattgttactgttttatttttttttttgcccggctataactgaacatgattataatcaggaaatttaccatcgcgagcagcaaaaatcataattgactgattcacatttcaaatcaaaccctatgtatacgttgatgtatgtttatccttttgttaggaccctcagccgtttggaaagacatcagc

SEQ ID NO: 88188 - DNA, 989 bp, Citrus clementina
  Intron number 2 from transcript clementine0.9_016363m (loc us clementine0.9_016363m.g) derived from phytozome v7.0 (c hr-ID scaffold_12; pos 476788 to 477776)
caagttgggttgcacactccactgaggtaatttattcttcccttgaaaattttcagttccatagtcattttctgtgttgtttctttaaagatgttgcataacctgctagttgttatttagtcatctataattgtgaagatctacagtagagcatgaagtaggtgcacacgctaactaaggagacattacgaattgtgttatgaattatgaagggatgcccttcagcaaacatatgattgctgccacacatattcaaagattctccaccttgtttaggtttctttgatgataagaagatattacaaaagacttcctattgaaattcaatgggtttagtataaatagattatgctgaaaactgacctatttggaacaaggatataatacattatgaagaaggatagaatttaactgcatagcagcttagtctgtttctgattaaatctcaccttacaatgatgcctatttcactagggtgagtcaatatggatattattgtgtgccattattttgttggtcttgtctatcttctttgatgatgagagagataatgagttactttgttagtctcctcaaaaccaggaggaacagaggtaatattgggggttggggctatgtcctttatctttattttgttgatttgaatagaattgaaggcaagcagaaagtatattaattatcaaattggatgctttgcttgccttgttttctctcatgttgaagcagtaatgagacaaagagcatgctaacaaaagaaggttaaggtcgaccattaccatgtttttcaaggtggttctcaaatgaataacataacgttcctgtagattatgattcaaaatctgtgatttgagctcatgatttttgcttctcgagttataattttgatgtatctgcatttgccttctcttttgtttctgaagcttggttattagtcatttttagttacctcaaaatgatcaaaggttgtttttgacacttgtgacctttag

SEQ ID NO: 88189 - DNA, 728 bp, Citrus clementina
  Intron number 3 from transcript clementine0.9_004552m (loc us clementine0.9_004332m.g) derived from phytozome v7.0 (c hr-ID scaffold_61; pos 1048243 to 1048970)
ggagaaccattcagattgtcaaagccaaatttcaggttgtattctatatgtctactttggtcttgctaggatcaaactctttttctttcttgattattattattattattattattttttactatcaaaagcaattattttatcatctctactattatcagattcctgtatctttcctccagtgttcattcctacagaatctcgatatgaaattctcgtgcctttttttccttttcttgtttataaaacattttttttgttatttggtgccttgctatataaattatctatctcttttttctttgctctgtttttctttttaatatctaattgtttaagtatcagtcgctcttaaatttgggtgaaattctagaattttggtgtgaccatgaattagtctaggacttgaagatgagctcaggtattgatttttgtgatggaaatgaagaaaagaagccatttagaaaaatccctgttcttgttttattagtttctgggtgaaagacataaatatccttcttaaaagtgtttaaaaagtttttgtttcatttaaatctctggacctaaatagagtccagttcctgcaaagtttttagtcaattccatgagaagtttaattatcttgaagacctaatcagtttttcacttgattacttgtgagtctcaaattgctttggtgtttctttggtccagagacaccttctaagggctatcacttaagacacagg

SEQ ID NO: 88190 - DNA, 728 bp, Citrus clementina
  Intron number 2 from transcript clementine0.9_024754m (loc us clementine0.9_022326m.g) derived from phytozome v7.0 (c hr-ID scaffold_68; pos 210480 to 211207 reverse strand)
aaggtaccgatctaagaattgagggtttcaatgcaatcgtgtattatctggttcgagttctctttttttttttcttttttttttgttctctctccctttttttgttaatttcttatgatgaagggcattgacagctcagtttaacgggacacttgtcatttctagcagcttccagccttccacccttgcatagtgcattgaaaatggaaatcgatatagtttttaattagggtaaattatcaagtaggtccatattttttgatgttttatcagaaaaagaaacaatttgtctattcctacaaaacagtccttgactttctgggaaataactaaatattgaatagacacgctactttctagttttaaagttgaataataagttgagtagtgcttcgtgaagtgatagtacaacctccatcatttaatttgagtagtgtttgttgaaaatctaattggcattgttaagtacttctcttctctagaaaaatctggtgataattgactttaactgctgataagaaagtttgatgaaaccggtttccagaactgcattttagagacaccctgttcagttatagtttttaagcagtcattggaagtcaactttcccatcaagttgcttatgataaaaactgtgcaaatctgatgaattggcactcattaagttctatttttccttttctactcttctaggtgctccaaataaggtatcggcgaaatcaaaattg

SEQ ID NO: 88191 - DNA, 999 bp, Citrus clementina
  Intron number 2 from transcript clementine0.9_035365m (loc us clementine0.9_035365m.g) derived from phytozome v7.0 (c hr-ID scaffold_8; pos 1724679 to 1725677)
cctccactgattcctcttcagatttagacacagaggtcagttcaaaaaacggaagccatttgattcattatcactgtacttactttctgctaaattaaccagtcattagtctcattttcttttactgctcaatttaacctttgggtgctttttttaagggtaatgtaatgtaatttcgtgcctctcattcataattcaatatttaggtagtagttcttaatttttgctgggtatcatgattattttaattgaagatgccagaagaaattagggtccagtgtctgttagaaggacataacttgattaaaagatttcagagttcaaattattttttgtccaaaatctcgttgctgttggtctggactctggaatccgcagttagagattgttttcacccaactcattttttattgtcttgatatcgataggtatttaaactattaaggttgtagtatttgtttcctgaaaagtcttgtgtgcttccggtgttcactcttgtttgccggattcttggcatgtttattcttcaattattcatgtaaaaataaagattcaccagcaaaaaatccacagattatgtagtatacaccgggatcaccagacatgaagctacaatgtggtaattaaccttgtaattggagtgtgacagttcataaattcagcaaagaaagctgttgtatttcatcgaatgctgcatatgcagtttctccgaaatgtaaatccaattgaacaaaataacgtgatacagaaatttctgaaattcagatcaccaattggaatcataattctcacaacaatctgacatctccttgggttacaaaagatttctttgaaattggtgtgaagggagctactgtgacttaaatgatttttcccttcctgttattgtgatttttgatgtgaatgtacgaaactacctgctgtgaaacagtggatagataattcgatggcctgaacactagtattgtaattgatttcagtctacagggtctttctttc

SEQ ID NO: 88192 - DNA, 728 bp, Citrus clementina
  Intron number 4 from transcript clementine0.9_015534m (loc us clementine0.9_009658m.g) derived from phytozome v7.0 (c hr-ID scaffold_8; pos 5108805 to 5109532 reverse strand)
gaaaactagtaggtgtgatatttacattgcaagatggttccctattttctctcttaccacttactgttctctttggtcacttccaatccaatgctgcagactgactgcaatatattcaccttcatattttgaaatttaattatttgatgtgaactgtttatccttgaattaatgaattatcaatttgtaaatctttagacaacatcgaaaatcgatcaatggaggtaatttagtctgtgtgccaatgtttatggcagctactgctcgtgtatcatataaataatcctttttgatgtatgataccgctgaagacttccaaaatgcacatgcactgttatggaggtgtgataagcttttctttatttagaattagggatgaaacttctatgctgcatcaaaaaagcattagcaaactgtttttatatttagaattagggatgaaacattctatgctgcatcaaaaaaacatttagcaatctgtttttagtcttctattcttctttttgtcgtattgattttgttgtgtaccacagatgtaaactttctggaaaagattgacaactttctgttgcttctgtgcctgcggcaaataagtaattgtgactgtgcattatatccatacccttggcaattattatatgatttcttgggattgcttgcctccgtattgagtaattctcctgattttattatttgatcgacagcatacactgacttagctgatacct

SEQ ID NO: 88193 - DNA, 303 bp, Citrus clementina
  Intron number 2 from transcript clementine0.9_015534m (loc us clementine0.9_009658m.g) derived from phytozome v7.0 (c hr-ID scaffold_8; pos 5110071 to 5110373 reverse strand)
cccggtgtcgaaatcagcacaattttctctcaaaggtcttgttttacattcataaccatcattatatcttattccttgtcttccggatacactttctcgtagtgttttcatgtcatatacttctttcttaaacccttgcgcgtctgaactctgttttatgatttgttattccaagaattgacaagcaggaaatagaagttccgagtaattcactgtttctcataattttgatatgatgccaatatttgttttcttgaaaaaaaagcaggggctctgaatcagaggaaccagttcacatccttg

SEQ ID NO: 88194 - DNA, 529 bp, Citrus clementina
  Intron number 1 from transcript clementine0.9_013818m (loc us clementine0.9_011494m.g) derived from phytozome v7.0 (c hr-ID scaffold_35; pos 470313 to 470841)
agtttctgagatcttttttgaagagcgatttgacggtactctcttagtattcatgctttggctgcttgtactttttatttatttttacttgtttttccattaattttgccacgtcagtaaccgtaacaaattttagttagttaactaactgtttacagttatatgtttagtaattgttgtttggccgccgagaaaatgcgagaaaattttaatgagtcaacatctgtagtagaaaattgagtttttcggtacccttctgcttgaactaaatgatgcaaagtaccaatttttttttttttttgaatcaaatgctttgtttggcagaggaaagtgaaagcaaaactaaaaaaaaaaaaaaaaaatcagtcttttaagtgaaatttttctcaatgaaatagttcaaattcaatgagcctgtgatgatatttttattttctatatgtaggttcttaagctatttatttcttaaaaaaaaaatgattcgattgacaatttcttcttggttgtttattacttggtattgtaaaag

SEQ ID NO: 88195 - DNA, 613 bp, Citrus clementina
  Intron number 1 from transcript clementine0.9_005402m (loc us clementine0.9_005402m.g) derived from phytozome v7.0 (c hr-ID scaffold_91; pos 776343 to 776955)
tctccacaatcaccagcatcattcttctcacccctgtgagtctctctctgtttttggcgccgtggtaattcttttatttgattatgtgcattatgaatgccgctcgaatgggtttgtttctattgggatttctaaggattgtgttgtgtttttattttgtggattttgagtgacattcagttacatatgacttcatttgaatcagaactgaaatgggtgtgtttgtttttgtgcaaatagaagagcatttactcagtagtgccctgtcttcaattagaattcaattgggtttgtttgttctgtgattttttttttccacatgcccgcaagctgtgttgttctctcaatgtctacatctctgttattgcataacggaattcattacctgaaattcaatttgtttttcaaattttaaatataatgctttttcttaggaaatgtcccaaaattagtggcaaagggatcaaatttgttgaagggaaaataaaccaagatttattttcactgatgctttgtatggagtcacgagttttatataaattaatttctttttctggatcttttatcgaattttgtagcaaaaagtaaagagcctatctgtttccgtacacat

SEQ ID NO: 88196 - DNA, 649 bp, Citrus clementina
  Intron number 2 from transcript clementine0.9_005402m (loc us clementine0.9_005402m.g) derived from phytozome v7.0 (c hr-ID scaffold_91; pos 777077 to 777725)
ggacatattttggagcagttggtccatccacagaggtgagacttgtgccatttgtcaataaacttactcatgaaattttgtcttatatggtgatttttctggaaaccattcttataagcatgttgctacattttcaagcagataaatttttgtgatttaccaaaagatggtctgattatttttgttaggaatactgcaaaattttaatgtctcaagtgataattaactgttaacttgctctcttttttaattagtttgtatattttgggttgcttttgttgtgagttcaagggtgtttttttcttaaagtgcatgcactagtgtacatactgatgatgcatagcttaagatactctcttctggtttgatttctttttcttctcttgacatcgtctgtgctcttgaattttctttgttttttatcacgtattttctgtcttgtataaatgaaggataaaatttcctttttgaggttatcctgtaatctgaggtagaaaatattgtgtggacgtgaacagtcataaaaagctgcaggcattgatgcttgctataagttttgttgatttgatgtatgcaagttttttatttatatcatctttgttatccgtctgcaggaaaacttaggaacaagtttagctacagaaactct

SEQ ID NO: 88197 - DNA, 470 bp, Citrus clementina
  Intron number 2 from transcript clementine0.9_017877m (loc us clementine0.9_017845m.g) derived from phytozome v7.0 (c hr-ID scaffold_39; pos 1934773 to 1935242)
tggagactccttgtgcttgtagtggcagtctcaaggtattgtcattggtatatcatatctgtgtttgagttcttgctttacattcgatctttctatttctttgtcgatgatgttctatgctttcttccgaaccgctggcttgttttcttttgtcttttggatggaatggaattagtcgaactgcgcaatcgatagattggtgctattaggcctgtgatttattatttgttctagtgaaattcattgtcaattgtttgatttgttattattgataatgtttgcatcataaacaatcctgtttctcggcttcctgctgttctgcatacacactggacttttattgaagctaacatttaggttccatgattcccaagtaattttcctttccgtttctcgttcttttaacattcagactcttattcttttatatgcttcctatatatatttactggttgtacattttacccagt

SEQ ID NO: 88198 - DNA, 559 bp, Citrus clementina
  Intron number 2 from transcript clementine0.9_009169m (loc us clementine0.9_009170m.g) derived from phytozome v7.0 (c hr-ID scaffold_151; pos 47539 to 48097 reverse strand)
ttattgttcttgacagatatcggactttcccccaggtagctatttatgagaatgcatttgtaatgttaacctttcaatttgagctccacatatgtctgttgttttattgtttgatcaaatatacgatcgtttatttattattttgtatttgagaaaagaatgtgtgtgggtctgctaatggaaaattaaacagcttgagagtgtaatcaatgggaagaaaatacgataagtgtgatatctgactgatttgggcatctctctccactgcaaaataaataatgtctcggtggactacttaaagcatgtggctggcccttttacttgatgttattttttattttttgtgttagatagtagaacacaaaaaacagttgtcttacattttgatcccttcatttccttttgattgtattatattgttggttgaactttgcaaaaatatttttctggtagtgcatagaatattagaatttgcatatagacgcaggtttctttcccttttttaacattttgaattttctgacttaccttactgtttaacaggggtgctgctgctgtt

SEQ ID NO: 88199 - DNA, 821 bp, Citrus clementina
  Intron number 1 from transcript clementine0.9_009169m (loc us clementine0.9_009170m.g) derived from phytozome v7.0 (c hr-ID scaffold_151; pos 48239 to 49059 reverse strand)
ctgcggctgctgtttgtagttgtttcttctcacacgtatctattctatcctctacttgcttttcttttcattttactattaacaaattagtgtttcagtttctagttctccatcatttatgctctattgcttagtttcttgcttttgtgagtgcttcaaatgttcaattcactgccttgtctcttattcgctaattgaattctactttcattttcttctttggtgccaaattatgtaatttcttttctggaaaactctcaatttattttaatttctggattaggagaatttatagatttggttcgttatattgaattatttggttgacggcttcgatgggaaatctgttcttggttgaaatcccagtcatttaataacaacatatacaaatatttaactccccaccccacccaacaatggaaacttttcagtctttttgtcctaaacagactctgagagtcttttcaccaagctgatacacacacatatatacgcgctaaacattttcctgaagccctaatgctgaagccaattagtcatttactatctgcacactttactaatagaataatagctcctttagcatctttgtgtgcctactcctcttccgtggattgggattagtaacaagggattttttttcatttgctacagcatttcatcgaaattgtgattcatgagtatgggaaaaaccaagttatttcactttgtctagttggcatccaatctttagccgtgctaacttcaatcagtgtcctgcaagttctttttgaattttgataacaaaaagcactgcaggcataccttcaactctttgaaac

SEQ ID NO: 88200 - DNA, 1048 bp, Citrus clementina
  Intron number 1 from transcript clementine0.9_004436m (loc us clementine0.9_004436m.g) derived from phytozome v7.0 (c hr-ID scaffold_37; pos 1199387 to 1200434 reverse strand)
caacaatcatctgacctcacttcctctcttgagaggtcttgttttgtcatttcgatcaatacctatttgttgtttcttttatttttttggttgagtgttgacccttgatgattatgtcaactgggtttctattttttcaactaatttagcgacaaagtcgggactttttttttttttttttgaatttgttttctgagttgtgttgattttgattatatttaacattgagctgctgcgacttctaatccacaattagtgtggaatagaaaggatcattgggtggatagttgataaatagtaatttcccatcaataagtaaaaaggtgagtgtatatcaaacagtttagctgcagtactttcctagtcgagtagaagcagaaatgttgctgagataaatagtaatttcccatcaataagtaaaaaggtgagtgtatatcaaacagtttagctgcagtactttcctagtcgaatagaagcagaaatgttgctgacataaccttcattttcttatatgtatgttttattatgcaaatttgtttttggatgctgacactgttgcaatttacatgctgacttcgctttggttagaaaaccttgattcttttgcaatgttcaatgccgtttagttttgagcctaaagtaattagtatgttgtttataatgttctatattaatcgaaacatgagagttacagcgttaattttggaggtcaacgatgaatttccaatgaacaagttggctagtagtcacattgcataagcaatatagcatagtttgaataagaagaataaaataatcgtaatttcattgagtacctctcttttcttgactgcattcctcgttggaaaagtttgttagattgaaattctggttgtcttttagacttaagttttagtgacaatacacttggtgaaaatatgtttacttcatgacatcatcttgaagtcttgttgttatggagacaaatatgtcgctcaattagcttggcattataagataaatgtacttctttgcagattaggagggatattaaaggtgccagacttga

SEQ ID NO: 88201 - DNA, 687 bp, Citrus clementina
  Intron number 1 from transcript clementine0.9_001998m (loc us clementine0.9_001359m.g) derived from phytozome v7.0 (c hr-ID scaffold_21; pos 1762372 to 1763058)
ggtactgtttttcacttccgacttttctggagttgttttgatcagcttagttagaatgaagtaattcaaaaactttgttaaattgaataaagttgttagatttaactataagttaagtccgcgctttagcttcttcaggtcgcaatcaactggaaacttgagatttaaatctcatttattaattaatacgctacttcttatggtcagtaacaaaattttatattcaaaatttaggctttcttgttttttttgtttctggatctaggtggatttattgatgaataaattactttcatgtgataggatgatgcatatcaaaaactaggatgatgtttcggtactttttcttttttcaaaaaatggaaatttatactttctgtgctcaaataggatgctttggaaatggcattttgatcgtaaaaatcactttcgtctctttaagattaaacactcgaacaatgaagataagcactttttagctatttaaaagtgcttttactgatgccaaagcaacttgtatacactgatagttatctctgagaggcttgtcttatattaacatatgcccttgggtttttttttttcggttgctatctgagcctagacggttggattgacttaattctgtgtttgtttctctgtgtggattcagctgctgaacatccattcaaggagatcttgaccgct

SEQ ID NO: 88202 - DNA, 667 bp, Citrus clementina
  Intron number 3 from transcript clementine0.9_015149m (loc us clementine0.9_011979m.g) derived from phytozome v7.0 (c hr-ID scaffold_16; pos 2229257 to 2229923 reverse strand)
catcgtaaaggtgagtttgacatgttatattacattgtattatttaacgtttggtaagttgcttttgactgtattatgttaacattgtattatattaatgctatataatatttggtactatattgtactatattaatttttatttatcttatctttggtgttgcattgcattgtattatattaattcttttggttaaaaatttaaattacaagttgggacaaaatattaattagtacttagaaaaatgataaaatagatgttgtaaattttataattttttacatcaattatattttagtataaatgtaaaaaatatcacaattcttttgaacatatgtaaacttaagaaattctaaaatttttggtgtgtgtatatatatatatacacacaaaggagcagttctaaaatatatatattatgaaataaagattaaaaaaaataattcaatcaaataatctctaaaaatcatcataacataaataaatagataaaagccatcttatgataaagatgacaacaaaagcatttacatataccacaacaaactagaactctaatcactaaataaaatggattgaacaatgcaccaaactcagttcaatttatagctggaggacgttctaattctgttagttcttccagggctctggctcactggtggttcc

SEQ ID NO: 88203 - DNA, 1027 bp, Citrus clementina
  Intron number 1 from transcript clementine0.9_015695m (loc us clementine0.9_015695m.g) derived from phytozome v7.0 (c hr-ID scaffold_52; pos 819167 to 820193 reverse strand)
tgacaaggcaagttttatttctttgttgttgttcttaaagaaacgaattcttttcttattacttgtacatttgtatacaggtgttaaatttgcttgtttataaatttttttaatcatgtttagcgtggaaagatactaagaactcactcaaaataatcaaaaatgaaaaatataaggagatagaggtgtggggtattcagggataacgaatctctcaatgtcttaaaaatgaaaaaaaaaaaaatctaatgtgtttgaaacgttaatcaaaaactgaaatttatgcatttgagagaaaataatatcaattaaggatcattgtattttcagctgcagaaggccatcacagaaaaacaactgttcaagttgcttttatcttaaaactgaattcatctttgtgtcaatgactgtaagaaagttaatgctatttgattccgcctcatttatctgtattgaatgaataatggctttagtattatatttatccacaagggtagcggctttctactgttgaggatgctagtcaagacaagcgtgtagcataaaacaaacgtcagtttgtgttaaatttcatatcatgactcaagacctttcatatattcaaattaggataaattaatatccattttcttgaattcaatcaccaccacttcagagtttcagagtagatgattaaggaactgcaatcatataaactcattggcaacaggaaaactctttcccaaagtacaattactacctaaacaaaaggatcctcttcgaaactctttgattccataaaataggctttttcttgaaaccatcccatccagttacaatttgattgtgctgatcattatattgatataatatgaaaatcatcttatggtactcctgcttgttagagtttttacattcgaagatgcttattctcagttttgagtgcttattgggagagacaaatgggggtgtctatggcatatgtctgatcattcgctggcattgtttttcaggtatccaggagctctgttttctccaaggcggtcat

SEQ ID NO: 88204 - DNA, 798 bp, Citrus clementina
  Intron number 1 from transcript clementine0.9_013714m (loc us clementine0.9_013739m.g) derived from phytozome v7.0 (c hr-ID scaffold_12; pos 182111 to 182908)
gttccccaacaagccgcctcctcccgctcaagctggtgagcatattctattatcaactctattcctttcgtttcttctattgatttgattgttatttggatttgtataacttcgattattatacagcccttctgtttgtttgttttgcctgcaagtgtaagaaaattgatgcaagtgaaagttgtttatttttattattattattattattattattattattatcatcgtcgtcatcattatcattattattactactactactattgttattattattattattattattattttggtatcattttatgattcaaagacagaggaatcgacattacattagtcaagatgagcgtcacacaactgtcgctctgctgtctttacactttagtaaaattatgactttttaatcaaatgcaatgacagcttcaggttgttattcagcaaaacatttgatttttttataagttgaaagcttactaattaagttcataactttgggattttttcggagttttatcattttttcaatttctgttagtctaattcctgaaattgtagagacatgctttgtccatcattttcaacataagcaatctacaaacttgtttttttggttgttttaatgtgcatgttatgtatttaaattatttgttgattggtggcaaagaacggtatgaaggaaatggagtttttcaatagcatctatgcactattggcttcctatttcaatattttttcctctctaccatatctaattatgtggtggccttcattaaacagtgagggaggctagga

SEQ ID NO: 88205 - DNA, 885 bp, Citrus clementina
  Intron number 1 from transcript clementine0.9_025341m (loc us clementine0.9_025324m.g) derived from phytozome v7.0 (c hr-ID scaffold_16; pos 1459973 to 1460857 reverse strand)
tcagaggcgcctctccctgctttgatttgcctacggtatgtacgattctagcttccacctcgcatcttataacacgggtttcgcttgtattgccttcttctgaatttttttttttatttgggatctaatcttcataggttctcacatgatctgtttgtttttcatggtttcatcttatttaatatgatttttggctgctaaattataacgttaattttcttttgactaatggaagccgaaatagtataacatattttgatttttgtagttaatagatgagcattgagtagttgacgtgtaatatgcctgagaaaatcttggacttgcttggttacatgagttggttaatttgtttcgtttgatggttgtgtgaatgaaattattatttgcttacccgttaacattgtcttatatgcttcaatctgccattgaaagttgagactatgtcgttgtttcattttgctatgtaattctttgcttataatttataaaagtttgtgatgattgtgttcccacctattgtggtttctgaatgttaatttgaataactgtgagggatagttttgtagtcacatttcttgtgatggtacaaataatgggtgtgttgaagaaaaaactagtcctctgttaatttatatgtttactgattcttgttaatccccttcctgttttgttcaaagcaaaaaaatgattgattgtaaatgttgtttggtaatgatctcagcttgtgtatgcaactctataataatttttagatcctgttgattggaatcattcaggaagcaaatgtaccttgtagcttctttttttttttttttttttgggttgtttgttaaaccttagcatagacactgatgctgttttctattatgtgtagcagcaaca

SEQ ID NO: 88206 - DNA, 387 bp, Citrus clementina
  Intron number 1 from transcript clementine0.9_016733m (loc us clementine0.9_015789m.g) derived from phytozome v7.0 (c hr-ID scaffold_13; pos 14026 to 14412)
gtttcgcgcagatttagcacgaacgcgaattttaggtagcattaaaattaattttcaattttatatttccttatttaaaaaaaataaagatttcttctttttatctttttttcttcaatttgtctcttattgatttaatttaataacatatatgaatatttttagggtttcttttatggtaacttgttgtgatcacggcgttttgttgatcatctattataactgaatcactcaactgaagaagtatttaaatgactgggctgattgggtgatttgaatttttataatttcatttccttttttgggtttggtttatcactgaagccagtttagtctgtcaagaatatatttgtttcattgaatttccctctgcagttgcagttttgc

SEQ ID NO: 88207 - DNA, 946 bp, Citrus clementina
  Intron number 1 from transcript clementine0.9_022961m (loc us clementine0.9_021346m.g) derived from phytozome v7.0 (c hr-ID scaffold_12; pos 4372144 to 4373089 reverse strand)
aaagactcgctctcactcagaagtacgaggaggtaactagttattatatttcataaaatacttttatttaatttgattttttgttttcttcgctattttattttatttatttaaaaaatcagtcattttacaagtaaaatgataaattgttacaaaatataatgggttgcgtaagtttatcgtttgttgtaaagtatgctttaaagatattgttgttacttctgttgaatatctaatttcattgtgccttgttcactgtgagaagattcaatcttacattctagttttcatgtttaatgttagtgttttgagattgttggtgataggttgacattgaatacaagaaccaaagtgattaagcatattcgactaaatacaagaaccaaattgagaagattcaatcttatattctagtcttcatgtttaatgttaatgttctgagattgttggtgataggttgacattgaatacaagaaccaaagtgattaagcatattcgactactttctgctaatcaaatctttaatggttttatgccaatttctctggtattgattgctgcgtcacatattttggttagaaatactgaaagagcttgtggtttgtgctctgaaataatctttggatctttagcaaatttggttaaatctttgtctaaatatgatcactgatgtctgatgcatattttgaaggtgggtttaaatcattaatttcaaagataagtatttggactaagctggtgattttaatttcttacacaaaagtcttagttaaggagctaagccgggaaagttcacttgcaatatgtctcttctagtaagtaaaatttaaggcgcatggctggcaattgggtttatcaaagttataagtgtattttattgcaagtattatgttttaggattttgctgatgtggatcttcttgcagttgcttgttgctgggggtggc

SEQ ID NO: 88208 - DNA, 855 bp, Citrus clementina
  Intron number 1 from transcript clementine0.9_000742m (loc us clementine0.9_000742m.g) derived from phytozome v7.0 (c hr-ID scaffold_12; pos 5009620 to 5010474)
gcacattacaaatcgagtcccaaggtgtcgccgaggtgaagaatgttagttttatgggggggcttcaactacccttaagattgtgaagggataaagttaatgtctttttttgtataacttatctaatgacttaagtgtttatttaattatataagcttttttcaattttttttgttgttgtttgattttttagtaaagcttttaatgattaaataagttattttattgatactagtaaaaacttaaattttgggtctttaagagattttttttaaatattaaaatatctaaaatattctttactaatttgataattttatttctttttttataacacaacttaaaaaaaacttacttgttaagtaatttaatattttttaataaaaactttcattaacaattaaacaactaaatttttttagtaaaacatttatttataaaaactctaggaataaaaattttaattaaataagttttatttaaaaaattatattaagcggagtcttaaatagtttaacatctggtatttaaatgcaagctcaatttaaataaattggaaatttacaacagttaccttataattgttaaggctttgaccttattggaagtgctataagataaaatattcttttataatcacacgattaaagttataattatttttttattatttatactcaatacatattctactttagagcaactccatgataaccatactcttgttataataataataataataataataaactctactaactaattccgaacacttcaataagcaatgcaaatgaagaacaaatgaaaaataacgcagcggttgtttttgggtccagaaaaaaaggaaaaagg

SEQ ID NO: 88209 - DNA, 551 bp, Citrus clementina
  Intron number 3 from transcript clementine0.9_011779m (loc us clementine0.9_011279m.g) derived from phytozome v7.0 (c hr-ID scaffold_16; pos 1522659 to 1523209 reverse strand)
gattgtaagttcttgtcattttatccgaattataccttatattatatctatatctgtatgtgtgtgtatatatatatatacacatctctgtatgtttgtatgtatgtctgtgtgtgtgtgtgcgcatgtgcgtgtgtgtatttaatgttggcttcaattcaatggcatctcttcagtacagtgtcttaaaagtaattagggagtaactgatgctcaaaagaatgataagtgctggtttagagacggtctgttttcattgttgaacgtctggctgcagaagttttttgttcatttgcctggtaactggatacgcttgaagaagattttgctttgtaaagcctgattctgaaggagtattctttaccactttcctcattattttgatattatcacctaaattgaggttcaggggtatcatttcggctgacagagtaaatagtggattcaaaacgtatgcttcatgttgaacgccattaagcagtattttagttactatcttctgctatcatttttcagggagcttttacacacgaaacagagacgtgaggaga

SEQ ID NO: 88210 - DNA, 676 bp, Citrus clementina
  Intron number 4 from transcript clementine0.9_031579m (loc us clementine0.9_031579m.g) derived from phytozome v7.0 (c hr-ID scaffold_11; pos 4643379 to 4644054)
agagggaaactttgctcgggattcttcgtgatcaggttagttcatccctaactagaaaataattcaaatatagaaaattatatgtaaaattattatcgaaactattatcttctcataaggaaacttagttctatgatattgaataaaagaatccattttaaagttacaactctgaaatatttaatgttttatattaaaatcattgctagtgacatccatgacttaataattttattggttcaaatgttgaagagaccttgtgacttcttacatcactagcaaacactagcgtgtgacaagttattggccatgagttctctcaattgactccaagcattttcgataaagacacttgcatctatggtaaaatcaaatccatgagactgaaggatgcatgtcgatgtcttacaggcctaatttagatatttgcataggtttatttctattttaaccttaaatacagaagagaagaacactaacctaataccaatcatcctaagacccaaaattgcattaattatccttatatatattcttaaagtaggcccaaattccatgattatgttggaggaactttttaattgaggtttcgctctttcttttcatttttctaactatgttacaggtttttggacatgtaggtatctgagccactacgggcgttaatcaacggagc

SEQ ID NO: 88211 - DNA, 986 bp, Citrus clementina
  Intron number 1 from transcript clementine0.9_017117m (loc us clementine0.9_017142m.g) derived from phytozome v7.0 (c hr-ID scaffold_57; pos 788347 to 789332)
aggtaactcatttctggctttgttttggttggtttccttgtttatgatgatgattcatattattatcgttattattgttattattttttggggtggtgtcaggagaattagtattaaattgttctgtggcattggttgctttttgtcttgtcagatgatatttccttggagaatttgtcttttaaactcttgattctgagaataattaactctttttgtactcaaacatggagaataccgaaatagtacatgctttgtctctaatcttgatgataactgataaactattttgtttgattttttttttctttttccttgtaccgaggaggtgtataaagcttgtgcaggatttgcttaatttatattttaattattaaaaattttggaatttctctatcaatggtgtttaactagaataattttgctttggctgtatttgtttgcgtagattatataagcaagttgaaaatttagccccacagagtaaatttcatcttgtcgaaccacggctgattctgttggttcttaatacaaactctggatccaattagaagattcctctgtgttcgtcttgtctttctttattttattctctttggtggagttttgctttccattcagttgcaattcatcgtccttgctgatttgtttcttaaaaatatttcaaagagttgctcgtgggaatcaattgttgggtgtttcatatttctgtgattttttattgagtaagacgatgtggatcataagtgcttaaaaaacaataagaagctggatcataagagcttaaaaaacaataagaagcatgtgcgtactttttcatctctccgcttacaacatgttaaggctcgagatcctttgggcaataactcgctttaattactgttgacagtttcattgcactggccggtacttccactcatttgtgtttcttggagctgcatatgctcaactgttgtgtttaatttcttatgcaggccgagacagta

SEQ ID NO: 88212 - DNA, 667 bp, Citrus clementina; identical to SEQ ID NO: 81243
  Intron number 2 from transcript clementine0.9_017117m (loc us clementine0.9_017142m.g) derived from phytozome v7.0 (c hr-ID scaffold_57; pos 789384 to 790050)

SEQ ID NO: 88213 - DNA, 483 bp, Citrus clementina
  Intron number 1 from transcript clementine0.9_031454m (loc us clementine0.9_031454m.g) derived from phytozome v7.0 (c hr-ID scaffold_8; pos 713888 to 714370)
gcgctcgaagctgatattcagcacgccaacacactgtaactctctcaattcctggatttttttttttattatcgatcaaattttaaatttttattttctaaatacttttttttttgtttatttaggtgtctttatatttgttaattaatcacgatatcattttgctcttcaaacatgtgcggtttagattttttttttcttcacttgcgacattattattcaagtaaaaatcgcaacttttgttcttgtaaaatttggttctttgaatgtttttgacgcataaaaagtattaattgtattcatgtttaaaatttaatcttttagttgaaactttgcattaaaggtacaatctcggttgattttcacctttgttaaacagtttttagtatttggagttattggttttgtatatttgctaattgaggattgtgctttttgtttctcttgttattcgcagggcattagattacccgagggagacgg

SEQ ID NO: 88214 - DNA, 894 bp, Citrus clementina
  Intron number 3 from transcript clementine0.9_018657m (loc us clementine0.9_018657m.g) derived from phytozome v7.0 (c hr-ID scaffold_16; pos 3855242 to 3856135 reverse strand)
caggccgggttatcaatctcttgggagttcaagtggtatgctcatttcttgttgattttaatgtgtttgtgcttttatgagaaaacatggctaactttagtcatgtgaattattagaacctttcttgttgcttttggttaaaatatgtttccctattcatacagcgacaacagataggtggtaaagactagaaacacaagatgaaatgattcagaaacacaagatgacatttactaataagtctcagttattagatctgaagttgcttggggcttaataccaaacgtaggaatatggccgactggtgtcaaaagtttatatttttgtaacgtagtgagaaggaaactagcaacagactggtaaaaccttcttttgcttgttttgaatggcaatggatttcgtctgatttgaaatttttccttgaaatatgcgctacttttcgactagtctttgttttagtaggcatttagctgcatataaaaaatgccacgtgaatatgcaatttcatattaacttcttgtaaataaaaataaaataattgaaaaatattatatcttgtggcagtcgtggctagctaagctctttagcttttggctgatcgaataggaacatgggaggtctgttcagtagtgctttatcttctatgttgggccagggaggggatgagaagatggtggcaatggggctctcttacttttagaattgagtctcacaaatgtataattttcaattaggagttactgaaagtatagtcaggggcaaattagtgatgatatgtattgccatggatttgttcttgcgaacagatactgccattatgttaacctttaacaatatgtctgactttgcctccgtgcagaaggatttgaacaacaaccagcaaacaattggaag

SEQ ID NO: 88215 - DNA, 520 bp, Citrus clementina
  Intron number 1 from transcript clementine0.9_007165m (loc us clementine0.9_003126m.g) derived from phytozome v7.0 (c hr-ID scaffold_21; pos 660764 to 661283)
tgttgaggaaggagtggcttgtttgcttcgaggaggtaatgcgcttttttggtttttttttttttaattctgtctcttattatggtatttctttggtttctgaggaaattgaatgcttcttgtttttacaactgtggtggatccattttctttctttctttttttgaaataaaaatatgtttttaagtttttcgtgtgatagatagttgtttgtaagttcttaaacgaaaaaatgaaagtaggtttctgaaggactaagtttggttgccaagaaaattgaggaaaatgagagaaattttgaattggaatgtactagtgaaaatttagattaattaatttgcgcatatatggagtttgacaacggagaaagtttacttgtattggagaaatgatttcgtaagtcttattgttactgtgatatttattttagtgtgatgactattttactttgtgatttttatattgagtttgtcattggattttagaggaactagatttgggtttgtagattcaagagttg

SEQ ID NO: 88216 - DNA, 893 bp, Citrus clementina
  Intron number 1 from transcript clementine0.9_015977m (loc us clementine0.9_015977m.g) derived from phytozome v7.0 (c hr-ID scaffold_12; pos 1460258 to 1461150)
cgcagaagacggaagctgttaagctaataataatcgtgcgtctaatacgtctccttctctctgtttctctctctttttttttttttttgaatggttatttaaataatttttttcctattcgtttgattccctgataactttgtcatctctctctgctagattttgtcacaatgtttgatttgtaattttattaataaatcgtttataaatttatcttctgcatttagaatttgtatattgttgttttcatttcatgtgttacttatacgcaaccattgcaattttgcttttttttttttttcaatttttaacgtttgatttagttttgaccaatttatgcaagtagttcatgtcaaatcatagcatagattagtttctctttttatgctactgctgaagaatgattcagcaaagcagaacatgcggtcgatgattttatgagatgtcatcgtcatttggtaaggtcttaattaacttaaaagaagggctgaaaataagaaccagaaaggaaaaaagttgcagaaaagaaggggcttcatttcgattattggtttgaattggtttggtagcttgcatgatctaattgggaaaaatgcccaatgaactactttgagttggagtagccattggagtaactagccttgtttatgtttgttgcattgccttctgttctagggagattttatcggattgaaatcattagttttcttaatgaagtggccaatggaagaaattttattaagatactgatgggtgtgctgatataaatcgatgattgctactaagattatgaaagatgttattcaacttttgacagttatattaggacaagttgacgattaatttttctgtttgacaggatagggtgctagccagatatatattaaatcatt

SEQ ID NO: 88217 - DNA, 415 bp, Citrus clementina
  Intron number 2 from transcript clementine0.9_008582m (loc us clementine0.9_008582m.g) derived from phytozome v7.0 (c hr-ID scaffold_44; pos 1510105 to 1510519 reverse strand)
tttccgaaggaaagaaagagtatccaaaatttacggtaggattttattggctttgaattaagcttgaattttgatccaattgaatgtaattgttctgcattcagtttttttcatagtgttgccagtaaaaatgttagtagttgatgaatttcgacttgctggtaaagagatatattatggatatattatagctgggcttattagtataatattgaagcaaattggtgtgctgatgggtatgatagttcatcttctaatttcgatatgatagatatactgttgtgatattctgatgagtttagatgctttaaagacagataaatggactgggattaaaatgcccgagaaagctgaaactgttgtttctgttgtgtagtaagactgaagaaagtatagattggttacgctcttggaa

SEQ ID NO: 88218 - DNA, 600 bp, Citrus clementina
  Intron number 1 from transcript clementine0.9_012466m (loc us clementine0.9_012466m.g) derived from phytozome v7.0 (c hr-ID scaffold_61; pos 918357 to 918956)
caacttattactagactcccctcaatctcccaccggtttgtaaaatttaaccctttattaccattattattattttcttgatttttgggtcatcttttgtttccattaataataatgctttgttgaacttgagttgagtgattactcttgtgggtagtttttaaattgctctctgattacttggttcatgtagaaactattacctttatgtacttgttattaaccaattgttggtatgagtaagaatagagctgcagtttcatgtacaaactgacatgacgtaatataactgcatctgtgggatgaaaacacctcatggctcacatgatttttttttaatcattttatgtttttatcccaccaaatagaattatgtcatttcagtttgtacaaagtaagtattactttttaaattgttatttctattgctttgttggtagtctatctcgaggttttttcgtgtattattaaagatgtaaccaatgatgctggctgctgggggatgtattcttctttgatgcttgttacttgcatcagaatgagcttttgacgaatgcacaccattgcagattcttgtgagccctgtccaagtaacggcga

SEQ ID NO: 88219 - DNA, 388 bp, Citrus clementina
  Intron number 1 from transcript clementine0.9_000299m (loc us clementine0.9_000299m.g) derived from phytozome v7.0 (c hr-ID scaffold_56; pos 172325 to 172712)
acgccagccacccctacacgactcaccctagagaggtacattgttggtcaaaaattcaattcatactttcatatttacttgagttagtttgttttataagaaaattggtgccatgtcagccttatggtagtttgagttagtttttatttgaatatggatctatcagtttgtgtttcaaagccattagttagaataggggggaatatttaatcatgcccggtggccggggggtgggtggagaacgtgcagatgcttcttcttggaagtaattcctaaaaaaaaaaagaggcaattttaatgcatccccagtgagtactgaagaagcagctcattttttacggttaataattttattgcagtggcctcctttagttgaggtggtagatac

SEQ ID NO: 88220 - DNA, 639 bp, Citrus clementina
  Intron number 1 from transcript clementine0.9_006562m (loc us clementine0.9_006562m.g) derived from phytozome v7.0 (c hr-ID scaffold_11; pos 90398 to 91036 reverse strand)
gccactttgtctggctttcattctcgtaacatcaggtgaaaagttacttttaatttcgcatactaatattcaacactgtaaataaaattcacgcagcacccttagttaaattttccagatgataaactacacttttaaattttttcatgcatcaaattctagacttcttgaacttccccacttttgaactcctataaaagaatttttgcagaattaataataaaagctccagaggtttacaatatattttaacaaaattaatggtgttctgtcgttttttaatcaatttcaatctcttactcatataccactaggaaaaaaaaaatctcttccacatataacatattcctgtaattaaagagttattaatttatagggaaattggaaatttccttactcaaatcaatatataccacttattttgactatttttacaatatttaataactctcctggtaccatcactttacaatattatccttatgaaaaaaaataagtggtatatattaatttcaataggaaaactagcaatctcctttatttcacattttatgcaaatcccttctatttgaagttactgctgctaattttatgtatttggtaggcctgaatcggaacttataaacgaagttgttcatc

SEQ ID NO: 88221 - DNA, 906 bp, Citrus clementina
  Intron number 2 from transcript clementine0.9_032535m (loc us clementine0.9_032535m.g) derived from phytozome v7.0 (c hr-ID scaffold_123; pos 296633 to 297538 reverse strand)
aacaatttgatttggttatgctctttatccagagttacttttattttatgtttttatttctgagtggatttttaatttgatcgttaagatttcattacgaggcaaccaagtgatctctgattaattcatgcatctagacatgttttctgcatggctcataactcattattgttttttctgacatattgagattttaagaatcatgagtgagggaaaatagcttatgaattagaaagctttcaattttatggactgttgctaggaggctaaacagctactgttttcaaatccgttataaggaagcattctacttgagatccttcattgactggtttcaaggaactaattagtgaaaattaatggttggtttagtttgagtaaaatcagaaacatactggcacaatttgcccattgttagaactcattttagtcagaaaatttgaatttgatgacattgtatttgagctcttatgatagagcattgtatatgagcatttactagttcctgtggattctaaggtttattattgcatctctcatgcattgagtaatttattactcttaagtcatctttctggtttatgtttgtctttcacaatcaactgcaaagcttaagcaaattttatgagtgtttaccagttcctatggattctaatgtttattattgcatctctcatgcattgagtaatttgttaatcttcctgttttatgtttgtctttcacaatcaactccaaagcttaagcaatttttttttaattttatatataattagaattttggattgcaagtcaaccacactattttttcttttcttttttcttttttatggatcatttctttttttgtagcggggtctaaattaatattctttcatatttgacgctgctttgtttgttacagcttga

SEQ ID NO: 88222 - DNA, 640 bp, Citrus clementina
  Intron number 1 from transcript clementine0.9_006599m (loc us clementine0.9_006599m.g) derived from phytozome v7.0 (c hr-ID scaffold_8; pos 4301755 to 4302394)
ctactgtttggctcacttgggacactcaaacttctgtaagttttttttttttaatgggaaaggtttattttagttacttttaagttgaagaaattggatgtgagttgatggagcattttgaggttccatacatatgtattattgctgttaccctttttttttttcttttttcttttaaacttcttgtgattagaaggcaatgggaggttgagttaaatttcagtttagttgattagaaagtcgaggaaatggcaagaaatgaaaataatattagggatttattgggttaaagatagaatttatttggtgttgtattaatttgttaaatttaatctctcaagagttctttgttgtttggttgttaagaaaaattgagaaaggcaagggagaaaggaagtttctttctttggttgtttatcattcatcatgcttattaatttagaggtatatgtctgtgggtatataaataagtctttgctactttaagcttgtttgatttgctttttcttgaaattaactttgaaggtgctttatatatgtgattttttcagtttggatgttgaaagttatattagatccttccatcaatttaaactgttcgactcattagcatcatgagacattcattgtttgcagcatt

SEQ ID NO: 88223 - DNA, 746 bp, Citrus clementina
  Intron number 1 from transcript clementine0.9_003210m (loc us clementine0.9_003210m.g) derived from phytozome v7.0 (c hr-ID scaffold_16; pos 2731617 to 2732362)
ccgtttcaggtaaaattttccaaagttcattgcttcactgatgattcttaatcttaccaatgctctggctgatgctgttgcttggtgtactttgtacgaacctgtatttgatcaatgatgagtgtttgttttgttgcggtgtttgattgttttatttctgatttcctgtttcgttgggttttctgtcacatgcataatttgccatttgaagtaaaatatttactctctctctgatatttcggtggttagatgatgtaatattattttgtagcattagtgctatgctatcaaacatctttttctagtgaggactgtagctttctctgtttggtaatgtattgatttttggaaaataataataataataataattaaggggaaaagaaaagaaaaacatgggtgtttttgtgttgaatgcactttttttttcccggaaaaatgttgtttggctgtagtttctgtttatattgtaaactctgtaacaaaacgtgggaaagatacgactgtttggcttgattttttccctttctttttagcatatgtatgataagaataaaaaattgagaatgaaaaagttggtatatgttgtgatcttaggttacatttcttattaggtaatgtcattgtggcttaaatgctattattgatggagaattaatgccaatcattggcttgtggcacttgtaagttgtataatcgtaatgttgccctccacgtgtaccatcagggctcagcgtatatttagc

SEQ ID NO: 88224 - DNA, 346 bp, Citrus clementina
  Intron number 1 from transcript clementine0.9_014098m (loc us clementine0.9_008486m.g) derived from phytozome v7.0 (c hr-ID scaffold_8; pos 1001129 to 1001474 reverse strand)
agactctctctaaacatcttttccattgtaattaatcttcgccctttttttttaatttccgcagcattctagtttatttatttgcttgcttggttgttgagtcaatttcagtacagaattttctgggtaagtgtctgtgtgttaaagtctgtttgaaagctcctgctgaggaagcctaagaaaaagaaaatggaattctgagtgtcagttttggatttgagtttgaagtcaaaaacttatgtcagttggataacgcagtcaatttcttacatatttttataatgttttggcttttttgggtgattctgtacttaaatgttgaaatggttcaggggaaaaccaaccc

SEQ ID NO: 88225 - DNA, 636 bp, Citrus clementina
  Intron number 1 from transcript clementine0.9_035143m (loc us clementine0.9_035143m.g) derived from phytozome v7.0 (c hr-ID scaffold_11; pos 478023 to 478658 reverse strand)
gccactttgtctggctttccttctcagaacatcaggtgaaaagttacttttaatttcgcatactaatattcaacactgtaaataaaattcacgcagcactcttagttaaattttccagatgctaaactacacttttaaatttttttcatgcatcaaattctagacttcttgaacttccccacttttgaactcctataaaagaatttttgcagaattaataataaaagctcccgaagtttacaatatattttaacaaaattaatgatgttctgtcgttttttaatcaatttcaatctcttactcatataccactaggaaaaaaaaatctcttccacatataacatattcctgtaattaaagagttaataatttatatggagattggaaatttccttactcaaatcaatatataccacttattttgactatttttacaatatttaataactctcctggtaccatcactttgcaatattatccttatgaaaaaaaaagtggtacatattaatttcaattggaaaacgagcaatctcccttatttcaattttatgcaaatcccttctatttgaagttactgctgctaattttttgtatttggtaggcttgaatcgaaacttataaacgaaattgctaatc

SEQ ID NO: 88226 - DNA, 683 bp, Citrus clementina
  Intron number 2 from transcript clementine0.9_016298m (loc us clementine0.9_007721m.g) derived from phytozome v7.0 (c hr-ID scaffold_8; pos 111724 to 112406)
gggcattgtttcagataattttggaagaaggtgggccctttatcaaattcagcatttgctattcttaatctttattcagtgttttctggaaattttttggtgttcattctctgctaccattcttatttaaggggggtgcatatttatctgtctactagaagtgaaactagtaagaatcttatagccatttcaagagttactctgcttcgaatgcttgaaggtgattttgcattttagttttgattaactcatccttcgtcttctcccatgaaggagaaatatcttcctgattcctgccttcttgacctggaaaatctgacctctcatactgaaagcacattgtagcttaaaatcacccatatatgtcttgacagacaatgtctattgaaatagaaacaaagagagatcctcaaatgggttcactggctagttgaatctgcatattattatgaaaaacgatatgaaaatggatactgtgtcaccatgttctgttttactgatttgctttgctatgatcttttgtgatattgcatttgatgttccagaactttcttggaatactactacacttctcaatctgcatttctctgagtctgatcaatcttctttttctttttccctgtttgggcgtttgcttctatccttcaggaaaggattcctcatcacagcaatagtcacttctg

SEQ ID NO: 88227 - DNA, 486 bp, Citrus clementina
  Intron number 2 from transcript clementine0.9_018835m (loc us clementine0.9_017648m.g) derived from phytozome v7.0 (c hr-ID scaffold_25; pos 3077762 to 3078247 reverse strand)
gggagcctcgagcttttgtttatcataatttcttggtgagttcttttctttttttttggttattttgattttctacaattgagcttagaaatgctaataattttgaccctttgatgtgattctccctcttcattctcattcagtcatgtcgatttttagaatgaaatccattaagccttgcgtcttattttgacttttgagaaacttggcggttgtttgtgatttcagctggcattattgattgattacgcttcttgaaagtaaatctgatctactattgattgttatgaattatattgaagtatctgtcacaagaacagcagtacaattggctacttggcttgggtgttttgtttgtatgcatgtgtggataacaaacttgggatcttgggctcaatttcatttgatttgatttgctcacatactgaatttgatcaccttttctgcgcagagcaaggaggagtgcgagtacctaatcaatcttgc

SEQ ID NO: 88228 - DNA, 265 bp, Citrus clementina
  Intron number 2 from transcript clementine0.9_017711m (loc us clementine0.9_013653m.g) derived from phytozome v7.0 (c hr-ID scaffold_12; pos 1189043 to 1189307 reverse strand)
atacaaaagcttcccgtgaggaaaagctggtaacagtttttttgtttgttattcctacttttgaatttgtttatgttttacatacctgaacaatatcatgagtgatgtgtgcttggagttagaattttggtatctgtaataaatgatagttcttgcatctcatgaggaagaatttaatcgcttgtaattcatgcgatgtgctcaaggccaatttctaaaactcttaaaatgtattgtaaacttttctattttcatgcagatattg

SEQ ID NO: 88229 - DNA, 178 bp, Citrus clementina; identical to SEQ ID NO: 81881
  Intron number 1 from transcript clementine0.9_025937m (loc us clementine0.9_024948m.g) derived from phytozome v7.0 (c hr-ID scaffold_121; pos 116552 to 116729 reverse strand)

SEQ ID NO: 88230 - DNA, 593 bp, Citrus clementina
  Intron number 1 from transcript clementine0.9_017948m (loc us clementine0.9_017904m.g) derived from phytozome v7.0 (c hr-ID scaffold_13; pos 2764613 to 2765205 reverse strand)
gtacacattcaccaacactaacgcgagaaaaatcggtgagcttgtttttttggttaattttgaaattcaattttattttttcttttgcatttgcgcatgttagcaaataaactggataaatgctgaaacgcgccatatgcaagtcgaacttctgcacattccggttgcgtataccgattacgacacgtggataacatgtggctgattcgttctattagaatgactaaaacacccctagtaatggcgtggttggctgttgggcggttaactagttttcaccaatttggattttacaattgccgtgggaccactttaagaataaagtgcagcagtgtatgcctttattattaattaatttatgacgtggtgtgcaataaagattacaattgtggattcttccattgtttataggaaatggaccccacgtgatctgtttttataaattcctgactgtagatttagggagtagatttttttcttgggcggctgggatttttttacggctggcccacatgtggcgtaagttctttttgacttcttcttgctatttggatacagggcctaaggagttcatccaagtgtttcacagtctt

SEQ ID NO: 88231 - DNA, 474 bp, Citrus clementina
  Intron number 3 from transcript clementine0.9_011306m (loc us clementine0.9_011316m.g) derived from phytozome v7.0 (c hr-ID scaffold_25; pos 2947878 to 2948351)
ctcgtgtcagggtatattcattgctctattattattttataatcttgttgtaatatgtttcaataatcactcaattgcaataagatctactgtgcatccgattttgtttgtgaataatgtctgaagatccagttatgacgactgaattacagaaaagaagttcattgctattattggattagattggaacttggggagatcgacataatcactattataatgtctgaagatacagtcatgaattctattgcttttgttgatgaatacatgcaatgctatttcctttaattttgactcacagctggagtaaaatctgatgcttgttatgtttttatgagagttctgtattctgcttgacttttggtttatttgtttgtatgattttgtgtttatgcagcccaattgaagttaagtatttttggtcatttgatattgacaggagagattggaagatattgagaaggatcaacgtga

SEQ ID NO: 88232 - DNA, 829 bp, Citrus clementina
  Intron number 2 from transcript clementine0.9_008540m (loc us clementine0.9_007526m.g) derived from phytozome v7.0 (c hr-ID scaffold_21; pos 3882568 to 3883396 reverse strand)
cctcatttaaggtctaaaaaattattatttaaactttttttctttttaaaatcaatttttattagttatttatatattatatggaacataacgtatttactaggaaaacccaaggggagtgagtttgaatagttgaacccttggtttacatacaagagggagagaggttcgggtccttggcagttggcgcctcacttgggttttagacttttttaggtgcaaacacaagtgaggttacggaatttcggtagtgcaaggacaaggtcattgtgtttgttgaattggtaaaatttacatgctaaagggagctgaatttttggtattgaatatttgaccagattactattaagccatcttaaattttaggtagggaaatgtactgtttgaactactgcataaatcatcagaagaaaatggttttctttaataaacagaaaataaagaactgggattgaaaaagcctgacttggtggtgctaggaattttgtagttagcctggtttttgaggcaattcttttgttctttccacctcaactattgcgcatgcactttaatgaatgaaaaatctttacttgcttagtttacttaaatttacttttatcttaatctcttgatttgaaggatgcttaccatcatccatagatatgccctttcatgccattctgttcgtggcttttgtgcaatgggtgtcatgtgctatcgtcaaagagtcccaaagtcatcgtgatatggactactaagcttttgctttctttggttttgtttctaaaattgattcaattttgcatgttcaggtggtccttctggaatctcgggatagagttggtgg

SEQ ID NO: 88233 - DNA, 433 bp, Citrus clementina
  Intron number 1 from transcript clementine0.9_025322m (loc us clementine0.9_025322m.g) derived from phytozome v7.0 (c hr-ID scaffold_104; pos 272694 to 273126)
aaatttgtcaagaataattcagttcgccgtaacaagtgagtttcttctgcactctcggaccatgttagctatgccaatttatgttcagagaatgtgttaaagattcaatcacaaaccctagattttgtatttctgtgtttagttcaaaatcttttttttttttcaaatttataaaattattttcatgtgtgatcagttttgcttgaaggagtgtgttcagtactagaaacatcgtagctctttgacttccaattcaaaatttcgaaaaattctgtattattttgtcaaattactcgaagtggttctacccagaaagaatttgagccctgaagttaatgcattggttttggttcttccattactaactgaatgccaccatcttttgttcatttttcaattacagcagtcgagttctgattcgtgggagacggag

SEQ ID NO: 88234 - DNA, 1003 bp, Citrus clementina
  Intron number 2 from transcript clementine0.9_006895m (loc us clementine0.9_006895m.g) derived from phytozome v7.0 (c hr-ID scaffold_81; pos 684092 to 685094)
agcattcgttatccagtaagcttcttcaatatttaactctttatttgattttgaaaatgttcgagcattaattaaattgaaaattttacttatctagtcattttcatgaatacattatcaaaactagccatataacataatttctactatagtagtcacatacagccaatctgtaccaaaatgcccttaaaacaatccaaccaaatctttttgacacaggcgatggttgccatcacccaaggtgtggtgtggggcgacgcctgcaagagctgggcaagagttattcaactttggtgggtgatgatctccgggcgatagtagccatcacccgcatgtcacgcgggcaatggtttccattgtccgcaagagttcctcacttcatgcaggcaatggagagttgcaagttggttgggtttggttggtttgttttaaggataatttagttcaagttgactgtatgtcgctattatagtaagaaattttgttatatagctaattttgacaatgattctatataagacacttaattggtaaatttctgaattaaatttgtgtatcttttttttttttttatattccttgtgttttacaagataaagggcatacatgtcgatttttacccaaaaagtctctcagcattgctgaaatgaccaaattattcctgttatattgaattttgatttcagtcattgcagtaggggcagggagctttttgaacaaatgggtaaactatgtccttatgcgcaaaaagacaaaaacactgatccagatcttataatcccattggtttcttgcattttctaatgatgagatgatacaattagttattttgagttttgaagactggttttcttaagtgaactgttatggtagaaagtaaacttcttttgaaggcattgatcatgtcatgtgtttgggtccactagcatcgatggatcttgttaaagcattgcatttttggaatgtagctattgaaggggaattggaaactgcagtttttaag

SEQ ID NO: 88235 - DNA, 465 bp, Citrus clementina
  Intron number 1 from transcript clementine0.9_019650m (loc us clementine0.9_019650m.g) derived from phytozome v7.0 (c hr-ID scaffold_79; pos 680116 to 680580)
gccgcccccgccgttaacgcgtcctctgctgcaaggtaagcttaagccttttttggtgaaacttcgtttttctgtttggttattgagaaagtaataacagaacataaaaatacatattgattcttgaatttctggttttttttttttgtttgtccaataattcgttgagagatattttctcattgtatatgcttattagttttgttggacaattgacgaatattagagatgaagaattaacttttcatacaattagcaaaagtgaaaatgagcacttttgatttgatagagggatagcaattcgatcattatagcatccaggaggaggaacaaaaaataaaccatgtaattttttgttttctagaataattgtgtgtgtgtgtgttttttttttttttctcattctttatttgtacgtgctgttgatttccagtgtgacgattgactgctcatttggtgattcag

SEQ ID NO: 88236 - DNA, 568 bp, Citrus clementina
  Intron number 2 from transcript clementine0.9_024502m (loc us clementine0.9_023965m.g) derived from phytozome v7.0 (c hr-ID scaffold_8; pos 61714 to 62281)
gttttcaaggaagggtttcgaagccgtcgatactggtaaatgttttcttcttaacctttaactactactgctcgtactcaaaagcacgaagttgttctgcataactaattatttcttaaaatttagcgatacccttacatatttcttggacatctaattactggtttttagcttttgtaatgatgtttctttcaacaatgagtctatttccattgcatcatgagtcgtgagaaaggacttgatatcaaattaagaagacctttggctaagcattcctttttttgatgttgagagcaagaaacaatgttttcccaaagcgcaaagagtattaatgcaaatctgggatcagatgaaatggaactcaggtttcctgtttactgacaaatattttttaacaaaaaaacagtaagcggtcgaataccaattgtgcttaagagctttgcaaaataaaggttgttaataaagtaaaggatttatactttcccgtcaaagaatactgtatatatttttgtaatttattaatggcatttcctcctgtcctgtgcagtttggtggagtgttcagacat

SEQ ID NO: 88237 - DNA, 816 bp, Citrus clementina
  Intron number 1 from transcript clementine0.9_025028m (loc us clementine0.9_025028m.g) derived from phytozome v7.0 (c hr-ID scaffold_28; pos 1301943 to 1302758)
aattcgctagcgccagaaagtgcgtggctgatagagtaaagagaaacatagtgaaaagcaattttatttaaacatttttatttttattaaattaaaaaaaaaattaaactacagtcaaatatgagattgcaaaagggtaatttttaaaaactacccctgaggtttgcctttgatacacctagagagaatatatgcatatattgacaacatcccccctggccgtttataagagttatacatccgttaggcagttgagggaatattcaaaaatgcccttaacaacacatttcaaggaatgataagataatttgatactgtagaagatcttactttttggcgccaaatggaaaagagtattagaaaggctattatacccttatgaatttattttttaacattacacaatcatatataaaacaaaactgaattaggtgttaaaaagactaaaatgccctttaaaccaagtattttaacagtaacaattaggtagtaataagacaaatagattaaaatattttaaagtaattaatataaaagcaacactgatattaccgttggtaaccaatggtaatatcagtgttgctttactctatttaaattggcataatttgattctttgtttgcacaatattcttcgtttgcaaagcatctcaactctcatacttgtcatggcttcagcaagttcacaacaatcaattggatcaagcagtcaagaaagcagaggatggagggatgagattaatggcaacctcatacgatattcaaacaagacatgtagatgctacaaaagagctgctttgaaagtgtcagaatcgg

SEQ ID NO: 88238 - DNA, 585 bp, Citrus clementina
  Intron number 5 from transcript clementine0.9_005770m (loc us clementine0.9_005764m.g) derived from phytozome v7.0 (c hr-ID scaffold_84; pos 777602 to 778186 reverse strand)
ttgacgtgaaggtaactttttttttatgctgccacgtctgtttttcattaattttagttctttttaaggaagtactatacttggttgctgcctttaattgaataaagtctgatttttaatcttccaatgcatgctaactctatctgtgagtttcagtttgtagaaaatcaaaatctgcccaaaaataccatgtatttcttattttacatgtcatattgtggctgtatattttcagctattggttattgttcaataaatatcaacggtaaatttattagggtaactaacgccagggagtctccatgatggttttctgaacttttttgcacctgttatttatatttgacgaatctcaaggggtgccagtggaattctttcctccaaaatggtaattcggtatctgtgggtttttcttaaaatctttttgatctaaaatggtaaagaatgctctttacgttatgtttattttatgcttattcatatgctaatatcatctggaatatgtacaataaatagtgtaaagaatccgctccaattcattttcattgcgattaagttcaataatagatgatttaactttttcag

SEQ ID NO: 88239 - DNA, 633 bp, Citrus clementina
  Intron number 2 from transcript clementine0.9_000758m (loc us clementine0.9_000760m.g) derived from phytozome v7.0 (c hr-ID scaffold_92; pos 382188 to 382820)
tgcactccatcgagatcgcttgctcttctattcaagtatttttttttactttttattttattttcttttctctgtttggttctgagaaagtacaagaaaatttcaagtcgcacgttctgtgtttcctaggaaatgaaagagaaaactattgtctaccgtgactaatttcttttctctttactatttaagctgattacttgatcaatggtaaattcaaagtattaggttatgttcagttgcttggaagatagagaaaatgtaagtgaaggggaaaaaaaaaaggttaactttgaatgaagttttgtccctattgttgttgttatttagtttaaagcctatgacttgtagtggttttaaaattgatttttgtattgattaaatatctaaatgaactaactcgattgcgttttggtactgcaaaaataaggaaaatcgaattgactatggatgaattttattgcatttttcctttgtatgagtttgttgtaatattaggtttctaatgcatatgttcatgtttacatatttatggaggtttgtgatttttgacacaaatgaaactttccatatgtaagtatgctcttgtggacaccaggcaggcatttttactggtggtggttttcattatggcag

SEQ ID NO: 88240 - DNA, 404 bp, Citrus clementina
  Intron number 3 from transcript clementine0.9_000758m (loc us clementine0.9_000760m.g) derived from phytozome v7.0 (c hr-ID scaffold_92; pos 382895 to 383298)
ccagtttatccttggtaagtaaatcaggtgttaaaaatttcaacataaacttaacggatggaagagcagttatgaccaacttttaagactgagtaaatattagaatgcattggtaaggcttttggacacaaaggaggaatctttttactaatattatgaatttatattgcctttcctgtttcccatagaagaaaattttcaagttattttgtgctctggacctttgatttctataatgctcttggcttacagatgtctgaatagtacttttattaatagttttggtgtgatgcacatgcccttgaagatgaatgatcctgcctttctcaatttaatacatttgtttatttattttatttattttatttattttttccctgcttcagagaattcacaggtagcaa

SEQ ID NO: 88241 - DNA, 429 bp, Citrus clementina; identical to SEQ ID NO: 82529
  Intron number 2 from transcript clementine0.9_025431m (loc us clementine0.9_025431m.g) derived from phytozome v7.0 (c hr-ID scaffold_16; pos 2189513 to 2189941)

SEQ ID NO: 88242 - DNA, 818 bp, Citrus clementina
  Intron number 1 from transcript clementine0.9_004078m (loc us clementine0.9_004078m.g) derived from phytozome v7.0 (c hr-ID scaffold_12; pos 2638340 to 2639157)
aggagactggtaagttgtcgttgttgttgaggttttatattttcttagaagtttatatttgattaatgaatgatcttagcaaaggacttgcaacttctgggctgattgatttttgagtgattgtattggtgaaaagaataaatattggtgagagctatgatagatattgttgtggttgttgttgaagttaaatcaagaggtggaattaatctgctgtgcggtttaatgggtagctgttagggtgtgttttggtaattcttatgtttccatagtattataaggaatgagggggtagaacctgatactgcaaatcgatggcatgcttctcttttatatgcatgtgctttagtgcatttctgtgtataatgggctagagaaacatttaattctgtcttcacatatcactgcctcaaattctgaagtcctataattattatttaatatgagattgattttttaatttaattttctcttcaaggtggaaaattaatttgatatttcattgttttctattttatacttttgggttgtgtttgcaaattcatgttatgctgagatcaaccttgtcaaatcaccattgaagggattaggtatgggtaacttgcacttctctaagatgtggcctgctcatggaaccattttgtcaacgaacaagaatgttttttttattgcttttctcttcaagaagagatcagaaccaatttgaagttgcttgctcatattcattaattatatattttgaataattgttttttgctagtttttggtcattttttggacaaccaaattgggtgattcttttggacttactgcagttg

SEQ ID NO: 88243 - DNA, 456 bp, Citrus clementina; identical to SEQ ID NO: 78993
  Intron number 3 from transcript clementine0.9_007149m (loc us clementine0.9_007149m.g) derived from phytozome v7.0 (c hr-ID scaffold_21; pos 943100 to 943555 reverse strand)

SEQ ID NO: 88244 - DNA, 691 bp, Citrus clementina
  Intron number 1 from transcript clementine0.9_014013m (loc us clementine0.9_013944m.g) derived from phytozome v7.0 (c hr-ID scaffold_92; pos 453645 to 454335 reverse strand)
tatatagtccaaagattcttcagctgctttcagtggtaaagtgcttctgcttttgcatgtactgttataatttcaattccttgattcttgttttttctatgaacgttaagagtagaattctaatgatcattttagcatttctgcagaatataagcaacggggtggcaaaaagagagatttattcattttttttaagtattttcatctgggaacaggtttgaccttctctttatctctctctttgttggggttgaagtttaaagtttgttaaagttccttaagaatagttcaaaggactctttcagacaagtgtctcagaagatctcaagttatggctaataatcagttttcggaatttggtgcttcaatttggggatgttatgtacttagaaaatttaaaaaaaaaaaaaaaaaaaaaacaatgctagtttcgtacttgtgtcatatattccatacttaatttttatttgcttatatcacagtagcattttttttttttacaaatttaatcttatgattgaatttttctctgactgttaattgccttcattaatattatccaacttgttaagcattgatatttttgaagagagaaatatgaaatcatgattttgttctctccttttctagtatatgggaaatagaaaaccaattgatttcaatttttgtttttgggtcagtgtgagtgaaa

SEQ ID NO: 88245 - DNA, 750 bp, Citrus clementina
  Intron number 1 from transcript clementine0.9_026684m (loc us clementine0.9_026684m.g) derived from phytozome v7.0 (c hr-ID scaffold_151; pos 89369 to 90118 reverse strand)
agctttttcagcttctaacaaatctccttcaagaggttttacctttttttcttttcttttttttttccacctcgatttgtttcttctatgttattacttggctttgctgattcatataatttaattgtgatgattttcatttgaattttgttatgtgcttacttgattttgtcattaagaaactcaattgtcatatctcccgtcccgttgattctaaatcagttagaagattgtttgtaatttcaacttatggtctggtgtagacgtgcagtgtgtgtgtgatgctgatgcatatgcattcccaaaatggggacttgacatatctttctattacctgtaacaagtaacaataccctattttttatcaccccatgtagagcagttccttgagatgatcattcacttgtctgatctcctcagttcagctgtaagtgattagtttctgttatgggggaaaaaattttgatttttatgattaaggggtttctttggcattgtgcaagtttggactgaaaatcatggatagttgattggggttacagattttgacgaaattacaagcctagattcccccttccatcataacaaatacggaggggattgaacaatgggctgaaattgggtttcattttgttcattatcttttgcatacattattacgtctgactagacgagatattcatcatcatgaagctttctcatcagattcttgtaggtagaagcattgaccaaccaggaagaaattgaatt

SEQ ID NO: 88246 - DNA, 523 bp, Citrus clementina
  Intron number 1 from transcript clementine0.9_014245m (loc us clementine0.9_012599m.g) derived from phytozome v7.0 (c hr-ID scaffold_25; pos 3155108 to 3155630)
cgacgtccttaatagtgactacgccgtcgttttcggtagtagttataattttcccttttgctttgtctttgtggctttgttttgatttaaaacttttatcattagcattaagcaagcattctattttttttttcttttttgattgataagcaaatttaattcaagcgaagaacctcataaaacaagctgtttacataaatttaaatttaattctttaggtgcttattggaatgggagtgccttcgtagaaagaaactaatgtattttcagctgatacctctttctccccgaaagtttctttgaaagtgatcttgactacggttttaccaacagagccgaaacgaaaagcattcttttagaaactttttccactagacttgtttatgcgtaatgctattttcctgccattgaatttttcttagttatgaccattgcaagttacatatttggaaatgcattttagttatgtgtacatataaagttttgtttggacttgctaggtgttccccttccatttattgga

SEQ ID NO: 88247 - DNA, 811 bp, Citrus clementina
  Intron number 1 from transcript clementine0.9_015841m (loc us clementine0.9_015800m.g) derived from phytozome v7.0 (c hr-ID scaffold_69; pos 1182031 to 1182841 reverse strand)
tggtaagtcattgttagagcttttgaaaagaattatttttgcttcaattgatgaaaaattacttttttgttatcgttattgttgttgctaatactatttgttttgctgttggggaaatttagacgcaaaatttgaagagtgaaagaatatatacatttatatatactttcagctatatccgtaatttgttgtgcttctgtatgcttttgaaagtgcaacagctaaaattgtttagtgtaagctaatgttttatttactcgaaaagcctgataggtcagcgtgacaattggtacttctatccaacatgtactcctaacgtttcgaaagccattttttacgttgtttttgtggtcctaaattggaattcttattgaaatggagccaaactgttccttcgatttcgagtaatgtaaattccattcttgtcagcatgtggccttttggagtttgaacataaatgtatgcatttatctatctcatttttgtttctgtagttgttaacgagaaaacaaaagtacctttttttgaaaattgggatattatgttctttaagcatcactatgctggtttcctgtttgattgggtgaaattacagaaagcctcttctcaatagtaaataatcaatcaggcttcttgttttacgttatgctgccaagtaatgatatgctctgtatttgtattcttgaaaggaaagagaaggttacttgattcatgtttcttttgtctcatttagtgattcggtgttagtgctgttttttacacctaatccctttctgtgttttgttaggaataagagacctgagttcactgc

SEQ ID NO: 88248 - DNA, 630 bp, Citrus clementina
  Intron number 1 from transcript clementine0.9_015240m (loc us clementine0.9_015240m.g) derived from phytozome v7.0 (c hr-ID scaffold_28; pos 1006751 to 1007380)
gctgaagcgtgcaggagcttctggtactcgcgcaggtactgtacaatttcagatttttttttctttttacgaattcttttttaatctttgattgattttattatctgctattataacttggaatttcggatttttttctttttttgagtttaattcagtttattatggcttgatgcaatggctgtcagggcaaaaataggcataagatgattgaagtaattgaatattgagtgatttatttaattactacgttgatacaatctggtgataatgaagaggataaaatagttccaaatatcaatatcacaaaatctgttttattaatagatgacagatcacatatgaaagatactgaggtcttgaattcttgaaaattacttagcttggatgtgtgcttgagtttgaacgttttgtggaagaaggtttttattcttatgtcaaactgaggcctagaaagtcttttttaacttctaatttggtatgagttatgttttcaaaagcactaagctaaatagattgtgattgatttttctcctgaaccagctacctttttttttttttttgttattaatttttttccccttggaaaatacaggagttgggggttatacgtacttactagaacctctt

SEQ ID NO: 88249 - DNA, 490 bp, Citrus clementina
  Intron number 1 from transcript clementine0.9_023961m (loc us clementine0.9_023961m.g) derived from phytozome v7.0 (c hr-ID scaffold_16; pos 3206318 to 3206807 reverse strand)
ggtttattatttgttcaccgtttacttgcttctgggtattatgcttttgggattctttgattcaattctgtagagtttgtacttatgatccctaatctgcgtggttgctagaaaaatttgaaagaaaatttgatctcagtttttgaaattgatgatcatttaatgggtctgcttgcatctcgatttagtttctttgaaaagaattaaaatttgctttattggtatgtgctttctcgagtttaaaattcgaaactttatttttttgcccattagcacgcgtacaaagatttaatattgcttttggctttaatgaggcatgaaaatttgcataattaatcatcctcgccgtcagctatgggcgtgctttagcaaaatttttgttctttaattctttgttcaatctaacggttacctaaatggcatgttttcttctatgaaatggttgttaactacattttgttgtttcacttcaggcatatcgcttctgaaa

SEQ ID NO: 88250 - DNA, 685 bp, Citrus clementina
  Intron number 1 from transcript clementine0.9_023391m (loc us clementine0.9_023391m.g) derived from phytozome v7.0 (c hr-ID scaffold_12; pos 1071727 to 1072411 reverse strand)
aaagcgagatccgctgctcaaaggaaccgaaaaaggtattcagtttgggcttctgttaatatttgttgaagaacaactgctgatgattcagtttcttaatttagttactagtacacgatcacatttagttttttgctaggttttgatgctgaatcaatataaatgccgtccactgggatctatttagatatcatcaagtaccttatgttatgcttcccattacaataacaacatagcaacccattggtggttgctaaagatgtgctgatgatatttggaagcatagttcaaatggattgtttcatggtagaagagtagctgaattttcatgtactccttggaagcaatgctgagtttcaaacttaaaatctctctgggaaaacggtcagggtgtgttttgctggcatctgttgttttgattatacaattctaatatcttttatgctaatatgttttcttattttaaagattccaaaaattaattaaaagtctccatcttgatacttggcctataaatcatgccagtacctccaattttgctttgtttaaacgtcgctgatcatgtttgttggcactctcatatgcattttcgttttatgttctcttcaaagaactagatgcttgctattgatttattctgttcatgtcagacgaccaaagccaaaatctccagtgaaacagaaaa

SEQ ID NO: 88251 - DNA, 568 bp, Citrus clementina
  Intron number 1 from transcript clementine0.9_013114m (loc us clementine0.9_013114m.g) derived from phytozome v7.0 (c hr-ID scaffold_124; pos 25553 to 26120 reverse strand)
cagttctactcaaggtaattaaattgattagtaataggatttctattttctctcccacttaaatattaatgtttcaatactgatatatacagagtcacaacctcattctacaaatagctgtagcatatataacaattttggtcgaagaaaatagagtgggctattttagtgtgaattttctactcaaaattttgaattagttattttatacaatccaattttagatatattaaatgtcaaaatagcatttaatgatgtcaaaattcgtccctcattgtattgtataagatcaatggctcaaatttcgagaaattttttttataaaaaacttaagttgaaatagactcatccaaataaaaaatattaataaaaattaattacatgcatcatgtggagttttttttaaaatcaaatcaacattgttatactgcatcagtttgcacaaagagtttgtggatctagtattactgtttttctatatatgaacagaattccgagatttttaactgtttaattaaatttatatgacaaaatatatctgtgaagtgggttctgcataactggggtg

SEQ ID NO: 88252 - DNA, 636 bp, Citrus clementina
  Intron number 3 from transcript clementine0.9_030822m (loc us clementine0.9_030822m.g) derived from phytozome v7.0 (c hr-ID scaffold_16; pos 3314614 to 3315249 reverse strand)
ttgataacattcttgaggaagaggagcaacaaaaggtaacttttttattttttacgtactaatctcaccttcaacgaatcatgagttttagggttccgttctattttttcatctttaattttcttagaatgtaaattaaaggttgatagatggagtagaaaagagattgataatagcaagtcatctcacgaatcatattgcaattttgggatggttgcaaatgacacacttaagatcaatttgcagttatggcctttatgttcattaatggtctcaaacatgttgactgtgggtttttatttttttaggttgagtcaatttgaaaatgttgggtatttataaggggctaaactttgccatcccatctactccaattttggttgtttattttattggtttgattctgctctgttcagtttttatttctatctgttgtgattgaatatgatattttgctgctatttaaatgatatactttcttcaaaggattcacatttagttccaacttagcttctcctgcaattgtttgagcccccaaatttcttctaattcatatttactttccatctctatattaaggatgttaatatgaattgattttgttgtctgcattttcttttattcctctgttgaagg

SEQ ID NO: 88253 - DNA, 355 bp, Citrus clementina
  Intron number 1 from transcript clementine0.9_021599m (loc us clementine0.9_017740m.g) derived from phytozome v7.0 (c hr-ID scaffold_12; pos 3453002 to 3453356 reverse strand)
tcatccgtgtgactccagctatttcactaccaaaggtatccttatgctatcaatcgctacttttatgttaattttttctccgttcaaaacgtgtctccatgtagatctgttttgatatgtattgaaagctcggtgctccatggaaccgttggatttggcgtgtattaggtttgattttgttctgttttgttcccaagaaagtgccggaatctcttctaaatcaatttaagaattagacaagtctacatagctgagtttcttgttatatataactctgtgtctccgattaattgtcggattgtaggtttatttctattttctaatattcggtatttcatcttttgtgcatagatag

SEQ ID NO: 88254 - DNA, 709 bp, Citrus clementina
  Intron number 1 from transcript clementine0.9_001435m (loc us clementine0.9_001435m.g) derived from phytozome v7.0 (c hr-ID scaffold_84; pos 817244 to 817952 reverse strand)
ggtgaattcttttttgtttttgtttttgttgaaaggtgagattgctgttctctttgggttacataattttaaggtcaaacttgcggttggttctgattttgattttttttcctttgggggatcaagcgtgagttgaatgaagaaaattttgtttttttatatattttctttaaagcgcgatcgttttgtcatttttgtgaattttgcggtggaaatgctgaattttgatggaatcttgaatgttaagattgattttgttgtgatttagctcaactaagctctgaaggtgttgtgttaggtttaattattattattatttttttaattttggagaaaaaatgttttgaggcattttttaataatattcattttttcaattttcattttctcacgaaccaaacaaggcatttaggtttggttgttggtaggtaagcttgtggatttcatttttatggtattatccttttcatttcattatctctcaaattttaaggaaaaagaagaaaaatctccgtttaattttttaatgttaaatatttaatctcttagaaagacatatacaaagtgaacgacttttctctgagtttttttttctaaaggagtaattttttcctttttaattggatagtctgatatgagaatttaagtggtagaaaattatcatatctgaagtaaaaggaatttgaaaattttgcaggaaaaaaagatc

SEQ ID NO: 88255 - DNA, 784 bp, Citrus clementina
  Intron number 1 from transcript clementine0.9_019235m (loc us clementine0.9_015914m.g) derived from phytozome v7.0 (c hr-ID scaffold_39; pos 868098 to 868881 reverse strand)
gggttacactgtcaaagccactgttcgtgacccaagtcagtatctctttctcacagcagttttcttttcttttttccttttttcttttttcttttttcttttttctgttttttaactctctttatctatccatggagtcggagatttgtcacgtggtgcatctgacccaacaagattttttcttctgttcatgatttttgaggatctaataaaatttggcgttcttaatatttgatggtgaagatttatttgctgttatttttctctttaagcctttaaggcatcatttttaagaatggaagagttttcaaattactcttcaggatattctatcatctaattaatgaatattaccacatttaaagattaagatgctacttaaaaaatgtagcatttgtccttcctaaattttatttttagcagtggactgttaggcttcttataaatttgaagcagagcaactaaataattggtagacacccacttgatggctaatatttaccgaccacccaaccacttataattgacaacagtgaagagaatatcatttctattagttcgttttttccttgtgtttgtatatttatttatgttctccctcagaattaaggccgttgataattttgaattataaatgactgtaattaattctcctggcactcaaaatattttccactttcagaaatagattcaatatactggtaaacctcattggacgtacgagttctgatattatatgtaccccatagatagccccaagacagaacacttgcgggaacttgat

SEQ ID NO: 88256 - DNA, 768 bp, Citrus clementina
  Intron number 2 from transcript clementine0.9_004887m (loc us clementine0.9_004361m.g) derived from phytozome v7.0 (c hr-ID scaffold_8; pos 2176065 to 2176832 reverse strand)
tcgggtttacttaatgtattgtcacttaacttggaagctgtaggactatcatatctgtccagttgtggaactctctgttatgctactttgcttattttaaactagttgcatgcatttcacttcctgtatataatacatggaatattctttaattttgagataaatgatgtgtgatgtagatagaccattgagttgttccttttttctaattcgcgagacctgacatgcaatcatgtagttttgtttttagtttttcaatgtgaattatttgctgtataaaccagtgatatatcatgcctatgttttttatttgacataagcaggtctaaagtaacatatcgtgaagtttgggattttgtaattgtttgatgctgggaatatcttgagtctgttttgttataggaactgtctgactgattatcacatttgttttggataaaaaagaatattagaaattttttatccaactatcacgtttgcataattgcatatatgaatgaattacaagtattatgtagttgcatacatgaatgaattacaagtattacattttgaaaattatttctgctactttgtaatttatgcataatttgttatgagtattttgcaagtttttcttcgttatgataattcatgtatttttattatttgattttttggtgatacaaatgtagtcatttttttttctgagttttgtctgctacttaagtaaattacgacatgttttaaacagcaatcttccctcaacgggtcggcttcgaatattcc

SEQ ID NO: 88257 - DNA, 1014 bp, Citrus clementina
  Intron number 1 from transcript clementine0.9_004887m (loc us clementine0.9_004361m.g) derived from phytozome v7.0 (c hr-ID scaffold_8; pos 2176920 to 2177933 reverse strand)
ttataaagatctctgatctgcgctccctccctcaggtactctttaatatttccctttggttgagtccgagttcacttcctcttttacgatcccatcgcgtccccttttcgccaacttataactgttttcccgttcgtaattaatcgcgattttaggatttagggtttaacgtctatctactttgatgtgatagtattaggttttggtttgttggcattttaactttcatttctttttttttttaatttgttacacgttgttgaaatgcatactgaagtgatttatatactatctgtttttttgtttattttttatttttacttttgataaagtttaattcaagattttgatttatttaattatttttcggtcatcaaataagtgattagttagtggaaagcataattagttcccttagcatattatttaatattacattttctaggttgcattgagcatttgggattagagacagttgtttagaacagcttatgtgtctttgtagcatgcatttcattagaagtaaagtttggtggattttttcttagcttcattattctgttttagggttcattttatgggtccttctcatgccccgcttttttttcattgaagatgtttagggtttttgaccaacctcttattaatattgaatactgtacattgaaatgaggcatgagagataacaggactctttagttcatgtttgcatgcagtcttcttttctttttcacgtacattattcttggattttttcaaaatcttgttatactcaaaaagtaaatggtagaaaatcttgatataagtcctaaaatgctcgcacatttctttttgtttggaaatcactgaaaacttttatacttaaattttgatgtttattgtaattgtttttggtgtctttctgtttgttgcttgctgtgtttgggtctcaattttgctcttttgggtttagtctcttacatactgttgtatttttcaggcttttagttgtaaattcgcagggatcaaatcagc

SEQ ID NO: 88258 - DNA, 518 bp, Citrus clementina
  Intron number 2 from transcript clementine0.9_009322m (loc us clementine0.9_006276m.g) derived from phytozome v7.0 (c hr-ID scaffold_64; pos 1345100 to 1345617)
tgactaaggtaaatttccttgatatatattttgggcaaaacattcaaattgacacgcataggtatattgtaaatagttcttgtgtctaatgatggaaggggctttgtatacttgtcttatcttatttataagtgtgaggtaaatgtcagatagatgctgccactttcatttcttataattgcttacaacttggttgtggtcggccttttggaccattatcatttaattggatacttctaagaggctgcaaaattttttgttgaaggactatcatgcttgatttatgcttcttgtgaaagaaccaattatatggcttataaggacagatatgatgcataagagatcttctgggcagttacgttgtaaatgagtcaatttggtaatcggtttccttatttacggccaagctgtctaagatatgtgtgtgtgtgatatgtatcttttagcatttttctaacaaacattttcctctctttccccttcattgcagattgaagaagcttcagttgactcagtta

SEQ ID NO: 88259 - DNA, 412 bp, Citrus clementina
  Intron number 1 from transcript clementine0.9_001039m (loc us clementine0.9_001041m.g) derived from phytozome v7.0 (c hr-ID scaffold_12; pos 4007243 to 4007654)
ttcggtttcagtttcagctctcacttaacttgctggtaagctttgatcttttaattcaaccctttaatctaagtaattactttgttttataatttcttgaagttgaattgaagctttgactgttttttcaacactgtttacgtaattttagtctaaatccatcataatctagctcttgttttgtagcttcgatcgttcgattcttttttctgatgcgaattccaaatgattttgattgaggaaggagtcaaaaatctaacccgatatcatttatttataaaagcttcgttacgatcatgattgttggttctggtcgagtctatgatcatttcttcttctctcatattggattaaaatttttgactccttccttccagactgtttcaaatttaggaggcttcaccaggaagat

SEQ ID NO: 88260 - DNA, 655 bp, Citrus clementina
  Intron number 3 from transcript clementine0.9_025682m (loc us clementine0.9_024476m.g) derived from phytozome v7.0 (c hr-ID scaffold_124; pos 455487 to 456141 reverse strand)
tccgctcctaaggtatcctgttacttgacttgcatctcattatccaatgtctggtcctaaggtatactgttatatgccatgcccttcactttttccacatgctcgtcataggtttgagatctaaatttataattgcagtgtgtcttatgaaggaaatattgtttcattgttttgatgtcaattggaagtcataacaattttcaacatgtgccatatctggttgttagttttccaacagaatatactccctgttgttgagtttctgtaaactttgacttaaatgcttataataatttttaatttcatgggagtataatcaggttttggtctttagctgttctactttttggataataggaagttttttgtgaagaaaagaaactaaaaatataacttttacgtaagaagcgtaagaatataacttgcgcagcttatcaaaaaaatggattgccaatcagtttacacgatcaatatacatgcttctttaatgcgtatttattcttcaggcacgttatttggtttgaccttggcaactgcagaacaatatcttgttttcatgcttgattttgccctttaactcaattatgttttttcgtgtattgaatgtctcctgttaacaggttcgatttctgaccaaaatatatcatcctaacat

SEQ ID NO: 88261 - DNA, 1005 bp, Citrus clementina
  Intron number 3 from transcript clementine0.9_010343m (loc us clementine0.9_009596m.g) derived from phytozome v7.0 (c hr-ID scaffold_16; pos 443493 to 444497 reverse strand)
atactctgaaaaacagaaaaccagttagtaatgcatttttacttcgtttttatttttcttgatatccttgtgatgattgaaaaaggaccatttttcttgaattacttagtctatattttgagcaacttgtaatttttaaattcgatatgagtatcttagatgattcattttcttttccttatattgacaagtgattaatgcttcgaacttaaaacatatccagataaaagtaataataacttcagatgaactgctaggatgaatcccaaaaaaaaatttgtaggaacaactcatgattccaaattcacactgaagaatgattctttatgttcatgatccttatattattttcaattgattctcttctacttttggaggagctgctgttaataagtgtcctttgatgtagatgaacctttttagggagatcctatggataaaatgttatttgaaggtaattcgcttcttagacaattgcagcaatgttgacaattgagtatgaaaaatgtgtataacctataatggttatttggtgtatttacatatgcacattcctatccagaacttaccagagggtacagctcttgtgcaaaaggattgcatagccaatcccatttaactggaacaaaatccttagattatatttggggttgaagtgttttggcttttaatccacagctgtcgtgggacggacccccaaaatatcaagtattaagtgtttgggtgggttttaacgagttaactaccatgtaaaagtgagtgtctacgaatcctttagtttatgtgctttcacggttaaatgaagcttaaacaatccgaagcatacctttaatgggttgattatttaagtactcatcttggctgagtctgtctgtagttctgttttgaaggcgtgttcttaagaacttgcggttttgtggctgttcttgtgtgctcctccctatgcttcatcatttttttattgcatcaggaaaatactgaaacccgacgtaagagttcaaagcg

SEQ ID NO: 88262 - DNA, 998 bp, Citrus clementina; identical to SEQ ID NO: 79067
  Intron number 1 from transcript clementine0.9_012997m (loc us clementine0.9_012997m.g) derived from phytozome v7.0 (c hr-ID scaffold_88; pos 532522 to 533519)

SEQ ID NO: 88263 - DNA, 556 bp, Citrus clementina
  Intron number 2 from transcript clementine0.9_013743m (loc us clementine0.9_013743m.g) derived from phytozome v7.0 (c hr-ID scaffold_103; pos 122310 to 122865)
gagctctagtagtcaacgttggggaactcttacaggtgtgtaaagtgaagagagttcattattttttggcatggaggggaaaaaaaagttaaattaatgtaaggattggttggtgaatagtcttaactgcatttatgttcttgatactgccttaatgatgtcccaaacttttgaacatttagaatacgtagatttcctttaagccatcatttgattggtgggaaacagaagaattaaaaagttcaaagatatgacgaaccctcgaaagttggttaaatcagtagcctcaaccacaccaaattgtttcatattgcttagtttctttcagtagaatttcttattttcttagctgcaaataataaagatgttaacttttcaaacattgcacctctcagcagctatagagagtctagtggtaattctggttgtgaaaaagagtagaagatgaagaaaatgaactgacactgctttgtaaaatcaatactatatctgtcattaggttatcatacggaattgttaaaggttttgacttttgttttttggcaggttatctcta

SEQ ID NO: 88264 - DNA, 790 bp, Citrus clementina
  Intron number 1 from transcript clementine0.9_023268m (loc us clementine0.9_023268m.g) derived from phytozome v7.0 (c hr-ID scaffold_54; pos 1258699 to 1259488 reverse strand)
cattataattatttctactggagtgttgttttcaggtaaacggcttaatcattttcttttatttatttcttctaataacaatagctcagtagcattgtttgctttctgtatattgtgtatgcatttttagtataagaaaactgtagaaattaagtgacaatgaagcagcctttgggtctaaaatgttgcttaataaagagcattaaatagtatctttattataatatttacctactggttacttgttagtgaaacaaggagttggggaaattttgttttttggaaacaaagagatcccactataatgaagagtatgccaaaacttaagctcttgggtcgagtggtaacagagcaattttagtctcactttttatgacctctcttgttgtgctaggagggtatggctaatttttggatgaatataattatcatgaggacatattgcagaggttgaatataatcgtcatgaagacatattgcacctaagattaagaatataatgtaggaagcttttgcaaagactgtccatagcttatatactgcaccctgagtccttaaataatcaaatctctagttaaacgctcgtaaaagttttgacttctatgtggcaaggcttcaagtgtattctatctcacccttttctttgatgtgggatctctctttgattaaacttattgccattttcaaggttttataatttctccaatataaaacttttgtattttgttgtgatcatatatcacttcatattccagttgcgaaggagacagagtttgagttttggggattt

SEQ ID NO: 88265 - DNA, 975 bp, Citrus clementina
  Intron number 1 from transcript clementine0.9_021068m (loc us clementine0.9_021068m.g) derived from phytozome v7.0 (c hr-ID scaffold_70; pos 1090322 to 1091296)
agctgaattggccggactgtggccaaaaaactcaggtctgtaaataggttttttaattttatttaattgttcttataatctttttaaagaaaatatttggtcacagatccatctcatcaaatatgttatttttatatgtaatacttcttactcttttagcatggtttcttgattaaaatggcctttcagcttcgatctgctgctagataaatagaatctacatgaaatcttactccacacacacacacacaaattatatgtaaattcattcggtctcattatttcgttagccctaattctaaatcttttgatctcattattatacacacacacacacacacacacacacacacacacacatcaaatttatatatttgtttttcaaaatttatttgatttggttgccttaattgggttttctttaattcagccgtacaaaagatctactagatcagttcaactcaagattgtatgcataacattttttttttctcagctgatgttcttggaacccaacgatacatgttttcacagtggctttcaacagctttttggcttctcatgttcagtttcaactcattgttctagatctcaacatatcaaaaattttccatttttcctttttcattttaaaaataaataaacaatcttcctcaagtaccatttctcttaatatataccttttccttttcttttactccaagattttatatataagcatgtatgtatagagtgccaaaccaaaccttcgtattttcatcttgttaaacaatttcttgctggcttttgcctctattctcacttctataactgaatctctatagctttctgagtttgctttcgtgtaaacaagaaaagggcatgagtgttttcattagttaataatctttctaatatttcatatcttttttcttcggaaacttttcatcaaattgagcaaaattacatacgaggggctgattaatttcaggtcca

SEQ ID NO: 88266 - DNA, 497 bp, Citrus clementina
  Intron number 2 from transcript clementine0.9_024234m (loc us clementine0.9_021262m.g) derived from phytozome v7.0 (c hr-ID scaffold_103; pos 642505 to 643001 reverse strand)
cccaggtactatccctgttcttttgcggtgcaacttgttcagctattgaaggctgttcaatatgaaaacttttaaggaagtgcattttgttatttttgcgtggactccttaccctaaaccctaaccatctaaaccagcaacacttatgtttgtgaaaaaattctgcgctacattttttctccacttattcaattctctgttgaataagatgatatttataactgttttgttgattgaatgctatctaatatttgattcttctagttgttctgattatattcttggtaatttgtaacggacaactctgaaatttttgtttaacttgcttgcttttatactatcatactcttttccaaaatcttttagtgatgtctttggactaattaataatttaggtacgctaatgtttctaaaaaattctcttaatttgaatgtgttttaagttgcggatcccctgaattttagtcatgattctgcagttctcttctggtggcatt

SEQ ID NO: 88267 - DNA, 807 bp, Citrus clementina
  Intron number 2 from transcript clementine0.9_021242m (loc us clementine0.9_012536m.g) derived from phytozome v7.0 (c hr-ID scaffold_13; pos 2271092 to 2271898)
acttttttgccctgcagtgaattcgtcatattcaggtcagcttggattttaactatggtaaatgtaaatcagtgaaaacctgtcattgctaggaaatgactggtttatcatgcctgcattgcatcaggttcctggtcttctgcaggaataaatttgttgtcccatagatgccccattgtaacttggaataagacttgtcaaactaaaatctgttttgttaatactgaatacctagaattactttcctttagttatgaatgacgtttccccttcaaataaaggtgtgatccttgaatatcctctgtataattaaactaatcaatttttcttaaggttagtttgtcaataatagattaatacataaaaaagacatttgcaaatttacctatttttgaactgtggtacacaattttaaatcatacgatatacaatgaaaacattagagggaaatgatgtcattttggagtcgatggttatagattgttattggcactcatccgtgccttcatttgaagatgaaatttgtcaagataattaaagaacgtaaatgtgacactctgattcacaatttcaaaatattgctggcataattctaatttttgtgatgaagattcctttgaatttgtgatcttaatttttgtaatgacttgaagtgttttttttccccacaagatagggagaaataatttctttatggttgtgaataagtcagttggaataacatgcaaaatggatgttgcttttacaagatgttatcaactttttattgcagattgatactagattctcctaagcgggtcaaaattt

SEQ ID NO: 88268 - DNA, 981 bp, Citrus clementina
  Intron number 1 from transcript clementine0.9_016229m (loc us clementine0.9_011793m.g) derived from phytozome v7.0 (c hr-ID scaffold_148; pos 134571 to 135551 reverse strand)
aagacgaccaattctgtaagaccattctctctttatttttggttttgcttttattgattctacttgagtgtgtgcgcatgttaataaggactcttgagagatatgattattgatgattgattgattatttatttgtttgatttgtttcgtttatactatgaatatagcggaaagcaaagagcttgtctaaaagccaacaaaaaaaaaatgaaaaaaaaaagaagtgttttttttcttcagtttggtttctggcaagtgcttttcttcttgtttggtttctgggaaatgctttctgcttctgtctggtttctgggaagtgttttttccttctatttggttgctggaatgtgtggtatatcatcctctgttttgttgctgagaagtgctttctgcttccatttatgggaagtgctttttaattctgtttgattgctgagatatgcttatctttctgttttattgctagtaaccaattggacttttttttttttttcaattatctgaatttactctattttgttagagggaaaaagccttagggcctggccgtgtagatttcaagtggaaaattcgaataatgaatattgtaattttcctttttttccttaaaattttttgttcactggtaatggcacctagtgtttgggaaaaagaaaaaaaaaatctaaataggttttcttttgttttttactttttttattttacagtgtctttttttgaaacactgtttggttggaaggaaaatattaggaaaattaagaaatcaaatgagcacatgtactgtctaactcttgttgaaaaaaatgggttataagtcattcacagcggtatgggatggttatggagattacagaaagaggattgtcaagctgaagccattttttcaaagtgaaaaatgaaaaataaagtaagattattcaatttaattgatggatcttctccctttcagatttctgttctatcagatccaccgagtaggtc

SEQ ID NO: 88269 - DNA, 985 bp, Citrus clementina
  Intron number 5 from transcript clementine0.9_010532m (loc us clementine0.9_009308m.g) derived from phytozome v7.0 (c hr-ID scaffold_79; pos 846200 to 847184)
gaaggtattgaagttgatcaacttgttggcacataatttagactaagcttaatctcaccttaaaattctacacattgagtttctgccattacaaatatgctatgtttattaaatttttccatgacttttctattgcgttaacaaaaaatgctacgagattgctacagaagtagcctttttgtgttgtacttctatccaaacttattataggcctgcgtttcaacctttttataaaccattttagaatgtagcgttgtgtttgaactttcctttatagttgaggtcaatatccaatcttaaagagtactttgtgtcttatattcatctgatgattattctaacatcttatgaaaagaaattcttcgaatgggatgtggcaatggattctttctttctatagtttgaattttggcatgtgatcttgtttcctaatattatatatctgtaggaattgctgctctcttttctccattctaaaaactttttatatctaaccaataattaatatagaaaattgtggctccgtaaataacatttgtttttcagtagactcatcagaagtctcttttattttttaaagaatactaagatgatttatatcaaattccagaccattctggcatggactaatatagaactatattgcaaagtcatgtaatatcgagctccttattgataaacaagcaacattacagttgtttttctgaactcttttttcataaattgcaagtcccctgtcccagatgatttccctttatggtacaatttcatgttccatttctatgtcataacttccttttatttgttatgacctgagttaatcacttaattgtattttaaggggttcataatttaatatttctttctttttatgcctacctattgttgattcaattacttataccatcccagaggaactctttttatgatgtatatcagtccagagtaattggtcataccccttttggcatttgcagtgtgccac

SEQ ID NO: 88270 - DNA, 451 bp, Citrus clementina
  Intron number 4 from transcript clementine0.9_003552m (loc us clementine0.9_003552m.g) derived from phytozome v7.0 (c hr-ID scaffold_16; pos 4124176 to 4124626)
ggtcagaggtaaaataaccaattctcaatttctttcattttaagaacttttgtagttgtgcatgtgttttgatgtttgcaccctaaaaggcttcagtttttagtacgttattctaattgttgtctatggcatgcactgtagtttactcggttggttgtttcttataatcattttaaatttatgctgaggtgaccttttcattatggttgttgattcttttcttgatgcatgtgccatttagttgtttttatgttgagtacaaatagttgcatggatgatacgttgctctgtgttctttttttttcatgcaatgtttttctagtggcatgatttttactagttactttgtcatgcacggctaaggtttagcttggttcattcgcttgaccttttcctgatttaatgttcatttgaggacagagcagattgatcatcctgtcctgatcacaga

SEQ ID NO: 88271 - DNA, 534 bp, Citrus clementina; identical to SEQ ID NO: 78653
  Intron number 2 from transcript clementine0.9_008005m (loc us clementine0.9_008005m.g) derived from phytozome v7.0 (c hr-ID scaffold_64; pos 753153 to 753686)

SEQ ID NO: 88272 - DNA, 292 bp, Citrus clementina; identical to SEQ ID NO: 80756
  Intron number 1 from transcript clementine0.9_007344m (loc us clementine0.9_007338m.g) derived from phytozome v7.0 (c hr-ID scaffold_12; pos 4499982 to 4500273 reverse strand)

SEQ ID NO: 88273 - DNA, 511 bp, Citrus clementina
  Intron number 1 from transcript clementine0.9_013971m (loc us clementine0.9_013944m.g) derived from phytozome v7.0 (c hr-ID scaffold_92; pos 453645 to 454155 reverse strand)
attcattttttttaagtattttcatctgggaacaggtttgaccttctctttatctctctctttgttggggttgaagtttaaagtttgttaaagttccttaagaatagttcaaaggactctttcagacaagtgtctcagaagatctcaagttatggctaataatcagttttcggaatttggtgcttcaatttggggatgttatgtacttagaaaatttaaaaaaaaaaaaaaaaaaaaaacaatgctagtttcgtacttgtgtcatatattccatacttaatttttatttgcttatatcacagtagcattttttttttttacaaatttaatcttatgattgaatttttctctgactgttaattgccttcattaatattatccaacttgttaagcattgatatttttgaagagagaaatatgaaatcatgattttgttctctccttttctagtatatgggaaatagaaaaccaattgatttcaatttttgtttttgggtcagtgtgagtgaaa

SEQ ID NO: 88274 - DNA, 613 bp, Citrus clementina
  Intron number 4 from transcript clementine0.9_020848m (loc us clementine0.9_020863m.g) derived from phytozome v7.0 (c hr-ID scaffold_16; pos 3723583 to 3724195)
ctgatttaacaggtgtatatatgtgcattaactttttatttgttttattgatgattacttgtatgctctgtctaaagaaagaaatcttctttagttgactcttggagttcaagttgtgttccaataaacgccttctggtcctcttgttcaggagctattgtcccacataagtttctgaattccataatgatctagtaatgaaatgtaggaaaacacacgtagtgacctcagtaattaaacagtacaaaagattcgaattattattacactctttctatggtggtaattgtcactaaatacggcgtagcaactttcatttctccttttggggcttctactctcacataaagttcttgttttgccaattcaaaggtaggagaaggctttttactaatgaatcgactttcaaaatcattccgttctggatattaaaccaatgttatatagggggaaaatgaaaaaggcagctggcttatagcacacaactccaaatgagctttccacatgagggttgttgcatatattactcagttgcctgtagctgccaaatgggggaatatctcgtatatccactgtttattgctttttcctttatcaggggctgatctttcag

SEQ ID NO: 88275 - DNA, 523 bp, Citrus clementina
  Intron number 6 from transcript clementine0.9_032115m (loc us clementine0.9_032115m.g) derived from phytozome v7.0 (c hr-ID scaffold_11; pos 3597651 to 3598173 reverse strand)
cggtaatttactacaccttaatgcaaactattttgtttactatgtactctttgtttcacaaaagtcctctattgcattcatcatgcattcctctgttagaagtcttgatattccagcaaattgagctttctatattctctaataagtttggcttataaactacctgtatatttgtttggttttgcgttttgaagtttagaattgtaatttgtgtcttttcctatttatagtctgctagtatgctgattgtttatgaatattaaaaatatcgtggatgactactcttatctgtcaaaatgttgcggaaatctgattacttctcatcggggagtttaattttgaatcctagatttttacagttgtgagtttctagctgccaggtcttcatactgataatatgattcttccatttatgatttgatgatcatataggttcgaagattaattctttttcaataagataacttcttctcatccatctctttcagcttaaccaagccattggttcaatcgaagcaattgc

SEQ ID NO: 88276 - DNA, 497 bp, Citrus clementina; identical to SEQ ID NO: 81331
  Intron number 2 from transcript clementine0.9_023074m (loc us clementine0.9_023074m.g) derived from phytozome v7.0 (c hr-ID scaffold_12; pos 3426666 to 3427162 reverse strand)

SEQ ID NO: 88277 - DNA, 773 bp, Citrus clementina
  Intron number 1 from transcript clementine0.9_025184m (loc us clementine0.9_025192m.g) derived from phytozome v7.0 (c hr-ID scaffold_39; pos 1344569 to 1345341)
gtttactgtggcaattccggcgttacccaagtcaggtattggttacatttccagggtttttgtttttgtctcgtatcttgcgtgaccttgctgattataataagtgagcagtaattgaaatatttttcaatgaattgaattagttgttgccgtcgcgttgaatacagttcttaaatggcgaaaaggagaccatttttgtcattccatagtttgaagctatatgaaaaatattaaaatacataatcaagaagaagcaaaatctgtgaaaaccctgaagcctgattatttttgggtggtaaaatggaagaaagcttaagtctaattaacattaccgttagaatttgtgttaatttggaagtttttcaacttgtttggtcgcccctttcccatgcttatagagctgcacgaactctgaatctgtaattggcttactgatgctctgattaacagaaagcaaaagggagctcaaactcaatgtttttgtttttgttgattaattattgctaacaagctacattccttcaattcaatcatttacatatttttcttgaagttctgtttccttaaacacagatttgagtaattagaaatttagaagaattgccattcatctatgaattctacacttttttctatgcattacacttaatttcttgtttcaaattattagtcagttactcagttattttactcttttttttcccccttattgggtctttatttcaatgcgaaacccagatcaaagccaagttcggcagctgttgttggttgta

SEQ ID NO: 88278 - DNA, 467 bp, Citrus clementina
  Intron number 2 from transcript clementine0.9_014872m (loc us clementine0.9_014691m.g) derived from phytozome v7.0 (c hr-ID scaffold_12; pos 1746526 to 1746992 reverse strand)
aactcgtcaaagtattagcaggtaccgctttgctaatgctaaattgagttactatgatatttgtgttgcttgatgtcaccaaaatacacaagtaagatgtggataactatttaacgagtatcaaaattgatatacatatacatatatataaatagtgagtgttagagcatttaatttatagcatcacattaaaattcaaaagaagattttgtgcttttgttaagtttgttttttctttcgcaatttgatgattgtaggtgaaatatgtttgtttaaacatatttcattgcctaaagaagtgtatttattttttcattttatatgcattgacatttttaagttgtgctatgatggcattgatttaagtagttcctatacatttagatggaaactataaaaatgaaacttgaagtttgtgtcctttcttctttttctatatagtgaagacacgtaaggaggccaagcaa

SEQ ID NO: 88279 - DNA, 686 bp, Citrus clementina
  Intron number 2 from transcript clementine0.9_021487m (loc us clementine0.9_018622m.g) derived from phytozome v7.0 (c hr-ID scaffold_13; pos 3435966 to 3436651)
gaaagacctactgctcaattgaggagactctgtaggtgaaattctccctcattcttgttggttttgcttgagaatcaattactaattttcttatttgtatgtataaaggttagattgcatattgaagtgcttttttttactgctaaaagtacttcaagtaactagaacaatggtggtgtttatatcataatcttcagtttaaataggcaaaagtttatcttttcccccggatattttagacatcgaatgctgtctggagaagcactgataagtgaatttaggtactttgtagacagttctatggtttcaaatgatctagccaccaaagcaccccattaacagtaggaatttgtcgttttgttcgtctttagacgtcgtcattaatgtggattttatcttattagaaatttcacaggtcctattgactaactaacaatctatcaagaggttaaaaaaagaaaagaaacatattagcgaaacgaaacatattagtgaaacatggcaagagaagggaaatattgcatattaatcaaacaatcaaagtgatagatactattcaatgatttagaagtggaactgtctactgcagatgtgttttctataaatctgagaatttgagagatgaggcaataaattgcttatttcttgcaggtttttggctgaaattggggctttatatcttttgg

SEQ ID NO: 88280 - DNA, 537 bp, Citrus clementina
  Intron number 1 from transcript clementine0.9_013125m (loc us clementine0.9_013118m.g) derived from phytozome v7.0 (c hr-ID scaffold_16; pos 1770182 to 1770718)
cgcctcgtaattcgctcgttctcatctcataaccggtcaatttctcttcctctttctctctctcatttctattttttataattaaattctcatcaaattctcattttttttctttttttctttcttttcgatccgttcaatacctcgtagatctggtgaattcttgttaattttcctttttttttagtttaaatttgatttcggtaatgtactaatcgaaacatctacagtctttattatgtcattgaggctttaatcatagatttattgatttctgttttagtggctattagattgaatccttttctgttttgatatatttagcttatcttaaagatcgaatttttatgttcatttcttcgatttttttttaattattgttattagtgtgatttgatcattgttaataaattgggaaaatttattctgtattaaagctacgcgctagtttgttgatatgatcatgaatgtcgttatctatataatgtgattgtcttgctgattttatcttgtgtattgtgctgcaggtagcagaag

SEQ ID NO: 88281 - DNA, 488 bp, Citrus clementina
  Intron number 1 from transcript clementine0.9_009066m (loc us clementine0.9_009066m.g) derived from phytozome v7.0 (c hr-ID scaffold_71; pos 131727 to 132214)
gggttctcaagttggccgattttggccaggtaatttgcttcaaaattctttttttttttaatttaatgcctcaattattttatgccattgagaaaacgacatgcattatgatagacaccaatgtttgtgaatttatagtttataatatgtatgcttatgacaattgtggaaccttgatttagttgaaaccaatcatctgacagatacaggtctgatttttattaaggattaatcattcctctctaaatttgaagaatctgagtcctttcgctgcaagtttgtggtttaattactactcatcttgtggcggccaattgttttggagtgaatctcagaaacgatgacgtatataacacacaatcatgtgtcattttctccgtatcatttgtgctttctataagcatttagagtagtttatgctgttttctgaatgaatgtgaattgttcttctgtttgattttgtttacaggcaaggatactcctgggta

SEQ ID NO: 88282 - DNA, 518 bp, Citrus clementina
  Intron number 1 from transcript clementine0.9_007929m (loc us clementine0.9_007929m.g) derived from phytozome v7.0 (c hr-ID scaffold_8; pos 3741050 to 3741567 reverse strand)
ggttactacacgcttcctcattctcaatctgcaaggtaacatttgtaacttcacattaaaattttgctttatttccatgtttttgacataaaggactaataatcatgattgaaggaacgagatgctttagatatttttcttgtggggttgttttgttttgtctcaagtgaagtaaagaacaaacaaaaccaggctgcaaaaggttaaacaatgttacaaaacttcttggctttatgtgtcaatgaatctggattacctcaaattggttgaataatttgatggaatgagtacaattctgatgcttccactctgtaaattctttgaagcaatggatatgcaccattatgattgcatatctgtttgtgaagtcaagtatgatttggattgtcatgcaatttttgctttcatataatcaatgctgcttcaacttgaaatcatgtgttgttcgtttatatgctgtctatacacgagcataattgacacatttgttatttttatttttataaataatttgcagg

SEQ ID NO: 88283 - DNA, 871 bp, Citrus clementina
  Intron number 2 from transcript clementine0.9_009965m (loc us clementine0.9_009965m.g) derived from phytozome v7.0 (c hr-ID scaffold_12; pos 4039447 to 4040317)
catccgattccgcgagcttgccgccgacgttttaggtgactcctgtaactaactcaccggttcttttggtaatttcatttattaattttcttttcttctcaacagaaaacgaaacgttttacctgaattttattattctgaataactgtttccagtttggactttatattttaaatgttagttgaacttaatttcaaaatacacgtggcagtaaatagaagctcgcgcttggattaaccgttccaacttaacgatagcgttttgaaaatagaagttgtttctgaaaatagaaacattttaggtgggtcgggtgcagcatggggtccatctctcgccaaaccaatgccttgaactttattcgggtgataaagatttttaaaactcattcttcttattaaagatttattagcagtgcggatagattttggaattatgtttaattataggtaaatttgaaaaattctagtggagtttatgttgctgatgtgaacgctaactctaaagcatgcgcacacaattcataatgatttttttttttttgacttataccacctgttgttcgtttcgatgtgacgatgtgccggcatgacctatgttaccttaaagagtcattttaattttgttcattagaatatgaggtatgtattatgtcatcaattcatcatcctaagaaacttgatttgtgccaacacaaaatgcttttgcttttattgtaaaaaaaaaatattctgaaattatttccgtggcttaacgatggaattgtcatatagaatcaaatgtaatttgcaaaaacaaccgtaaaaggaaaaaaaaaaaattgctgcaataatcatttaagcgacagtgccttgtgttctcttgcagggtccgg

SEQ ID NO: 88284 - DNA, 971 bp, Citrus clementina
  Intron number 4 from transcript clementine0.9_015360m (loc us clementine0.9_011036m.g) derived from phytozome v7.0 (c hr-ID scaffold_75; pos 620418 to 621388)
tttaacatatcacctttttttgtgtcttagccctggtgagcagattccttctagtttgttaaaataatgttgatttcactttctccttgtttgtcatctggataaggttgttgattagttttctacgatttggtgttgcatgtatttagcaagaagaatagttgcattttatagctttgtgttttttggcctgggacttatgcaaatgttagactgtcttctgtaagatggatagggtttggctagtgagcctagtctgtggtgaattgcataagttaaaatacgttgagaagtagagaaaaagtgaagaatcaaaataagcttagttaaactatgtttcatatggttctttctctaatgcttttttttttcctatacttggaacttatgtgtgcgcagatcacgatttaatttcaaatgcctgctttctgaggtgctggatacaaattactgaacattattctgttatatgctggatatatatcatttcaaatgcctttcattggtttcccttgtggttgatttttgcatcacggctatggaataaaattttgttgtaccacttcttagggatgatgttgatctggtagtggatgagttgctctcaagttagcttatgaatcttgtttcaagaggtgttagggcagttgtgggtcaatcgttaaaagaagttacctacatggctagggacttctgtttgttagcaaaaaatttatattccgtactatttcttgatttctctttttaaagtactcttgctcttagtgcattaatactgatgccttattatttgacgtgtactttaactcaagttctaatatactttttgaaacttcatgctggtaaactttattgttctcctggtttggaacaggccatgcacatttattagacatgatttgaagtccttgccttctatgtcactgtgtttatcattttttgttttctttttgcagctttactagttgaaa

SEQ ID NO: 88285 - DNA, 697 bp, Citrus clementina
  Intron number 2 from transcript clementine0.9_011217m (loc us clementine0.9_011217m.g) derived from phytozome v7.0 (c hr-ID scaffold_12; pos 4203964 to 4204660)
tcgaagagaaggagctggtaaatccctaactataatttttgcaggacaatcgaggaatatcatgcatactgttgcttttgcccccccaaaaaaaaaggaaaagaaaagaaagtagggcttacatttcttaattctacttgatttgattatgaagctatgatgccatgcttcctaaccctgtttaaatgaactatattcatgggttagtcttttttattacatgtggtgtgtcaagattgataaatgattgtgatgtcagttgttgaggtctcttgaggttgtagaagaggccttaggtagaaacctggcacacattagagataagggtgagtttgaaggtggaaaatatgttctataatcttctgaatgggttgtatggaatgtgaattgatacacaatacactgctctcagtcttttcactttgcttgaggggagtccttgatgaaatttgtatggcagactggtattctaaacctacaaatctagtaatttaaccttttgtttcctaatgcttttaatccagcttcatctcttgaattctttctagattgcattgatacaattgctgaataattgtaatatctgatttatttgttacttaaatgaatttgtccctgttcttgaacttctattggctaatttctgggtgttgtgcaattcattatgttaaggaggcagatttggttttgggtggag

SEQ ID NO: 88286 - DNA, 753 bp, Citrus clementina
  Intron number 3 from transcript clementine0.9_011217m (loc us clementine0.9_011217m.g) derived from phytozome v7.0 (c hr-ID scaffold_12; pos 4204787 to 4205539)
gacacgaggtattttctttggatattctttacagtattgaagatttggttgtagatggttcatggcttaacattgaaatgaaatgctgttggcccggaaattctcaaggcttgcgttaaaaatgtgctgataaaacttggtagcttttatttgtctttcctacagtctgcaaattggggtctttcagcttgtgtttaaatctggtgttgttgtattgttttccaagttgtgtttcagagttggtggtggcattgtgttgttatgagctcatctgtatgcaaggttggtggctataccttgcttctgagtattcgattgaaaatacaccaaggggctataatgggttttattaattatggtgtttgattttagtctttctcttaccctgatcctgtgagcctgctggcctggagtgtgtctgaactagaacatttgtagcacctttatctctttaactgcttttctttcactttgttacagagtcttaatccatttttgtttttgttcttaatctttgattcatatttttattgtaaaatatcaaaccatggtgttcagccattttcacttgttgatgttatgtagatgctttaaattgcattttctgcatgattatcaaaaggaatgatgtctattatgttgcgtattcctgccttttcttttttaaagtgaatattagcttctatctaattgcctttcattattgtgcatcaacaagatcgtggagctgtggaccaagagaaattttaggtg

SEQ ID NO: 88287 - DNA, 325 bp, Citrus clementina
  Intron number 1 from transcript clementine0.9_015435m (loc us clementine0.9_013588m.g) derived from phytozome v7.0 (c hr-ID scaffold_21; pos 3828376 to 3828700)
gggtatgttctaacctatatggttccattcattcttgtgtctcttctgcatatacaccctttgattttttttttttcattttaattttttcttttctggttaacctctctggtgttctgttgtaaatttgaaagtagttttgaacttttagctatgaacaaaaagtgtgctaggtgatatggtttcttagctcaaattggtatcgcaaaataaaagttcaaatcattagataaatatgaaatttgaataataattttgataagtaaaatctccttaatgtccaaatcatatgcgctgtgtgtgtttgatgatggcagacaggaag

SEQ ID NO: 88288 - DNA, 676 bp, Citrus clementina; identical to SEQ ID NO: 81477
  Intron number 1 from transcript clementine0.9_014714m (loc us clementine0.9_007121m.g) derived from phytozome v7.0 (c hr-ID scaffold_99; pos 745996 to 746671 reverse strand)

SEQ ID NO: 88289 - DNA, 813 bp, Citrus clementina
  Intron number 1 from transcript clementine0.9_028542m (loc us clementine0.9_028542m.g) derived from phytozome v7.0 (c hr-ID scaffold_16; pos 2677847 to 2678659 reverse strand)
cattgaagcaaccaaaacttgtctgctatatcttggtatgttcttggcctccggttctatattttgcagatcgaattatactgctagcttttgttctttattataaaatctaaatcagatacgttgttgctcatgagagcgtacgtcctcatttcacatgttgtcatggatacaacgactatacattgttcatgtgtttttggatttttaagaaatcaaaatattatttattatagaaatgttattttgtcagggaaatattgcccgaaattttttgagcaagccaaacgtgagcctcgccaaagctaagagttcaccttgcccaagaaaatttcgtgccgtattttcaggagagtagcattgcttcaatatctatgcctactctactaggtggagatttcctgaaacacgtattcaagggggttatattaatacagtatagtatttcctgcaaactctaacaggaaaatttttaagtgcaaacattttgataacgtcataaaatgtttggcattgtttaattgtaatttaagtgcagagacattctcatgttttaaagtgtggattttcgttaggaatggctaactgtcttaactataatttaacatcatattataactagacaacattatttagctgtaatttaatgcaacatcatatctagttgtctagttaagccattaaaactagacagatattttccagctcaaattagcattttacagattaactgttaacatattatatatttctgaaattgaataatttggtcctgcagggtggaattgtactaggaccgtcggttctatcccg

SEQ ID NO: 88290 - DNA, 688 bp, Citrus clementina
  Intron number 3 from transcript clementine0.9_002102m (loc us clementine0.9_002101m.g) derived from phytozome v7.0 (c hr-ID scaffold_21; pos 2769794 to 2770481)
ttgaggacttggaattgagatcactctttgaggtatgtcatattgtttttatttccttttacaaaacctttatgtccactttggcattagtatctgtgttattaatgtctttgctgatcatgttacttctgaaatttggttatttttcaaataatatatgtatacctgacatgtatttgacttgctatggacattttaacatctttcctggaagaaagaatgtatcaaaggcttaatgaaaaggttatctcatgtttttctccatataccagataaaataatattatcaagttatgaaaaggaaatgaataagagatcacatattatttaatgttattgaaaaagagatgttcattttctgtgtttttcttgttatgattgaatgactcttgtttcctgtatgtgagtgaattttgggtattatgtgtattctgttgaatttacatcctgtttccatgtgcattgaagtcttttagtgatttgcttttaagtgctgaacccttttgtttttttttttctgtaattgctgtttttgggtctggttgaagaagtgtattattgtgattctctggtgttatttctaatttgttctgccatttatcatggtgaaaatgactttgaactcaatttgatagtttctacaatcattgattgtcattgattgaatgcttattttctttgtagcaat

SEQ ID NO: 88291 - DNA, 510 bp, Citrus clementina
  Intron number 1 from transcript clementine0.9_023666m (loc us clementine0.9_023666m.g) derived from phytozome v7.0 (c hr-ID scaffold_12; pos 3012619 to 3013128 reverse strand)
ttcttgctgggtatgcatatttctctttctcaaagtttgagatttttcaacaatttggttcggtaatcctggaaaatgaaaaatacagttttagggtttcaataacaagacctttcgttaacgggtaccgtgaatagaactcactgatatcatttgatgttcttgcttgggagatttttcttgtgaatggaatttttttccctgtttttattatgtaggtcaattagatggcgctatttttttccctttactactagattcttctatttgacattaatgtgaggcaacctcaaagttgaaattttttcgcctaggataaactctctccgaactaatttggtctagtacaaacggaatcattgtcaattgaaaacaggcattttttaatttttttttttatattcgcgttaatttggtaaatgctgtgctttttaaggattatattctaatttaatttctggcttttgtattgcaggcctgtggtcagtcttgtttatcctctgtaagagc

SEQ ID NO: 88292 - DNA, 607 bp, Citrus clementina
  Intron number 2 from transcript clementine0.9_023507m (loc us clementine0.9_023507m.g) derived from phytozome v7.0 (c hr-ID scaffold_16; pos 673590 to 674196 reverse strand)
tgtgtctctgagttcatcagcttcattaccagcgagtatgtaatgcaattcaattctatttctgttaattgcttttatttattattaatactgttttctttttggtgataattggttggtcaattttataacagcgaattggtgtgtttggaaagtgtgtagctggctcgattttgatttgagaatgtgatggtgttttggaaaataaaggtcctatagtttggtggaaggtgtcagctttggaaagtggtttttttttgttttttttcattttatcgactggattttttttttcaaatgagggattttgtttttgtcgaacttgataattgttttgggaagttagattttgtttggttggataaagatgtcgttgattttaataaaagggattttattttgtggactgggtgaatggtgttgttgaaagtgaaaatttgtcttgcgaattgtgtttgatgcttccaggagctggcttttgttttgtggaatgtggtttgtttgtttgcagttgttttattggaagatctgattcggtttcttgaaataggtttttcatttttgtcctgtagggcgagtgataagtgtcagaaggagaagaggaaga

SEQ ID NO: 88293 - DNA, 452 bp, Citrus clementina
  Intron number 1 from transcript clementine0.9_014973m (loc us clementine0.9_009131m.g) derived from phytozome v7.0 (c hr-ID scaffold_12; pos 1173763 to 1174214 reverse strand)
caaggttagtaaataatttttgtttgtattttatgggaatgtgaggttaactttacttgcccatcatttttatatatctgttaaccagtaaattctatcacttttacttcgtttttttctgtaagtggttttgacatcaccatcatgtacttgaatttattattaccattgattttattttctgtcagctttgaagttatgctttattctttcctattggattgatcattgttattcaggatttgagtatgttgttttcatgagggctgctaataccttatatagttattttcttccggatgagtgaataactgaaggatatgttactagcttttattaagtatcatctctctgcattatgtgcagcatactaataacatattttctgctattataattctcctgagctatttgcagtattaccttaggacaggagggtgtaagttcggaaa

SEQ ID NO: 88294 - DNA, 678 bp, Citrus clementina
  Intron number 2 from transcript clementine0.9_003878m (loc us clementine0.9_002365m.g) derived from phytozome v7.0 (c hr-ID scaffold_87; pos 950262 to 950939 reverse strand)
ctgattccgtcaagtggcaaacgagtatgcaattccgttactagctattttgtttaaattttcctcagttcttgtgttctgtcattttattttaaatcacgggtggatctatttgataatgcgctttaaacaataaaataaagagtagttttggctatttaaccttattagaaagttaaaaaagagctgcttagagaagccttaaatttgagcttctcccagtgggcgtaaaaatgcatttttgactcttcataaattttttctccacttgtaaacaattgagaccaaaaaaaaaaaaaaatcgaaagaatttttaacaattaaaaaaaaaaaaaaaagagtttgtttagccaatggagaggccaattcagacaagcattgattgtgatatcatcttataggaaatgaaatgggagttgggttcattggagttgtttaataagaagttaattttttttttacaatagaacttttatcatgttaagtaataattagctgatatgagactcttgcatcctatgataaaagataagagactgaaactatgtaaaagaatttctatttcattgaagtgtctgcagcagaaaacttcccttgctcaaagtcacaatgagttaaaccttgctaagacgtaaaatctgctgcaggctgttgacacagtcgttgctggtattctac

SEQ ID NO: 88295 - DNA, 792 bp, Citrus clementina
  Intron number 1 from transcript clementine0.9_010937m (loc us clementine0.9_008285m.g) derived from phytozome v7.0 (c hr-ID scaffold_16; pos 4078967 to 4079758)
attcctgaaactgcccatcaaattagcagcggtttgtctcttttcccatctctctgattctctttgcttcaaatctagtagcatgtttttcattaaatcattctgtttcattatgtctcaaatttttattttattttattttattttatttctttttggctgaatctcagatttttattgcctttttggcgagtcttccgcaaatgtatggttttttgacgtgggattcttgggttactggttttaccattctctttgtttcatttggtgtgtatgaggttccaagtgtagcagcatgttcttgatgaaatgactgtttcgttatgttaaagttttaatttttttggcaaaaaaattcaaattttttattgctttctgtgagagtgattctttaaatggatggttatttggtgtgggaatcctgggttaaattggagaaggggatcaatttgatgaattttgttgaaaaattatattttgatcctcaataagctttttatttgcttgttctgtgtaatgaatatgactgatctgtttaatttggtttatttaatatctgactcttaatttttattttttcttttcatctgtgttctatcaaatgaaccaactttttgctttttggttgtgaaaaataagagtatcatgaagcaataatttaacctgttgaggaaagtgaatttcttattgttcttacgtataaataggaaatgtaaatttctgcagtttggtaatgtattattgttgttatgtgagttcgtcatacttttttcatttggaaatgctagattc

SEQ ID NO: 88296 - DNA, 814 bp, Citrus clementina
  Intron number 1 from transcript clementine0.9_007900m (loc us clementine0.9_005433m.g) derived from phytozome v7.0 (c hr-ID scaffold_102; pos 581003 to 581816)
gatcctcacaagaaggtctgtctctctatttcagatctgttttgttttatgtttttgttgttttttttccccccaatttagtcttgtttgctttttaaggctctttggctaataatctttgggtttgtttaaaactattgaagatgccttcaagggatcattgatttgcttggttgcataataaccccattgcccatatccaatgatcatcatattctttctaatttttgttgtgattgatgatggatactgtggtattcaaatgttcgtctagtgtaaaaagaaaaagaaaagacagttcgtggttttggatcaagaacatgtttactttgtggcaaatgcagtttaaagtttggaaaagaaagcatctagactttcattatgattgtgacgctcatttaggtttgagcaaaagcaagtgaagaacccactttttgctctttatttagcattgtacaaaaccacttttaattgatacttgggatgggtttatgagcttcctgggtagctatttgagtcttgtgatatttcaaactcaaaatgaagctcgtgttctattatggttttttgagttttctaaatcaatttgctggatcttctgttgcttataactagttgagcaattttgctttcagttgtgcttgcatctgtcatattaaatcttcagatttatagttccatagccatgatagactaatataacttctactatatccttatgtgatatgtaccataattgttcgttctgaattctgtaatcactggttgctaagtgttatgcagagtgcactagaaacagaatttttcacagagt

SEQ ID NO: 88297 - DNA, 994 bp, Citrus clementina
  Intron number 1 from transcript clementine0.9_010342m (loc us clementine0.9_010342m.g) derived from phytozome v7.0 (c hr-ID scaffold_99; pos 175364 to 176357)
acctgacccgagtgccgttgttgccgctgcacaaggtaatattatttaaacccatttgcttttcttttttataagagtcacaaattgaaatgccttgtgtaaatgttgtgcggatggatgcatgtttgggagtgctttttgtgagaagcagttttgagtagaagtgctttctaaagttgcaaacttctacaagcaattgtttctgaaattacaaatatgtatgtttttaaagttggatgactgtagtgaagcttgttaagaactgtgttgatgatttaggtatgattattcagatggtataatgagattaattatcaaagggcatatgatatcttatctaatagggcaaatttttgggtatatgcttagctaaccttattaataattattaatttaatcatgaatttatgtagtagacgtgttgtattgaagttttgtcatttttaatccacaattgctgaataatgaaatcattagctgtcacgtataaattggtacggggttagtaaacactaacttccaaataaaagtagctgcttaccaaatactttggctgttgtgggttcaagattaagcagaaacacaggatgaggatgggatgttataatgaaggagactacttaactggagttgatcggcattgttttcaaacttaatcaacatgtgctttgtttattagaatattagattacattgactaggaaatattattgcatatatgtaagcaaatgcatattaaattatgtggatccactgtttgatgtaaagattaaatctggggctcgaatgtaggagtgtgttttcgagtttgtactatatctggatctgcccttttaaagacttgaattggtgtagtaatatgcagttgattggtgcttgtgccaacacatttctattatgtttgcttgtatttccactgattcttatttgactgataaagtgtctcttcactgttatatttcatcttgtttttcagtcctgggaagtatttcag

SEQ ID NO: 88298 - DNA, 322 bp, Citrus clementina
  Intron number 4 from transcript clementine0.9_020533m (loc us clementine0.9_011446m.g) derived from phytozome v7.0 (c hr-ID scaffold_11; pos 958535 to 958856 reverse strand)
aaaatataataaaaaatcccatactctctgacctggtgtgttctgtctcatgattatctcagattaagttcaatagttacgtattgtacttgtaacttaaggttcttcaactccgcaagagcaatttgcttgttgagctaagacccagggtcaagttaaaattagttttgagttatacatatagttcatcaaagtttgaaatagaaaattttttctagacctacaattgcaatatactctatattgagacaaaattacttattgtttgttggttttcttgtttgcagattgggggtgtagatactgttactttaggagacga

SEQ ID NO: 88299 - DNA, 644 bp, Citrus clementina
  Intron number 4 from transcript clementine0.9_019293m (loc us clementine0.9_019292m.g) derived from phytozome v7.0 (c hr-ID scaffold_8; pos 5624432 to 5625075 reverse strand)
ccgagaggatgtaagtcctgtgctattgcttttttcgaacttttgtatttaaattatcactgtggatttttgtctgacagactaaggttcctacttgggtttacactgcattttatttaaggagctgggagactctttttcttttctttttttcctttttttgtgggggcggggggggggtggggtggtgtgtgaatctttttatttggttgagtggcagcagattgtttctcggtttctgccaccattgttttgatatctgtattccctgaggatatacgcatctttattaaatggcattttagcttgatggtattgttgccgtagcttgtgatgattgtaccatatcatctggacattgatgaaagtttaaacgcaagtttagatgtgattgttccctcctcttatataaagtatgagtgcccaagttatgtttgagcttcaatcaatattttacttttgattgtatgatgactgatttatttgagttttttcattcacttctcctatattgaaactgaagaaaatcacattttgaattgagttgcttataagaaaatctcattttgatttgagttgcttatcaagctgctggtgtttatgttttagtcagaaaggaaggattattgaatcattcccaagat

SEQ ID NO: 88300 - DNA, 167 bp, Citrus clementina
  Intron number 1 from transcript clementine0.9_019293m (loc us clementine0.9_019292m.g) derived from phytozome v7.0 (c hr-ID scaffold_8; pos 5625639 to 5625805 reverse strand)
cacttactctcttctcgtcctcaacataaccttccgtgagtactgtgatgagatgatacctctttcttcgctcttttgattttcttattaataaacagaagtttctgtgtgaattgtttaattaatttttaaatttttgtttatctcaatgtcaggtactactgctg

SEQ ID NO: 88301 - DNA, 941 bp, Citrus clementina
  Intron number 2 from transcript clementine0.9_007514m (loc us clementine0.9_007514m.g) derived from phytozome v7.0 (c hr-ID scaffold_57; pos 770844 to 771784)
aggtttgttgtggttccttattctaacctattgtgtagcatggttcattgtcaaaaatcgtaagtcgaacagaactgtataattgttagcatttctatttacattgttttcataaattaatatgttttgtagatattaccaaaaatataatatttattggcaaatcttgtggttgatgtcacaaaaaagagggggaaaaaattctagcagtactatctactctctttggattatatgtgaggttaccatgcattaagtaggaaagcaacaagataaactgtagactggaaaataacatattcagcattgcaattgtaggagaattatctttttctttgtcttaattaaaaaatattcttagcatttatgtgaataatgtgcaactatagcctatatttttttgttttctagaaatgaatgctcttgtttgcctatgctcagcttgtaatgttgaccgggtaactgactattatttaggaaataggaagatactaagaaattacttttggaggtcatgaaaattgtttatttgaataaggggagtctgtcaaatttccattacaaagttttcacttagaaacctcaaatttaaacatagatttggctttggagcttcgtcattgattaaaaatcagtttatctgaagctcatgcattgtcagcagcaccatctaaagaaaatccaatttttaatcggttaaccttatgtttagtttcattggtttatgttatgttgaatgtttctttatgcttacaaactttgttagtccccgctgccgataaatcttctcagtcataatctaaatattgccagatgggatctatacatgcacagacaattttatccattaattccaacccacatttaggtgatttatttattgaaactgcttggcttccattataggaagaagaagttgaccaatcactggaggagcttta

SEQ ID NO: 88302 - DNA, 683 bp, Citrus clementina
  Intron number 1 from transcript clementine0.9_006377m (loc us clementine0.9_006377m.g) derived from phytozome v7.0 (c hr-ID scaffold_16; pos 2375900 to 2376582 reverse strand)
agtcttggccgccactttacaagctcgctgaatatgtaagtgctgtattttttttttctttccctatattcgaaatttgcagtgtgtaacggtacgacgtttcgtgcactccacaaaaatgtggatgacctgtcgtttatcttgctgaaacaacagctcattcatatagctttataaacgacttgtcttccgtgtcttatgacattagactatgaaatggaaaaaattgctttatatattattatgtgtgtatgcagaatggaaatttgatagaggtatggggatcttggcccctagaccaaattaaattcttaaaagacaaggtttttaattgaaattcagctaatttttttgtgtaatttacgttttctcctctccaaattagtctttatgttgtttctccatgatgaccctgttgagccaaaatctaaagttgggcacagtgtatattccttttgtctcatgattcgaaattgtcgtatttgtattatgacttgtttgaatttgcatattctaaaattccgtgcattgattaatgcatgttacctaatgctacttattcagaatctcaataaaactgttgacgttgtacataatgtttcctaattctcaaaattatttttcacccacttaagatttcggaaatcccctgcatgattgccattttatttgttataagcagc

SEQ ID NO: 88303 - DNA, 921 bp, Citrus clementina
  Intron number 2 from transcript clementine0.9_017604m (loc us clementine0.9_016341m.g) derived from phytozome v7.0 (c hr-ID scaffold_21; pos 2822482 to 2823402 reverse strand)
aactttgcacaaagctcaacgaggtaagagaagagctttttcagatactttttccaactaatgcttgtgttctgactgaagatttgggatcaatgctgacgaaacttttgctagtaatcagatccattgcagctgtaattttacgaactttctagatcaatattgatcttcaaatgacttcttttaggactaatcttgaatggctcgaagatacttgttggtgccttattcgatatggatcccacttgatctattttgattggtgttattgaagcttaagtataaaagatggtccaacaatttatatgttattgaaaaaaacatgtcttataagttgatattgctgtaaaccctgtatggcaatatgaatggataccgataggcactgggtatctgtagcaaaaagaagataaatgttgcagatgcgacaaaattggttgatatcctcaaacagccacactaaattgagaaaagatgggaatttactgtgtttctggaagtcctttttaatatgttggaaatttcaaatttatcctaaaatacatgatctttccctttaaattttaatcttgatcatggtgctcatgtttagtaacctattagagtattaatattcagcatgacaatggaacaaaaaaatccagcttttaagaagctaaatggtgttaattgatgattttttttttgtgattttttttcattttaatgttaggcttatagtatatctacagctgttatatccaacataattatctagttctgctctcccatcctaaaacaacaagtatccaactattcattttatttcagttgatttttggttgatcttgttcaaggacatgagattctattttatcatactatcagaagtttgttttgatttcaggcaatatctgtaaaagaaactcaactgataggaaa

SEQ ID NO: 88304 - DNA, 697 bp, Citrus clementina
  Intron number 1 from transcript clementine0.9_005268m (loc us clementine0.9_005268m.g) derived from phytozome v7.0 (c hr-ID scaffold_87; pos 604138 to 604834 reverse strand)
tggggtgagttttatgatagaatcttaaattataccattttccttttaggaacctttagctttgtctttggctttcctttttgaaatccaactagtcaaaacgttgaatttgaatttactgatgatctaactcatcttataaagatttcatgccagttgtgcatttataaaaagtgttcagttaacataggcagagtttaaaattgaagtggggtggcctctgattatattattaattgattatgacctagcttcttctctattcggaaaagagtcgttttaaagtccaatgtacagtgaagaattgaagatagaggcagtttatgtaatagcagaatgtggctattatctagatgggaacacgtatcaaatttttcctcgtctttcctccttccctattttcctttcatccattagtttctagtctcgatttctgttgcaatgcttttgatgttagttctgagatagaattgaaacttggaaatcatatagaaacaagaatctgtgtaaggaagtgtttgcagaggccatatatggagttttactctttatttttccttctggatagtaattaaatagagctattgaatctcatgcaattgaattttgtattctctcttattaaaaaataaaaaataaaaagtttcatgtataagattttcattctccacaggttgcaagcttcggagctgctctg

SEQ ID NO: 88305 - DNA, 263 bp, Citrus clementina
  Intron number 2 from transcript clementine0.9_004241m (loc us clementine0.9_001578m.g) derived from phytozome v7.0 (c hr-ID scaffold_12; pos 2541880 to 2542142 reverse strand)
cattgatcttttgttctcagacgcttagaagcaaggtaactgcatttattattttttgtttttaatttattctcgtttcatgattatatgtacacttgggtgctttacaattcttcagttctattctctttggaagatgttaacgctgacgtaggactaaagcaacaaaaccttttctggcatgtcatcttatttatcattatatttgctgttaatagtgaagattttgatgcctttcagatttgattcataggtacaacgag

SEQ ID NO: 88306 - DNA, 437 bp, Citrus clementina
  Intron number 1 from transcript clementine0.9_014298m (loc us clementine0.9_014298m.g) derived from phytozome v7.0 (c hr-ID scaffold_21; pos 650539 to 650975)
tacttgtaagtgtagagccaatattaattacactgttgcttcatacaaatatttaggtactggccaactatcatagccaatttgtacacattgatcttcatagtcttctatcttcgttaggtttctatttttctcttttgggcttgttccatatgtgaagctttttaatattcgtttaaatttgttcgcgcaagggctaattgcttttagatcaaacgtccaatattatcaataacttttaaatttgttattaatgatttgcattgtgtctggttaattcacagctttaatacagaataggtgcaattattgatcggcgatattgctcactgaacaattttttattttcggataatagctgtaaattaaagtgattttcctgtcttattttttggcttgtaggctgtgatacctttgtggaaggagctggagtacta

SEQ ID NO: 88307 - DNA, 733 bp, Citrus clementina
  Intron number 1 from transcript clementine0.9_014915m (loc us clementine0.9_014915m.g) derived from phytozome v7.0 (c hr-ID scaffold_12; pos 405347 to 406079 reverse strand)
ttgttgctgtcaaatacatagaaagaggcaagaaggtaatcttcttcttctattcgggttattgtatatatctcatattagcaatcctgcaagtgatatagccagagatcctagtggttgcttgatactgataacgaagtttgtttttctacaattatttccagaaatgggctatttggattttttttttttaattgctgtttcgattcaagcattttggcttatgaatttcttgctagtggcataaatgtctgttagggatgaggagtatgtagggaatgccaatttgttcagtaacgctatatatattatagtataaaatattcaaaatagtgtttggagaatcttggagaagttgtcggtgaaagtttttaacattggttttgctcaattgtccgtgtattcaaacaagtactcaaattctgtccaatggctcattaaagaaacctcatcatgtcactgctggaattttttacctgcattggtttgtctgacactaggaaggggataattctgcagttttgcgagagtacaagagctatttgtttctggtgctataatatcagcatttgaactttttgagggattccaaatgttgtttaacaaatgagactacatctcattttagatgcacattattgtatttacattgtttgacacagagtatattgtctagtacatagtttttgaattggagctacttcctatgaattctgtttctggtttcagattg

SEQ ID NO: 88308 - DNA, 304 bp, Citrus clementina
  Intron number 1 from transcript clementine0.9_004911m (loc us clementine0.9_004911m.g) derived from phytozome v7.0 (c hr-ID scaffold_12; pos 4159419 to 4159722)
atacgtcgccgcctcatcttcccttcgctgctcgagtaagcaactgtttctcacataacatcttggctatctgtttggctccttagaaaacgaagaaaagtttcgattttgaatgtaaatgcataggaagtgaaattcgtttgattactcagatatagtttatttaatgtttaaaagttccagcttcttctgaaaattagaggacaatagtggaaaagtggtggagaattttacagagtttatttgataattatcttgtaactgcactaaattcgttttttactttgtagagttttcaaacata

SEQ ID NO: 88309 - DNA, 922 bp, Citrus clementina
  Intron number 1 from transcript clementine0.9_014370m (loc us clementine0.9_010450m.g) derived from phytozome v7.0 (c hr-ID scaffold_57; pos 153864 to 154785 reverse strand)
aacagttcactcgatagcgctctgcaaaagtccatgtaagtgattatctgattttttttttcttttcttttgattcctacatttgttaaacaaattttttatttgatttattgtttcttttgaactatttgatttttgcagtaattttgttttttttttttgttgaatcactgagaaatataaatggaaaagaatttagggtctctcttattcttaagtaatttttttcaatttctcattgtgaaatttgatttgcttattggcattaacaagtagagaagaatcaaatgcacttgaaattatatctctttagcgctgattttttgaaattagaattgaaaatgaggggaaaaaaattttaaaacacttattttagtttgttgctctgaaaaatgaaaataacggctcaatctgggattttgttttttatagatatttggtagcaacaatatattaggcttttggttattatcttgcatttaccatttcatgtcatgattgatccactacctgattgtggatgtaggagactggtacatacattccatgatttctcaagtgtctctctctggataatctatttatgccttttaactatatgtaaattagtggagctatgcaggccttatctgcctttaaagttctgagagatttgaattgctgtgacttctttttaatttttagaaattttcctcctctgggtttttgaacaaaacagaattaaaattttcaccctcttttttcttgcttttgtgtggttctttgcttttgtagcgctggaagtccatttgtaaatcttcttcctctttctttgcccttcactgcctttttattgcttcttcttgttttctgagaggaagataaacatttttttcccaagtacccagaaatcctgcgactgtactgtgttcactgagttcta

SEQ ID NO: 88310 - DNA, 535 bp, Citrus clementina
  Intron number 1 from transcript clementine0.9_029055m (loc us clementine0.9_029055m.g) derived from phytozome v7.0 (c hr-ID scaffold_71; pos 578005 to 578539 reverse strand)
cgagaaccagcaacaagaacatacaagtcaagctggtgggtatgtctttccctttattttcttctttgaaattattttttgataagatttaattttctgcctgcatggatcattgcattagcaacagggttcctacgttttatttagattcttttgctgctttcgttcttgtgttagatgtatcttactccaggggcttcaagatttggctttctgttgtgattatgttatttttattaattaaaattatgaagatataactgctgctttgattaaattaggaacgaacaacagtttagtattttaattgaacaggagagacacagcatataattagtttcaacttttactgtagaactttgcttcagctgcctattattgctgtttcatgaagatttttcagtacccaatatagcagctattatattctatttatgtactactgacagagatccttgttaatgaaatttcttgatctttttttattcagttaattgacacattattgagcttttgccaggtacttcttggggac

SEQ ID NO: 88311 - DNA, 977 bp, Citrus clementina
  Intron number 1 from transcript clementine0.9_031843m (loc us clementine0.9_031843m.g) derived from phytozome v7.0 (c hr-ID scaffold_71; pos 491025 to 492001)
gtaaacgtggcttgcggctgccgatattcggaaatttggcattgaatcagatttatggctatacaaacaagaaaatcaatattttgaattcgtcaaacatttgcttttggaggatttctattgaaaattaaattccgcaaatcatgacggctgaaaagtccacatgggggaaaaggatggaggaaggaatatgaatcccgttcttcataagaatatttgcacacactatcccaaaattgcatgagcaatttagaagaatgtttaaatcagaaaagcaagtctgagaattactcgcagcttagcattagctagaagtcttgactagaattcaatatttaccattcagccagccgaatctaagtaaagttgcagattttgacataatgagctagtgatgcacaacaggatcacaaagttcctatggcatgaaataagcttatcatggcaaaaaatttggtctaaagatttccactttccattacttgtaaagcttgagtcagaatgtctccaatcaaagttgatatatttttaaccattaacgtataaaacacgaggaaaaggaaaaaatgataagacagtaagttggtaccttttctagagtttcatgaatgtttatgaatctcacatagttcttgaatctcctctttctcgtagaaataactcacaggcgcccattttgtgtccacaagcattgttgaaagcggcgaccaacaaacagtgtacgcacaagtcactgctaaggggtgacacctcctggattctcgtcgagttttagataaaagcagagcaattgggtatcttcagaaacacccagaacagaaagaaaaatggtaatttctttcccttgtatcaatctcaaaacagaaaaatattgtcaccctcattagagttgatagtaatgatgatgatgatgatggtgttgtatctttgtaatggaggcagggcaaaggaacacggagcttcgggaagagaaggaa

SEQ ID NO: 88312 - DNA, 1059 bp, Citrus clementina
  Intron number 1 from transcript clementine0.9_015416m (loc us clementine0.9_015416m.g) derived from phytozome v7.0 (c hr-ID scaffold_16; pos 2155520 to 2156578)
gacagttgatcccaaacgagccaaaaggtgggtttttttttccccccaaactgtggtacatttacgtttattttgtggaatgtgtatcgagcttataaggaaaagagagaattggtgacccttttgcaaaattctattaaagttgaaagctttttttttcctccaaaaaagaacaaattttatttcatttgaagtgtgtggaaagagcagatttatctttaagatttgttgaaacgcatttgtcaatgtggtcaacgttatagataataaagttggattttttttaagtgggtaaaagaggaaatttgatgggctttgcattttggtagacgggattcatgattttttgcttcgctggaagatatttgcttttgctactttttttatttgtttgtatgtgaacatactcttaagtgtcagttttcagtgattagtgattcgaattagctacacgagtctgatttctcttccaggctttgattattctctgttgctgaggtcaatagtgtttatggtccttcattacacgaaaattgggtttaggttgaatttccatctgcttgtgcaatgatactacaccttttagtatttcggtctttacatgctactgaatgacagatttatactccttaaaactgccagtttacttttttccaacgtggtgatctagctgcacactcatacttaaagtttgggtcactatacatttgatattcaattaatagcataatattgaattcttatctcatgttcatcctttcttttaaaatcgaatgttttctaagtgatggatcattatatattagaaatttttcagttggttttcttagccaaaataccttttgttatgggatcggagttcggcatatttgccgaaccttatagaattttgttttcacttcaaattcatttgattggcagaattctgatggtttatggtagaaatggaattataatttacttaaccctttgattgtttgtttatttattgatgtttccttttacaaattgcttttctaagcaggattcttgcaaatcggcaatctgctgctcgttcaa

SEQ ID NO: 88313 - DNA, 638 bp, Citrus clementina; identical to SEQ ID NO: 81479
  Intron number 2 from transcript clementine0.9_023409m (loc us clementine0.9_023409m.g) derived from phytozome v7.0 (c hr-ID scaffold_88; pos 182000 to 182637 reverse strand)

SEQ ID NO: 88314 - DNA, 634 bp, Citrus clementina
  Intron number 1 from transcript clementine0.9_021588m (loc us clementine0.9_019542m.g) derived from phytozome v7.0 (c hr-ID scaffold_39; pos 978796 to 979429)
cccgtaatttctcctccactccgtacctctttttctgtttcttctactttgtctttgttgttccctttttttaatttatttcttttaatttctctgtttgtttggtcgcggctgttattttttttctttaaaaaataatatatttgaattgctttccactactgtcctgtttgattgctaagaaaacgcgggaaaatggggaggaattggagtttgcttgtgattgcgaattctcttctgagagtctagggtttgaattaattagaccgttggattcttgcaaatctggaatagcacatatgagatgttatctaattattggatagtttaaatctttaatattttctcgatactgttttatgaatcgtgcttgcaatggaaagttcttgaatttctttgtagtgatgtcagaggacatggtgaaggatggatatgaagatatagtgaacattgatatttcttcagtggctatcgacatgatgaaaatgaaatatgaggaaatccctcagctaaaatgtaccctctttttacaaacatttttactatttcctgttacattatttttcccctttctctgaagtaaccacggctatttttgtgtttgttttctttatcaatctcaacagacctgcaa

SEQ ID NO: 88315 - DNA, 591 bp, Citrus clementina
  Intron number 4 from transcript clementine0.9_033158m (loc us clementine0.9_033158m.g) derived from phytozome v7.0 (c hr-ID scaffold_21; pos 574290 to 574880 reverse strand)
acacgtgccttaaaacaggtagtacacaatgttgatggcttttaacagttgtccatccaatagtagttgttagcagctgaactaaattacatgtgaagacttcagcattggatgtagttgtattagcactttgatcaattatagccaaggtttggcggtcagcatttatcttgggtagtttagacaacaattcaatgatttttgacttcgtagtgatgcctcacccggactctacaagagctaataattaagagcatcaagattatgcgtgttcttacttctatatgattactgtaggcttactgaaattaagttggagtacctatgatcataagaaccctgttgcttcatttactgggcgttaagcaacagtttgttgctgtccagtcttggcacatgtagctcattgatggtagaagttggtttcctttctattttatgatcctataggtgtgtcctaaacaaatttcttctattgttattaactttttaagtcaatgtgtttattagttaacttgtgcgttatctttatatgatttcatttcacttgttgcagtctggacttcaatctcatcaagtggattacgtgaa

SEQ ID NO: 88316 - DNA, 851 bp, Citrus clementina
  Intron number 1 from transcript clementine0.9_018078m (loc us clementine0.9_012536m.g) derived from phytozome v7.0 (c hr-ID scaffold_13; pos 2271092 to 2271942)
acttttttgccctgcagtgaattcgtcatattcaggtcagcttggattttaactatggtaaatgtaaatcagtgaaaacctgtcattgctaggaaatgactggtttatcatgcctgcattgcatcaggttcctggtcttctgcaggaataaatttgttgtcccatagatgccccattgtaacttggaataagacttgtcaaactaaaatctgttttgttaatactgaatacctagaattactttcctttagttatgaatgacgtttccccttcaaataaaggtgtgatccttgaatatcctctgtataattaaactaatcaatttttcttaaggttagtttgtcaataatagattaatacataaaaaagacatttgcaaatttacctatttttgaactgtggtacacaattttaaatcatacgatatacaatgaaaacattagagggaaatgatgtcattttggagtcgatggttatagattgttattggcactcatccgtgccttcatttgaagatgaaatttgtcaagataattaaagaacgtaaatgtgacactctgattcacaatttcaaaatattgctggcataattctaatttttgtgatgaagattcctttgaatttgtgatcttaatttttgtaatgacttgaagtgttttttttccccacaagatagggagaaataatttctttatggttgtgaataagtcagttggaataacatgcaaaatggatgttgcttttacaagatgttatcaactttttattgcagattgatactagattctcctaagcgggtcaaaatttccatgccaggggaagaagagtgtgattttagaggcacacatcgt

SEQ ID NO: 88317 - DNA, 868 bp, Citrus clementina
  Intron number 1 from transcript clementine0.9_009843m (loc us clementine0.9_009841m.g) derived from phytozome v7.0 (c hr-ID scaffold_21; pos 2604246 to 2605113)
ctgacgtggatcctgaagaccgctggggcagcactgtaattttcattaatccctttcttgttcgaattttttagcaaacacttaacacttgtgtgattgctttctgaaaaccctttttagaatcaccttaggtgcgttgggtattgttttcatatcttgttttctatttttctgaatttagaaatagattatttctcaaaatatttttaaaatataaaattcattctacatttttaataaaagaaaaaaaattcttgttttgtttatttcccaatacagtattaggcttcaatgaataactttcctctataatctctcaaaatgataataataacaaacatcattaatattaataataataataaaaacaataacgtcattattattattattattgatattataaaaaaaaaatttccccgtccataaaacttttcttttcttatacattatgatatttatgttttatatattaattaaatcaagtatatataatctatcatttttctttaaacaaatataattaacaacatcacctaatttattcttaaaattagaataaccaaactaattaaataacaataaaaataattatatattaattgatgtttatttaatgaaaattatttcaataataattctttaaaatattcctataaaacggatttgattattaataattctttaaagtattccaagtgtttttcaaatttgttttaattcaattgaggctgttcactttttcttactctgttcttgtataccttttgcaaatctaagtaataatcattttcagacaatcaaactcacaaatgtgaccattaataatgagctaataattcatagttgattgaacagcctcttgcag

SEQ ID NO: 88318 - DNA, 787 bp, Citrus clementina
  Intron number 1 from transcript clementine0.9_027123m (loc us clementine0.9_027123m.g) derived from phytozome v7.0 (c hr-ID scaffold_112; pos 29462 to 30248)
atcaagtttcaggtttagtttttgaattcgggtttgatttctgattttttttataatataaaatcaatgttagtagtaattgaattggccgctaagtgatgtttctgttcaagaatttttgtagaatcagtgttagatttgctgcaattttatcatcaagctgaaactctgcaatcttgaccacgttgtttggagtggatgaagcaccagaatgtaatggtagatgttataaaaagagtggacttgacaagagcattttctatgatattagacgcaatcaagatatttaatttagcataccaattattggtggattctttgattcttttctttagttatagtatccaatgctcatagttttttttaataggaaatgcgactgtcaagttaatttgtctcatgttcaatttgcttagaatttccgtactttgggatcttaattttgtatatctagttgtctatgatctttggcaatttttcttttctctttctatgttatttttcattttcatttaagcttgaaacctttgcaaaagactacctggttctacttcccttagggacttgagatggtgagtttaggcaagccacctcatcttgtggattgaggggactttatagtaactttttctttgacgtatttgcatcaaacgaatgccaatgctcataataataataataataataataataataatcataataattttctattgcttcctaatcttacaaatgattgctccattttccagtttggtgggtagaagcatctatttgtggggttcaa

SEQ ID NO: 88319 - DNA, 377 bp, Citrus clementina; identical to SEQ ID NO: 81937
  Intron number 4 from transcript clementine0.9_002837m (loc us clementine0.9_002832m.g) derived from phytozome v7.0 (c hr-ID scaffold_115; pos 263152 to 263528 reverse strand)

SEQ ID NO: 88320 - DNA, 957 bp, Citrus clementina
  Intron number 1 from transcript clementine0.9_009674m (loc us clementine0.9_009674m.g) derived from phytozome v7.0 (c hr-ID scaffold_11; pos 3180755 to 3181711 reverse strand)
cgttgcttaagcaccatcgtttttctagtttgcaggtaagagctgtaaacaagaccaaagttatgtgacttgcaattaattaattaattgcattacattgcatctacgtagccagtccttaatttactaattgaattgccctgcaaatacctagtcctcattggtaattgcaatgcatctaactagtccttcattagaattgtacaactgcattaatttataacaataattgtttgtacaaataatgcacctaattattatttagtgatgggcatctttcaccttattcttaaggtttttagttcaacacttgattacattatgaaaatatattttcaagtgaatttattggttaggctttagttgtgtgttgtcaaatctatttatctattttcataattttcgaaactattcaatatttttttttaagataaaaaaatgttgaaagtccgaattagttttttggcatcataccttcccaaaattcgaacatcgatgagggcagtctgtgttatattgtgaaagcttagttggagtgaatttatgagttgtattttaattgcatgttgtcaaatctatttacctactttaataagagtttcaagcttttcatttttttttccaaaaaataggaagatggtcaaagttcatattgattattaccccgccagaatttgaattcatatgaggattcaaattttcggtatattattgctcgatttgattttttagcatcttacctccccagaatttgaaatcaaacaacctaataaaattgtttgaaaataattcaacgaggcccttggggcaactcttttagaaaatctaacgtaagacttagtaaccatatcgtcgcagctgctgaaatgttttagggtttccagccacaaaatgaagaataaaaatctgtgcacgagttgaagctaactttttagttgatacaatggcaggttgtgg

SEQ ID NO: 88321 - DNA, 661 bp, Citrus clementina
  Intron number 1 from transcript clementine0.9_016033m (loc us clementine0.9_016033m.g) derived from phytozome v7.0 (c hr-ID scaffold_56; pos 1097096 to 1097756 reverse strand)
ggaggattcatcaaataaatactgcactctacgatgtaagttaaaacttttctctttcgttttgtgggagaagaaaaatgggagaaaaggatcgataatggtctgtttggtactgaaaagtgcttttcgaaacaactaaacaaacagagtttcagatatatcaatgagtttacgaatttcgactatgtttattgttgtgaacgagtttgttttgttttattttggcattgctgcagatcagttcattaacattttgacttttctttttggtaaattgtttttgcaatcaaataacaagtaaaagttcaactatgattaaattaggacttctttttctatcagtttttcaaatttattagattggaattgaaaacctttttttttctttataaattacgaaaaaggaccacgaatggtgtgtttggttgctgagaaaatagctgccaaacagtgacgttaaatttatttttaaaattttttattcttgtggatcaatttgctcattgttagcaactcagttttggtttatccttttcaaatcgaatgaaaagtaatttaaaaaaaaaattaggaaccattgagctatagattttatcgaattggagttgattttattgattcttataatccaattttgttttgaattcgggcgttgttgtag

SEQ ID NO: 88322 - DNA, 460 bp, Citrus clementina
  Intron number 3 from transcript clementine0.9_019508m (loc us clementine0.9_019508m.g) derived from phytozome v7.0 (c hr-ID scaffold_8; pos 1616303 to 1616762 reverse strand)
gttcgcaaaggtggtgcttttaccggggaagttaggtctgatttgcgtaccatctctatattaaaatagtcctatgcatgcattgctttagtaaaatatgcctttattacttaccaaacttgccaaactgagcattttatcttctcttttatattaattgttgatattcttttttatgtttgcttcgatcacaattaagatggtcgtccacttcaatgaattgcaagatctatatgcatatgtttgtgtgtgcactgtcctcttttatattgatctctatgatctaagtcactacaggaaatttagtttatctaaactgtttgctttactttcttttaactagattttgattttatgctggtaataaggtggtgtattatgcaatttagatcgatttatgcgatcagtatgaagttgatatctcttctcctttttctttggttttgtttacagtgctgag

SEQ ID NO: 88323 - DNA, 387 bp, Citrus clementina
  Intron number 2 from transcript clementine0.9_019508m (loc us clementine0.9_019508m.g) derived from phytozome v7.0 (c hr-ID scaffold_8; pos 1616817 to 1617203 reverse strand)
ttgtgggtaagtctttgtgaactttatcttcttgggttctttaattcatcattgaagcaatcattttcgttaatttaaaagtataatttttttttcaggtaaaatagaaaattcattgtttgaaaagtaaatccctttctttcagagacttagtagttagttttatagcaatccctttgtcagtttaaaaactaataagtttgtttactgaagtcacttttgaaaatgaaaaattggaaagcaaagaaagcttgataaatgatgcttgatgtagatgttgtgtgctcttttaatgtgattcgtattttcagttctaatttttgatgtgctgtcaatttattttggcttgcagaggttgttgtaagccctccgtttgtgtttcttcct

SEQ ID NO: 88324 - DNA, 708 bp, Citrus clementina
  Intron number 1 from transcript clementine0.9_009785m (loc us clementine0.9_007111m.g) derived from phytozome v7.0 (c hr-ID scaffold_64; pos 364462 to 365169)
atcatcttgttctctttgctttcaagcctttcaaggtaattttttttttcaataattcgccccattcttcataattttttatttaatttgttaaaagtggattcttgattagattgaatttttcgtatattgcgtttttttatttatttacgaggttaggtatttttttatccatagaaagtaatttgtttgttgacatattgtgaattacataaaaaattttattagcgttctgtggaattgtggctgttcttgagtcctatagcgcttttgtagtattagatttatcagtacagtctttgatttgttttcttttaaaacccagatatatatagtttttctttatgtgatttgaagacccaattgttatattatgtgattaacaatttgatatattatgtatatcaaatttaatgcatgtcaacacaaagtattaccatggaaggctctttatgattgtcttgtttcttttcccttgataatatattggttcttgggaattctttggtaattatgaaactaatcaaatatgaaaaacccttcattgagaattttgactcatatttttgaaattgatagtatgactcatgtttcagtgaggaggtaaatgatttttattagcaaatctgatgttatgttcttttggttctaacagatgcaaatctttgtgaagactctcaccggcaagaccataacccttgaggtcga

SEQ ID NO: 88325 - DNA, 660 bp, Citrus clementina
  Intron number 2 from transcript clementine0.9_007819m (loc us clementine0.9_006500m.g) derived from phytozome v7.0 (c hr-ID scaffold_87; pos 1020939 to 1021598 reverse strand)
cggcaagcttcagtttctcttttcttttcgtttgagtaagttattcatactaatgcattcttttattgatctcttcattggcagtgaattatctctctgtgtcctttttgtcttagacgagtagctctatgtgtaagtttggtattagtggatgtggatcgcttggtctggcttacatatttgtgatacgtggtggttatgtgtagtaaatttgattaatatgatacatattagctgatacccggccacttcactgctcagtcatggttaatgtttcacgttactgttacttaacagaatagaggttgggaaatgcctacttgtgtttttatcattatccagattcatgaaagtgaagtcattcatctgattttcttgaaacagattccagttttgtggttttgtagtcctaaataatttgagtgtactggatattgggacttatcctaaataagcctggttttgatcctttattggaacccctttgatgattcaacttgtcaatggaattattacttcgtaaaagcttcttttatttttgtgatactgttgttctgatcttcaaattctttcttctggacttaacttaatggattagaaggcatacatttgggattttttttgatagtgctaatggcatgaactttgtttctcaggtac

SEQ ID NO: 88326 - DNA, 993 bp, Citrus clementina; identical to SEQ ID NO: 82087
  Intron number 2 from transcript clementine0.9_024243m (loc us clementine0.9_024243m.g) derived from phytozome v7.0 (c hr-ID scaffold_8; pos 986666 to 987658)

SEQ ID NO: 88327 - DNA, 542 bp, Citrus clementina
  Intron number 1 from transcript clementine0.9_031080m (loc us clementine0.9_031080m.g) derived from phytozome v7.0 (c hr-ID scaffold_39; pos 1536870 to 1537411)
tggaagttgatactgttgtgaattctacaaacgaggtgagcactaactagttaccttattcaaccttgtttggtttctaattctttgatgattgtggtgtggacagcatttaaccatcttacttatgtgtcttatgctatgtagtcatgcttttcagcagtttggtcttttggaaatatgttgctaccaatagatttattcttggcttgtatgagttgggctcatatacatgcttcaattaatctgaatttttttttttttttttgctttttttgaatcacagccattatggaaaatggtattagtatatatatttgtgttcaacaatgcactgtaatattaatctcactgttgccttccgctagaactttgatgagtataccatgcccatgggatgactatcctaggaaagtcctttcttgaggagtgattagaaaagctggatgacccttcaggaagtgtatattccagccaatccatcaccttatctaatacatttcattactgatctgatacttttgcggtttgttgacagaacttgg

SEQ ID NO: 88328 - DNA, 560 bp, Citrus clementina
  Intron number 1 from transcript clementine0.9_016180m (loc us clementine0.9_012962m.g) derived from phytozome v7.0 (c hr-ID scaffold_69; pos 777402 to 777961)
ccaagttgctcactattgatcaagattactggcatgtaagtcttctttaacaatttttattttattttatttgtttttatgttttatgctctgttggaatttggcttgctattctcttcttttgatttttttatttctttgtgctgatgagaaaaagcccaggggttaaggagattaagttagtaaactgcatttgcaaccactggcatgaaggattttagagaaattcactgtagtttataatttgtatgtggtaacataatttttgtttcgtgaaaccttcttgctttgtatttcaaatctaagagatggtgtctggttaatttcagctcactattttgattagcacacataatttttgtctcctgaaaccttcttgctttgtatttcaaatttaagagatggtgtcttggtaatttcagcttactattttgattagcataacagccgtttgtatatctttattggttgcataattaatagtcattaaccattttgatcttctaatgttcatttttatttttccttttagggttggacaatttttgaaatagtaagat

SEQ ID NO: 88329 - DNA, 983 bp, Citrus clementina
  Intron number 1 from transcript clementine0.9_020880m (loc us clementine0.9_018473m.g) derived from phytozome v7.0 (c hr-ID scaffold_28; pos 720616 to 721598 reverse strand)
aaagagaaaacttgtgctggtaattgataacagaagaaaaaaattaaaatataaagctttttggatcttttcgtaataaattttattttttggatgggttttacatattgattttgcgaagaaattattattttttctttattacttgtagtttctaaagttgggattttgtgatgaatgcgaaattttagggtttgttatttattgctgttcagtttgatgatgtgtttgtttgttggatgatagattgtggtgagtcaagaagagaaagtttgggatttgttgacgaattgggcgttttgatttattgtttttatatttatatttgttgaattgtactttttttttgcttttaattagggtttctaagttaggttgattgggaatttctaatgtgatgatgcttgggtaaatatgatcgcactttcacacttttttcatttggttggttggtcagtgataatcttgtatttttttcttttgcttgcttaaattgtttctttgagaaggatagtcccgtgctttttatttatttttgatcctttctgatgttttgagtatgtttggttcctcaaaatgtgacgcaaaagaaaagggaagataatgatgttttctagaacatgtgatttataattaaaattttttttttaaagatatggtcgcacaattttatcactagacttgttcaggaggttctacaattcaagaatagatccttattatggtaattatggggtagagactcgtttattaagttgaagacatgtctaccaatgttgccttacttaaataagtttatatttatttggccttagttgatattacagagcttttgtctaggtaatattttcttcttgatataatgtctgtgatttcttttcaagacggctgtgtaggttattatctttagactgcctcagtcattaaaattcttttgattatttgcaggactgtcactcaaatcccaggaactaacagctatt

SEQ ID NO: 88330 - DNA, 967 bp, Citrus clementina
  Intron number 2 from transcript clementine0.9_002184m (loc us clementine0.9_001618m.g) derived from phytozome v7.0 (c hr-ID scaffold_56; pos 831391 to 832357 reverse strand)
cggtaaataatttaaattcatttgagaatttttgaatctattttccatttttgtttaatttttaattttatgattatgcactttaaatattttgctcgatgtcatctgggagttagttttgattttttgttatagattccagaaactgggttgttttgaaatttgggaggcaatgttgttttctgggtggttgtgttctcttttaattttctgcctgataatttgagttttgatgaatttatgtattaaactattggcttattgaaaatgttttccttcaatttatttcttgcatggtaatttatgattgcagaagcaggttatgtatgagttatttatggcgaaaggagtctaactcattaatttgtagatttcaataatcagtttattgattttctgtcgaggtttctcaatgcttatgcatttgtctgggtgtgcgtgcactgtgcaagcatgtattgagtctagtggttgatttttctctctcaatgctactttgcgtgcatagtttccctcattgttctgcttatatttatcaacttttaaggcataggaagctgtagttaatttatatcatatatcattgggactttttgataaattccatttacatcttgggctatcagaatgaaagtcatcatttaccttaatgtttttttcaagaagacagaccactgctggagctttgagcttgtaatctgcagtgttttgattgttgatattcctaaaattgtgtgagaatgtttgtgtgcgattgcttgatgctgcttaattccgctactgtgctgtatgtcatcttgaccttcctagtcccgatggtttctgtttgtcgtaatccaaatcttgaatttatcatgatatttctattgtagtctgaatgtccaaaacaaaattttggtactgtgctttgaagttcaaccaagaagtctaatctttgcctttgttgaaatgctgcagtcttttgatc

SEQ ID NO: 88331 - DNA, 330 bp, Citrus clementina
  Intron number 1 from transcript clementine0.9_028952m (loc us clementine0.9_028952m.g) derived from phytozome v7.0 (c hr-ID scaffold_16; pos 1138906 to 1139235)
aagaagaagtaagtttaaagtttttttccctttaatttttgtattctatttattttcagcaccctaataattttatgtttttgacaaattttaggatgaaaaacctattaatcatggaaacaatgtcacaagagaatcggacattgtagatgattgtgcttgtgttttcaccactaacaaggtagatagctaaatttcactttttaattttttattactaattaatattattcaaacctttctaattggatatactataattttgttttgattaggtttttaatagcagaaaagaattaattgagtaaacgcgaaatgctggcaagagaa

SEQ ID NO: 88332 - DNA, 734 bp, Citrus clementina
  Intron number 2 from transcript clementine0.9_025227m (loc us clementine0.9_023627m.g) derived from phytozome v7.0 (c hr-ID scaffold_21; pos 2511592 to 2512325 reverse strand)
agaggccccagagtgacaggaagatatcagtgaaggtatctatttacttctactttgctgaaataggttatttgttctttcttttgtttagttcctacttgcgctatgttgtgtggacttctgttctgttccttttgtatgcttgtcttgacaatgcttctatggaaccataagattacctgattttaatcatgcagattgttacatgaaagatttatggtcatgttggttgttgattgcgccaaatattttgttatttctattttgaatctctttttcttttattttaaatctattttgaaagatttatgatcatcaggaaattgattgctaattgaatcttatgaataggttgcaagtagaatgctccatgctctttctgtttgttgaatcgcttggatgttcattcaaatattatcaattagatgatgtataatcttgtaatagccatgttcttgcatttcatcctaatgaatttggtattgcacttcttcagtattcattcttgtaggtttatcccactaatcaacaacttcaaattactttaccctgcaaagataaactagactagctcatgtgttccaatatttgatcctgctggagatatttgattttgttgtcgacttgggacgtttaacacaaaatgcgcttggatcaccgataaattgtctgtcaaattaatgtactggctggtggcaggaaaattggcgaaggccgaagggtattgattcacg

SEQ ID NO: 88333 - DNA, 396 bp, Citrus clementina
  Intron number 1 from transcript clementine0.9_007790m (loc us clementine0.9_007808m.g) derived from phytozome v7.0 (c hr-ID scaffold_39; pos 1807080 to 1807475 reverse strand)
cgacccgccgtttggccctcctctacgtctaacgtgttagtctctctttctctctcctctgtaacctaaatccattttcaagatctctctcttacaccgttgttaattaatcaaatttcatttcattttcatgtactgtttctaattttgtaaatctttattttattttattctttttagttttattggttaatgctattgtattattgttcgttaatttctcctcatataatttatatacaaaaagaaaagaaaaatctggcagctcaattttcattttttgtgttttgtgttatctgaattatatttgttgacttctttttttttttttttaaatttttgtaattaggattaatactggagtaatattgtgtgggagtaagtaattttgttgta

SEQ ID NO: 88334 - DNA, 530 bp, Citrus clementina
  Intron number 3 from transcript clementine0.9_010959m (loc us clementine0.9_010959m.g) derived from phytozome v7.0 (c hr-ID scaffold_39; pos 806573 to 807102)
agctggacttttctccaatctaggagttgacagtatttctctttgtttcatgctcataatcaattatttcttccctcttatttgttattcttttatgtcaatctttgtttgttttttgagaaggctggaatagttttttaaaatatagtttgaatctaatgaattatgttttttcaagtatccatgtgcttagccaagttgcaaatgactaaatattttgaagtcaaagctgaaaaaagaaaacaaaagtgtactgctttactacagtttttaagcaatcaaacatatcattatctcttttgcaaatccttttgctggaaagtttaaatgtttttttcttgcatggcaatttgagttgctcaagcttttattttgatgtcatctctgctttggaatgcttaccaatttgttagtgtgatgctcaactgaaattaactaaggccagaaaaaaaatcaaatacgggttaatcccattcctgatcttatattagttgctaacaatctcgtaattattaccaggctttgctgga

SEQ ID NO: 88335 - DNA, 637 bp, Citrus clementina
  Intron number 3 from transcript clementine0.9_000486m (loc us clementine0.9_000462m.g) derived from phytozome v7.0 (c hr-ID scaffold_68; pos 700525 to 701161)
ttgaggaaaagatctataccgctgcctcaagtcaggtaattccaatttgacttccttgaattttcaatatttcatatatttgtttatgtaaagtttatgtgcactatgtcttgcacgtggaggtacagacacatgcatatttggtgctaaatagacttgtaaaggaagtgtgaacaaaaggactgaaaaatgaaaaaagaaataaaaatgatattggctgtagatggtctttagtttcttaatatctgttacagatgctgtcatttaaaatgcactttgaaaaaagggaagaggagagagaataagaaagttggaaggggaaaaagggctactatggttacaaatcttctaaaatatgaaagtgaaaataaaatccttttttcctctttgaccttgccgcatatgatggtagtggttgtaaggaagactttctgagcataatgagcccctgggcattttctatttgctgtttgtgtcatgtcttatcattttctttagtcatggcatgaccattagcttctgtttcttctgttttccattttcttttcttttgtgattctggtaacatggagtgctaaattatttgtactggtatcgaatttttcagtcggattatctgcggaagatatctctgaag

SEQ ID NO: 88336 - DNA, 469 bp, Citrus clementina
  Intron number 1 from transcript clementine0.9_013775m (loc us clementine0.9_013775m.g) derived from phytozome v7.0 (c hr-ID scaffold_25; pos 1667634 to 1668102)
tttcgttcatcaaatctaccgcctgctgcattgaggtaagtcttaatttttgttaattacttcacttgtgaattagctcgactaattaaaaagccattagggcccatcttaattgttcatctcctgtttcagtttataaacttcttttatttcaattttaagattttgtccgaattattattattattattattattattattattattataagtgcttaatcataaaccttctaaatatccacttttacttgtccgtcttctactgctcatcactcacttgcttacgtcttgggaatagggttgcaattagtgaaaaatgggttggtgggttttagcaccaagcatgtcaaaatcaaattaaacacactaatctttggttgtattgataacttctttgattaaatgagtgctctttttcttcttctttttttttaattttttcttcgattttcttattagttcgaaag

SEQ ID NO: 88337 - DNA, 682 bp, Citrus clementina
  Intron number 1 from transcript clementine0.9_011135m (loc us clementine0.9_011135m.g) derived from phytozome v7.0 (c hr-ID scaffold_151; pos 112646 to 113327)
cacccggtatctttttacttgtttataattcattatccttctcttctctctatttttcaatttctttccttttttttttcagaacaatttcttttcatatttgtttacaactagtaatttctcttaaggataattgattcttagtgcttttcaatttctggcacaagtctttcatcatctcatggaacctagggaagcaagatcgaattttggtcaagattgaagttgtatttgggtaattgcgttcatgagaaaattggggaatggaaatcgcaactttttagcggatatgataaaaatgtgaaaatacttaccccaatgcttggctcttttttctttatctctgtttattttagttttcatgttttgaattaataatctacttttaatctttaggttagacgtcttattgggttgcagaaaatactaaagaaattaagtaaaaacgtgaggttttaatttttgagctattactatcatatgccttctactcaattaaaactgagttcttttttttcctttttcttttatcaatataattcattttaggttttaattccacgtttacggggaaagaagacatgtagtcagaatttttatttttttcattattttatatgtggctgttgctgtgcaaacttactcgaattgaagacattgtatatatgtttattggcaggaa

SEQ ID NO: 88338 - DNA, 773 bp, Citrus clementina; identical to SEQ ID NO: 78848
  Intron number 2 from transcript clementine0.9_019422m (loc us clementine0.9_019462m.g) derived from phytozome v7.0 (c hr-ID scaffold_104; pos 737569 to 738341)

SEQ ID NO: 88339 - DNA, 862 bp, Citrus clementina; identical to SEQ ID NO: 82134
  Intron number 1 from transcript clementine0.9_006207m (loc us clementine0.9_006207m.g) derived from phytozome v7.0 (c hr-ID scaffold_69; pos 1073766 to 1074627)

SEQ ID NO: 88340 - DNA, 728 bp, Citrus clementina
  Intron number 1 from transcript clementine0.9_012346m (loc us clementine0.9_012346m.g) derived from phytozome v7.0 (c hr-ID scaffold_13; pos 2636794 to 2637521 reverse strand)
gtcgtttcttctctctctttccttctttctctcaggtctgtctctttcttaatctcttttcgtttttttgttcttgtgttagttcttacaccagctgattttcatttttaatttacttaccttatgcgtatgtagatatgtatgtgtgccagtgtatgtgcacatgtatgcttatgtaaactccagctagtgcttctgtctcgatgcctttaatgatgttgtgagcagtgggctggagatttttgtggtattattaggattaaaagaattttaaggtcgattcgctgttattaggatttgtcggtaattatcgtgtgaaatgtaactaaagtggatgagcacatggtttgcaagaagatagttttgtagtcatatgaaggggcatttaacaaaatttgacaaaaatatgagtgacgtgtctgatgaatttctggttggtttcttgcaaatttcgaagccgcatggatatacttgtttttaagtctaaacacagaaggaggtcaatggtattggccgtaattagtttaagttgcaatgtaggacatgcctttactgctttgagttttggcttcatgaagcttttgaaagaacctgaaagaatcttaacttccttcctcatttttctctgcaaataatgatctttaaatatcgttgtaccttgaaatgtgacatgtgacggatttttatgtacctcatttgacttgtggtcattgctgctttctttcaga

SEQ ID NO: 88341 - DNA, 971 bp, Citrus clementina
  Intron number 1 from transcript clementine0.9_003980m (loc us clementine0.9_003980m.g) derived from phytozome v7.0 (c hr-ID scaffold_35; pos 1157400 to 1158370 reverse strand)
caacatcgagtctctcgtcaaatccgtctacgaaggtctgcaaattcttcatctcctttcaatttatttaacttaattttggttttttggtgctttcttgtggtaccggtcgggtcgggcgggttaatctagtggcattgacctggaattagcttgcaagaaagtactgtttagttatcttaagttccttgtcggattcgtctacgtaaagtctgctgattttaagtttttttttttaagtttgatcaaatgttttgggaatgtcagtgtcttttctgattcggatcagtataatcgggttgatccagtggcggtctgtgattgtctttctagttccgtcacgttgtagctataaagttttgttgtctgggttcgggtcaaagtagtcgggttgaccgaattgttactatcaaatgctgtgtatttataaatggtctttatctatttatttatcataattaaaattggaactaggagatgaatattaagctgattctatctaattatggggtcaatgttgccatgtgagtgggccaaactcaccccccgtttggttgcttggaatatagaatgcaataacttcacttgtttgattcttgtttcctattctatatccgtttctgtattttagctcatatggtgggtgagcattggctaaatgtattatcttcattcaaaatcaagctacaactacacttgctactatacttatattaaagtcaccttaagaaaataaaacgaggttgttaaaggtaataagtatttttcaaaattccacattgttttggcaattttatttgggataaaagagtcggtacttactatgtacgtgtggcactactcctttgaaaaaagggtgtcctgttgctgtggtttgtggttttgcttttcattaacattgtgggcagacctaatggttctttttgtgcttttcagaggtcgctgaaacagaattgaatttggaggagtca

SEQ ID NO: 88342 - DNA, 815 bp, Citrus clementina
  Intron number 1 from transcript clementine0.9_030864m (loc us clementine0.9_030864m.g) derived from phytozome v7.0 (c hr-ID scaffold_13; pos 3945374 to 3946188 reverse strand)
gcacctcctatgtatttttatcataaataatatttaatattttccttttgatttggtatttgtctctaaaatgagaatgcaacttactgttgtgtccaaaattggatataaaatgctaaacaaaactatcaaccgtgagaaatagaattttcaccatgacggcaaatgccgatgatatagtttgagaaaaaaacttaattgatgtgccctggatataattaatctggtcagaatcattagcaatcatactcaagttgatttgtcgtgcaaagtaattactaagtaaatagtagtcatactcaaatcaatatgtcattgaagtaattattaattgatttgtcttttcaacgacatcttcgagatatttataaatcatgatagaaagtaaataaatacattccaaaaaagaactcggccctctaggaagtctatctaattttaaatatatttgaaattcctctacttgagtgagaaatgatcaatggcaccttcaaatcacacaagtttatgctacagatataaaaaaacgaacatattgaataactttttattccaaaattaaatgggatttcctttcaaaaagagagagagagagagaacaagaacaaataagaaaatggagagttgagctgaatgagaaagaacagtaaaaaaagaaaaaaaaaaggttgagaagagagaataaggaaaaaatcatagaaattaatgtgcaaaacttagtgttccgtgtaatttaatatttatataatcttcaatctttgatctaatggtttaaaattcgtgtaaaacctgtgtaattttgaaggggtcattaa

SEQ ID NO: 88343 - DNA, 859 bp, Citrus clementina
  Intron number 4 from transcript clementine0.9_032842m (loc us clementine0.9_032842m.g) derived from phytozome v7.0 (c hr-ID scaffold_151; pos 159202 to 160060 reverse strand)
ccagaaatatcgaacggcaaggcacattccagaaggtatattattttcaagtccctgataattgatatggttcttaaactataaatttacctgtttgcatttgatttcatccttgtccatgccaaatgccagtgcctaaacttcatgaattttgacgcttttgttgttttgcatcaaatatcaacattgattggtgtcacagacaagaacaattaacctgacatcataacgaaaatatatatttccaaaaaataaaaataaaaaaggccattaatatgcctttttgaagagtactttgtgtatacttggacccagcatatagattatttgattcttatactttatattcggaattcgcatagttaattcagctatcgtacgattaatgaaacatgcttttgtcccatgacattttgttggccaaatgctatatattaaatgagctgatgtaattgtcgatcttccctttaatctgaattaattagacctcaaaagaacaggtactcgccagttaacgaaactaatatatcatttctattttgagatgaccatcatgggaataggtttcagcacaaaagggctactagattctattatgtgaagtaagacatccataaaaatcatccattaattaccttaggcctatcaacctgggattttcagacacaacaatcgtcttcatattagaccctaatgtaatactaatagaattagccgggccgccttagaggctcagttagaaatggggggaaaaagttacgtctcagtaaatttgctgtgcattttatgctttaattatatatgcgtgtgagtttcgtatgcaggaaaatcaaagcgtgagaggacaaccgacctgaat

SEQ ID NO: 88344 - DNA, 176 bp, Citrus clementina; identical to SEQ ID NO: 79329
  Intron number 3 from transcript clementine0.9_032842m (loc us clementine0.9_032842m.g) derived from phytozome v7.0 (c hr-ID scaffold_151; pos 160022 to 160197 reverse strand)

SEQ ID NO: 88345 - DNA, 488 bp, Citrus clementina
  Intron number 3 from transcript clementine0.9_006758m (loc us clementine0.9_006758m.g) derived from phytozome v7.0 (c hr-ID scaffold_96; pos 123798 to 124285 reverse strand)
gtggtggacaggaatcacttgctgaatttccatttgctagctttttgcactaggtatgttcttggtttgtattcagttctcatcatgttatgttttccttttaaatttcttttcttgattaaaacttttagaaatatgttttagtatttgttcttatgatatatgcgcagaacattcatcccacttatccatgagaatccttgtctggtttgattttcaattgagacatttttgggaaccctgagcaggttccatatgctaataatctttgaggtaaggtgttgtaggatgccttgagaagctaaaaacctattacaaggaaaagctcttgcattgttttgtgcaatctgtgtgctagcaagtcatgtctctaataatttcatagtttgcttgattaggaattttttatcttgatatggattgtttattctagattccttggtgccactgtaggttgaaacagcaaaagattcagcaccgattttgtc

SEQ ID NO: 88346 - DNA, 613 bp, Citrus clementina
  Intron number 3 from transcript clementine0.9_032768m (loc us clementine0.9_032768m.g) derived from phytozome v7.0 (c hr-ID scaffold_11; pos 4783147 to 4783759)
atcaggttagttcatccctaactagaaaataattcaaatatagaaaatttcatgtaaattactactgaaactattatcttctcataaggaaacttagttctaagatattgaataaaagaatccattttaaagttacaacttgaaatatttaatgttttatattgaaatcattgctagtgacatccatgacttaataattttattggttcaaatgttgaagagaccttgtgacttcttgcatcactagcaaagactagcatgtgacaagttattggctgtgagttctctcaattgactccaagcattttcgataaagacacttgcatctatagtaaaatcaaatccatgagactgaaggatgcatgtggaagtcttacagccctaatttagatatttgcataggtttatttctattttaaccttaaatacagaagagaagaacactaacctaatatgaatcatcctaagacccaaaattgcataaattatccttatatatatccttgaagtaggcccaaattccatgattatgttggaggaactttttaattgaggtttcgctctttcttttcatttttctaactatgttacaggtttttggacatgtaggtat

SEQ ID NO: 88347 - DNA, 883 bp, Citrus clementina
  Intron number 4 from transcript clementine0.9_023721m (loc us clementine0.9_019617m.g) derived from phytozome v7.0 (c hr-ID scaffold_8; pos 2513430 to 2514312)
gtgggcccgatatccccttccacccgggaagagatgtaagttattattattcgctattatttaattaaatttgatttaatattttttctgttgtttcgaggatgaaatcgatttgtgaaattgatcttagtagcttgtttaattgttttgcttgatttatgtaaattaatgttgaaacatttatagctcatttactgataaaattggccttatttactgtttatttatttatttattttagtgagtgttactctgttttctggtctttggctttcattgttctgtgtaaaactttatttggtcgttgggtgaaaattgaaattaaaggaagcagtataggaatgtgcatgcgatacttttctagttttttttagcgactgcacttggcttggaagatgttgatgaatttgtggaaatttttagaaataagaaagttgtttcataacataaaacttgtggcttttgaaattgtgttgcgcaatcaaattgctacgattgtctatgcggactaccacaagttttgtgtgactctgtggatggccctccgtggttaagtggctgggtaatggatactgaagttattgcactgttgcttttttcactgtactttggttatcaaataaaatatcagccacccttttgatgtgacattacacacgtccaagtttacaacactgtttattataacattgtatattgaaattataacacttagctagtttttttccccttttagttgtgatttgctctatttatctataaaatacttatctgtatggtgtttttgattacaaatcttgtattgttgtgattttttgctactgacaatggccgtctcctattctcaggacaaggctgagccacctcaagaaggccggcttcc

SEQ ID NO: 88348 - DNA, 941 bp, Citrus clementina
  Intron number 2 from transcript clementine0.9_030643m (loc us clementine0.9_030643m.g) derived from phytozome v7.0 (c hr-ID scaffold_35; pos 1283408 to 1284348)
gtaacgcatacagactgtctctttctacacacgcacacacacatatcacatcaataattatgcataattgtgctctctaatctgtagctcttatcctttttgtttaaaataataataaaataaaaagattgttgtagtttagaaatattaccatgatggtcgatctataatttattaatcaaataattgcgattatagagcttacctaattattaaataaaaatatgtacatatggcagttaatattatgatatgcacgaggattagaactccgtcatgcatatggtaataaccctagttcaggaaatttgcttctcgtcttcaatcatcaccaataggaaaaaacaaataataataattacatgcttacatctaattctataaaacttagaaattatttattaatttgtaattttttaatttggaattaaatttttttcttttgaagggagaaattaattaacaagagataatttctcatctgatgattccaacaggtccattcaatttcgaagcaggaaagtcaaaaggtcgtatgccgattttgcatctcaatccttatagctggtctaaggtgatgaaacaatataatgttggcgatcattgaagtttatttatgtcctatttttcagctcatcgttgaattaaaatgaatcataaataataaactatacgtctaatataatataaagactttcggaccatagtcagacgttcggactagtcatatttgccaaaattttatatatttttattccataattagagcttgttttcccaatagttgtggctaaaaaaaagtacaacactaaacatactagactgcacaaatatatattctatagtagcatttatagcgacatttgtatttaacatatttgttaaaatgtttacttggtctttcaggtttctaacgtattatacttggactctcctgctgg

SEQ ID NO: 88349 - DNA, 725 bp, Citrus clementina
  Intron number 1 from transcript clementine0.9_005833m (loc us clementine0.9_005712m.g) derived from phytozome v7.0 (c hr-ID scaffold_92; pos 46656 to 47380)
caatcagtaagtaattaagcttccttctaattttcttcaacatattatgtacaatttcggttcatgatcatcagcttgtattttattttgattagttccaaaaattttccttgaactttgaagttgaattattagttttaagtgtttcatgaatgatctcttggtccagtcaacattaggccggggtttgtatatggggagggcaatgatgggaatgatttaagagtgtgtttaaagcaactaaagttaaaagttacttgttaattgcacttaattttctacttctttagtttggtttgaccagattcactaaatcatgctttattgtatgtaatcgaatccacttgcttttcttttcttgatttacttggagttgaagccaattcattgacgtcttgcattagtgaatgataagagatttctgatttttttaatacatggatcattgaaaatttatgtttatgctattgaatgtgtcattattctttacaattgctttccaagatacgcccgggatttctagtgattatggatctatcatttgatgaacactgagaaattctgcacttagtattttattttattttattttttggtttataagcacttagtgataatattggtagttctttaattggatgcttgaaagaattttcttttactgaaccgtagacatggttaaaagcacagactgcaagcttaaactgaaagaaacagagaggtgg

SEQ ID NO: 88350 - DNA, 359 bp, Citrus clementina
  Intron number 2 from transcript clementine0.9_009932m (loc us clementine0.9_009932m.g) derived from phytozome v7.0 (c hr-ID scaffold_8; pos 1828503 to 1828861)
ttaaagttgccacatttcctttaacaaagaaacaggtgagtgtttttgcttccacttcttcgaggaaaatgatatgggtaattaggctgtttcttttattacaagtcatacagtgttttaatttaagaaaattcaactatgctacttgatgaaaataaggttttgccatggaagtgacgttttgcaaatatttgccaccaattgtcattttttttttttggtctaagttgaaattgattgatgtattgtatttgtggattataacgccaatgtgaatgtaatataattggcttccttggtagtgttggtgttgttaggtgatgactttgattaatatgtaggtggaatcaacattagca

SEQ ID NO: 88351 - DNA, 693 bp, Citrus clementina
  Intron number 3 from transcript clementine0.9_023324m (loc us clementine0.9_019747m.g) derived from phytozome v7.0 (c hr-ID scaffold_25; pos 1768939 to 1769631)
agcttgacaaggctagcggtcttatcaaagtgagactcttctttttcctgtcttaaacctgccttgaactccaaaatagttaatatgctgctattgaaaattcaaatacgttccttctagtgacaagcttcttagttttatgattcaaatttattaagtgaagaagctgtaacgaattataagcacagcagttctaattaaagcctcagaagatcatgatgctgttgtttctaaattagtaaatgctcaataaattttgggcaccaaaagtgtgtaaagaaatgtttttgtctgtcatgtaacaactttttcctaataaacaatgttgtaaattttctatgtagatctctttaacgaggttacgcatttttaacctttatttttgcaaataatatattggtgaatggacatattgagatcatagaaatcgcggttaaatagtgaaatgatagcttgtcgtgtattgaattttgtcagttacataattgctatggaagtttatactatgattcccatgatatatatcacacttcatatagttccttttttcatggattactaatttgctggttttatttactaatttactggttttattatgttaccatatgaatctttttgcatgaagtaacaaatagttgggagttcttaataataggtagatcgtgttctctactcatctgtggtctatcc

SEQ ID NO: 88352 - DNA, 383 bp, Citrus clementina
  Intron number 2 from transcript clementine0.9_003767m (loc us clementine0.9_003531m.g) derived from phytozome v7.0 (c hr-ID scaffold_71; pos 175778 to 176160 reverse strand)
gagccgagacgacgttaaggctattgttctgacaggtctgttcctttcttttccttgaatatacaaatgcacttttttttagtcatttgattgaaattcccattaaaataagcatatgctcctgtaaacagtaacatttgattgaaaagtaaacatgttgacaaaaggaattgctctgtgattgtcgccggtcggccgtcggacggtgactttttgaataatattgttcaagtttttgaactttttcttttctaatttttcactttttattggaactgatgaaatgataaaagtgagaagctcgatctggttcttacggttgtgatttactgctggagaaaggtctctgataatgtgtttgtttctcttggtcactgaaggca

SEQ ID NO: 88353 - DNA, 582 bp, Citrus clementina
  Intron number 6 from transcript clementine0.9_018521m (loc us clementine0.9_016392m.g) derived from phytozome v7.0 (c hr-ID scaffold_195; pos 14114 to 14695 reverse strand)
aggagccgtagttacagtagaggccgcagcgacaggtatatcatcccttatttgtaatgagattattctccttttatatagatcaacaagtgatgaaacagttgcagtttgcttattcttttcttttgagtgttgaatttacaggaggtcccaccacaacaaaagccagctgaaaaatttagcttttctaagctagtgtgctactgattcttcaagtcttgaatttttatactgctttttgtgtttttccaatttaaatatgattaaaaataccctatgcatggtaaaacttgaagttgtgagctcccttttttgaatttttgttactgaaaaatttagcttttctaagctagtgtgctactgattcttcaagtcttgaatttttatactgctttttgtgtttttccaatttaattatgattaaaaataccctatgcatggtaaaacttggaagttgtgagctctcttttttgaatttttgttactgtttactgtttcttgtttaattttatttatttactcattgtatcaatttgcaatttttcagccgatcacgatcgcctgtcaagagagataggagtg

SEQ ID NO: 88354 - DNA, 470 bp, Citrus clementina
  Intron number 1 from transcript clementine0.9_018521m (loc us clementine0.9_016392m.g) derived from phytozome v7.0 (c hr-ID scaffold_195; pos 16334 to 16803 reverse strand)
gggtttcttcttcttaactctctcgccctcagcaggtgcgcctctctctctctctctctctctctctctctctctctctcattcgttttaactacagttcgttcggtgctatacccaatcttctttgatcgattatctacttttattacttgatttgtttcaagattaaatatttaattatttcttcatgtttttttcggttttcagggttcgttaacagctatatgtgaaattgtttacgaggatttaattgagtctataaaagctgattgactgtgaaattatttgtacctttaattattctagaattcctgaatttttagatcagcatatgaacctatctattaggtgatataatacttgtttgagggcgttattaaattgtgaaagtggctgtgtttgtgtttgtttttgtgtgaattggctaggtagtaattgagtatgatttgatataatttaatgcagaaaaa

SEQ ID NO: 88355 - DNA, 326 bp, Citrus clementina; identical to SEQ ID NO: 80789
  Intron number 2 from transcript clementine0.9_008028m (loc us clementine0.9_008028m.g) derived from phytozome v7.0 (c hr-ID scaffold_12; pos 4745743 to 4746068)

SEQ ID NO: 88356 - DNA, 858 bp, Citrus clementina
  Intron number 1 from transcript clementine0.9_003260m (loc us clementine0.9_003260m.g) derived from phytozome v7.0 (c hr-ID scaffold_8; pos 1548132 to 1548989)
aacggttcgttaacaaaggtgagtttcatttttctatttaacaaattttaacttaagtttcttctcctatttgatttaatcgcttgattttggtaatttgatttatgtgctaaatgtttatagatgaggtgattgttgagttgtcgcttttaatctaattatgccaaaacagctgattgttcaaaatttaattcgatcaaatatatgctagttttatttatttattttttttaatggcggtttttgacatacgaaatgagtttgaattcatgggctatgaataaaacctgggaaaatcctagctatgttatgaaagaatttttcgaagttattaaatattgagaaatatgatgagctaaaagaattattaatcaattctcggttttcctgatacatattctggttatgttaatgctaaaattcagctaccaaacagtctcataactcctactataaggaaacagccggcgcgggcagtagaacattctttttatgtgtatattcagacttaggattatgaaacccttgtgggctttcatgtatgatgtatatacatgtttcagatggtgaaatttggattgtaaattggaagttgattaaccatggcaaagtgcctagaagttgatgtagccgccctttggctcaatgtgttgtcataatgctttcctcaagtaaaaagattctagcaaagctactacaggcaggatggcaaattgaaagagtttggaggacttgaatcttgcctgctcaatatctcgttcttgttgttttttatttgtatttccttttgcagaatcttttagagtttttttttttttttccatgatgagtgtttccctacatacaggctgattgtgg

SEQ ID NO: 88357 - DNA, 737 bp, Citrus clementina
  Intron number 2 from transcript clementine0.9_018555m (loc us clementine0.9_015470m.g) derived from phytozome v7.0 (c hr-ID scaffold_61; pos 62119 to 62855)
tcgccttcgctaccatccctccttctgtcaatcaggtgagacttatcactataattattgtttttatttatgaattaggcattggataataacgatgacatattaggagttgatgattattgttgttaggtggagatgaaccctgcctggcaacagagaaagctcgtagaattttgcaagtccaaaagtattattgttaccgcattctctcctttgggagccgtcgggtccagctggggcacgaatcaagttatgaacaatgaagcactgaagcagattgccgccgctcatggcaaaactgtggcccaggttcctttacgtagttttttttccttttctttaaacagtctatgagcctaacacaatccaaaaggtagtatatcttggtcacatgtagaaaatctatgagcctaattccatccaaaagttagcttattccatcacgtgtaatagaagtttatggtactaacttaattcaaaagtcaagttgaaaagatagctcaagaattgagggtcttttaacatccccattaaaagatcccatcacataacaagccgatcttatttactggtcgtcatcaggtggtaaggtagcgtgggctctaatattaaaacttacgagcgtaacttaatcataaacctacgtcaaagattgaagattgttcaaattttatgtactaagtttaatatcaaggatattttccctaaccgtatttacgttggcaggtttgtcttcg

SEQ ID NO: 88358 - DNA, 635 bp, Citrus clementina
  Intron number 1 from transcript clementine0.9_008382m (loc us clementine0.9_008382m.g) derived from phytozome v7.0 (c hr-ID scaffold_8; pos 901959 to 902593 reverse strand)
ttcgagtaattcaaatttcagaaaattgatttttaattattttattttattttaattttaggaatggttccctgtaattgattttgatacttggcctgtttaagtgctttagctagaaatagacccaaccctcgaaaaaagaaaagaaaagaatgattatatttgatatggaagagctggaatcaccctttcaccctcttgattttgttaacttagacttctaatggtgattttcagatgggtcgagtttgttaacaccctgctttcattagagctaggtcactttgctttaaagtggaacttcttctagctagataggattatgtcaacggttaattaaaccaaaatgttagttattattcaatgattatggaatttggtttcttgttgcaagcatgtaaacaattgatcctatcatattctcttttataattgtctatgctgtgttcagttagagttttgaagaatattagttggtgggtatgagttttagatgaggaaaatgttgtattgtatgatttattatttattaaattttgttgctttgtagtgcttgacctagatatggttttgattttagtttgttttaatgtattgttgttgggggcatatttggatgcagaccaaagcagact

SEQ ID NO: 88359 - DNA, 869 bp, Citrus clementina
  Intron number 1 from transcript clementine0.9_006581m (loc us clementine0.9_005012m.g) derived from phytozome v7.0 (c hr-ID scaffold_11; pos 3869916 to 3870784 reverse strand)
acggaagtaagctgtttcaggtaccggctcttggttcagttttctgtttagattcttaaaaaaattatatattttgtagttttgggatgaaaataatgtgctgagattaaaacttattaagtagttttattgtgatatttaggtgaaggttgtggatatagggcttaattgtagttttggagattggaaaattatcaaggttgcttaattgctacatttcctggttgagattgtgtgcagttgttgtgtgttttgttgttggatagttggaatgaaagagcataaattaaaatttaaaaccgtatttaacgatctttagccattttataatcatctagtttcctgttgttatgtatgaagtataaaatggtgaagctgaatggagtaccgaactgcaactagtttggaaccatattgaacttaaaattgactataattttgattctgttttgtcccggggataaatgtggttctgatatgactgattcttcttcactgcctttctggagtatgcatgttgcttcagttctatctcattcaaatatgaaagcagtgctgcaaattttcaaaactttagcttatgcttttcaccttcttttatcttaaaatatcatgtgagaaagttatcattgttctacttgttcatttgtgtaaatttgtccatgttaactttcactagtactcttgtcatcagaacttcaaaaacttatatttttatccctttaatgtaccccactttcattttctgaattcctttgtgcttcaaattctttcattctgttcgcaaagcactctataagttactgtagctgagcgttgattccaattttatagtgtttgcaaagggataagattgcagcacagtttca

SEQ ID NO: 88360 - DNA, 880 bp, Citrus clementina; identical to SEQ ID NO: 78379
  Intron number 3 from transcript clementine0.9_022304m (loc us clementine0.9_022204m.g) derived from phytozome v7.0 (c hr-ID scaffold_11; pos 3874628 to 3875507 reverse strand)

SEQ ID NO: 88361 - DNA, 665 bp, Citrus clementina
  Intron number 2 from transcript clementine0.9_005604m (loc us clementine0.9_005173m.g) derived from phytozome v7.0 (c hr-ID scaffold_56; pos 686842 to 687506)
agacaccaatcaaaggatttcaggttcccttcttcacttctttgtttgtatcttattagcttgtggccgtacacacaattcatgcatgtgccaccaaatcttgcgttatcctcgttccaacaatttgcttctcataagattttgaggtccaaactacgcagaatgagatatggtgcattgttgtggtgctgactgataatttgggcttttgttccattgcagtctgggcctaagttttgaaatgcacccttttatttattcacgcattggaagttttaacattttgacaaagaaaaggtgtatctagagatatttgtgatttgcgtatcgcagcatccgatcaactaaaatcctcctcgggagtgctccatttttgggcccaaaatcaaaagttcggcccatccaaaagaaaccaaaattttttcttcagaatttggctaccgttaaggggttaggggtactgggtagtatataatatgtacaagttttaaatctcgttcttagatcgattacagaaataataataaaaataataattcttagactaaaatctaagattatgaatctaaatatgttttacttctaggatacatgttaacattgtttattgagcaaagtctaagatgatgatgttgctattgcacctcaattgtagataattgtga

SEQ ID NO: 88362 - DNA, 844 bp, Citrus clementina
  Intron number 2 from transcript clementine0.9_001834m (loc us clementine0.9_001834m.g) derived from phytozome v7.0 (c hr-ID scaffold_16; pos 270309 to 271152 reverse strand)
gcggtaagtttcttcttcttctttttcttcttttcaatttttttccctttgaaaacccagatgcaattcttttttcttgaaattttcaaaagaatttttgtggacacaatatgctgtcttgtaaacgtgtatcgggttgtgttttcgcttgatttttgaagttttacaaatactgcggctaaagtgttcgaaaaaaaaaacaaaaaaaaatcactttactgttggcggctaacgtgcaccaaccactcattcacctacccatttatatttggtatccaaaaccttcaaggtgtttgatatatttcaaaatgttcgttaaatgtggtaggtcctatgtcgttgcctctcatatgttggttactagcataaatcaaggctctgttgcgtgtcatattggaaaatgtttgaagtactagaagatagataaccgtgacttatgtgtctccttgtttgttttaatgctctgttgacttataactgttcagggagtaatgagtttactgttttccttcttttagcattatcttgaagtcagattagtttccaaaagcaattctgtttgaccaccagattagattcttggcagctaacatcgtcattatggtcaagtcagtgagattatgtctttcctgttttgtatcattttttaagctgggttctattcaaagaatcattttgtcgggtccgctagaaaaatggtgacaactctcacaggaaagatggttgttcattgattgatttgttcaatctttgtgatcataaatgttaatacaagccaaaatgatcattgttttgacgcctttatgttgggttattgttccagtgccccctgttgtggtgcgca

SEQ ID NO: 88363 - DNA, 689 bp, Citrus clementina; identical to SEQ ID NO: 80321
  Intron number 1 from transcript clementine0.9_024527m (loc us clementine0.9_024527m.g) derived from phytozome v7.0 (c hr-ID scaffold_12; pos 4990608 to 4991296 reverse strand)

SEQ ID NO: 88364 - DNA, 457 bp, Citrus clementina
  Intron number 1 from transcript clementine0.9_025991m (loc us clementine0.9_023205m.g) derived from phytozome v7.0 (c hr-ID scaffold_16; pos 357014 to 357470 reverse strand)
cctaacaccgtcgatacaacatccgttactcaaaggtaatttttttttcccttcagttttcctttttcttttcttgaattttccttttggttgtcgagaaaatttgtgaatggaaaataacagtcttaagtcttgtgtttggttatcagatgagtagttaattagtcaacaaagcttaggaaggataaaagaagaaaattatggtttatgaattctttaattatttatgtgtttattttgactgagtgaaatagtggtagcagtggcactatcaaactttaattgtattaattttgcgaaaattccggaaactgaaaagattggaacttttgaattattttggtaagatttgttggagtacttgtaaacttttagatgagctttttgtgatatatttttcatgtgtaatttcaattatatggttttttatggttttttcaggcttcagaaggaattg

SEQ ID NO: 88365 - DNA, 544 bp, Citrus clementina
  Intron number 1 from transcript clementine0.9_001206m (loc us clementine0.9_001206m.g) derived from phytozome v7.0 (c hr-ID scaffold_11; pos 4013114 to 4013657 reverse strand)
cgatacattttgcaatctccagcttctctttaaccgtaagccctactacacaacgacgccgtttctgttccctgtctatttctcttcaattccttcgttttctttttttattttaattttttttgttattaccatttcagttatcttttttttttttttgccctttatattcagtttctggagattttaagttattgaaacagaagcttgttcgttattgtgtatacggagatttgctaaaaaaggcatatcttttgagtttaattttcttgctttatttattatacttattgattaataaattaataatatttcttttgtttggtcgctgagaaaataaaagagaaaatcaatcacttagttgtgtgttatgcaagtaattgttgtcttattattctcctcgtgattttacgttttgttgaatttttattttatttattgattagggttagcattagggtttgaattttctgctcatcgtagcttttaatttaaatgtggtttatttatttatttgtttgtttgataaattgtagtatcatat

SEQ ID NO: 88366 - DNA, 687 bp, Citrus clementina
  Intron number 2 from transcript clementine0.9_019576m (loc us clementine0.9_019576m.g) derived from phytozome v7.0 (c hr-ID scaffold_12; pos 3138201 to 3138887)
agcaaagcgtgaacaatactctcctgaattcaaaggtacaatttactgctttgtgaataatcatagccttttgagacgtgctgtgcaggtgcctgttatttcattttagattctgatatggatcatgattatattcgttgaattttatccatcgatagattactcgtacccatggatcttgttatttttaatgtgttaaatcgaagttctgcgtttgatgttaacaaaatggagctggtcaggtcagctgaatgcatgttgaatttaaactagacaaataatcgtattatataaaatgagaaatttgtaattgtgggtagattaacggctactgtgtcatgttattagctgttgaactgaaagcatgaaagctttgatgagtcataaatctaaaagtttggaatcatttttttttcatatcttctttttaaaggtagagggtggataaagcttgaattaattttttaacccccatctccccaagattcgaacttaggtggccagccaaataaatttgcttgaaaatcactaggtcaattttagtttaagtgattagaatcatgggtttttggattactgaaaattttggggaataaaaattgaactatgctggtctgcttttaggtggatacaaagagagaagttcagtttataattttttatgctgttttgacagaaataaaccct

SEQ ID NO: 88367 - DNA, 481 bp, Citrus clementina
  Intron number 1 from transcript clementine0.9_002932m (loc us clementine0.9_002932m.g) derived from phytozome v7.0 (c hr-ID scaffold_121; pos 326695 to 327175)
gctcggttcctgcgacgcaaagtaagtttctcgatttttctttggtttaattttgattcagatcgaacgctatcaatttgtttttttccccgcgcggggaggggggggggggttgggggttgtggggccttgtcaaaaatatttgaaattatgtttcctataaagatttatgtagtgttttgatttttttccttatttttgaaaaattgtgcttttcttagtgggtttccttgtgactgaatgcttcagttttggttctccattaagttgcttaggcccaatagtttgagaagatttttgtttcgactgtgtatttacaaatggaaattatagccagtatttgagtataatcaatattttgtagctttaggacttgtgagagataatttatggatttttagtattggaaaggataagaagcaatttgagtctttcttgactggtctagttggtctgcctttgtttttaatggcagaagaag

SEQ ID NO: 88368 - DNA, 880 bp, Citrus clementina
  Intron number 1 from transcript clementine0.9_026072m (loc us clementine0.9_025724m.g) derived from phytozome v7.0 (c hr-ID scaffold_64; pos 1206095 to 1206974 reverse strand)
gaaaaactcttactttgctatagttattgagactggtaactttcgttttttttttttttggtcttcttttttgactttttttatttagcttctttttgcgttgagctttctttctgcagatccagggtggtaactttgttagagagtctttcagttttgatctttattgaagttctttactaatgtgtgtgtgtgagagttaaaaaatttttcctgtggaaaattgttgcttgatttggcaatccaatagttggatgagaaacaagcaaatgaatgcttggcaacttagcatcaagactatgttttcaaccatataaactgaaaagagatcctttataatctatggtgatatttttgcttctcttgggaggttttagtttatgtccccgctttatgtttttcattgattgatttatattacaggtggtcgtccggcttaaccccaccatcttggtgttttgaaaaaagaaaaagagaaatctatgggtttgagaaaaattatgattaaggtcaagtatgcacataaaaatagatttaagtgattcatcagtaaatgagtgaaattgtgaacattagaggtcagaaattttgatatattgactaattttttgtttcttttctttttttttgggttgtctttctttcttttgatgcaataatgtaagaattttgatttagtgctgagttttatgctgttgttacagtttgcgcgtaaaagtagatttcagtgattcataagtaaatgagtgaaattttgaacattagaggtcagaaaatttgatattttggctaatttttttgtttcacaatttttttctttttggctgtctttcttcttttggtgcaataatgcaagaatttcgatttcgtgctgagtttt

SEQ ID NO: 88369 - DNA, 916 bp, Citrus clementina
  Intron number 1 from transcript clementine0.9_012916m (loc us clementine0.9_012916m.g) derived from phytozome v7.0 (c hr-ID scaffold_64; pos 360678 to 361593)
tttgattaaggccttctttgaatctctttgtcaaggtaataataattactctccttgtgttttggtttatcttttcttattaatatttagtttaatgattgatttggttgccatgatgcgatgttttgtcgattaatttgtgaattagggtttgatcttttgttgttcatcttcatatggtgatatgttaattattttcttttgataagctgtagatagggatcgcttatttgtcgtttgaattgataattatggccaggtgacacttaataatcagctttgtgggttttatttaggttttgattggtggagttttagtgctctttctgagataatcttaaaattttaggtgtttaatatgggcatactatgtaattctataagatttgtgaggtaaaaaaagatcaactcaagtctggtgtttaatatggttctgtctttaaaaaaaaaaaaggtgaaattgtgaaatcttttgttatggtggttgattgttcttgaaaatagcatttcgtccttaaaaaaaaaaaggcaaaattgcgaaatctttcgttatggtggttgatagttcttgaaaatagcatttcgtccttaaaaaaacaaaagtgaaatcgttaaatctttcattatggtggttgattgttcttgaaaatagcatttcgtccttttacctttgtccatttatagtcaatttttgctctgagaaacctgcacattgatgggaagcataaagtgtctttgaattatgaagtgacggcatcttcttcaactcagtgttattggttatgctagatgttgttatatatttgcctcttttgaatcgtaaatagagtgtacatgtatagtatttagttttgcttgtttcatttggttgttctgtatgaatatatactgatgtggtgttttttttatccaatag

SEQ ID NO: 88370 - DNA, 720 bp, Citrus clementina
  Intron number 1 from transcript clementine0.9_028475m (loc us clementine0.9_028475m.g) derived from phytozome v7.0 (c hr-ID scaffold_8; pos 4421064 to 4421783)
ctagaagggtatagtaaaattataataaattggggtgtaaatgttttttttaaaacattaggggtttttgttcctttgcctaaacgttgggggtgtgtttgtcattttcccttaattatttgacaattatttataactgaatttcttctttaaaattctcatttctacttttattttacttaaagcataaacttgaacaaatgtgatcttagggttcttactcatggaatatgtggatttagtttgaaggttttattaaatcatcatggttgtagtatgaatttaaaatttcaattattcatatagttttaacaagaaaattcctatcaacaataaagaaaaccaaagtaaagtaaagaaaacaggagtaaagctacatttcatacaactcaaaataacagatcaaagaaaatataggtaaataaaagattcaagaggcttgtaatgatcaacataaagataaaccagtcgacttaattatttaatattctaagtataaccacaaagaataaaatcaatgtaaagataaatgagtcgacttgaattttaatgttctaattataatcataaataataaccatctattaattttttgacagtcatttataattaaatttataccattgtaaaacagtgataaatgcaatttacaacattgtagactcttttcaaatttaaattccagacctgaagctgattatatatatatatagacatact

SEQ ID NO: 88371 - DNA, 740 bp, Citrus clementina
  Intron number 1 from transcript clementine0.9_016880m (loc us clementine0.9_009579m.g) derived from phytozome v7.0 (c hr-ID scaffold_16; pos 2949374 to 2950113 reverse strand)
atcgcttcggtgtcgagctccttcacccacctaaggtgccgtcatttctctcgtttgattgtttattccttgtttttgttttattaggctttgcgtttaaaggttttattttcgttaattgattcttatgctcaatatttgctaatctggctctatggtggtgggatgggaaattgattcatccaaacgatggactgtattgtatgtactattgatggagatgatagttcattacgtgaaatgaccaatttgacttccagatgctccaagggtcattttggttacctgctgaggatactctgacattagttgatgagaaaatgagtgtagaaaagactcaaatccacttctgtagaaattggtgtgcttcttgagaaactgatttgtgaatttgtttgtgttaatttcagaatgtgattgattgacagttttatttagtggaattttggagggaaacaactaacttccccttgaattatgctctgtttgcttgggataggatctcttcagccattggatgaggattcgcttggatcctaattcatgatgattaaattttcttagtttttgtcaatggctcaaactgattttaagattaaatggctatttttctatataaggacatgtggtgagggaggatttgctggtacaaatctgttcacctacaattttttatttctgtgttgttcatgtttgtttgaattttcttatgctcaggtggtgcatctttatagacggaa

SEQ ID NO: 88372 - DNA, 405 bp, Citrus clementina
  Intron number 1 from transcript clementine0.9_007181m (loc us clementine0.9_007181m.g) derived from phytozome v7.0 (c hr-ID scaffold_12; pos 2330804 to 2331208)
tagctttgaaataagattgttaaaacttgaaaaaggtgctttctctcccccccccccctttacgctcttctctttttcactattatcagcatttttgcgtttattatttagctgtctgtatttgtttcactcagaaaacaaaaccctcttttgctttagtggttacactttcattttcacgttcacttcacttgttattattattgttctctcctccgtctcagtttcagacccagttgtggtgggtactggattttcattttcttgcgggttgtattttctttgttttcttttcgccaagtaacttcatgatctgggttaccctcagatttgagttttagttcttagcttgtgagcttttcttttgttttgtagctaaccttttagagagagaaaagcaagatc

SEQ ID NO: 88373 - DNA, 516 bp, Citrus clementina
  Intron number 1 from transcript clementine0.9_012442m (loc us clementine0.9_005955m.g) derived from phytozome v7.0 (c hr-ID scaffold_39; pos 945609 to 946124)
acacttctacctccaaggtaaaggtaataaataaataaataaataactttctttaaaatctttttcaatgttgtttagtattaattatttgttttttgcgtacttggcttagttatgcttgatctgctaacaagttatagtgcttgcatgctgcagtgaatcagcttttaacaagtttgtggccttaaatcttctgggtagtcaagtttagacttttctttaattcatacctggttttcttttcttatcattcttgaagctgtgtttggtggcctggaaatctatgggcaagaaggaaattaagattctgataactgtctatttatttataactttataagtatgattttctgttgaattgggcctgagaatttgatttgatttgattctgctattttttggagctttcttttcctcttctaattcttttgcaaccaaataaatggtaaagacttaaatctttgctgaagtatttgctctgcttgatcatgacaggggaaaaaaagttatctgggt

SEQ ID NO: 88374 - DNA, 586 bp, Citrus clementina
  Intron number 1 from transcript clementine0.9_005709m (loc us clementine0.9_005709m.g) derived from phytozome v7.0 (c hr-ID scaffold_61; pos 36984 to 37569)
tcaccaatagattgccttctttgcccctttgggtggtgagtgcttgccttgcctcgtctctagttttaaagcctatttgtctttctttatgctatgttatgaaggttcagaatcatgtatcgagagaagattgagaattctgatatttgagaactttttcttttttaaatcctttcttgtggttgataaacataattaattgataggtagtggcagaagcttattgataaacatattatatgaattgagtcattatgcttgagaggttattcctaatctctaattcagatcaatgagtggagcaattaattattgaagaagaagaagcatatgaattgtccatgccattatatcattgggtaatttctttgatttgttattagctattgagatgtcgtttcagtacctaaagcttgtgaatatttggccggatggtcaaatgctcgaatacttgtactgggaggagctttgcagtttttgtcaaccatttcatgcaggatcatgattttttttttttaatttaatttaattaaattaattttttttttttttttgcagctttgcattgctatatttgttggaacaa

SEQ ID NO: 88375 - DNA, 999 bp, Citrus clementina
  Intron number 2 from transcript clementine0.9_014170m (loc us clementine0.9_014170m.g) derived from phytozome v7.0 (c hr-ID scaffold_64; pos 415681 to 416679)
gcgcgtggctcggtggacagctcttctctgccgtataataaattgcaatttttctttgttatcaatcataatgcttgttgttaacaataaacgttaatttttttatttggtatgttttgtcaaataatcataaatatttatttaatatcataattttttaaaattttttagttgttgtttgtttattttttaaataatatttttaagattaattaaattttttctttttattagtaaaaatttaaattttgagtttttgttctggaggttaaaatatttttaaaaaatgttatatatttaaatttttttatttatttcataattttattttatttcttttcgtaacatgattgtaaaaaatttatttattaaaataaagttataatttttaataaaaattatttttattaacaatcaaataattaaatttttttaataaaaacttagaaaaattctactaccaaaaattttatttaagtaagctttatagttctgtatatggcttatgataataattaattatatgctaaaagctctgttaaagatatctccaaaaagctctgttaaggacatcagttcgtgtcaaaaagagacttgctggagggtggtgggtctgatggtccctcttgtcattattaaggaaataattaagtttatttttatttatctaattattggaaattccgatttggaatcgagttatttcttcactttaatattgagatgagtgaaatgggacaatatcttggttaaatgaggagttttgtaatttgggtcacctgtaaagcattagtatcatatttggactcttaatattctatttatgtctcatacaaatcaaacctttatgatttgattttatcacttcattagaattgctgccacacaacagagtatccgagatttcgtacaaaacaatttaggtctaaattggagttaattgaattgcctgtaatttgaacaggttgtgcgcaaaccagcccacatcttccttgacga

SEQ ID NO: 88376 - DNA, 637 bp, Citrus clementina
  Intron number 1 from transcript clementine0.9_006704m (loc us clementine0.9_006704m.g) derived from phytozome v7.0 (c hr-ID scaffold_91; pos 240805 to 241441)
acacaaggagctgctccagaacttcactgaggctggtatataaatttgttgagaaattgtgtataaagaatttaaattttgtttaattacctagtaatatttatgcagtgttttggaatttggatgcttgttttttattgactgagaatgttgtggaatgtttacttggctgttaactatgcaatttttatggttttatcttttattatagtaaattgtcgacaatgtgaacaagaatacatgaagtcagctttttgtgaattgaatactctgaagtatacagatattcgcttcaatattcaattttctctgtaaaatgagttttaagttgttttcagcgtctgaatatttggtaggttaagagaagtgttgaatggaaaaaagattgactttggaaggtgaactttgttattacttgaaactgttattttcttttttcttgctagcaatacatggtatgtatttgtagaattaaaatcccattttgtttttggttttagagttgaaattttgctgtgtattattcaacacatattgacttataattctatcagtagttagtggcttagcagtgagatgaagagagattttccttttgaatgtcttcacagagactccggacgaagcttttaagtgg

SEQ ID NO: 88377 - DNA, 604 bp, Citrus clementina
  Intron number 1 from transcript clementine0.9_023266m (loc us clementine0.9_023266m.g) derived from phytozome v7.0 (c hr-ID scaffold_88; pos 214281 to 214884 reverse strand)
gatccgccaggtccttactcagggcgtcagtcttggttcgccccttaaaccccctttcatcttctctcgtaaaactcttgatttgtgccttaaaatttgatttttaatattgtgttaatggttggttaaatgggtatttaaaaggaatacgtattgtatttgttaagtgtaatgcgtcaagttttgttctttgtgataattatgggatttgtgtatcgttttcgatgtgggattttctttttcgtgcccaaatcctgtactctgcacgttgaggtgggaatcattaggatttgaaagcatgccttttgtggatttttattatgttatttgattcgattcttggaggtactgtattgcaataaagctgctgaaaaaaaaaataacttttttgtttctaatttttttgaactgtgaaaataatttggttaccgtgtcattatgggtcttggaatgccggttgctccagttccattagaaaattatacccacttctgcaattttgattctgaatgacttgtcagaaacctttaattgaccccaaagaaaagggaagaggagtagctaaaatatatttttatgagactaatttaattttgtttcaggt

SEQ ID NO: 88378 - DNA, 465 bp, Citrus clementina
  Intron number 2 from transcript clementine0.9_025197m (loc us clementine0.9_025197m.g) derived from phytozome v7.0 (c hr-ID scaffold_11; pos 962839 to 963303)
cttcttctcagtaagtacatcctgtggttccaatttcccaatagttcatcaaataactatgtttgttatctttatcatgtaatattagaacagaattcttaattccattttcaattctctggtggtttatgcaattacagctatgtgattatggcatttagagttcaatacatacaccgggcatattaaaattggctactctgtttgatgagacctgttttgggtttaaaatctacattagccttagatatgcttaaaccattaagattggtttttaacaactaataggatgcctctgagtccctgacaataatgttgtttaactattactgttttttcggttattttagttagggtttcctttgttttgttattttattcttatcatctttaattttgagagggacaaaatatctaataggatgcttctgacaaaaagaacgttttcttgttgctatcagggaa

SEQ ID NO: 88379 - DNA, 874 bp, Citrus clementina
  Intron number 1 from transcript clementine0.9_027868m (loc us clementine0.9_027868m.g) derived from phytozome v7.0 (c hr-ID scaffold_13; pos 4148978 to 4149851 reverse strand)
actagtgggggctcaagcccccactggtaaaaaaaaaattttaaaataaaagaaaaaaatattttaattttctaattagccccattaaatttattaaaatagttattataaaatataaaccccataaaatttaaactttgacttttaagaaatataaaaatatatattttaattaaaaataatgatagcctactactcaaaatattttctattctaagaaatatgattaatttttccgatttatataataatagtagagcaaacattttcagtaataaaactcataaaaaattatctttagaatcggatgggataagtgatagtttggttgtttatataagaaacaataaatttattaatattaataatgagtctattgcataatatttttaaaatataaaaatacgtagagattaattataaatattttacatattcaaaattttaattttttatattttattattatctaatttagcccccgataaattatttttctagatccgccattggttacctcatcatattttctttataattagggaggtgaaggatttatgtatttactctaagttgttaccattccatattttttttataaaattgttaatgaattaaattcttcaagagtttatggtaagtcattcagtagctttatacacctgtattaaatatggtaagacctagttacttaaaacaaataaattctttaccttaaactaattaattttacgcgtctttcctcttataaattcatcataaaacgatcatatcaaagcccaaaaaaatcattgttcatagaaaaagaaataagcccatcacattgattttccaaatggcagccaagaaaaccagagggagacaaaagattgaa

SEQ ID NO: 88380 - DNA, 583 bp, Citrus clementina
  Intron number 1 from transcript clementine0.9_019069m (loc us clementine0.9_019069m.g) derived from phytozome v7.0 (c hr-ID scaffold_64; pos 1209590 to 1210172)
ttcaaccgttaccatcgcgccggccgccggagactgtgagttgttgacttcgtttttttttttataatagttcattaatttttttccttaattaaattgtttgaattgtgattcgtactttaatttaatagataataatttaattttgcagcagctttttttttttcaaattgtcttgactctgctttcttaatccaccattacttcaaatgatctgagctattagtgtatttagggaaaaatttctgcagctgttagtgcatttatggtgctgtactgctgttcttagaattgatattacttatggatattttccttttggtaatttctgtgctgtaaattgaattatggaagaatgcttctgcttttacagatttcaaatgaaaaaactatggtgctgttacagggttcaaatgaattgaatcaatctacctagaggcaacaaaaattatagtgctgaaatgaattaaaaaaatatagcttacaccttaatgattaaatcgatctggaaaagcaatgtgattacccaagtaatttttctgaatatttctgagatatatttccattttgtcagggattggtg

SEQ ID NO: 88381 - DNA, 493 bp, Citrus clementina
  Intron number 3 from transcript clementine0.9_004297m (loc us clementine0.9_004280m.g) derived from phytozome v7.0 (c hr-ID scaffold_71; pos 611471 to 611963)
aggaggaaggaagtgcaagtccacttcctgagaaggtactattttgtcgtgaacacttgtagtaaaattagtagatagaaaaataaacaacttctattaccattttctaatatcaaagtcacatcagacttagcctgaatcaatatttttcatttttatcgactattgactttgtagttgcttctttctttaaccttgttaatacattcttcttaaccatgacaagcagtcaaactaatgtgttttttggttgtttatgggaaaacaagccaagcatttgtaagatacggtcaagttttaaaatggttaggctttacatgttgtttttactgaaaacgtttctgcttgttacaatgcattgttagctttggcagcctatgtgatgtctttctggttcatgcgttaaggcaatacttggaagtagtttatttttaatttattgtgtgtttcctcttcagatacagcttgggaactcccccttgtacaaggtaga

SEQ ID NO: 88382 - DNA, 898 bp, Citrus clementina
  Intron number 2 from transcript clementine0.9_015056m (loc us clementine0.9_015056m.g) derived from phytozome v7.0 (c hr-ID scaffold_12; pos 1816561 to 1817458)
gtattggtaacccatcagttgcaggtaagtgaagaggaatttgacttgtaatttagatataaacggttagggacatatgagaaaaataatttatatgatgattattcatggtaaattaggcattttccgtgcagctgttgggtgattgtccaaattccattaatcctatgtgtatgggaaaatttttgtggatttttttttaaaaatatgctgatgtaaacaattgaagaatttaacttatagtttgtcttgctttaaacaatggtggattagtgactcagttttgcatggattaggatagagtcaatagatgtcactatttggctcttgggaaatcacttgaatctgttttctgtccctttaaattttaaagtgatatttattgttttgcaaaccattagtacattttatgttttggtgatgttgtatattttcttgcttttttcgtttgaaagatatattagtttaagttgaacatgttgtagtgaccaagacttgatattcttttagatgtacatcacctttctaaacatcttggatattcgctctgctcacgacttaaggtttagttatcactcagggaaatatgcagacttttgaatgtttttgttttatctgtgtgtgtctgagtaacaactttatagttttccactttagtgttctggttatatattggacactttttgtttatttccatccatgagctgttagttcattcctgtgagttgatgacaagttgtcttgaatgtttccacgtttgacactttctttctgtgtggcgtggattacctactgaaaatttgcattcgttcaagttacttctagaagttggatgttaagtttcttttgtatagcgaaacctgtagaactttgttgtttattgcatttcagggttcat

SEQ ID NO: 88383 - DNA, 962 bp, Citrus clementina
  Intron number 1 from transcript clementine0.9_012359m (loc us clementine0.9_006833m.g) derived from phytozome v7.0 (c hr-ID scaffold_79; pos 518158 to 519119 reverse strand)
gtggacaaggtacaatcttttagttgttttgctttgcatcttcactttgtattctgggttctaattaatatgttttttttttcttgtgtctttgattgtgaagattggagtttttatgagtgaaaagtgtcatgattcttacattctcttgtagtttgtttcgattctttttttttttacttttttaaccatgttaatagttaatgcgctctatggccatgggcctatggctatcgctggaccttcaccattaaattcgtacctaacctataatgcagtgatgtgggaagtttacaactttacattagcttctgatctttctattatagcttctggttcatcgccattgtagggctgctacttttttcactttcgtttgtttattctgtcatttattgctcttgttacgaggctttaataatggtcataccgtcatttgctttattcacatgttctgagaaggaccatggtttgctttcatctttggccttctttgctgttgtgattagtcaacaccgcgttgtctagttaacattccaaaatttattctccataacgacctctcatccttttatggtctgtattttcccatcaatctccctcatttgttttgttaaattcaatgagttaattcatttttacaaacatcaatttaattctttcggtggaatctaggcacttaaaggtttcattgtgaagtgatagtgatttggaatgatcttaaattgcctcaattacttgttatcttgcctcaagctttattacttagattcttctctgttctagttttgtcattgtaactaaagaaattatggtcaggtactagttgtttgttcaagaagtataattttaataattattatgtaaaatttgtgggttaattgtaacacatctaactctttcttttttcttcacggctatttgcagaaaatcattacttcatactcctgcagattaagcaa

SEQ ID NO: 88384 - DNA, 505 bp, Citrus clementina
  Intron number 3 from transcript clementine0.9_026169m (loc us clementine0.9_026157m.g) derived from phytozome v7.0 (c hr-ID scaffold_12; pos 4562130 to 4562634 reverse strand)
tcatttctaaatcttttcaggtgaaaatcttcatgctgattgttctttgaatatgctttagctttaagtggaccaatgaattgttctatctattaaaatgaactaatttgttcaccacccgaactttctcagatcgatctcagaactgactgttgagtgttgactacccaaaagaaaaatgatcaaaaagttgatcatgctcgtattgagaaaagattgatctttacttgtatgtaattgtgggaaatgcataggaaaataataacctgcaaatgttctttcagttgtttctggccattattactttcttagtagtataactcaaccgaagttttctttcaattgagcctaagcaagtggaagtttggtgtggttttcatttttttcccccttcaattatgctcgtgtgcatatgaatttatcttgttttggttgtgcttgtgaccagagattgttcaatacatgttccaaaagttccttgattgattttgttattagggaagaa

SEQ ID NO: 88385 - DNA, 586 bp, Citrus clementina
  Intron number 2 from transcript clementine0.9_007533m (loc us clementine0.9_007533m.g) derived from phytozome v7.0 (c hr-ID scaffold_12; pos 566725 to 567310 reverse strand)
tgttggagagggtacaacagttgaaatcggaagtggtatgggtaacataattcttttggacatgtatttgctgtggctacataaattttcttattgtttaaatttattagaagagagggaaaaaaacactttacatctttagtacagtatatatttatctgttcagattatagacccttcatgtggtacctgattttagtcctgaggcagggttccatgactccaaattttaagttcttttcttgtccttatatttagtggttcgcttctattgcattaataattgactgtttttctttgttcaaaaatgaatttcttcttttcccccttttattattcttataagaaatgggattttactcgaaagaacgaaaaatacaagagtgcaggccagaagtcaacgaggatagcagtctagcaataagaaatgtgtcattgactttggaatattttatagtcacatgaaaattaaattactatgagttttgggtcttcccacttcccttatctccattctcagaaatatattgtaatttctatactttgttttgatgtgcctttttttcattgttttgaagaataagtc

SEQ ID NO: 88386 - DNA, 474 bp, Citrus clementina
  Intron number 1 from transcript clementine0.9_033329m (loc us clementine0.9_033329m.g) derived from phytozome v7.0 (c hr-ID scaffold_57; pos 1317316 to 1317789 reverse strand)
ttgtttttctttttccaaatattgaaaataaatccaacgcgttgcattatctcttgaaattatattcggcggtttcgatagactttaaacctgctagagattgaaatttcctcttcagaacacgttgtttatttgtcaatagtgcgatgctctttaattttttaacaacacagtcaaaatgatatattaaaaatttgtaaggagcccatagtttcaaattgcattctctcatatattcagatggggaaagctacatgaaatttgtaaggaaaataatccaaagagagaagaaagaaacgggaaagtaataggaaattaattataatttatgcgtaataaaagctcaaagtaggaaagtcatatatttactttcactcaacactactctctgtttaattcagtcacaaaaatttccttcatacatggcttcatcatcttcttcttcttcttccggccttactgctcaaagcaaat

SEQ ID NO: 88387 - DNA, 701 bp, Citrus clementina
  Intron number 2 from transcript clementine0.9_003877m (loc us clementine0.9_003877m.g) derived from phytozome v7.0 (c hr-ID scaffold_8; pos 1168734 to 1169434 reverse strand)
aagaacaaaacaggatttctcgtaagtccttatgtacagtggcggcgcggcttgagagctagctagagcttcagcccctgcttgatttgaaaaaaaaaagaagattaaattcattttattttttaagggatttataatacatctcctgttaaaatttaaaaataattaaataccaacgtttttatacagcattttaaaatccaaaaaagataaaaaaaaagttcatagaaatcaaatcacttacttgtcattgatccttttgcccaaaaaaaacaaaaatctgttggctaccatcaacttgtcatatatgaattttgtgaaaaattatctttgacatcgaatgaggggtcaatggttgaatgatagtcttgttatatacatagaaaaagatatattttgtaatcttaataatgagattattcttcaacattttcaacatatgaaactacgtcaaggacaattataagtacattaaattaaatattttaatgaattttattttgagatacgttattagttgatcattttcttaaattaaattaatgtttgaacttagcccctgctaaaaatgattcccggcaccgccactgcttatgaaaccatctttttgatatgattggtgacataaaagcaactgtcaagtttgatttggctcagggatcttaacatattttaacaccaatttttttttatttgcaggc

SEQ ID NO: 88388 - DNA, 635 bp, Citrus clementina
  Intron number 1 from transcript clementine0.9_014435m (loc us clementine0.9_014422m.g) derived from phytozome v7.0 (c hr-ID scaffold_87; pos 209162 to 209796 reverse strand)
agagtttctgtaagtgaagattcttcagaggtaaaatccttcattgttgatgcggattgcatgacttttggaactttaattccgggttttgttcttctatgcaatttgatcatgtgggctgatactcatttacttaattacacacgttattacctgttttgaaaaaaaaaagattttgtaaatgttttatatgatctgttggtataatcaagcttaaaatagcttatttagttttgttaaatttcttcattattaattgattcatttggtttttttaggggattcaattggagatgtgtgttgatcttgtgatgtttgtctttctagatgttaaattattattattttttgttatcaatgcttaaaagtttcattttttccttccacttaacctgattcttcagttggttttgacttcctatgtatttttttattggaattttgtctttggttgtactagttattgatgatgcttggagtttctggtcatagattttgagctggaaagtggaaattaattcttaattacttcaatctgcattgcttgttattactactttaatttctttagtaaatgatctagttgttaattgtaaacagttcgccccctttccccaacaggttgttatatcttg

SEQ ID NO: 88389 - DNA, 740 bp, Citrus clementina
  Intron number 1 from transcript clementine0.9_027286m (loc us clementine0.9_027286m.g) derived from phytozome v7.0 (c hr-ID scaffold_11; pos 1182641 to 1183380)
attattcaagtcgtgaccttcgagaacttgttgcagttgagtgttttttttttttttttgggtaatgacaaaaattattaatgtttaggaacaactctttaggggagaagcatatatatctggctggcaattttggcatattcaactgttgatagtagaatggatgtatgaagggttgacttcagtgaccacaattaattaagtcattgtacggttaaatggttgcattatggaaagcagagatgcgttagaaaatgacatggcctttgtcacgcttaatctgtgcctatgcagctattgtattatcttggttaacctgtgctttttaaattcttgtactatgactgcctggtcctaagcgatattgatggaaatgacatccagcttgaagtttatgtatatctttcaaaataaattctgaatacccttggatttggtgtgtacaaagtcaaagaatccatttagctggtcctacaagttttagactttgcagggaggcttcagatttataaatatgtaacaaaaaaggtgtagactacataaaaagactttaaaaaaaaagtgtatagaattattagctatgcgtagataaattcccggtaattacctttctagtattactttttttcttcttgtttctttgagatatttcaagaaatatacaatatatgcaaacatataacttcttgaaatttgtaattataggattctgttgactggttggttctatacctctttgt

SEQ ID NO: 88390 - DNA, 726 bp, Citrus clementina
  Intron number 1 from transcript clementine0.9_028454m (loc us clementine0.9_028454m.g) derived from phytozome v7.0 (c hr-ID scaffold_35; pos 2303787 to 2304512 reverse strand)
ttcttcctgatcacatccttctagatctctttctggtaaattaacctccccttccccctctctttttcttctattttactttatttcagtcaatgatttattgattattgctgactactattactgggtatctgttgtttaattgatcgatcaagttaattttgtgattatcgattttgttttggagaatcattaattgggttttggatgctcgtttcttttgggctgtcaaatttgaattatgtatcgttttggtttggtttacttgatgaatgatacatctcaaaacgaagataattttgctttatttatttacgactcctgcctcttgcaatatttacacgattgatccgttttcttacaaaatgcccttttttgcgcctcttaaatcaagattagaccagactgtctgctttgtaagaattaaatagcagcgcattatattatctctcaaatcagcaaaaatggatggaaaaactaaagatattttgagcagatagtagatggcttgtttgatatttttttttttgcatttagtcatgccagatgagatcctttttctcattcttatctgaattgtacaaatcctactagagctgcattactgatagcattgcctttctacagactgactgttatatcgttatctttcttcctcattcttgttgtctataatatcgggatgtttataatatcattggtgtacatggtaccagagaacattaa

SEQ ID NO: 88391 - DNA, 577 bp, Citrus clementina
  Intron number 1 from transcript clementine0.9_023040m (loc us clementine0.9_023034m.g) derived from phytozome v7.0 (c hr-ID scaffold_87; pos 274347 to 274923)
cagccccattgccaattggaagatctctagtcctggtgagtttttgaaatcacctatacatttcatgattctatttgttggttgtacagaattgtattgactcaattagtctgagatcaagcgtaacatattcttttagaaatgataaattgtttcaatcatactttttaattgctcaaaagagcttttttttttggttaaatcctgatatattgtgacactgccactaaggccttggcctagtcaccatgggagctcaaacatttcctctcccacaaatgtgtgtatgggtggatatcttcccctatattaggaggtgcagatttctgagctgatcttggtagacgtctgggctgtaataagtgtatttatttagttttgagtagactttagattgtaatatttgtagattgtgaccaattctttaaaaaatgcataatattgtgtttgatgtattggattgattatgattttaaaatgtattcaattggttgtagttgtgatttaaatgagcatagagaatgttttgtaatcttttgttgtctttcatttacttgtttaggcgatcatccggaag

SEQ ID NO: 88392 - DNA, 617 bp, Citrus clementina
  Intron number 1 from transcript clementine0.9_005318m (loc us clementine0.9_005312m.g) derived from phytozome v7.0 (c hr-ID scaffold_71; pos 340408 to 341024 reverse strand)
caccattaaattcatcaaaataaacttcggttcaggtaattggagttttcagatagagatatttttaattgattgtcttgaagaatcagtttgatatgtaattcctttttgcggattgtacattttctctgtcggattatagcttattgtcaattgaaaggtagtcaaaatgttgaaaggctcaggagataatgttgtatactagtatttgcttgtttttcgatctttgtttacccagttgtttgttgtccttcaaaattgtttatttgttttttcttttttgattgataaaatttgtttccaaattgggggttaaatgtatatttaagggtaggtttggcaggacttttatttgtagatcgtctgcgtgttcatgaattgatctttgaagtgcatggtaaagcttgatggacttacattaaatgatatttagatattatcagtgtgtttttttctttttttatgtgatattcaaaagtctatcaaattgattattccaaatgaaattttagattctcatctgttggatctgtttccagatcttgctcaatacttaaagatgttttggtgcattttgcctaggttctatcttcaaaaaagtgttttgatcatctcca

SEQ ID NO: 88393 - DNA, 291 bp, Citrus clementina
  Intron number 2 from transcript clementine0.9_028907m (loc us clementine0.9_028907m.g) derived from phytozome v7.0 (c hr-ID scaffold_8; pos 3713960 to 3714250 reverse strand)
ctgatctgtagcctctttgctagcattggaagcaggtaccatatttgttctacctttttttccctttttttttcaactgctttgatgaaagtaataataactatcaaatctatcaaaaaatagtgctatttttggttgatcattcgcatgcatgccaagtttagatccaacatcaacagtcatactcacagtttctttgaaaaaaaggctctggaatttttaacttcttttcgtatttaaggacttttgctaacacatacatataacatgcaatggcacatgtgtttgcag

SEQ ID NO: 88394 - DNA, 679 bp, Citrus clementina
  Intron number 1 from transcript clementine0.9_007583m (loc us clementine0.9_007583m.g) derived from phytozome v7.0 (c hr-ID scaffold_57; pos 631847 to 632525 reverse strand)
tcaggcaaagagtacccacgaccccttcggtgagtgaatcccatgtgttagtattgatattcaaacaaaaaactttgacataatgctgataaaaacagtaatttggggttaattggccactgtttctgctagtcagtggcaaagccacattacgttttccaaaaatttaacttttaatttcaccaaaattttgtatttgtctttaattaataaaatttatgcttttcaccattggttttgaataaagtaaaaaaataataacaaaattacattttcatagccaaaaccaacataaatatttacctcatacaaaaaattaaattaaagcaatcaaaagaggatcaaattattaagagtaataaacagttaagctagtctcttttagtgctattacaaacagtgaaggaattttctatcctgttgtgtcaggcattgatggttgtcttccttgttggaaatgatagttttttcagttttgctgaaactttggatatccgagctgatacacttaacttctaattacccaatttgggcaaacgtcttgaaaagatacatctaatccgtttgaaatgggattaggattagatcttggatatgtatttaatgaagaaaaaagttaattcgatctgcttgctgctgtataggagaaggcagaatcagcgttgcgtgcacatagtag

SEQ ID NO: 88395 - DNA, 631 bp, Citrus clementina
  Intron number 1 from transcript clementine0.9_033613m (loc us clementine0.9_033613m.g) derived from phytozome v7.0 (c hr-ID scaffold_83; pos 496434 to 497064 reverse strand)
aggtaaataaatgtttaaagtaaaaggaatttttttttatattaattactttactttcataggcaattaaataatataagttttgggtaaaatgtcatcattcaaaaagctattttaaagatgcagatagtcctatcttaggggaaatttacactaataaccataaaaattttgactttttccttcttaaccccccaaacaaacttctatcaacattagccataaaaaaatatttgagaccaaaatacccctctctctcatctctcccccaacaatctctctttctcccatctctcccaaaccgaagaaccaagctttgcaaacaatctcagttggtttattctagttatactccatcttttttgactcaacaaccttctccagtgtctcctagtcccaatcctccattgtttctccatcacgcttatcactgtaaatatctatctttccaccctttctctaaatattcaaatcatgcaagaacttgcatttgaaacccttttgacttattgctccggagttctttccccacaaggttaaggtacttgttatacaaatttaatgcaagctagtttggcactttggcattcacagatggccaaataatataagttgaattgtattctagggc

SEQ ID NO: 88396 - DNA, 338 bp, Citrus clementina
  Intron number 1 from transcript clementine0.9_008604m (loc us clementine0.9_008454m.g) derived from phytozome v7.0 (c hr-ID scaffold_28; pos 1052703 to 1053040)
gtttctgtgctaggggtggccagggaaaggtgagttcaaggaattaggtaggattcagtgttcagcatgtatatatctcttgtttgaaaacagcacgtgagtttagttgtttgattttatttatttaattaatttgggcagtttttcccaacacttaacaacgtttatgaccagtaattttgaactaatactgcagttttctaattgtagcttttgtttaatattatggattaataacaacaccaagttcttctgtaaaatctgcaaaaaagggctgaaaaggtgtggtatatcaaaaactaaaacattttgtttgcgatatttattgcagaatccat

SEQ ID NO: 88397 - DNA, 812 bp, Citrus clementina; identical to SEQ ID NO: 81973
  Intron number 1 from transcript clementine0.9_018994m (loc us clementine0.9_015612m.g) derived from phytozome v7.0 (c hr-ID scaffold_16; pos 3419701 to 3420512)

SEQ ID NO: 88398 - DNA, 252 bp, Citrus clementina
  Intron number 1 from transcript clementine0.9_003130m (loc us clementine0.9_003130m.g) derived from phytozome v7.0 (c hr-ID scaffold_25; pos 1498789 to 1499040)
gtcttcggtcgtcactcactaaaagttcttagtaggtatggttctcgctcatacaggtcacaattttacaattttataaacgtgttatttgcagttttgcactgttcggtgatcaaaaccctaggtttaatgtttatgttaatatagtttctttttgttttcttctttctttgttttgatgcgttctgtgtcgagaaaagctcattttagtgttgtattggttgatttctgtgaggcatttagggtttccaa

SEQ ID NO: 88399 - DNA, 636 bp, Citrus clementina; identical to SEQ ID NO: 80597
  Intron number 2 from transcript clementine0.9_003130m (loc us clementine0.9_003130m.g) derived from phytozome v7.0 (c hr-ID scaffold_25; pos 1499078 to 1499713)

SEQ ID NO: 88400 - DNA, 844 bp, Citrus clementina
  Intron number 1 from transcript clementine0.9_021561m (loc us clementine0.9_021568m.g) derived from phytozome v7.0 (c hr-ID scaffold_16; pos 2572409 to 2573252)
ccgccgctgccccctcggttgcggcacgtgtctgaaatgactcgccggatcgtcaatgatcaagcgtatgattaattcatgattctttttagggaaaggaattgatttagggttttgtttcctactcttaaatgtaacattttggatctctatgtttgatttgtatgatttcaattttgttacatgctagatgttcaatatttttagtgtaatcgcgaattcaatgtggatcgttcattttgtggatctttctgcaggatctttagctaggactgttcatattctttgcttgtctgtgatcaattttgtgttaattcattctttgtgatttactgtttccttaacttgaataatggaatttgcaggaatgtttacttatttttatgttttaaaagtttgggaattttttaattttagatttgaggtagttaagggaataatcttgttcagttccagtaggaatttaaggcacttgtattctttattaatgatagggatatgaaactctctttatttatgatatgaatatgaaactcgtttgtcaaatagatagtttattaacatttatttgtaatgctatgatttagtcttggctgatttttgtcttatacgggtcaagtgatgtgattctatgttacttgtggagggagtatttatgttttgtttgtttgttagacataagaatgaaattttaaactggcatctaattttacccacattgaagaggtcaagttcactttattctaacagcttttatttatgcagttacaacttgtttcacttctttttctttgttttgttctctatgatctgttaaaatgggggaaccttgttttgtaggaga

SEQ ID NO: 88401 - DNA, 560 bp, Citrus clementina
  Intron number 1 from transcript clementine0.9_004310m (loc us clementine0.9_002179m.g) derived from phytozome v7.0 (c hr-ID scaffold_25; pos 3103904 to 3104463)
acaagcttggcgtcaaaacggtgaggattttgattaagtttgtttgctacttatttattatgtcattttctaagttaagaacaaatcaaccaaagattattattaaaatactagtaatgtggactggcattaatttaattgtaatgcttatttgtttgttcattatccaattaaattaagaatattaggcatcatatggactaatattctatgcaactgctttcttttatttgatttgatttgatttgatttttgggtgtgttagtggtgtctttgttacttgtttgattggctagggctatgtttggaattgagattttgtagattagaagactgctgtgaaattgaatcactaagctgtcaagtacaagtggataactagtaagtaagctttagccgcccagtaaaagtgggtgttgaaccagcacttgcttgttgttttttgacaattaagcatacaaacatttgccaagtcattgaattttttcttttaaaccgctaattacttatgtgtttggagcaataatatgaggtgggattgggtggtgcaggcaggagtg

SEQ ID NO: 88402 - DNA, 993 bp, Citrus clementina
  Intron number 1 from transcript clementine0.9_005794m (loc us clementine0.9_005794m.g) derived from phytozome v7.0 (c hr-ID scaffold_8; pos 3606143 to 3607135)
cctctgcagaaacaaaacccaaaacccagatccaggtttgtcctttatatattctctgaacttctttctagaagtgtgtttgattaagttgtaagctgttttgttatctgtttggttgctgagaaaggaaaacgaacgaaaaacaaagagatatcaaagtgttgagcttgttatttgtaggtttatcttatatggaaaaagattcagcttagctgagctgaagggctatattcattattgtttgagtgaagcgagaaagattgtttatttggtctaaaggtttgatttttcttaatcattgcatgcatttggagcctaatagcttaatgggtgttttaacttttgtcaaggtggtaaatggatgattttttgttgaagaatgagattaactgggcttaaaagacacgcaaagatgaaaagagttttaacctttatgtttcctgcttccgttgttcttcctcaggaattgttaatctatagtaagtgattggtgttgtacttataacagtttcattttggtatttagtcataaatttttttgtgagaaagaatgttctgtattggttctgttttcttgaggataatgtatgctagaaatgaggtgatatctattgattttttttttcaatacccagagtattggatgattcttatttagtgtgtgataaattattaatacattattaatcaacagcttttattagtgtacttccaaaattttccctttcttctttctttgtcgttttcgtatagatttcgtttctgaaatggttattctttttttgttttctagtattaaaaaaataagtgattccatacgtgcacttagtatgtgctttgcgtgtcgtttacttctgattctcagccatgaattagaaagtctttatattgaataagtttgatgtatacactggttacatggactttttcctatctaaatataatattaatttctttgcttcaaaacattgttgcaggctggttgtttcaggg

SEQ ID NO: 88403 - DNA, 436 bp, Citrus clementina
  Intron number 3 from transcript clementine0.9_005794m (loc us clementine0.9_005794m.g) derived from phytozome v7.0 (c hr-ID scaffold_8; pos 3607987 to 3608422)
ccctacgggtcatatgtgagttccatgtgacacgacttgctgttgagtttttttgtttttattttatttaaatgcaaatggctgcctgtgctattctttagatatctcttccaactattacctaatattttttttctcttactgtttgcatgtgaaacctttgtatctgcttttgcttgagcatatttacatccttttcctaacaaaatattgttcaccttcactgtggattttttttcttccttaatgtttatgtgcttttgctttaagttcatttgtgtcattttgggtgccaggttattttaagctggacagaatgttaaggttcccaacagtgatgttttatagatattgcagtctgttgggtcttgacatattataatttccccccaaaattgcagggattcgttgagagggaaaccactctaattggatc

SEQ ID NO: 88404 - DNA, 347 bp, Citrus clementina
  Intron number 1 from transcript clementine0.9_020583m (loc us clementine0.9_019947m.g) derived from phytozome v7.0 (c hr-ID scaffold_12; pos 240579 to 240925)
agatctctcccgtcgtccagtctcaccttaagcaggttagatccttaatttttaatttattttccccggtcaaaatattgaatttttgtttttatgcactttcttgattgacagttgcttccattagagagatattcactgttttgtataatttagattgccttaaacgtatcgccttcttgggaattcatatcctggaagagaaagaagaaaggaaaagggaaaatttaggatcacctcaaatcaaaaaggcttttatttaatgtccgtagttgaatctctcgtcgtattagggtttgttgtgatttttgggaaattttgcaattgtgctaggtttatctgtcatt

SEQ ID NO: 88405 - DNA, 915 bp, Citrus clementina
  Intron number 1 from transcript clementine0.9_020978m (loc us clementine0.9_020978m.g) derived from phytozome v7.0 (c hr-ID scaffold_28; pos 87332 to 88246 reverse strand)
ctattagcgacgttgaagtctctgctgatttgcaagtactgtaaatgaatttttttaatttagtatgtgaaaatttagttaatatggggtatttgaaatggatttctttcaaaatttgattttgtggtcatgggattaaggtgctgtagctgctatagagatgaaatcattagctatcaactatagctaagcggataattgctaaatattagctgctcaagaaaaagtgagtgtttattgaacacgttagcagttttgatttcgaagttaagcagaagaacaacagctattaacataacctttagtttagttgcatgtggattgtttgaaatggcattatgcaatgtgtttagtcattagtgtgcaagttacttgtgctgtggtgttgtttaacgacagcttttatggtttgattgtgagagtatgttcattgttgtgtttggatagtccgtggaaaagaaaggaaaagaagtttcttataattaattgttttactaatgtgttctacctttggaaatttaggtggatgattacttttaaaagtgtattatttatctggctacaatagtctatgataagtcaaaggtttttttatgttacttgcatttccatcgtaattttgctgctgatgttagaaaagctgaatggggttttaagagtttagccgtatattcttttcatatcatttccttaatgctataccattcaaccaagggatcttattaggcctttcactgtccttgttactttcagttcgaatgccatagtgttaatcagtcgtattatgttaatttagattcttttgtttttgtattataaagttattgtgggagtagctggccgttgattaacttgtagttattcttttacaaagtcactgaaatgtttgtcaatttctgtaggtagttaaagtat

SEQ ID NO: 88406 - DNA, 786 bp, Citrus clementina
  Intron number 2 from transcript clementine0.9_020519m (loc us clementine0.9_017660m.g) derived from phytozome v7.0 (c hr-ID scaffold_121; pos 298649 to 299434 reverse strand)
actttgttttcattaccgaagtgaggttgatacaggtttatgggatctgcatttattgaactttgttattttagtaattggtgattcttttttttccttttttctctcttgtgttatattagcaagaagatatttgtactgaaatttgtttctgaacattgctgttttctgtctttattatgcttgagaaagcatttgatatttgaattcattagtatgctgatgggacagaaaagtcttataataaggtttttttttttgggtatagtatttataagctccttgattttgttttcaaggtatatttcataaatgagttattatgttatttatagctaatgttgagataaaggtttttttaccacttaatttgtgatgcatataccatgttagtgtatagctatgttttcttgtgggggcaaaggtgatattttgatgctattgattattgatatggcaaaagatcacatttttattacttccatatgtaaaacatggtgtggtatcagctaattatgatatttttggtcatttaaggaatgaaaatgtttaatattttcttggtttcgaagtagagtaccctggattttaagctgtttattcatggtacgaatgataagttaatatctttgaaattgactgtcatgtgggacacgttcaaaaacataattctgttatttgtaactgactcaattgcaaagtttgcttctccttacttatctgttgattatgaacatgtgtttgcattaactgcagaggaatctgaaacagacagtgaagaatctg

SEQ ID NO: 88407 - DNA, 599 bp, Citrus clementina
  Intron number 4 from transcript clementine0.9_007058m (loc us clementine0.9_006992m.g) derived from phytozome v7.0 (c hr-ID scaffold_16; pos 3863003 to 3863601 reverse strand)
ggtgagttcttcaattcctcgaatagatgtatgttcattttatttaggcatgtatgaccggaaactaaatcttgccacaccccatttgagtgggctcaaacccagacccctccctgagcggttttactagttgaaccaactaacacgctcaagtagagttagcgtacattagtcaaattaatattaagttatatatatgacctatacttcacttaattttctgttgtttgattctcaattaatactcgttattatgtgattctggttctttggataaactagacttgtaacattttcttaactcattgaacaaaaagcagagtcaaattacagtttattttcaagtgactaattttctttttttttttctttttcttggattgaaactcaatttaattaatatatatctcaaaatatttctagcagtacgtgatcttttatatatttcagattcacattttgctaatttcgttggccttaggaagtgccaattacttcgctgaagttgggaaccatacttgcagtttcactcttttctatacgtattgtgtttaacattgtggatatttaaattaatggctgttttgcgtgctgtagtg

SEQ ID NO: 88408 - DNA, 551 bp, Citrus clementina
  Intron number 2 from transcript clementine0.9_011149m (loc us clementine0.9_011149m.g) derived from phytozome v7.0 (c hr-ID scaffold_70; pos 1082281 to 1082831)
cctctggtaagctcactttgaacctttttttttaatgctttgtattgtaactaagagcttgcgttttgcatatttatttaagtttaagctgttcagtagcaaaaattgaagtgattgaaggaacatttaatgtacaatctgaaattgggactttagtgtcttcgctttatgtttgataacagactttttggaaaacttgaaatgaaaatgttgaaattgtggtgactgctgaaacaattatgtttatagccgtgtgcaaatgggtatctattggtttacaatgtgttgtagaagtgcaggtatgttagacacgtagttttagtttgaattattggagttggagtgtcggacacagtgagcatgaagttggaatttggggatttggctggataaagcacttgtttatttgtgagtagtgataattgaaactatgtcattggtagcatattcatcgtctgagtaattgcatattatgttgcaaatatatatttgatgatcttcttgaccatgtatttcttttttttttattattatcttcttttaggtcttgc

SEQ ID NO: 88409 - DNA, 622 bp, Citrus clementina; identical to SEQ ID NO: 81058
  Intron number 1 from transcript clementine0.9_012425m (loc us clementine0.9_012409m.g) derived from phytozome v7.0 (c hr-ID scaffold_35; pos 2297382 to 2298003)

SEQ ID NO: 88410 - DNA, 425 bp, Citrus clementina
  Intron number 1 from transcript clementine0.9_027153m (loc us clementine0.9_027174m.g) derived from phytozome v7.0 (c hr-ID scaffold_61; pos 777292 to 777716 reverse strand)
cgtaagtgaagattgaggtatgtttttcataagaattgcaaacttgagagtgttagttagcgtgcttgtgagtaattaatttgtgtaattttatagggggtatattggggctctgaaatgttacaatgggatgaaattatagaacaggatacacacagtataggggtatttgcttgtctaatgtagatgtaagtcgggtttctttttgtagtcagcgtattataaatttaaatttattcactttgattatttctctatagaggctttcaaaattgatttcacaagatcccaaaagcttaaccattaaataagtatcttcgtatatgactagttttatctcgattgtacgtgtcactgatactgttttgtcttcctgcaataactccataggcttcaaaccgagttgtgatcgatttcttagaggt

SEQ ID NO: 88411 - DNA, 689 bp, Citrus clementina
  Intron number 1 from transcript clementine0.9_006571m (loc us clementine0.9_006571m.g) derived from phytozome v7.0 (c hr-ID scaffold_12; pos 2887562 to 2888250 reverse strand)
caaaaggcttttggctgttggttcaatctctctaggtattttattcgtcctgctcctgctgttatttttctctttcttttttaatttcttgtgtggaaaattgtgcgggaatcccatttgggtggtttttgatagatgttattattgtatttgtatgggtttgtgttaatttttgaagcgatcataaaggctagtaaagttcagttttttttcttctttcagaatcattgagtaatgcatattttttctttcccacaagcagtcttgtgggaaaggatttcgtggcttagcttcctttggaatttcaactgtattccttgcggaagcattttctgtttgttctggccatcaccgagaccaagtttttaactgttatgcaaatgcaatcagttcattgtattctctttctcgattcttttgagaattgatgctgaatctacttggtgatgatggtgtatatatcagttgaacttattgatcctctaatcggattttttcccttatattttactatacacgagtctatgattttagcggctgtctgaagtttggatgcttaagattctggcattctctttgtggagttactatgtgtatcattatggttcttcaataacttctttctttgatttttctcatttctctgtgtagcagatcagctcatactttaccttttgctacattagagg

SEQ ID NO: 88412 - DNA, 711 bp, Citrus clementina
  Intron number 1 from transcript clementine0.9_005166m (loc us clementine0.9_004553m.g) derived from phytozome v7.0 (c hr-ID scaffold_84; pos 419178 to 419888)
ctctaagtgatactagtagcccctgcaataaagtgcgtctgtctctctttacatacatttttgtcatttatgcataaattttgcccataccctttagcccattttgtaattacagaatgacattggttgaattttcgcaatcgccatgagaacttagaaacatttagcattaggagtaaaattttgtaacacgtagttagtaatagaaacatattaagcgtggcttcccttttgcttgcaactaaaacttgtttgaagaaaatcaaattttgtactctaatacttgcacggcaggtgagagcttttagaaaattctgggaaatgttgtctcaaaaagttttgattcattccagtaatatgaagtccaggtaacacttatcaaaagctaatgtgcagcagggggaattcatttgattttttgtccttgaattccatgtttcatacttactttgtcacgttctttgatcaggacattaaaaatagtagtgaatgttcagaaaaagcaatgcatgcttcgcagcttaaatgtacttttgaattgcttgattccaacttcttcaatgaaagaaaggtgatttcttaaatacattgtacaattagatttcacttggcctacttttgattctcttttttttttccataataacaatagttgattaaacattttttggtttaggtgttggagattgcaaaaggtgcaacagagttcaa

SEQ ID NO: 88413 - DNA, 237 bp, Citrus clementina
  Intron number 1 from transcript clementine0.9_021569m (loc us clementine0.9_021572m.g) derived from phytozome v7.0 (c hr-ID scaffold_39; pos 1153694 to 1153930)
tgattgattcatttttgaggttgcggccttgtacggtcagtttctggaaacagcgccatgattttaggtcttcttaggtttgatttcaaaattgattgtttgtaaaatgttatgaataaataattcaattggtttgtgagcacctttattttatttttttttcaactttccaatttaaacctgatcttctgttgtaacccagccgaaacggattggaattttccagtttgttgcggt

SEQ ID NO: 88414 - DNA, 673 bp, Citrus clementina
  Intron number 1 from transcript clementine0.9_001681m (loc us clementine0.9_001681m.g) derived from phytozome v7.0 (c hr-ID scaffold_12; pos 4400796 to 4401468)
ttctggccacgttaattacccgctctttctcaaatgtttgtctcctttcctttcattcacttttttttttccttttccttaaaacgattattttcgtctgtttggatttgctttatctcaaatatttacacttgtacccgtacttggtttttttcctgtctgagtagaaaaacttgtacctttcaaatttttgcttttatgtttggtacttttagtttagtttggttcatgtgttttaaactttgtccttttcttttcttttctttttttctttttttgggttggggggtgggggggggggggggggggtgttgaatttgctccatcccatttcaattcttggaacctctatatatatatattttttatttttttacttttttgttggctaaaataaatggcttccatatttccccccttcatactattaatttatttatcctgaattgggtttcttcctttaaactgtaggaaagctttttttttctcttgtactttgactgcggtgtgtgtcatttgaaggtcaacagtatattaactgaatcgtgaatgataacagattaacatatagtttgatacagcacttgaagttctggattcttctagtttgatttgagttaaaatgctaatcaatacaggtaatccgaattcagaaactgagaacccaaaagat

SEQ ID NO: 88415 - DNA, 560 bp, Citrus clementina
  Intron number 2 from transcript clementine0.9_024464m (loc us clementine0.9_022759m.g) derived from phytozome v7.0 (c hr-ID scaffold_39; pos 525418 to 525977)
gcttagacttactcaaactcatcctgatcttgcaggtactcccggaatcattgagtactcaatgtccctatacttcaattcttgatgggaacgatttaatatagcttatcactttatgttgaaatcatggctctttctttatttccaataattttcagcttttgattgtctttcgcatatatgttggtttcttatgcattttcaccttgtttgaaattttaagaatgtcgttattaattgattagcataggtgtttctttactagcacttaacaagatgatgcttttttcttttcttttttttctttttttccctattggggatatgtgtttttatagctgggttcatgttcacctgaaaaacaccacctcccttgcaatgaagtataatcaaccaacttaatttatttcgtgtaatcacctgacggagcagaaaatgaaatgaagtaaagagtatagcacatgctacatttgatctgttaaattcccatctgtgataattgtgtgaattaatggtgtgtttcaggtttgaagggacaatcaaataagaggctgataacc

SEQ ID NO: 88416 - DNA, 594 bp, Citrus clementina
  Intron number 1 from transcript clementine0.9_020649m (loc us clementine0.9_020649m.g) derived from phytozome v7.0 (c hr-ID scaffold_91; pos 982940 to 983533 reverse strand)
aagtggggaaaacttgcactccattgacgcttttggtaatttcttgagagctcatctgatagggatttaactgctcttctttttatttatttattttaaaagaacatattctttccgtgaagattaatcttttaaatatatttcattgatctcgctgttaatgcatattgttgaatgtggagatattgtcgtttattgttcaatagtaaaggtctcgcatggagaggcttgattacttgtcttgctttgattccatgaacaatgcggaatagagcatgtcatgaacttccacccaaagctcaagtggggtacattggtgtctgagtgaaccttttttatggttaagcattgaatggttgtccttgcagcaactgtgtacttgtacaaatcaatatataccttcttacttttcatctgttccattcatttaggatacatgcgtcactttatgtagacagccttcatctacaaatatacggatgggttatttatacattccagacattactaaactgcctgaatttctacatgcccggttcacttctaattaatttcatttttcttttaactgctctgtccttcagcagggcaagc

SEQ ID NO: 88417 - DNA, 889 bp, Citrus clementina
  Intron number 1 from transcript clementine0.9_026136m (loc us clementine0.9_026085m.g) derived from phytozome v7.0 (c hr-ID scaffold_54; pos 514099 to 514987 reverse strand)
agctgagtgtttgtctcgtcgtccgccgcagttaggtacttttctttatctttacctgtttttcccccccccccccccccccaaatatttctttgcagttactgttgttgctattgaaataaataaatcttgtggtggaattgtttttgaaatgtctctgatgatgtttaactatattaactttcgttctactgagaaaacaattatgcggaatccatatggagacctgaactgaggagactgtttatgtgctttgcttctttttcatttatcagtcttatttttatcgctccgtttcataaatgagactcgtgttattttgtgctttatttttcgtactttttaggctattttttgggcgatatattttgagttttatataaaattttaatgttcccgaaccagtgttgtgtttaatttaagctgtctctgatgatgattttaaaaaaatactttcgttcttccgagatgatacatgcggaaacattttggagacctgaactgaagaggcttacatatacatgtgtgtattcccaatctggtccggtattttaaaatgtgggaaagtccggaaaagctttaaaccatggtttaaaacttaaagctcataaacgtttctctgactttctcgtactttaaaatttcgaattagaatatttctaatatatatataagtttttaaccgaagacactcaagtgatggaacttgttctctgttgcagcattgccgtggatcccgtcatttgaaaagtagaacaatttttttttttaattcttagattttttttagctcaaaaagttgtttttaaggtttatagctattatggccttcattttgttatctccaacatgtacagtggattgggcattggagatcttatctcttgtg

SEQ ID NO: 88418 - DNA, 646 bp, Citrus clementina
  Intron number 3 from transcript clementine0.9_000094m (loc us clementine0.9_000094m.g) derived from phytozome v7.0 (c hr-ID scaffold_151; pos 93026 to 93671)
aatttaaaactgctcttcttcaacgtctggaaagggtgagctctggtttcactttttcagcagctgtatttctttttctttttattttttttctttaatcatcatacataatgtgattaactaagattactgttgtgagatttttgagcaatgttttcgattgttaatttgcagtgtaatatggcagaaagcaagtcctgagtagttacatcttgtacagaataggggctagaaagctgtcacagattttggccgttgacgagacatattttaaatagattatgaaatatcaggcttctatctgtgaattagttgaaattgagttggacagaacaataatcaagttatttttcccttaaactgcctaatttttcaaaaaattgtcagttttgatgacatatatcaaacttttatggatgcaaactctcttttgaaccatctatttgcatgtcatacattgatttgctatagttctggctttgagtgactgcatgttcagtgggttctgctagccttcgcaaatacttcaggcagccttgaaaacttttcactttaagtcctcactgcatcttccccttggtcttaagtattttgacgtggaattctgtttgatcatgctttctcctattgtttatctttcaggaaa

SEQ ID NO: 88419 - DNA, 507 bp, Citrus clementina
  Intron number 1 from transcript clementine0.9_002031m (loc us clementine0.9_002031m.g) derived from phytozome v7.0 (c hr-ID scaffold_88; pos 545721 to 546227 reverse strand)
gcaagtacatcgccgtcggtacaggtaatttgatggataattaataatttaggtgttgaattcgggttcaatactttctagggggtttattttaatttgcaccaaatatgcccagactttgcctcaaaatcactttcttggcgaaagaacctaaaagtgcttttgaaatagcagctatgaagtatttttcttaaaacaaattcacatacttttttgacacatctgttataggaaaaaagctctgattgagtacttgactctaaaagcacttcctaataaagtgtctataaagtactatcgagtttcttttggttgtgtcagagaaagagagagttttgcttttgaatttttactttagtttgattggtaagtgtattttacaagagattttctatttttatgagtttaattctttttgtttctcctttggaattgaattgatttgaaaatttaaattagccttaaaagcaatatgtttgtggaatttgcaggtaaactggtgcaaat

SEQ ID NO: 88420 - DNA, 533 bp, Citrus clementina
  Intron number 4 from transcript clementine0.9_031134m (loc us clementine0.9_031134m.g) derived from phytozome v7.0 (c hr-ID scaffold_68; pos 421691 to 422223 reverse strand)
gcatctaagattttgtggagtaactacaattcaaggtaataccgcaacaatccacttcagttttcgtgtagttaaatggcctttttcaaaaaatgcaaatttttgtaaataattttttaaattgtggtggatttacaaaaattttagggtggaaatatcctcttcccaatttatgcattgttgatttgacgtacaacaaatgcttgaagtggggtgtaatcacagatcagtatatttgttcttaggtcaattgaaacgcttttgcaatcaacatcaaatcacatgacaatgtaatgcaaattatttgctttcatttcttggcagcttatcagtcttgcactatttcatttttacttttttcatcttttaatttgtttgaagcttattgcttttatttatttgtttttttataataaatgatattacttttatattttgaattcactatagaaatctacaaaacttactttttcttttttaatttgtttgtgtttttttttaatattaacacttttattctgaattttaggaat

SEQ ID NO: 88421 - DNA, 684 bp, Citrus clementina
  Intron number 1 from transcript clementine0.9_004792m (loc us clementine0.9_004792m.g) derived from phytozome v7.0 (c hr-ID scaffold_88; pos 530395 to 531078 reverse strand)
tcctcgccgtcttgtccccaaacggcgtcgttaaagtacacacactctctgtctctctctcgttctctttgtaatcaatggatgatatttgtttgtgttatgaagatttttttttttttcatgtttgccagtatttcaatgttgcaaaggaaatatgaaaagattattgtttctttgtagtgttggaagtgtgtttgaaatcaaattttagctgggttcttataggatcatataaatagctttgtaattgcaaaccaacatatgctttaaaagcattttttttttttttccttaatagatgaattctatttgagagcattcatatgggaacattgagccttttttattttttccagttggtatcttgtgcgctcaacttaggatcagttatttttgtatggtaatggcattggacttgagatgatcttcacattattaccatctaaaataagtgtagactgtatcattttattgacatggtatctgtgtgacaacttgtctcagtcactaaaaaaaattgctatagctttgagaggggatgttgagttatgctgactttgaaaatttgatcttttattattcatgctgttgttctttctaagtttggcttggttttacatgtcatgtggccattgtgaagtaagttttcttatactgaggaatgtaattgtacgattttcagat

SEQ ID NO: 88422 - DNA, 685 bp, Citrus clementina
  Intron number 1 from transcript clementine0.9_034727m (loc us clementine0.9_034727m.g) derived from phytozome v7.0 (c hr-ID scaffold_11; pos 4101220 to 4101904 reverse strand)
gagttccctcttgtttcctcacagatttcattgacgtaagtccactcccattttggagaaattttagaatacttaagatttattacgtcaactatacaataaatatacgttacgcatgcattgataattgtattattttttatatattttaaaattcttatccatactgctcatacttttcattaatgatgtttctcaaatcagcatgcattaatcaaaatctttattttcaagcaaaaaattgataaaattttagtatttaatataaaggtatagataaacgaattgagattgaaacgcacaaataaaaaggaataaaatatagattaaattatgaatgataataaaaaattttatggtaacattatagaataaaagtaatcaaaaggacctatcagttattttaccagaagctgagacatcttagcccactggtggcatgcatggtaagtagggacggacctatgctgtatcccagtctaggggaaaaaattgtattcgaagaagataacagttgtaatggaaagttactagctcaattgtttgaaaattttacttttttacactctcattttatttatttatttaaattttggtcctctcatgtttgtaatttattaattctcaccatgttgaaccaaaattttgatttcgccagtgattgtaaactttgcacatgcaggtc

SEQ ID NO: 88423 - DNA, 340 bp, Citrus clementina; identical to SEQ ID NO: 81943
  Intron number 3 from transcript clementine0.9_000731m (loc us clementine0.9_000731m.g) derived from phytozome v7.0 (c hr-ID scaffold_121; pos 151592 to 151931 reverse strand)

SEQ ID NO: 88424 - DNA, 452 bp, Citrus clementina
  Intron number 2 from transcript clementine0.9_021484m (loc us clementine0.9_021484m.g) derived from phytozome v7.0 (c hr-ID scaffold_44; pos 1720551 to 1721002 reverse strand)
tcctctggagctttcaatcctgatcgcgtcgctgtgtacgtagccatttttttttgaattttttatcttttaatttgttaattctgtgacgattagtttcgttgtgtttatttcttttttgtgcagctaaaagaaacttatcatttgttagaatattcaattgtgaaagctaggaatacaattggagtttcaagatacaaattgaatagaatttagtagaaaacagccaatattgtattttgaactttttcctgggaatttatctgaaaaatgtttttactttatcatgagaattttgtattcttcttttttcgagaacaaagaggtgtatccgagtttggttacctcaattttaagtgtgcggttttgggttaattttgtgttagttactgtaagttcttcttcttcttcttcttattattatttctctttttgtttggcaggtattgcaa

SEQ ID NO: 88425 - DNA, 949 bp, Citrus clementina
  Intron number 1 from transcript clementine0.9_000361m (loc us clementine0.9_000361m.g) derived from phytozome v7.0 (c hr-ID scaffold_88; pos 1013026 to 1013974)
aagttcttgttaaagctcaagaatcgtattgagaggtaataagcttatctattatttttgttctcttctctaatttttttttttttttacattaataactcaagcattcatcaagctcaaatcctggactcgagccttaagaagacttattctaaccactagaactaaaccttaatttacccttctttcaagtcatattatttatattacaataattaagctatatatagagaaaggacatttttggataaattaatattcacatgctttattttaatattatttaaagagcattgatatttgaacaccataagacactaccaagacagaaatagatagttacagtggcactttaacatattaaatagtaatgttggtcgtattcctggtggtcaaatattacttaaaattttgaaaaatgagaagggagcgaggctgcacaaaatcacagcccatctctctcatccgctgccctgtacccgctaaaaatctttcagcttgagtgtttcaccaaacactaccaacttttacagccactaaaaatcaatttttactctctgttaaaactcgagctcgggtgtgcatgcatgaactttgtttacggctactgctgatgtttctatcaaatgttcccaacagttgggtttagtaagtagtatgttgactgcctaattcatttctgattttccgctcggcgccctcttctcagcaaaagttgggactttatttccttcacaattataaacttgggtagggaaaaaaatctccctcactgaactaaatattcttcaaaattactaagaacagaaatctgaaccatgcttttagtaaacttgatatggagtcattttaataaaattctgtttaaaagaaaattctgatttttcatttttctttgattatattcgtctcagagttggaatagtgcttccaacagtggaagttcgat

SEQ ID NO: 88426 - DNA, 498 bp, Citrus clementina
  Intron number 1 from transcript clementine0.9_028312m (loc us clementine0.9_028312m.g) derived from phytozome v7.0 (c hr-ID scaffold_11; pos 726379 to 726876 reverse strand)
gccagtttgtctggctttcattctcataacatcaggtgaaattgaaaagttacctttaatttctcatactaatatttaacaataaataaaattcacgcagcactcttagttaaatttccagatgctaaacttcaattttaaatatttttaagcatcaaattctagacttcttgacttcctcacttttgtgctctataattacaaaataattttgatagaaaaagcatgagaattttacaatatatatctaacaaaattagtggtgatctgttgttttttaagcaatgtcaacctgtcactcatacagcaccattaaaaaaaaaaaactcacgcatattcgtgtaatttaagagttatcaattcattggaagattgaagacttgtatggtatgtattaatttcagtaggaaaactgacaatctctcttatttcttatttaatgcaaattcctcctattaatttgaagttactgctgctaattttatgtatttgctaggc

SEQ ID NO: 88427 - DNA, 938 bp, Citrus clementina
  Intron number 1 from transcript clementine0.9_005871m (loc us clementine0.9_005871m.g) derived from phytozome v7.0 (c hr-ID scaffold_56; pos 561458 to 562395 reverse strand)
gccagaagcctggaacttctggtctccgtaagaaggtttactcttttgattgattcctgattattgattttgtgtcggatctatcgttattttctatgatttccgaaattaatttgttaatctaatcgaatctgatcaacggttacgatcagctgatttcatgcatattgttgtattgaatcagagcttagttgagactgataatattttgttaaaggttcgtgtagattcaactgtcgctggaacttttacagtgctgaattatttgatcaattgttttttttttaattaaagttgtcttggcttttgtacttattaattactattcagaagagctaatgcattattattcagattttgtgtttcctttagatctaatctatacttaattttttttttggcttataaatttgattatgtaatgaagtatctgctggcgctggtgtttgatgacgcttaccagaagattgtttttgcatgatctaattatttatttatttgttttattttttctatcattcgttggactaattaattagctttggctagtaaaatggcctgtttgcagatatggttgaaactgcttgacaaagtcatatttgagtgtccacaaaacacactattgtagatggcttgttcggtttggtattggatctgtttgccatacattatccatcatctctgaaattgttttttaatttgaatgagttcatgttatgaattttaaggagccaatttaattggataattaatgaagatatcattattagacactactcaattagaaattggatgatgtaagatgtctttttatcttccaagaatattctctttcatagcatgtggttgtgaagggggcctttttctttttgattttaacttatattggctgaatctttttaggtgaaagtgtttacgcaaccaaattaccttcacaa

SEQ ID NO: 88428 - DNA, 555 bp, Citrus clementina; identical to SEQ ID NO: 81339
  Intron number 2 from transcript clementine0.9_005231m (loc us clementine0.9_005231m.g) derived from phytozome v7.0 (c hr-ID scaffold_61; pos 442048 to 442602)

SEQ ID NO: 88429 - DNA, 732 bp, Citrus clementina
  Intron number 1 from transcript clementine0.9_018663m (loc us clementine0.9_018663m.g) derived from phytozome v7.0 (c hr-ID scaffold_8; pos 1222957 to 1223688)
gcttcgatcattgaatctggttggagggtattggttttgtcgctctttcattcaatcttttccctcaagatttgatttttcctttttcactgcccattggtgtttgtggatctgtttgtgcgtttaattgcttatttgttataaaatgatagtaataataataataataataatttttttcattggtttctgtgattttcttttgtttcaagctcttgcttattgaaagacagtgactttagaatgtgtgtttcagtacttgtttgattcttgatgttgatggcggggttaagtggttagattacaatgactcgcgtattgggtattgagctgattagactagtgacttgtgaaatcgaatcaccattagttagatctttgtttattgcaaatagttgtttgggcaattcatgacaactgagcaatcacaagaagatcaagaatttctagttaatccttttgttattgccggtgtgcatggctgcatgtgtagaatttattgctagttgaaattataatttactcttcttagatgagaaaaagggttatgtgtgatttagcagcttggtacttttggtattgattgattttcgtcgaatttctttagtgtgattatgttcttctccatttctcagtactgtttatcgtcttgagttatattataattcttgcaactctgtctttgtctatgacgcagtatctcatcacacatttcagcgattttcaactggc

SEQ ID NO: 88430 - DNA, 587 bp, Citrus clementina
  Intron number 3 from transcript clementine0.9_033238m (loc us clementine0.9_033238m.g) derived from phytozome v7.0 (c hr-ID scaffold_35; pos 779188 to 779774)
tgtacaataaccaattaactggcattatacctccggtaattggccagctcatgatagacagcaaatgcatgagccacgaagatctagaaaaatgctaaagccaaatcctaagtttactacgtgagggcatgagtcccatgcaagccatgtatgagacatgcatgcgctgatattgtgaagatacgtgctggagctggagccgtcccatgcaagccatgcatgagacatgcatgtgctgatattgtaaagatacgtgctggagctggagccgtgatctagggataagcttatcaacgattgtgcagcgattaaggagggaagctaagacacagaagttgttttcgattattttttggtctcgaaatattagctaagttgttattttaatattcgtttattcagccgtgattgtagttgaaaaccaaagtcttgttattataaataagttccagaatatgaataaaggcattgagaattcaaactataattatttggtcctttctcgccataagcagaaaaatatcactagcattactcgtaatcattgtctgcatctaactgggacctaacagctcaaaaacttacaa

SEQ ID NO: 88431 - DNA, 655 bp, Citrus clementina
  Intron number 1 from transcript clementine0.9_026960m (loc us clementine0.9_026050m.g) derived from phytozome v7.0 (c hr-ID scaffold_44; pos 562917 to 563571 reverse strand)
ttcactgaatcttggccgcaagcaagtctcaacaggtacataatattaataagtctctctgatttcctccactatacaatctttacaattgaaattacgacgaccctttactgcaaatcagatctacttgtaataaaattcctatttttctgttcggtctctattgatcttttttttttttttaattttattttttcgcccaatcacatgtagtgataaatgataatttgctagtttggatctaaaagttcttcctttgttagaaattttagatttctattatgaatcgataaaaatttatatcaattagtaacgtggatctgcaaagatgtctatttgggttagggggagaaaaaataagtttttcaatgtcaagagcttcgttgcagtttatgtggctgatttggaagagattttgattacaatacaaagctttcatttattcactcattcatgacagttaaagttaaaattcccaagaaaattgagatatggctatcggttcattttggttttactgtacatttaggtctgttggagtataagatatatagtgcaaagagtattaggtatcgctatatatgttgtttgtattgaatgttcttgcgtgattacgtttgtgtggagtttaattttgttggagaatcaggaaagc

SEQ ID NO: 88432 - DNA, 575 bp, Citrus clementina
  Intron number 2 from transcript clementine0.9_027146m (loc us clementine0.9_027161m.g) derived from phytozome v7.0 (c hr-ID scaffold_12; pos 2202170 to 2202744 reverse strand)
agtttgaagagtttgaaatcaacgaaggtccgatttattgctctttacttgtagggttcaacgttgatttaattttattctattttggtgaatctaaggagaaatttattattcaattactgtcgggtttatcttgctctcaacgcaaaaatatatgaatctatcaccctaaattgatctacgctttatgtgattcggattgtagccttcgccaggacatagcttttgagttctttaatctaaaaattttgtttttttttttaattctgtaaaatagatagaattttgtttactaggtaacctagtggtgggttctgatggtaattgtgaaatgctttatggtatttggttttcaaaatctatgcaccagagctttagctttacaagtactgatatagctagttgcagacttgcagtgacaggattcaggatttcgtagcactttgattgcccgttgcatggtctattctgctactaatttcatgaattgtttcgagttcttcattttgttaatttaacaattaaatattctagtctgaactgttcttgtttctaatgacaatgaatttgacaga

SEQ ID NO: 88433 - DNA, 642 bp, Citrus clementina
  Intron number 1 from transcript clementine0.9_025155m (loc us clementine0.9_025155m.g) derived from phytozome v7.0 (c hr-ID scaffold_12; pos 2570156 to 2570797 reverse strand)
aatactacttcgaccctctgacaattattctgtaagtaccatcatttagccatcactcttcaacaatttacagagttcatggtctttttgcgagcatggtcatgcttctaaggttgaatggttcatgcttgagtttcattctgagtacaacggtccttttcccatttcttgtttatttttcttgattttggcattcaccttgtgattaattttttaaaattgttgtacattttcctttctgtaaactctaggaagttgcaggctttgtttccacctgtgatgttggtcaatcaagtagccatttgacatcaaatttagaaatcatgctgaggagaacaagtttttaacaattcagttttatacatgaatgatttcttttcctttgaaaatatgccattattacttgtaaaggtccgaaattcctcatccttcataggtataaaaaaacctaacggccctagtttagactctgaaatcccatgacagagcttgctctattttcccgaacttgtgttttggcttgactaataagagtggacatttgattctagcagacggtgtcaaaaacatgttttgaataaagggttcttttttctgtggatttaacttcaggtacaaactcagcaactaccaattcatcat

SEQ ID NO: 88434 - DNA, 854 bp, Citrus clementina
  Intron number 1 from transcript clementine0.9_018802m (loc us clementine0.9_018802m.g) derived from phytozome v7.0 (c hr-ID scaffold_8; pos 949986 to 950839)
tttgaaagtcccagtaagttcgcttttttattttggtttttttttttcgtttttgtgaggtgatattattataattatttgttgttattattattattattattattattatttgtatgttcattagagtttagttttgccttcttggtgtcaaattgaggttttttttttgtcttattgatttgcgtcctgggtgacttcaattttggcgagtatctgcttttataaggaatatattcctctgtttgaatttgagcctttgatgtataaataaatatgtccttgcaatttcttgactcatgttagttatttcaagagttggggatgcaaaagtggtcgattatataacttttttttgtaacatttttgctgtttccacttacttccactataaatgaaagatgaagagtataatggcgttcatttgctttactattatttgtttgtaaaagggacgtcaatcaattcaaatttgattctgttgctctagtgattaaaattctgttaatgctgttacaaatctctagtttagatttgtatgaattgctgagtgaagtaaagctttgatcaaggggtgtggtttgcggaagtaagctggctgctgagtctcaaattcacctctgtttttagctgttctttgtgaatctttctctgttcaagattgaatgtagcttgttactttgttaatagttgatgtgtccaaagcataacagatcaaatgaagcaagatttcttttttgttttagtgttgtgagcatttcatgttaggtcaaactgacatgtttgtttgccattcatttggcaatgggtggatggattgaattgtagctcaagataagattgctgattttgag

SEQ ID NO: 88435 - DNA, 889 bp, Citrus clementina
  Intron number 1 from transcript clementine0.9_018975m (loc us clementine0.9_016722m.g) derived from phytozome v7.0 (c hr-ID scaffold_16; pos 4110682 to 4111570)
ttcctgttgttactggggttattatcgctagcggggtatgtatgtttttctttttttctttttcagttctcttatggtgagtgatttgggtattagggttgttttgaattttttttcgtcttttctttttgttaaagatgattattttattgggtaatttggaattttggttatgggtttggtttaaattaagctttttgttgtgattcttattttagcggggcaaagattaaacccagattcatcttattacaaagtctttaacttttgttttagagctttagcttttacttcctaagggaacgacaattgctttgtactcggttcagtttttagaaattagagctgaaaagaatagcaatacaactctggtttttagatgtagtgtcacatgggccttgttgatactagagcttcgcattagatggtgtaatgcaattgcagaaagttcttagtgcttctactcagaggacctctgatcttagggacacttttttcatcactttgcttgccagatctttacctttcgaccagtttgtttggcagccaaattcagagtttttcacttgcgatattcttgtttgattaatctgactatagattgtattgatgatcatgcaggcagatgcagaatttttcatctgtagtttgtagtacttttaatttgataagtaaagtctttggggtgctttagtattcaatgaaatatatatggaatttggtcagagagtagttttaagttagttcaatttatacccagattattatacatttctgtacgataatatagtttatatccttggagcaaattattctgctttctcatcattttcctctctcatatgtggctgtagggtgaaccaagtttccacttgtttggattcttaat

SEQ ID NO: 88436 - DNA, 276 bp, Citrus clementina; identical to SEQ ID NO: 78675
  Intron number 1 from transcript clementine0.9_010632m (loc us clementine0.9_010632m.g) derived from phytozome v7.0 (c hr-ID scaffold_39; pos 1682484 to 1682759)

SEQ ID NO: 88437 - DNA, 657 bp, Citrus clementina
  Intron number 1 from transcript clementine0.9_015039m (loc us clementine0.9_015039m.g) derived from phytozome v7.0 (c hr-ID scaffold_12; pos 3115926 to 3116582)
tgggacaggcaggaagcagcagttggctactcttggcaagtcttttacttttgatatggttttgatgtctcaactatattgtagcttacaggattattcagtttgtgatgcattttatctagatagtgatcataagtcataatgtaccttataatattgtagcattttttgtgtttaattaaggagacagcatttttttttaactcgttttagagtatattttcttctatggtcagttattaaagacatgcaataatagtcatctgttttcatctttttaaattgaatttagtgtattgcttgtatctttgaatcaattatccattatttagaccatcttattttactttttgagatccacctaattttagcaattgtagatactagtgactgcaaaacactattagaatttggtgattatttttggaaacagaagccagaatttctacagatgaacgtgttttatgtttggacctctaatttctgaaacagtccttgcattcatgttttctgtgaaatatttatatgaaaagaggtcatgaattttaatgatagtgtgattaattatgccttgcactttgatatctttatttctgtttgcatgctaaaattcatgttggggcttctcaaactgtttaactacttttatgtaggtga

SEQ ID NO: 88438 - DNA, 943 bp, Citrus clementina
  Intron number 2 from transcript clementine0.9_023176m (loc us clementine0.9_023176m.g) derived from phytozome v7.0 (c hr-ID scaffold_84; pos 520420 to 521362)
tccttaatttggtaatcaccttttactttttttccccctcttttcatgagacaattatatgttaatttcttcactatagacttttcgtatgcacggaatgatttagaaatcagtttagacaaatcaagttaagtgtattttgatgcttttcattctctagcccttttttatttgatcttttgatcatttgataatcttctgaatggaatgactatattcatttgtgctaaattgagaataaatttattatgctctgtttagctttcaatggaggtgataactttgtccctgcctgccattttaattagtcgtggctgaaagatgtggaattctttacatggttgcttagctttttagtggaggttcgactgtaaagaagttttgtcagacaggttacatgttatcaattatgaattgcctatactattgttgatttggttttgttgcggtggtggtactgctgagttttaagccgtagttgggttttgataactaagaaactctttattaacttgatcatttcaatatgtatttctactaataataaagagttcctattagttttgaaaaattctatttgataagctaggaattaagtgaacattaataccaggatgaattgcactgcttttcttatccatgttgaaattgactgcataagatattttctatattttatggaggaataataggatcatccactaagctgcttcatttcttttgatttaaactgttaaatttaaagccaacattttcaaattttgtttcatttttgctccattgtaatagttattagtcaagttgggaagagtttctgattccattggaaaaagtagtcgattcaagtagacgaggtagccagcagagtcatctactttttgtttaaatatattttttctgttttgcaggaaaacccagatctgtggaagtggctgactggcca

SEQ ID NO: 88439 - DNA, 923 bp, Citrus clementina
  Intron number 1 from transcript clementine0.9_003480m (loc us clementine0.9_003480m.g) derived from phytozome v7.0 (c hr-ID scaffold_25; pos 928871 to 929793 reverse strand)
gagctttccactcctcccctccgctggggcccctggtattattaatacgatcacatttctctcatctctcctctcgcgttcatctttttctttccgcagatgctactaaatgaacacgaattaagccgctgtttggggaaaatgtgtggaaactttggtgcctgttagtgctcgtgcgaatttcttaaagagtagaacaaaattaaaatttgttccaattataaattaggatgcatttggagtgtctttaacagaaagcactttcgctcaaaagtgctttgtgtgaaggttcttttatcgttaaagagtgtggaaaatcacatattaacactatatggtaagtacaaaagctcttatgtcactgccgaaaacgctcttaaaacaatttattagcctgtttgatgctttattagttggtgctaaatgaatgtcacgtgtttcatcaattgtttgatgattagtttcacatgcagtttggatgcactagaaggaatgcaaagaaaaatataaatcttatgtttctttggttttctagaagcatgaatatctgacaactaaagctcatatcaagctaaccatgtaattttggtagtttgttctggttactaattatttaaattatgataattttgtgagattctttcagccatctggtttctaagaaaaacagaattttgaatgtattaattgaagtaggtaatttttggaaatcaagggactttagcagaggaaacagtattagaaagttactatgggtacattttccttccttcttctaggaagggttcactttttataatcacaaatcatccagatggatcattatttattctgtttcaggatctgaatattgtttcagaatctgaatggtccttttactatttgaaggtgatcttcatcaccgcaggttgtattatcggcgt

SEQ ID NO: 88440 - DNA, 930 bp, Citrus clementina
  Intron number 2 from transcript clementine0.9_008312m (loc us clementine0.9_008312m.g) derived from phytozome v7.0 (c hr-ID scaffold_12; pos 2504406 to 2505335 reverse strand)
ctaaagtatttctctttttcccaaatgcgatagtgtttgatcttgtcttggttatgattctacggattttggtgtttttgggtgtcagataagtggtctggttcctctggtggttgcatttagtttttttttttttttggtttaattgtttatttggtagggcagtcagtcttcttcattgatttgattatgttttcacaacccgttgtagagagagcttgagtgcatatggtggcttcttttctatacatttatgggatactatgcagcattaaactttcaatttgctgtaaatttttttttttttcctttagttcactgacaaatgatggtcattaatttgtagtgttttcttcaacaatatgctctggaatcaagtcttgaatttctgaaaagctaagcaaattgcaattgcactaatatttccatgtgttggtattgtctttaatataaaaggtacatttgaaaaccattaagatcatcccattataagttcatcaatatcattctcctagaagtctccatggttgttagatgtttattctcctttcttctgtgttggagtcaaaactcatattgtgtgtctgttgggaggcaagtgcagagtaggagttggaggtatttctgataacaaagaaagttgcctaaataccactgccctttcattctaaacatcaagatggctgctaaattgtgtttttagttccaagcttggtctgagaggcgctgggttgagataaataaacaactagggagaaatcatgcttgtcaatttgagtgaaattaagcaacttagcggagataccggaggcaattctttgttagacagttttggtttattttttgctctctttgtcttgaagaattgatttcatcatcagctgtgtgtaacaatcaaagtactgactcatagtgctgtattgtaggtta

SEQ ID NO: 88441 - DNA, 676 bp, Citrus clementina
  Intron number 2 from transcript clementine0.9_035239m (loc us clementine0.9_035239m.g) derived from phytozome v7.0 (c hr-ID scaffold_11; pos 5098054 to 5098729)
agagggaaactttgctcgggattcttcgtgatcaggttagttcatccctaactagaaaataattcaaatatagaaaattatatgtaaaattattatcgaaactattatcttctcataaggaaacttagttctatgatattgaataaaagaatccattttaaagttacaactctgaaatatttaatgttttatattaaaatcattgctagtgacatccatgacttaataattttattggttcaaatgttgaagagaccctgtgacttcttacatcactagcaaagactagcgtgtgacaagtttttggccgtgagttctctcaattgactccaagcattttctttaaagacacttgcatctatagtaaaatcaaatccatgagactgaaggatgcatgtggaagtcttacagccctaatttagatattttcataggtttatttctattttaaccttaaatacagaagagaagaacactaacctaatatgaatcatcctcagacccaaaattgcataaattatccttatatatatccttgaagtaggcccaaattccatgattatgttggaggaactttttaattgaggtttcgctctttcttttcatttttctaactatgttacaggtttttggacatgtaggtacctgagccactacgggcgttaatcaacggaac

SEQ ID NO: 88442 - DNA, 773 bp, Citrus clementina
  Intron number 1 from transcript clementine0.9_013123m (loc us clementine0.9_013029m.g) derived from phytozome v7.0 (c hr-ID scaffold_8; pos 1713883 to 1714655 reverse strand)
agtctcctctccccaaattatctgttaatcttaccgtaattttttcaattgctctgctcattctttctattttagcttggctgtttaatctgtttgattcttcagaaaatgtgagagaaaggaacataaaatttcagattccggattccctcgttcatatagctgcctgatacggatctgtttttaataatcattatttgatctggattttatgattctttgtgattaatgtgctgccgatggatctataatgttcgtgttttgttcttgtttgctgtcttcattgtggagcaggaactgacgattgaattatatgattatttcttgtttgaatcattttactataatgtgttaagcatcaaaggagagattgtactttgtttcgattttttgccatgtatggtttaagatttttagtttctccatgatgttaaaaatttcaaatctcgaaaattaaaacttatggtttaattacattacttatcaattgtgttctgtatgcatgaggattgagaaatttttacataattttgtttttgtgggactatgggagagagtttgtttgtcatcttttgatgtgaacaatttttctgttctatatgtggagtaagttagaaattgtgtagatcaaatgactcaaatttgcttagttgtggttgctcattgattgctggaatttattattgatgtctatgttcctgctttgttttgtttttgttaattcctgttctaattgtgagtcattacttacttattccagctggtgatagaag

SEQ ID NO: 88443 - DNA, 938 bp, Citrus clementina
  Intron number 2 from transcript clementine0.9_023681m (loc us clementine0.9_023681m.g) derived from phytozome v7.0 (c hr-ID scaffold_16; pos 1549335 to 1550272 reverse strand)
agtgtgtccattattggaccccctgatactttatagtgagtgaatttcttattattgatttgttttgttgttaaaattggattttatgtttggtttttggtttttgatgatgttatgttttggattttcggagttttgctaggttttgttttgtttttaaagaaacaaagactgatgtaatttgtggaacaatttaatcttgattatttaaccattgtcttcatcatttggttaaggcgtgtgtctatgtgaaggagatgacatgatttccgagtttgatgatgcggttttgatttatttttttgataaatttatcatgttctttccttcttggtgtagtgctttttgttttgatttattgaatgctattgatatcaatatactcgtaaattttgcttggtagcttgatattccagggtataggttttgataggcaatcgttcccaattattttgtgattcatggctgcattttctttggcctgaaacgtacatcggtgctgtcttttctgaatcatggttttgatcttactcttttctggaggaagatatttttgcacagttaggggtccaggctggtccttgtttttaatccagcttgcttgttaaattttaaccaggagcaactggatcttctggttcccttaaaatgattaaagaactaggaaattccacaagggacactattatcaaggccccagtttctgtatatattggacttctagatgagaaaaatattacctagcacatagcataggaagtaccattattcattaagtgatgtgttattgttttctcttttgttaaggacatgatattggatgccatctttttcatcacacgctaatggatttaaatctgaatcttttataggcactgaaatgtgagcctctaatgttaattgactattattttgttgcagtgaggggggattcttca

SEQ ID NO: 88444 - DNA, 802 bp, Citrus clementina
  Intron number 1 from transcript clementine0.9_001889m (loc us clementine0.9_001889m.g) derived from phytozome v7.0 (c hr-ID scaffold_104; pos 303310 to 304111)
ctgctggaattcactaccctcgtgccactcctgaggtgcccttttcgtttttccctttgatttttttttccatttagtttcgtcactgatgaatttgttgaccctcttgtctgttttttttttttttcactttttcagttttctcatttgccttgtttaaagatatgagtttaaatcaattgttatgattggcgacaaggcaattgtatattgtacttaagttgggtacgcaaattagcattttatgtaacttcgaattccagttattcaatgagggcctgttcgggattaagggaatgtagcttttaatctgcaagctcctttgaaatgaaattactagctagcaagtgaaagtgggtggatgctgttaaccgcaatgccttgtttagggaagcattttagttgctgaatttgctgtgcttttaaaattaagtgaaagtacaacagttacgaggacccttagtcaagcaacttcctagtatgtttattgagaactgtatagatgcccttgaaattcacatttgtggtgcattggtgactgttgcttccttcattttagtcgtactctgtgtgttgattcgctctagttcttttcccatggtgctaatttatattctaatttcttttctacctttttcgcctgtttcatatggcgaccttctttgctggttttagcctgtttattacttatctagatatggactagactatcacgctttggcattgttaacttatctctcatcattacttttagagccactatgttatatgtctatgtgtaaactcctttgtatgatgtcag

SEQ ID NO: 88445 - DNA, 751 bp, Citrus clementina
  Intron number 2 from transcript clementine0.9_006945m (loc us clementine0.9_006945m.g) derived from phytozome v7.0 (c hr-ID scaffold_84; pos 459158 to 459908 reverse strand)
aatacaaaggttagtttctttctcttttttcttttttgatctgtactgataatggctgagtgttaattattggtgattttaataattaatgattggtgtagtaagtagattttatttgaaatctcgaggatatataaaatttttcaatccggacttataatctgcgactaaagttggtcgttggtcccggactttaacaaagtgaggatcctataccagagaacgactgcatccgttatgtgtgtatatatataaagagtgtatcatcgaaaagttagttgttgtgtatgtatgctgtcgggaatgttcctgcacaggtgcaaatttttgttgggttgttgttgtgtgtggtttaatgtgtaccgtatgtaggagacccaaattttctgctactggtccaatggcactttgcttactttaggaaaggagcataagaatgccttatttgtctcatgcaacaagagaaaccttctaggggttatttcatttgcattaatattagacacaaaacacttcaagaaacataaggaacatccaaaataacagtgaagagatcgttgattattgtcttgaactgattaaaatgcaataaaatggtttatgtgcccaacttcagatgtgtgaaaaatttatcatccagagttctctatgtcaaacgtcagaatgtagttaggttgagtttggaaattaggttggttcgtgaagttggatggacattaacattttctgtgtggttttgggttttaggtgt

SEQ ID NO: 88446 - DNA, 689 bp, Citrus clementina
  Intron number 2 from transcript clementine0.9_013535m (loc us clementine0.9_008808m.g) derived from phytozome v7.0 (c hr-ID scaffold_87; pos 866239 to 866927 reverse strand)
gaagcctcatttttgggtgtgttgtccgtctacacttttgaatgctcgctaattctgttgcatatttatatgtttggtatttctgtaatagctatttacataaatatttttcttttttttttcttttttgaggattctttccagttatcaaagtgctctaggcttaatctcttgaccattgcaacttattagcataaccatttttaaagttttatgatctattatgctagtttctttgtttaggtcgagccgttgaggctttctagttgcaatctgcatcaaataatgacctattacacacatttgaacttatattttaatttttcagatccttctctttttgtttcactttctccttttccacaaatcttttgcattgtattttgattcttagtttcttctttgcatgtcttaaattgtaattttcttaaattcttggagttttttctttaagaaaaaggctcgtggtgcggtagagaaggtactataaatgattgtctcggagatttggttaactttaaattttatcgattctgtaactatgtttttttctatgggagattgtgagatttcacatcttatatttaatcattcatgtgctcatattaatgccataatattaattatttattgatttattattcttttttgaagttgtggtgctagacaatctgggaatctagattcaa

SEQ ID NO: 88447 - DNA, 486 bp, Citrus clementina
  Intron number 3 from transcript clementine0.9_021559m (loc us clementine0.9_021559m.g) derived from phytozome v7.0 (c hr-ID scaffold_39; pos 1060045 to 1060530 reverse strand)
ccggtctacggtaattttttttctatttttaattataaatgtttgatttttcttatatcataatcatagtggtaagaagacacgtttttcattgtttgggttattattaaaatgatgaatttgatctccattcactcctgcttttgtttgggagatttaatttacattggcatgccaatctaaggcattttttaagttgaggtgatgtgacttttaatctaaagctgctatgaaatagaatcatggattgtcaaagatacaagtgggtaagttggttgttaattgttagcaaccaattgttctgctgtctaaaccgataagaaacagagcaattacaagcatatttttgtttagagtctagaccatcttgctgcagtttattgggcttttgaattcagtttcttctttgttgatatagttttttagtcttgttatatgatgaaaaagactttgttgctgatggtttaatttggtatgccaggagca

SEQ ID NO: 88448 - DNA, 758 bp, Citrus clementina
  Intron number 2 from transcript clementine0.9_009182m (loc us clementine0.9_006740m.g) derived from phytozome v7.0 (c hr-ID scaffold_12; pos 3339695 to 3340452)
caaagaagcctggttgtgagaacgacttcgttttggtatcttcttttctacccagttctttgtctttttgattctcacctgccccccttgttgggcttagttatgtaagctgatcatgatggtaacaataatcaatttgcttatcttatacgtgtttagtttgaatttcttgtattttgcagctaactgttgctatttatatcttgattgagattatgattatggaagtactttagctggttttccattgatttttgtttatcttcggaggacttgattcctggggaaaaataaaataggcataaaaaggtgaagtgggtattgggttgcttgtgtgattgattttttgatcgcttgtgttttctggacttatgcgacttgtattgggtgcatgtggtttcaatcaccatgatgcttaccagtaaagttgcagatggtgttatgttttatatctctcaattcaactgctattgttcacttgggttatctggtcttgagaaagttcaaaactagttggagtaataaaataagatgagagccacctactttctttttatcattattcagttacctacctcttttctttcttcatgtttatcattttggtttgcggctgcttttgggtagcttttattggaatgacaactacaaattctctgttaaacatgcttttgggtagctttatgatgtttttatctgttcaatttaaccattaatggtcattgcattttgttaggtaaaagttcagacgtggattg

SEQ ID NO: 88449 - DNA, 706 bp, Citrus clementina
  Intron number 2 from transcript clementine0.9_012361m (loc us clementine0.9_009869m.g) derived from phytozome v7.0 (c hr-ID scaffold_16; pos 2271903 to 2272608 reverse strand)
ctgcaatatcagtgaaaccatcatcaaagaaactggtatctgtttgctaactcatatgattcctttgttttattataccatgctagggagtagttatgaactttgttaacatgttggcaatgacaatttggaaaatctagttatcaagaataaaagataagcagattaattcacttgggttgtagagaatttgggtgaatgagggatgatgattctgaaaaatagtgcagtggccgataaatagctgaaagttgaaatcgagtcggcaggggatagaaagattggcttctgtcaaataggcttgaccaaacagcttggtcctactagtgcattgaaatatatgtgaattttatacatgatttggggatgatgaatacttcattaaatattttcaatacttcacaaatatgccttcccatttcagacgatgcttgcatgtgcatactctatttaactgcatttttgtccacagcatgatcatttatctgtgcacattgagagaccgggattgcgtttaccatattcaatcccagttttaaatgacgtgaaaaaagttctgatttttcaatttttccccaagctcgggttttgtcatgacagagttagtagttgacatttttgtgactgttgtataactactaatatttcttttcttccttggacgacgtccatcagtactgacttttgatctcattgttgacagccg

SEQ ID NO: 88450 - DNA, 342 bp, Citrus clementina
  Intron number 1 from transcript clementine0.9_012361m (loc us clementine0.9_009869m.g) derived from phytozome v7.0 (c hr-ID scaffold_16; pos 2272598 to 2272939 reverse strand)
gggtatgggttcttccacttttttttttttttaaaaaaaaaattgtcatgctccaattttcaaggattttacttaatagctacaaaaggataaacttgaatatcatgtgaccttggtggtataatgattttggtattactgcgattttggtttattctggagttttggtgtactttttgggaggcacttttgctaacgcacgcgtaccgtgtgtcacaaaatttccatttttgtgcatgtctaggagaaaatgttgacttgtttgattttttttttttctttttggttttctgtttgtgtcttgcaggtggaatagctggaatttttttgcctgcaatatca

SEQ ID NO: 88451 - DNA, 684 bp, Citrus clementina
  Intron number 2 from transcript clementine0.9_017981m (loc us clementine0.9_017362m.g) derived from phytozome v7.0 (c hr-ID scaffold_75; pos 749048 to 749731 reverse strand)
tggaggaggagaaagcacggctgctgagggaagaggtatttatcttatgataattatgaagaattctttgctctgattaccataatttgatcgttcataacatggctgtctgctgaagttgaagggcatttgagttttgtgaacccataatttgataagttaataataatggttatcttgctttccatagaagtgcatcatggataagcttttttgaggatcatataatcagttcatatgttggtcaagagttctgcgtatgagatatgaccttgatctattaattggctgacttcttgaactttgttaattgaatcatcttaagaatgaattttagcatctactatctgctttatatgcgttaaggtctaattttatgtataaacaaaaactttctttcgctgtcttttcccttctcttgttcatttgttctaaattatatcctacgtaatttttgaatggataagccttatgttcttcaggatctaaatcctccctggacatgactgtgccaacagtaatcattcatttgaaacttgaatggttccagatttcatttcttgcatttccctccttttgtactcaattccccctcccccccccacgcgcccgtttacaagcttcttatgagttgaatttataattgcaggctgagcagaacaagcagaggtttaagcaggtgtg

SEQ ID NO: 88452 - DNA, 1012 bp, Citrus clementina
  Intron number 1 from transcript clementine0.9_015995m (loc us clementine0.9_012692m.g) derived from phytozome v7.0 (c hr-ID scaffold_16; pos 2347689 to 2348700 reverse strand)
tccgctgcgccgtcggaggtaattgtttttcccttctttcaatctacaatatttttatttatttataagttatctgtctggttgccgagaaaacgcgggaaacttagtgggaagtttgagtttgtaaaatttgggaaatgggttgtttttgtttagcttaattgaattggtctgaaccaaaagtttgaattttcctgatttttctatcggtggaaaatgaaatcgttggaagtgaacgatacggaaaatctttgtcattgataaatgtgaatctcattgtgggattatgtttttgaattgggcttgtgtttcttagtgtagattaattatgtttttaaacttgtaatgactgaaattagcgacccagggactgtagcggaaccgaaaaatgtttctgttgccgaacccatgttgctgaaagctgttcgaggagaagatgttgaaagacctccagtttggcttatgaggcaagcagggaggtacatgaaggcaggtttatactttgaattcttggaatccgccaatttgttgtaacagaatttttacccttgaacttccaggttcttgttgagtgttttctcaaccctgctttgaaacttacgtttattggctttttcttttttcctctcgattttaacatttagtaaagtaatctaaaaaggcattccctctgttgctggatgagtatggtatccctgtgtggaagtggaactaggagaatagaaattttggctctttctttcatattaggtgctctgtgatccttgttggttgaaatcagatatttgcaattgctgttgtatctacttttatatcctaaatgtctcagttttattgttttgtttcctcgatcagctttatgtctgcttcgatttttaacatgctatttctttttttttctgaatttgtactccatgcgacgtggatctcatgtattttgtattttctttctttctccttttccttctttatgacagagttatcaaatcatctgcgagaagtatccttcatt

SEQ ID NO: 88453 - DNA, 477 bp, Citrus clementina
  Intron number 1 from transcript clementine0.9_004935m (loc us clementine0.9_004929m.g) derived from phytozome v7.0 (c hr-ID scaffold_12; pos 4557474 to 4557950)
tctccgagaaggatccgtcgtgtcgttacggtcgggtacgtgtcatttctaataacttattattatttttcaaaaaaaatattatttcttctgaattttagaattataattcatattgcatttagattaatttattttgttcggtctaattgagtaacaatcagggctaggttacattacgtttttgtttaattttatgattatcgaagaaaacgcccatctttgatggaattgctagtaattttaattgaatttttatatgacctcatgaaatgaatcctatctactgattatttgaagagcaggtggtttaatgattaggctgacagatgggactgttggttagagatatttttgttttttgtgtaatttgtggggttacaataattgtttggtaaatttggaggtttgttgagtggatatatatgcttttgttagacctagtgatatggtctttgtttgttttatttctccagt

SEQ ID NO: 88454 - DNA, 810 bp, Citrus clementina
  Intron number 1 from transcript clementine0.9_012274m (loc us clementine0.9_005737m.g) derived from phytozome v7.0 (c hr-ID scaffold_35; pos 1370219 to 1371028 reverse strand)
acggtgaccacactgctgtttctgctcttgttcaggtttgcgcattgcttcaattttattttcatttttatttttttattgtgctattattgttttattagtcattaaattagtcttcaatattagcagaaaaaacttttatggcacgttatgtgatattcatcaattcgagatgagaatggagcaatgaactattctgaaactccatgaaatacactgttcaattgattagtgtagcttaacttcgtattcatgacgtgtaattaaaatgaataatgtctttaaaatgaatggacatgtaatgactgtagcatacatatttcccctaaatattgttggatgttactcgttcttaccttggatgggaaaaaaaggaagagttttttaggcaattatcatatcatcaatgtattttttctttaaggattgtgaattattggcctggattttaccaagtatctgagcctccgtattattaagaaaaaatatatacaattatgatcctaggaaaggagtgttttatagtcttttgtctattttggaagaggactggttttagtaactaaggattgtcaattatgggtatgtatttggcaaaatatccaagaaaataaataaataagtatatacacacaaaattttgatcttgggaaggatttttctagtttttctgtcttgcacttctataagtttctaattgttatgcttcaatgatctgttgatataatcgttttgtagactaggcaggaattacaagagttgttgttggaatcaggaatcctttgcagcatcttagaggccaagctgtac

SEQ ID NO: 88455 - DNA, 623 bp, Citrus clementina
  Intron number 2 from transcript clementine0.9_025090m (loc us clementine0.9_023561m.g) derived from phytozome v7.0 (c hr-ID scaffold_56; pos 839841 to 840463)
cctcaggtgggtaccctgttagatgctctgtttgtgttttagattcttattattactatatatcatgttttcatggagaaatatgaagaaaataatagatgttaaccatctatgatggctttttttaatgattactttcattttctttgaatcctattaaagaggggcttcttattaatattttcagttttagtattagtctgaattacgatttgtcattctcaacttgaagaatttttttaacgttgttgtcatcatctcatctcatataggtcaggaaatgacatgagagttgtctacttgattttctctcctttcaccttacctttatccataccgaatataaaccagatctctcttatgggttctgtttactaagttatttagaaaattccataagattatctgtgtcttgagtgtacaacaagaagaattttggtagaggttacttagaaatgaattcttgacatgtaattatgccaatttttgaatttcactgttggtgtgtgcatatgttagataatctttgttgatttaatacgggattgcctaatctttgttgatttaatatgggattgccaattttaggggggtattgaagacggtgaggaccccaaattggc

SEQ ID NO: 88456 - DNA, 576 bp, Citrus clementina
  Intron number 1 from transcript clementine0.9_013376m (loc us clementine0.9_013376m.g) derived from phytozome v7.0 (c hr-ID scaffold_25; pos 3292050 to 3292625 reverse strand)
acgaagtcgtgcctggagtcgttgaaagccttaaggtattgatcgattgttaatgttttattgtttttcttttcttctgtttattttcattctttttcgaattaggatataattagaatatgtttaggattgagacgatgatattggtttaaacataggactgccaccgaatgaaattaattggtaaacactagccgctgtcaactgttttaattttgaaaacgaaacagagcacattttcaaaatcaagcacttttaaacacattatgcgttgcctaattgtgaaagctcagcagcataagtgtttggtaattattcgcatttacttggcagctaatgtttaccaattactcactcactcacttgtacttaatatctagtgatttcatttcaggattagcagcacctgaatcccaataaaaacctgttaccattttcataatattgttgttggatatatttgctatacatcaaaagatttgaaacctttggtgctgtgtagtcttgtttatgtttgtatctcatactacctgtttgctaggtgataacaaagttctgttctgagcgtattgcaaa

SEQ ID NO: 88457 - DNA, 788 bp, Citrus clementina
  Intron number 3 from transcript clementine0.9_024508m (loc us clementine0.9_024508m.g) derived from phytozome v7.0 (c hr-ID scaffold_12; pos 2900162 to 2900949)
gaggtgagtcatcctgcttctggtgcttttagtaaaggaatgcggtgaattgcttactacattttactttccatgagctctcaagttatattccagggggacttcatactgtgctgtccgtattctttgaaatgatcaatgactttatgttttctgtaactttgtttactctcttgcgttatatttaaatttagatgattatagagaatgagccaaaaagttgtcttctcttgaaattctattcacttccttgcatagttgaaattaaaagttaattggtagggttgattgcatggttacatgaattgacttgcagaatgaacctgtcacatggaattgaaagtccaccttgtagtctgaagtaagagaaccttaagtaagctgttttaccccatgactccactatatagtttctatctgtagaaccctatgctgcacttgtctttaggttattgttgacaaaaagaggattagcctaggtgtagtaagaatgaaagagagttaatcctgctagccctttccaatatttgggtggtagaaatttaagaataggaggaatgatatgttgctgttattagtgcttaggtggtgtttctccttcaaggttagtaagaaagcttcaaatgctgatccattaggccaagtccatgacaatatttaatattgattgtctgctagatataaaacaagtgtttatcctgacatatcatagccatatttcacatgacaaattttttattttgaattcttcaggtacgttcaagttgacccttcagtttacggaggat

SEQ ID NO: 88458 - DNA, 563 bp, Citrus clementina
  Intron number 1 from transcript clementine0.9_027867m (loc us clementine0.9_027867m.g) derived from phytozome v7.0 (c hr-ID scaffold_11; pos 2763776 to 2764338)
aaaggtactgtattcatatgcataattcgcgtgatgtgtagctggtctcatgagcactgccgttttaatattctccatataatttatttgatataaagaaactcatcatttttatgattaaaatggacactcaaagtttgtaacaaacctacaacagaaatcttgcccttaacagattctagcaactcacacacatatatatgtcatcaaattaaaccactcacatttctagcaacttcatcatttactagccatgttcaagaaaataataaaacatatttcccatattatttttgctcacagattcacttgcaaaactttttattatttttcttttttcagcccaaagtctctctatctttcgctcttttaattttcttctataaatagccttcaaagttcaaaccaaccacaagttctcttcgccactttcatcaacactcgtcaacaaaatcctcctagcaaaaatgttaaaagccccagcaaaattttcctttctttgggcaattgcccttctcctacacctagcttctgctcaaacacttcctgcacaagcaggtttt

SEQ ID NO: 88459 - DNA, 897 bp, Citrus clementina
  Intron number 2 from transcript clementine0.9_026699m (loc us clementine0.9_026699m.g) derived from phytozome v7.0 (c hr-ID scaffold_12; pos 2455128 to 2456024 reverse strand)
ctcgtccgcaatatctgcatcaaccctgaagtcaggtctcccgctaactctatccagaaaattattcattttttattttaataaaatttgtacatggcgatcttaatttctaactggatataattagcggaaaaactgattgtttagactaacgtgaatggagtggattttgaggttagaaatttgggttgtcctatagtaggcttgatttaatctgtcctattagattattgtaggagacaaatcaatgttagagaaagaaaaaatgcagttctggctttcgtgtcaaagaaaaaagtggaaataaatctctttttgaaatctaggaacagtctttatttcttgaaggtatcaccaatatcataacaatataagaaaaaaatgaaacttcaaatttgtttgaaaaaccggtaagcaaaagccggcctaaatgctgtgtttgatggtaccatggcatctgtgcttttggaagaatgtttatttgagtattaaattggaagaggacttttgttattttttaagcatgtgaaatttttgattgcacgctatgtgatttaagtggttctgcagttgctccatgtctatttgttgacaaaatgattaaaatgttgatgtagagctcacctaacttcagcggacgaattaggcttattataggttttgatattgagctctacggtgctagagaaacacttatttaaggaagacgtggcttggagatttcagtgctagtttttatttgttggagcctgttgtcttatttgcttcatatagaggggagaggagattatatgcattctggtacacagatgtgatgacttttgcttgacttacaatctttcttttggccttgttgaatcagggtgaccaagcaaaacagagctgcaggagttttgg

SEQ ID NO: 88460 - DNA, 782 bp, Citrus clementina
  Intron number 1 from transcript clementine0.9_001345m (loc us clementine0.9_001345m.g) derived from phytozome v7.0 (c hr-ID scaffold_8; pos 2332294 to 2333075 reverse strand)
ttgaatcatctaccggtctcagcttcaattatcaggtactatatattctttcttcttattatctgcaaaacaattttcttcttgcgttagctatatgggaagtcatgtacataaatggtcgcataacataaaagttgtaaatttagggctagggtcaggcctcccgcctccgccttcacatgtacatgtctacatgaatgaggttaagagagcttttgcgtttagagtgaaggctgaagtttacaactcgttttgatggttcattttttttaaaaaaaaattctcattaaattcttctattgataagttttttgtattcaattttctatcaccatcatcatcacagcagcattagctgttacgggcagctgtctgtatttaatctgctagctacctagaaatttgttagcttcagaactctttttactgttttctccgtgcacagaagacattctcagtcctccgaatttgtgcccatttgagtgaccaaattgcccttaaaaaatatgaggtgctctgagtttctactttctaactagccaccaatcctttactgacagaatctagtggtgtaaatcacaatggattgacccaaacacccttcacagtgcttgcatatttcattttcattttcgaaaacaatcggtccgccggttctcttgtccagttcatcatcaacactgtgccgcatcatttatatagaaaatttacaaaactgattaatcaggaaaaatgtgaatgcctatttgttttaatttcgtgttaatggctattgcagagaa

SEQ ID NO: 88461 - DNA, 686 bp, Citrus clementina
  Intron number 1 from transcript clementine0.9_020232m (loc us clementine0.9_020232m.g) derived from phytozome v7.0 (c hr-ID scaffold_11; pos 1250659 to 1251344 reverse strand)
aagctttctcgctctctgctttcttccaggtaccttgtctacgaaaacctcgtttgttttgtaagaaagtaattttcatttcctgtttggtttcccagaaaatgctagaaagtgcaaaaagtcaaacttttgcgtgtgtggtttttatttttatttgttgtgttgcaactggggcctaacgcgaatatttggcttacattggagtataaaatttttaaatgtttttctattgttttaaattttgttacatttgaaagtgcttttgtaggaagccttttttaactgtgatataaaagcactttaaagtgcttattttggtgcttggggggggggggggggggagagaacttgaaaatgcttactggaagtacacccatcaagtaaatgtttcctagagtgaaacaaaagccgttccagagaatagaagcagtttaaaatagattttggaaaaataaaaagcagttgaagtgtttttcctgttatgacatgggtgtcaattgattttattatgagtctattaacatttatatatggaaatggcatcaacctctgtgttgtttttcttcagctctttgaaatcttacatgaatatttctaacatagttgaagggattcttttatttatttattcattttttcaaattgaaacaggagccaattgtctgagaaactgttagctggagaag

SEQ ID NO: 88462 - DNA, 689 bp, Citrus clementina
  Intron number 4 from transcript clementine0.9_022766m (loc us clementine0.9_019145m.g) derived from phytozome v7.0 (c hr-ID scaffold_8; pos 3305988 to 3306676 reverse strand)
tatttgcattggttttggaatctggaggcagtaagtttacagttttcaataatgactccatcaatttggaactttcacctgaagaattttcattcaagaaaaaaaattaaaggaaccaaaaaagtgggaaaaaaaagtgacgaaaaatattgttaaggaatttaagtttggcttcatgttttcttatatcaagctgcaacgacaattttgactgtttttgctaatcacttacatttcctttttccctgatgtatgagaatcttatttctatgtagtccaagctattgatttattgaactttccgtttttctctaatgttttctgtacctcaatcattttcagtattagtcaaccaagaatattatgcttctaatgataaattatgaaattgaaaataaactgtagctcaccttagttcgtctagtaggtcaaactatctttcgacgggcaatagtcatcattttgtgaaatgattgggccaaatatggaaaggaagtagccttaggaaattaagtggccattcaaggaatggaggacataaagcatgataattctttcattctctatagcagtgcttttatagtttctgttaaatcctggctattgccaggcataagatttcttgttaagcaagttgatgagctcgatactctttggtttgctgtaggtgatctccctgtggtgatatc

SEQ ID NO: 88463 - DNA, 509 bp, Citrus clementina
  Intron number 1 from transcript clementine0.9_022766m (loc us clementine0.9_019145m.g) derived from phytozome v7.0 (c hr-ID scaffold_8; pos 3307226 to 3307734 reverse strand)
cgactcccgtgggtttcaccagtgcagacccgcctgtaagctcccccttttttctattttgctaatatctctattttttttttttttgggtttcctttttgagctctctattgagcaaaataggaacttgtgtgacgtttgatcaggctttgaatgttggtccttttttccccccttattaatgtttttaattatattttaaaaaaattgcatctttgggttgctatttaagtgcatgtattctagcatgtttgtttagtttatatgaaattttaattttattgccttggtctttactattgttctgttagtaattccatgaacttggagccaagaaatgtgaactttttgccttgaaaactaaaggatgaatctttaatatgtagtggagtattgatcaagatttgcattgaatacatccccgttccactttgaaagtgttcttatttcgtgatgtcttgttgttacttgcagttttccgcactggcgctgtgaattcagcatcgggg

SEQ ID NO: 88464 - DNA, 713 bp, Citrus clementina
  Intron number 1 from transcript clementine0.9_023552m (loc us clementine0.9_023552m.g) derived from phytozome v7.0 (c hr-ID scaffold_35; pos 351688 to 352400 reverse strand)
cggcctcacctctctctcatcacgtgattcacgctgtgagtttatttatttatttatttttaatttttttaattagcttaaaaatgaatgaataattacaatttccaattatatagaagcaagacggagatgatcaataggcaagcttacctcagttctttttgttcaatattcttgttgtaatttatacactagataaaatctgattatgaaattattgattgattttttttcctattgtttttcagtcattttgatttattaaagtttcactgtttatgagtaaatatgtgttgaatgacataaaaatagtcgccaaataaaattattattattattattattatttgaatgacacaatattgcatccagtgctaaactgacaaatgatattttacacttttagatgctagaatagtgttcaaatttcaatgtcgctggaaatagtatgaaaatactatctgtgggattatgttaaagaggtatggtaggttttgaatggatattttgcgaatggtaaatttaaaaattagttttgatagaggaaccttgatcaaagaacttacttcaaggaatggtaccaggttgggcatggccaatccagaccaacaaacataagtagtttggtcttcttcaatttagagtatcttcatcttcttctctgactatttttcctgtgtgtaaatcagagaccggaaagatagaaaagagag

SEQ ID NO: 88465 - DNA, 988 bp, Citrus clementina
  Intron number 1 from transcript clementine0.9_010328m (loc us clementine0.9_007475m.g) derived from phytozome v7.0 (c hr-ID scaffold_8; pos 3725117 to 3726104)
gctgagttgttgactaggtgactcttttattatgtggaggtgttttctttgcttttgatgttttgtttgttttgttgattcattggtatgtgtttgattgagttttaagattgattgctagcatgtaaatgactgtgcctccggagaattcaattcatgttctgcattgaagatttagaattgattggagtgttaggtgtttgagcagtttgaaagatttgcttctataaggaaattctctagtcactgcatttttgagattgtgtttcggtaacatgctgtttgtatgaatcatttgctaccttgattcattaggttgtgtactatgcgaaggattcatcaaattgatgaattgagtgataagaagtgattgttttctggttgttcctttcttgaaatttaacaggtatggagagataaaggaggtatggttggatggtgcaaaaggtgaaggggaaaaggacatggagtatttttttgattcttggtttagcctcattcatcagctccaacctcgggctgtcatcttttccgatgttggtcctgacaccaggtggattggagatgaggctggtgttgctggctctacttgctggtctcttttcaatcgaagtgatgcaaagattggtggtactgaccctcggtgagttcagtttgttcattggaatgtatcaaccgtccacagattctgttgtagaaaaaattgaaataattcaaaactgatatggagcagtctttctggtttattaaatctaattctgatttagaacttacctactaaattaattaactctccagtcattatcattaaagagtttgcaaagatgatgtgaggctttagtggatgacatgctgctacaatgagagtttgaactaaactatagagagaaactttatttggatttctcctggaattgtacaaagtgtaagaggctcactgaatttttgtttgacataactaacaggtactctcagggaggcgaccctc

SEQ ID NO: 88466 - DNA, 831 bp, Citrus clementina
  Intron number 3 from transcript clementine0.9_018232m (loc us clementine0.9_018232m.g) derived from phytozome v7.0 (c hr-ID scaffold_16; pos 872134 to 872964)
gggaacattagaagcacttataggaaaatacacttgtaagattgtcaacttttatattttcttgagataattgcagttggtggcaaaatttattttgcttatatttttttctgcttctgcattgcgtctactaaaaaaatagcatatttctgcttcatattgtgtctatagtttacctgcaacttcatgggatttttagctcagtgagttttttggattccgaggactattataaatatttctttcaaactttagaaaccatcttcctaccaaaaatgcactgacattccccttccaaatatgtggtgtggtgtttcccttttctttggcagtttgtttctggaagatggccttatctgtgaagtgaatagaactatgcccaatttcttaagttaagactttgtttgccgtgcttggccctcttgctatagaaggtatgcaaatgagaggagttttcttgttaaaagaacagtcaaccagttgataacaaataagagagtgagacagatgatggaattgttgtgagattttaatcttactcataggaaaaaggttaacagaagccttacaggcatgctaggacatactaccctcccttcttagaagatactggccttctcccatgtcttattcagggaaacaacaagcttgactctcaaagagaatgtggcagaattgcttcccttttactacttctttgatcttagtgtgccatgtttattattctttcttggatgtgttatgtctctcggtgtttatttatctgaaggtttgatgtggacattcctggtgcaaggtcatacaaggaaagtagttttacaaaggcaggta

SEQ ID NO: 88467 - DNA, 294 bp, Citrus clementina
  Intron number 2 from transcript clementine0.9_008637m (loc us clementine0.9_008486m.g) derived from phytozome v7.0 (c hr-ID scaffold_8; pos 1001549 to 1001842 reverse strand)
atagatcggcgtggcccgattccagacagttccttgtttgtgctttagttcttttacacaattagttaactaactgcatttttttttttagttactgaactattttgatttaagtcgtttctttaattgatttaatcttaggccgtgtttggttagcttcttttcaaaagaaaacgctttggaagcagaaaaacaaaactttttacttactgaaaccttataggataagtttttatatagtgtcttttgcgttctgtaggaggaggcaagagcggtggggcagttaaggagtga

SEQ ID NO: 88468 - DNA, 1037 bp, Citrus clementina
  Intron number 1 from transcript clementine0.9_006412m (loc us clementine0.9_006195m.g) derived from phytozome v7.0 (c hr-ID scaffold_104; pos 81267 to 82303 reverse strand)
actctgtttggatttcttggatcacaggtatatatctattcttttttcctaattttttgacttgttttagttccacctcgttgttttaataaggaatttggattcagtgctgatgttttaataatttcctatccctcatacatttataattagtttgaaaagagatttaattttttaaatattctaatctaagcctgaatccttatccttcaatgagatagtgttttagaaagtttgagggcagacgaagctgaaaataagcttgactttgttattatttttttgttttttaaaataagcttgacttcgttattatctttttatttgttcttttgcttgtggataacatataagattggagttttctgttcttggaagcaaaacaatgaaacttttgctttcaaagtcggaaagcaaattgtttaggcatgacgcatgagtggaccatggcagagagtcggagactcttttattttgtttttgaaatttgaggtcaaaattaagcgacttgcagccctcagatattccttttcattgctcattatcgttgttctagattaagataagattatctactttatatatatattattttttgtttatgcgaatacattattaaatcatattatttaataattcatctgaatttattctactaaaccttacgatttattaatgtttcctcaaaaaaaaaaattgaggacacactctctctctctatatatgcatatattaaattaaggtggttttactattcatgtagttaggaaaagcatgacactggaaaaaagaaagacaaatgaattgaaatttgcttgcttgtgaacctagttgcagccttctgatgtatatatagataagaaaaatgttcatcaaaatacataattaataagcttgcatctgcataatgctgaaattgagaggttaactcaaatcaaatttgatattttgtcattgttattcaaattttgatgtatattgtttggattaatgaatttgcaggggaattccaaattggtaacaacttaaaaccatta

SEQ ID NO: 88469 - DNA, 903 bp, Citrus clementina
  Intron number 2 from transcript clementine0.9_001151m (loc us clementine0.9_001150m.g) derived from phytozome v7.0 (c hr-ID scaffold_8; pos 2494312 to 2495214 reverse strand)
aggtttgcctcagttatctttattaccttttagataacgataaggtttctgcttaattgaaatttgaatatgttggctggagatgttgtgtagtcatctaataattatgatatgataatggatgtgtcgtattatgaaaaaagtgtgctctggcatttgatgaaaaagtagttcttaacttggatgtcctatttgacttgtttccaattttttttttttccatattttgccttgctgcagtcagggcaatagtcctatttgtctgttatttttctggctaagcggctaagctctatgatttattccctgaacacgttacagcctaattgctgatcacctttttctttttggtctgtctatagcatcattgctatacaaaaggtttctttgcttcttttcatttagattttacgtagtcaactgtaatatattttatttgtgtctttactgagaatgtgcttggtattaccagtctgcttaacaaatgtttggtgccagttgtatggtcaaacacaaaccgaccattctcttaggttaaatcattttttatttgacctttgatctctaaaatctttcattcgcaaaatcctgggtctgttgcctggtgtcatctttatttatcctgcacttttattaagccttaataagaaaactataattatttgcaatgttatatggcatattattaataatttgtcttgtttttctttatattctaatgtatccagaccaatacctataggggaaaaatatatgtactatgaatgctagatgtcttatttttgatcctgtgttactgttgattccttacagaaattttctccaaattatatttttcatttcaatttcataaataccttttcaacttcgttgtagatttgtgtttggtgttggcatcacata

SEQ ID NO: 88470 - DNA, 1022 bp, Citrus clementina
  Intron number 1 from transcript clementine0.9_011177m (loc us clementine0.9_011152m.g) derived from phytozome v7.0 (c hr-ID scaffold_69; pos 410854 to 411875)
gaatttgcttccacttctcgttgaagcgcttccaggtgaggcttctaaaaacgatccgtttcaatatctgaatttccgataataaatttttggttttgaagtgatttcatagcttagaatttgtttatttatttattttttttttctggtcattttttttcatatttatacgggtgaaaaagttggagtggtttagttctagatctgatcataattgtttattctaattattccttttgattattttttaaaatttttttacagctttattatgctaggaaaagaaaaagaaaaggaagcttttaggaattttttatttattaatctaatttttggtaattgtaaatcgctaattttaggaaatggaatctaaataaaatagtttggagttggctaacaagtaattaatattttttttaattttggttattgtgtaaatatttggaataatgatactgcacatataaattatcctgtacatcttttctttgaactaatttttttatttcacctttaaatatttttgtgtggcaacaaagagtttgaacctgtagtatgattgaaatatttaatgcaatctactggaatttatgtttttccggttaaaatttattgcaatatgtgagcactgccacttcatttatggaaaattactatttttgggattttacgtcaatttttagttctagttctcaatcttgaaacaaacatatatgaatttgcacttatgtatgcatcagaactttggttcaacctttgatggtatgtttgggattgcgttttaatccaaaaggaactaccagttctcaagtattaaagtgtaccaatggtggtacatactatctaaccaataaaagtgggtgattagctaacattttagttgctgtgctttcaaagttagacggaagcatagaagttctaaatgtcccatgagtgttggaaacacaaaatatgtttctgatgtatgaattttgttattcatattaggaagataggtgtttgggtggtacagaaggcacgac

SEQ ID NO: 88471 - DNA, 716 bp, Citrus clementina
  Intron number 1 from transcript clementine0.9_009327m (loc us clementine0.9_009327m.g) derived from phytozome v7.0 (c hr-ID scaffold_145; pos 128761 to 129476)
attctgtcattcagtcccatttcaacaagggccttgtaagtttcaatatagttattttatattttcagagatgattatcattatttattaggattaaggtgctgtataatgaaattactagccgttgaagaaaaaaattagtagtcgaacactgtcaaaattaatgtgaccttggtgggcattgaggtgccgccagccacggaatagaattgttagctgtggaatcatgagctgttaggtttaagtgaatgagtcgaatgaaaatggtacttgtcaagtgatacatagtgtttatggaacacttttgcccagtgcaacagttacaaacatactctatgttgtttattttggattgtgattatttttggttggtttcttgctcttttcttctctctgtcttttttttttttaatttttggaaagttccaatttggagtgttttacgaaaatggttatggaaactgtttagtggaatgaacatgggaaattcaaaaattttaagttctgattgtttggagaaatgaaactgtggaagcacaagattttgaagtaatgaaataaggcttttggttgttttccaattcttgttcttggaaatacatggaacattcatgaactttggatttttgaattttacattctgaaaaggactaaaaatgtactaccagtgtgcagataattttatatgttgatttcttctcttgttctaggttcag

SEQ ID NO: 88472 - DNA, 962 bp, Citrus clementina
  Intron number 1 from transcript clementine0.9_017274m (loc us clementine0.9_017314m.g) derived from phytozome v7.0 (c hr-ID scaffold_12; pos 310964 to 311925 reverse strand)
gcaagtccaagcctaggagccccgtcatcaccgtacttgcccaacgttttttttctaccgtttcacattcatgttatgttttatattgataatgtgcttaaataatacttttgagttatgagcaaaatgcttaatgtaaagtctgttatatagtaggatgaaataatgcttcgttaatcctttctttttgcttgtttgtctgaagtttaaaaaaattaataaatgaatcacaaccttacataatttggaagaactgagaatattttcaagtcacactattcagtggcacagactaagaaagcttaattactgatgtgaactaataataactcgtgcataatgctgttccagtgcacaaactatatccttgagtgatgtgccttccaaaatggactctgctttgtcgaaccaacaagaagcaatgactgaacaagtgcctttttgaatgattcactgtgtcaattgtattccttcctttcatggaaatttttactcttttttttttcccaagtttaatgcgtcgttccttgaggttacattgtcgaaaacaaggttgccttctttctgaaagaaacaatctataggctgtggaccactacaccaaatgatacacatcctccctcttccccttaagggaattaaagaaagaggaaagtaactctgagctagttgaccataccatcaacagcaagtaggattgtaagatggggacaaaaactgagtggtgagatacttcttgtgttgattgtttgaacttgattattatgcgaaataagagtatgcaagtttaagacttcatgtcttgtaatagattatcttcatcctgtttcttagcaggttatatctgattgatttttgagcattaattttctttgcgttattcatgcaaacaagtagtccacttattcatttagcttgccatgctcctctgagcaggtcattccttttactagtggaactgc

SEQ ID NO: 88473 - DNA, 932 bp, Citrus clementina
  Intron number 2 from transcript clementine0.9_000170m (loc us clementine0.9_000167m.g) derived from phytozome v7.0 (c hr-ID scaffold_8; pos 42245 to 43176)
cgcgacagaatgtaagtcaaatcattctttctttcttttctgtggttttagcttcaaataaaaatataaacctaactggacaagatgagcaagtaggtttatatttgtattaatctattcaacttgtccattcaattgctgtaggagttaatggtacaaggtcatgataacctaatattatcaaaattaattctgtaaattaccttattcaaaactagggagaaccttcttttttctttttctttttttttttgggaaccttgacagtgtgagcaaaatttattaattaacactagagagaacttgattacattaccaattgaaaaattcagaggagaaacaataataggagatgaatgcaatacaagaatttgttagactaggcaattgatggcgtagcctttcatacacactattttttttcttaatgcgcttcaattattgaatgtttgattggagtttatatttataaatgttgacgaatataaatgccttcagtattttttgtattaaaaaaaaaaaagttacccaaaaaaagaggagattgatatcaagtttacaatttctctaatgcaagaggagctgcagtatagatactatgcaaaatcaacatataatattattgtagaacagcctcctgattctccaagatgaaaataaagacgtttcctaaattctctagtcatgaatatgatcctgtggttactcgatggtcacatcttaggtcttctgcaactaggacttgaattttcacatgttatatcataatattatttttcagattgttgaattagtaatttttatttagaagttacttttggttgggtagtcttagacagtttggtgcttttataaaggaacctcatattcttaccaggaaatttgtttatgttatgactaagtaattttatttcatcctttccagctttgga

SEQ ID NO: 88474 - DNA, 692 bp, Citrus clementina
  Intron number 1 from transcript clementine0.9_025294m (loc us clementine0.9_025294m.g) derived from phytozome v7.0 (c hr-ID scaffold_39; pos 776941 to 777632)
gctggtacttctcccaatcttatctctcttgtgggtgcttctaaattgtttagatctggtttcaaatcgaaataaaccctaagatgagttgaattgtttatcgtgacttgatgtttgattgcgttacatgttagttgataaatacttgactgtgatttgtgggctgcacatatcttgtgtagttgattatactccgtttcatttatggtaattgggattttcttattgttttgatgaattgttatgggaaaataatagtttgttgtttaaatgatttgtgttcggcaataacagtgaattttcctagccagtagttggagttattgtaatgtttttcaaacttttgcttataatttaactggattcatatgtgaaaaatttcattagcaagtatgctctattgcgccgaagttcttgactttggttttggtctcggtctcaaaggcattaaggtgtctagttttgtggagtggcgttttcagatttgttacactgctcgtgtatgaaatcacttctttttgtattcttcccttgttatcagttattgcctcaagctaaagccctgagttgtattgtgtataccactgatgctgtttcctttttcttcattgttattttgatttgttttcctgttggcttatggaatataatcctcagtgataagtgtggtcttccaattctgtgcagcacct

SEQ ID NO: 88475 - DNA, 631 bp, Citrus clementina
  Intron number 2 from transcript clementine0.9_024164m (loc us clementine0.9_024164m.g) derived from phytozome v7.0 (c hr-ID scaffold_21; pos 1691947 to 1692577 reverse strand)
ggcgaaaaattcttttaagctagaacaccccctcggttagtgattcttctatattattgtctacgggtattgtaaaaaatatttttcttttgttttttaaaaaatgtttttcttttgctttttgggtgtgtcttaggaggaataggttttgattatttggaaccctaaccctaaatattatgattaaattatttaaaaggctgaatttatgtagtagttttgctagtctcgcgttattgttcctgggatattgttggaattgtaattctgggctggcggcacaaaataacttcaattgatgcgaattctggctctcattagaatgagtaggatgacttaactgtacctaatttgactcattaataaaattggtttaaactcacaagacctttttttttttattaataatgttttcagtttttagttgttaaacaaagagttttgaatcttttggtgcataaggcagtttgtgtgtgaatgttgtggaaactgcgagagctaattgacagtttcaatgaaaattcttatacttaaaaactgaagaattattactattaggttgtgtaagttaaattttgtaatgttctatatgccagagaggaggcaggctgaagctgctcgcatcagagac

SEQ ID NO: 88476 - DNA, 776 bp, Citrus clementina
  Intron number 1 from transcript clementine0.9_030765m (loc us clementine0.9_030765m.g) derived from phytozome v7.0 (c hr-ID scaffold_56; pos 1381718 to 1382493)
gaagctgcagcctcccgtccaaatctttttccctaccttattactttttcggaattttttttcagtacattcttaatccatacgcctattacgtgaattgctcgagtaatattgttgatgtggcgtttacaaaagttccatgtttataaatacttatgcattcaaatgcaagggctttgtttttgtttttcaatattgtacgtaataaagaatttgtgaactatctctaagagcataccgatatgacctttaatttctgtttcttttcacttttgcaacagtttgcatccacaatgcaggagtagtggcaaagattatttgctacccatattatatacgtaagcatatccttatacatctttttgatcatgtgttttcgacgttaataaatgcgatgggttcatatattctctattcttttactctatatttttttctgaatcatctctctgattaggtataaagcttattttttttttcctctcctcaattgcagttaacttagtaatttcccaagcaatcttttggccttccacaatgtactcatcaggaatgtgggattagataagttttctgtcaggtaaaatctcctctctaggatcctctttttattgctttgcttagtactatttactttcaaatatcattctccttaccagggtttccacttgatgttccgataattggtagatttattcttgctccaatagtctttctcgtgttccttatccaaaaatatagaaaatcattggagagagtcgataatcttgagaaat

SEQ ID NO: 88477 - DNA, 523 bp, Citrus clementina
  Intron number 4 from transcript clementine0.9_011511m (loc us clementine0.9_011511m.g) derived from phytozome v7.0 (c hr-ID scaffold_121; pos 338360 to 338882 reverse strand)
ggggctattgttggagctattccacctcttcttgggtaatttcttctttattttttaggcttctttttttttgtctttttttttgcccccacgtttgatttggggttgacagttatgctttgattgtattagagaaaagtgcttttgcactttgtatagcaagtgctaccatctgaattgatatttaatgcacgtttcgagttcaatatgtgatgggacttcttcatcctaatttggtacgctgagcttaatggatgggatgaagaattagtatcactttagcaattaagttattaagaaatgcagtattggcagaaagtggttagttaatgtattccttacacaattttgatgaaaccatggagatcagactgattgatatagaatcagattgatatttctagaatcataattcaacctgaattcatactttgacgttaagtcaaaacatattaatcatgcatgatgcaggctcatgcttatctgtttgttctgattctcaggtggactgcagctgttggcc

SEQ ID NO: 88478 - DNA, 514 bp, Citrus clementina
  Intron number 1 from transcript clementine0.9_009796m (loc us clementine0.9_009796m.g) derived from phytozome v7.0 (c hr-ID scaffold_8; pos 3785116 to 3785629)
cctctcatcactaaccctgtcgttaacaagaaacggtatcgctttttatttttttcgtttactttttatttttccttttaaaaaagcatgcataatttcgtgtttcttccatttattattctgttttttattttattatggaaaaaaatatattccgggtagttagggttttagcgtcttgttgtgtcattgatgctaaagtggtccttttgattgttagggttttgtgataatcgtctcatacttttcgttacggctacggtcgatggttctgtttcatgtattaaattgaaattttgaggtttacagaggaccccatcagttgactacggctctttttcagtttttggtattgagttttaggacttgagcgaatagaatttttgacactcagtggagtgtattgcctgtgaatcaagtttatcacattgtttgataattagttgcattgttcaatttgcactgctaatgcatgtcctttcgatgttggccaggaaaaaagctattggattgg

SEQ ID NO: 88479 - DNA, 592 bp, Citrus clementina
  Intron number 1 from transcript clementine0.9_008113m (loc us clementine0.9_008113m.g) derived from phytozome v7.0 (c hr-ID scaffold_8; pos 403690 to 404281 reverse strand)
gtggcccaactgggtatcttgcctggaaggtaagagtttttctcattttttatatatagtatcctggcaattgtgttttgtttttaacaattagaaatatgattctagctctctatgatatgattaaatctagaatgaatgaaatttggcaattgctttgcactgcttgccatatttagatgcagtgttctttgtctaaagggcagttctttcttgatcatatcatcgtgctaaaattttattggtggagttgtttgaattacttcttgctgttagttgaagtttgttttcatgatgtgcttttgatgcctgtatgttgaaatttgtggcggaacttcatgactaagtttacaatcaggaggtgcatcattgagccagcagcatggcaaaatttacttggtagtggattctgtctagaaattgtgaatcaacttgaccgatgttataaaataagtaaagcaatgctgatagctctatttgaagaatagtttgtagttaacaattggaatagctcagcttgtttatacgaattgttttgtatctgtttcaaataaaaatacgttaattctcttttgttaggttgagggtaaat

SEQ ID NO: 88480 - DNA, 1021 bp, Citrus clementina
  Intron number 2 from transcript clementine0.9_023771m (loc us clementine0.9_023771m.g) derived from phytozome v7.0 (c hr-ID scaffold_124; pos 64001 to 65021)
cagcggatcttcttggtgaactctttgtgttctcggtaatgccgtgtctcattatctagtgttagtgtgaaattgtggttaaatattgtatataactttaaatgctggcatgtttgtatcatatgattgggttgtaatgactaacttagagctacttatctttatagccccttgctgtagttgccattggagttggatgttcttggtgtgagttgctcatgcatagtcgattgtataaagagtgatcatgaaaccttccttgtattaccataactgcctaaaagtgaagtcactaatatgtatcatgccttagttgctgggaagtctaatctggcctccaaaataaatcttggagtgggttggtagctgaacaggcttgctatctagctcggttagccagagagccttggcttgagggttaactgtatgggtatcttcggactcactcaatgggggattagcacttaaaaattcacaccaatgtagcaggactaattgatagttgcataagaagcctgcccttggttatatggctggcaagtgcttttgttgccaattgattacagactatgatttgttggcttgaacatgagaggacataacaatatcttgtgcttattcaacccttttggtagatgtccttgtctgtacttttaaaaggaaacactgacatacagatgataggatatggggggaaacggtgtccttttttaatccgtacatggaatacttgctggttttcaacaatttcaactaaaaaacatcagatgacatgctatcaccttatatgatctattagtaccgaccagggatgttctggacaggctgaagtggtgaattcggtggctgtatatatgtattcacattgataatttgagcaactggcctcttgtagtataattttactgcttatattgctgtaaactgtgtaatctctataatttgatttgctagataacttgtatccttactggttgtctctctaggttgcaggagccgctgttatttttgaggtgcagag

SEQ ID NO: 88481 - DNA, 848 bp, Citrus clementina
  Intron number 1 from transcript clementine0.9_016711m (loc us clementine0.9_016711m.g) derived from phytozome v7.0 (c hr-ID scaffold_8; pos 2601974 to 2602821)
cttcaagtggacaacatcaggtaggatttgacaagattttattatttatttgaattcttcattgtattttgttaactttgattaccttttgttcattcccttcttttccttttcatgggttctttttaactgcactagtgattctggatttgggtttaattggaaagttaattttttttatttggttataatagactacttttagttactatttaatgtctatatagaggaaaaagaaaagatttttgagcttttttaattttattttctagggaatttgtttcttttccttcttttttttttggaagtgggtgttggtgtttatgtggttatgtttatattctaattcatatttgttattagtcttgattattctacctttctcttgtttactttcccttatgggatttgtatactctcctttgaaaaaaatcttgaaattaatcatgtgattatacataaggttggggagaatattgatgaagacctttcaatttcactttttttttttaataactcatttcggttgtctgttaaattaaatctgagaagataattttctcttcatacaatcggtttttctattatacattagtatatagcattttattggtgattaattttaaagtaaccaatatcatgaggatttcaaattagggtcttccaatattgaattcaatccgattccctattatcaacttggaaaattgagatcaatttatatatatataacattagaagttacaagatctttcttgagtattttgataagttttttttacaatttgccaatttaaagtgttttaatttgaaattgtgttgttgtcaacttgtcatcaattcaggaa

SEQ ID NO: 88482 - DNA, 550 bp, Citrus clementina
  Intron number 2 from transcript clementine0.9_014309m (loc us clementine0.9_014309m.g) derived from phytozome v7.0 (c hr-ID scaffold_39; pos 877022 to 877571 reverse strand)
aagttacactgtgaaagctactgtgcgtgacccaagtcagtttctctctctcgatagcttcagtttttccaaattttgatgatgttgtatcttttcatgttcttgttctgggtttaattagtagttcttttgtttgctatgattaattaatttggttggtcttgttcttggttcactttataagcctcggcccccacaacaagctcaatcaagagaggtctatgagtttgatttgcagtaaaaaaattccaatatcaagcttttcgccaaagctatcaacagtagtatttatcaaatttttacttgtttcaagaaacagtagcatcctttttagaaaaatacaagatcgaacaccttcattaaaaaaaaaaggaaaaatgaaaataaaggtttggatggtgatgagaaatctcaccagtgaacaccaatcctttcccgtatctgcaggtgcaaagatcttccacagccagccgagctagccccaagggggctactaagacacaacacttaagtttactagttctactcatatgttctgcagataatcata

SEQ ID NO: 88483 - DNA, 804 bp, Citrus clementina
  Intron number 2 from transcript clementine0.9_020297m (loc us clementine0.9_020297m.g) derived from phytozome v7.0 (c hr-ID scaffold_12; pos 4225773 to 4226576)
gctctcgggagccattgcaattcctgctgcaggttacgtgtgttgtgcatgtttcttcattgcaattttactctgaaaagtttgagactttgtgtatttctgcacaggctttttatatgtttttgatttagtataatgaaatatctagaatttggttttgttttgagggaaaggagatgatggcataattgtaaaaggtctgagcagagaatgggtgtttgtggtttgtggaaaaagaaaaggaagaggagccttgtcccttgcttgagtattagcattgtggcttctgggacctcttccacagtaaattaccttggtcttaaccatggtaatgggtgaaataattggctttggatgcactttagatttctcacttatcctctaaatttctcccgacattctatctcactcaccaaaatatgatttttttatcaattagctcattcttctgcagtgatcaaacagttttctgatccatttttatgtctgttttgcaagttgttactgactgcacttcatattatgaaaatctgcaagtcaaagtttcttatcaatctgataaaaccttcactctctttactaaaggtggatctaaaagaagaaattaatattgttgataaaagcttggataaccatttcttcacaattttatctcttcaagagaacaataataggaaatattttatgtaactttatgacatcatagctttgaatattaattgcacgaagttgcgccttcctttttcctccaaaatctctgatcttaatttttcctttgtgcttttctttattattgcagcttac

SEQ ID NO: 88484 - DNA, 995 bp, Citrus clementina
  Intron number 2 from transcript clementine0.9_014864m (loc us clementine0.9_014864m.g) derived from phytozome v7.0 (c hr-ID scaffold_12; pos 394294 to 395288 reverse strand)
tgtggacttcagggctgatctttgggaaaggacaggtatgtactctatgtttggtgatcaattaagaatgatttgaaataatttataaattttttttgtgaatttccttgttaattgttattgaaattcaagactgtaattattaattttgttatgaagttacatgcttagaattttgagttcaaagtcttggaagaggtcttcacattatagtgactgtagagcctcttgttgttgttcttcttgattctccactggccattgttataaggtttgtgtttctgttttcaagtatcttatatgaagatcaactggaagtacgatggcctaatattgattttctcttggttaattatttcctgttgacccatactcagcaggttttggaggtattttagatccctttcttgttatcaggaggcagtatttgagctgtggttggaaattttttctagtgttgcttcttagaatatgttgtaggtttggtgtaacctgagaggagaactttaatttaaacttgatgatatttaggaagctgcggcttcgtgaatttggaagtagaagggattagttcataacatgtttgtcacctaaaacttgtgttgctgcccatcatgtcttacatcattgatattgctgttatgggaatattttctttacctttttaccctctacatccacaataatgttagatattataaatattgttacaagtgaaatacactgtgtaagttgaggtaactgtatgattttccaaagtataaagcacctgacctggctgaccaattgaggtccatgatcaaactaattgcagccctgaaggactatcatcactgatgtatattttgtctttttgtcatgtatgttatacattgtcctgtttttcttttgttcttcaattttaataatttaataattatttctggtggtccactcatcttctctattgatgcttactttcttctttcagggaattgttgggttggaaacagaat

SEQ ID NO: 88485 - DNA, 885 bp, Citrus clementina
  Intron number 1 from transcript clementine0.9_026716m (loc us clementine0.9_026716m.g) derived from phytozome v7.0 (c hr-ID scaffold_12; pos 4906944 to 4907828 reverse strand)
cccaggagtttctcgaggtattcaatctctttcatcagtttccgtcgttactcttcatttctgtttttttttttttcctctttaccctttaatcttccttagacattcattcttttctctgctttgtgctttttttaatttcgttctttttgcaaatttgtgttcgcgcgttcgaaactaaattgatctttagattttctttttaaggaaaaaaaaaaaaggcccatcttttcgttacttttttggctgtaaattgctttaggttatcaaaattgcttgaataaactgccctctatatacattattgatttttagttgtagttggagggtgttttgggaacttgttcttgagagtttctccagtcacttttctcttgcattctaccttatttgcatgttttatacaaagggtctaaacataagtcctcttacaagttatgccgaggtgtctttcgtgatttcggtgggatcagcaattctttcttgagtatctgcgtgtatatgcttagaaacattggctaatttgagtcatagttttacctcatacatctgataatgcggccactcaacttctgacttatctttacctaatcatcactttggatttcgaaaatttcctaggtcatagtgaggaattttgaatctggtgctaatatgtatgtattcccataagcaatatttagtattgctttgtctgctgagctgagtttttagtttttgcccctctatcttatttgttctgacttcagttatgaaaaattgtccactgtttgttggttgggtcttgtttttggatgaatcatttcttccttcattggacttatggtttaagtggttatttgcttatcagactgtaacaggcaagtgctttgagaagtgcatcac

SEQ ID NO: 88486 - DNA, 535 bp, Citrus clementina
  Intron number 2 from transcript clementine0.9_005136m (loc us clementine0.9_005136m.g) derived from phytozome v7.0 (c hr-ID scaffold_8; pos 93437 to 93971 reverse strand)
gggctgaactttacattgacaattcatctgcagaggtttgttctggttggcatgtctttttggtggatcataatttgattccttccccccccccccccaatatttaatatttaaaatcattttgataaagatttggtaaaacaagacaggaccacgttgtagggtgtgtgaatttatttttctagttcattcttgctgtttccacttctccccttcggatgcctgctccatatattttcagggatcgattttcggagatttttcctgaattttaatttcttaatgagagctttgagtgtcagtatattgagctagatggggacatagtttcacttgtaacgtttatttcttagttaatttcagttggatttggaagcatattctatattaacttcttattagtgttttctttgaattgtcaatctgaaacatcttcttgacatctatttgttttttattatgtctgtcatttctttttcttctgttgttcaaattacattttatgttgacagtaaatttggtgattggattaggt

SEQ ID NO: 88487 - DNA, 488 bp, Citrus clementina
  Intron number 3 from transcript clementine0.9_020203m (loc us clementine0.9_017203m.g) derived from phytozome v7.0 (c hr-ID scaffold_8; pos 3859005 to 3859492 reverse strand)
aaattgaaaaggtttgcaaaatatcttaatttcttcaacttttgatatgcattgatacgattgcttacttgcttttgcctttgtggttgtcaatttgagtcttttttttttttagctttggatttttcttttttgcttctttttgcacgttcctgcatctggaaacactggtggattttgtgatcgatatgaatctttggattctttgtagtgaggatacggacatggaaaaagaaacaggataaactttggaccagttaggagtgagacatttgttaataagtcttgctgtacaaaattgtctatacttttgtacttttgttacacaaattgatatcaacctcacctagacatgaatttctgtggactaagtttgacgactgtgactgtttggtcttgatacgtaatcagatacttatttgattttttatctaattatatctcttttaacttgaaggttatttgctccctttgcggcacggaacaag

SEQ ID NO: 88488 - DNA, 689 bp, Citrus clementina
  Intron number 1 from transcript clementine0.9_033957m (loc us clementine0.9_033957m.g) derived from phytozome v7.0 (c hr-ID scaffold_28; pos 2449877 to 2450565)
tttcccacaggtctgttcaacttcggtttattgaattttgctgtctttaaatttagggtttaatggggctattttgggcctgatatcgttgataataaaagtctctgcaaactgaaactgttgtaagaataatcataaagaagaaaaaaaaaaagctgattgtgctgcctttcttggttaatcgtagcaatttcttttaggatggttagtctttttgatctcatctcttgcctaaaatgccttggtactgcaacccttgcaaccggatttcacctggttgttatcgggtcatagtaattgtttttctgatatatactcattcttgctagtaatacgaaaacagggaatagcttttttctttttacaattatggcttgctagttaaaattgggcctgtatacatataaaactgcaatggaagaagtagccttttgggatattctgaatttaacatgttgagaattgtagaaaatgaagacaatatgatatggttagataaattataatcatgcaactataagattatgacgatcatgatcacatcttagtaggtcgaaatagtttatattgtcattaacctaatttgcatgcttggaagttcacaattatcatttttactattgcgtaaattaatttgcttttggttgtggtaatatgtagaggcatctttatctggtgttgggccactt

SEQ ID NO: 88489 - DNA, 886 bp, Citrus clementina
  Intron number 1 from transcript clementine0.9_007689m (loc us clementine0.9_005590m.g) derived from phytozome v7.0 (c hr-ID scaffold_16; pos 3147292 to 3148177 reverse strand)
gccccataaagcttgaggtaacctatcatcactctctctataaattctctgtgcatatgccttcatgtacttttaaagatttgagcaagccagacgccgctatctagctattatattttaatgctgttgtgtgtattgtaaccgaacaaaactgtctctccgatctcgaatatgcattttaaaacgagcagatcatttcgatcctggagaatgacccttcatgtgtccaaagatttttttgattattattattattattttttaatgtttgtttgatggaaaagtatgagggtacgtgaaaatttagggtttatgcgtagcgttaggtcttcattcattagatttatatatggccatggaggctaataaaaagagaattaatattgtttttatatgatgttcatatattgacttggctgaaataagttttcctttctgttcttggactggaattgagctttgtttattcgttgttaagggatttgactggaattttctgatttttatagctgcaactttggatgaattctagtcacactattactagatcgaacaggatggtaaaaaaatatatatattagtacataaataattgcttacttgaaggcaactgaacgttcatttgtgtttgaggtaattatttcggagtgccttcatcgaattctcctctcctaatatttgtagataactctcgacaaaattcggggaactcgaaactattaatttttattttttattttccttggagttagggctttgtttctcaatttctactatctgtaatttttttttaattatttaataaaatatctaccttgatggctctttgacatcaaggacattgctcatgacatatttattatatgtatgtcaatccaggtacaca

SEQ ID NO: 88490 - DNA, 411 bp, Citrus clementina
  Intron number 2 from transcript clementine0.9_010662m (loc us clementine0.9_008582m.g) derived from phytozome v7.0 (c hr-ID scaffold_44; pos 1510109 to 1510519 reverse strand)
tttccgaaggaaagaaagagtatccaaaatttacggtaggattttattggctttgaattaagcttgaattttgatccaattgaatgtaattgttctgcattcagtttttttcatagtgttgccagtaaaaatgttagtagttgatgaatttcgacttgctggtaaagagatatattatggatatattatagctgggcttattagtataatattgaagcaaattggtgtgctgatgggtatgatagttcatcttctaatttcgatatgatagatatactgttgtgatattctgatgagtttagatgctttaaagacagataaatggactgggattaaaatgcccgagaaagctgaaactgttgtttctgttgtgtagtaagactgaagaaagtatagattggttacgctctt

SEQ ID NO: 88491 - DNA, 692 bp, Citrus clementina
  Intron number 2 from transcript clementine0.9_008234m (loc us clementine0.9_008234m.g) derived from phytozome v7.0 (c hr-ID scaffold_44; pos 1711793 to 1712484)
caaacaccaagctaccagagtactcctggaaacaggttgctgaaattttacttgatgagtatgagcactgtattttttttatcatgatctctctggctaaccctggaaaagctttgaatcctaactggagatcataactacagtgggaatcaggtcgaatgttgtaatgtcttggaaggtgataagttgatactgagattgaacaatagtaatgcgaacaaatttctttttgaatttgaataattatcttttccatgcatatttgaacttatttgtttgaaacacaaattggaatgtcactgtcttgcttatttcttgatttttgtttttgttcaggcttagctggtccacatttgtgaatgtgttaggaattggaagattttgtatattttaacatgaactatttaataatacccaaatgaaaatttatggaagaattgagagagcttctctctgtattaactttacaggtcacaagatgtgagggtagagggctctttcttcctattttggcgtttgcttttgccaaggggaccgtatacttttgatttattttttattgccttgtattctaagctgcaaaggagatttaatgaccatgcaaatttgtgatttatgggttctgttttaaatttatgtttccacataattctgacatcagggtaatttactggttgatgcatcagtgggcg

SEQ ID NO: 88492 - DNA, 913 bp, Citrus clementina
  Intron number 4 from transcript clementine0.9_026757m (loc us clementine0.9_026757m.g) derived from phytozome v7.0 (c hr-ID scaffold_61; pos 1307883 to 1308795)
gcttacccattgcattggctaactacgagatttagcagggactgaaactgtcaccattgcctgttgtaatgtgtaatcaaggtttgatgtgtaaattaactttctattgtggatacttttgcagatgctttatctgcttttctatatttttctctgtctatgttctgtttgttgtcactatgaataaaaaatggaacaacatttcagttttatgtacagtttacggtgtgatttaaataaataattggaatttgctctcagtttgtggtttatcttcttgatttctggttttgctctgcaattgtttgttttaagtactgaatgcttgagtgtgaagagtaactaaaattttattgttggagtcaatgtaggataagacataaatttgaggaatgtgcagttcttgatgattgctatacattccattgctgagtctgaggctctcccctttttcagttggaaaatttacccagcaaatgcttcttctgtctaccaggttttctttttccccctcttccttcttatgcaagggatctgtttttaaacggtacctactgtgtcactgattttattatccctctgtgagctgcattttctattttaaggtactcttagcttactcgttttcacaaaatttaatgataaatatttgaatggattctcacctctgtattgttagctcttaacttcattgtttagttggatttagtcgtagaatcctggctggtagtaagtctggccatcacaactgttgtgatgaccattttagttaccaaaatagtagtcatagagtcacaaactcttgtataaactgaatttatacaaatagagttatatcatatcaattagtagaagaatttgtggccttatcgttactctcaattatcagtaagaggtggaaattgcagaagcc

SEQ ID NO: 88493 - DNA, 810 bp, Citrus clementina
  Intron number 1 from transcript clementine0.9_035368m (loc us clementine0.9_035368m.g) derived from phytozome v7.0 (c hr-ID scaffold_37; pos 615851 to 616660)
ctcaaaattcgagttaccaggtaaactttagggcttaataaagaatccatatatgttattaattcattggttttaagatactaatatcaattttaaagacaaatttatatcaaaatgaagatgaggaagggggtatactagatagtttagcatatttatctcaatatctttgattagtttaatagaattttgttgacggttggtgagtgctgctaccgattccctaacttgtggatattttaacattaagttatatatcaacggtattcatgaaaacatctgttttatcaactaagattgtttatattagctagcaagcgactctatatattttcagattcttgctttttgtttcccttgcaaaactcttatatatgtgttatgttgttggatttagattcaatattatattatttttgcgttaatcatttgacgagtttctgattcataggtagttattagaagaaagaatatatataatgaaattgtaactgtgggatgttataaaatatacaaatgtgactagatattgaaggaattgaaattttctactgagctttttataattttgtgattagttattattagataagaaacaagaaataatatgcaactaaatcttagttgtaaactactataaatgcacgatggcaagaagttaaattataaaaaagacaagcaaagctcataacatttaaaagatgagaacagttacatgattctaacaagaataagcagaaactaaacatttgatgaagcatgttgaaaatataattcacaccactttatacatggctacagaaaggagta

SEQ ID NO: 88494 - DNA, 797 bp, Citrus clementina
  Intron number 1 from transcript clementine0.9_014068m (loc us clementine0.9_014068m.g) derived from phytozome v7.0 (c hr-ID scaffold_11; pos 1685152 to 1685948 reverse strand)
gttccgcctcttcacacccaccacaatccccaaaggtatatgtttatagaatctcgtttaattttctaattaagatttgcatttagaatcttatttaagttgtatttaatttgtttgaaaatttcatagtaattaataattttatcagtttatcttcagtcttcaataaatttaagagcgcatcactctttttgcaagttgtttattttgtagtcttttgttgtactttcttgcatgcattattgcaatttatttttctagagctcccatagagatctatttagttttctatttatttcaaaaaaatttagaattgttcctatttctatacatagttcatattcggcctccaaaacttacatatatttgataaaatctataaaatcgtctttgattatagccccagcggttggcttctcaattttaaaattttttatgtaaatagcgctttcaagtttataatttcgctattacgactcctattgagccaatcttgttaatgcctctgttcctcaggaaagtttaaaacaaaagagtctatatcactactgtcagataactgaatttatacaaagaaaatgttaattaaagtgataaaagaactgacaaaatgcttacaagataacgataactggtgccgatttattgtcgatattctgagatcaataatttttttacttttaaaaattcttgtcatgagaatttattgttgagatttacacatgacaattttaaattttgatattcttcttaattatgtgaatttattctttgcgtttcacgtttgttaggtggct

SEQ ID NO: 88495 - DNA, 539 bp, Citrus clementina
  Intron number 2 from transcript clementine0.9_019835m (loc us clementine0.9_019799m.g) derived from phytozome v7.0 (c hr-ID scaffold_8; pos 1930110 to 1930648 reverse strand)
aagacatcaaggtatataattatttctatatgcttttgcttaattatttaatcgtcgcacagaattagctaacttaaatatacatgagatttgtgtagtttttttttgttggatttatgtaaactattttatgtgacttttatgttattcttctgctgatctctccaagtgtttgcctcttgcaaattgttccatgcgttttttacttgatctgtttatatataagactatcgaaataggaaaactttatgattagattggaactttgtgatatggttgagtttttgtttggttaatgatgcatgcttcttcccaataactgtatttgagttgtgttttgtattttttgtttttaatttgttgtcaatttggttgacaatagattctatgtttcaagtgttaattctatagttttctcttttgtttggatgaagaggggtagtgaaattcccagcttttgtatcttgttgattatatttctaatgtgatattgtttttatgcaggaactgttttctgaagttggtgacttgaagcggta

SEQ ID NO: 88496 - DNA, 922 bp, Citrus clementina
  Intron number 1 from transcript clementine0.9_014222m (loc us clementine0.9_014222m.g) derived from phytozome v7.0 (c hr-ID scaffold_39; pos 518596 to 519517)
agcgcttgcaggagcgccccaatttgcattatcaggtacctttttttttcccatttttgtcatttattttcaggtaaagttactgattaaaaaaaaaaaaaactcttttttgtatttctaaaaaaaaaaaaaaacaagtattgaatttgcaataccagtaccacgtgacaactttagttttaatttttttttaagattttgttcgttgcggagaatttgagggagaagaagagagaaaagatgagaatttgaataaaatgtgaggaaatatgagagaaatttataattttcaaacgtaaaatgtttggttggtgagaaagtacgggaaagtgggataaatgtttgtgcaaattttggctttaatatcatgaaggaaagagttcactaaatttgcttttaccaggtgagaatttaggtatttaatgttttttctttttttgactaatctttgtttggtgatatataaaatgtcggggaaggaaggaaaatttaagaatttgaaaaaaaagtggccaaaagggtaaaatatcaaaattttaaaaataaattgagtaagcgagaatttatgaattattagtttttttttgggggggcattagtttggttactcaagtaatgtcacatgtgtttggtattacttatgataaaatagctagttcctttcagtttcctactgctgttgcgcttcgatgagtttttagaccggaagtgaagtcaagcctatcttctatatgacattgttgtctaaacatttccttcaaggggatggagattcaacaagatgaaattaaatgaggataattttctgcgttcttagtgtaagcttgtgttggcatatttcatatcattaatgctaagaatggtttcatttgtgaatgggactacaggttggggtgacaccagaaggagtagaaattccaag

SEQ ID NO: 88497 - DNA, 484 bp, Citrus clementina; identical to SEQ ID NO: 83001
  Intron number 2 from transcript clementine0.9_006267m (loc us clementine0.9_006267m.g) derived from phytozome v7.0 (c hr-ID scaffold_99; pos 536754 to 537237)

SEQ ID NO: 88498 - DNA, 602 bp, Citrus clementina
  Intron number 2 from transcript clementine0.9_031915m (loc us clementine0.9_031915m.g) derived from phytozome v7.0 (c hr-ID scaffold_11; pos 185836 to 186437 reverse strand)
agatccttaagtgcaagaaagagtattcacaaattgtgattgttgggaaattaatgggtgaagtagggccacagataaaatgaaattggaagaaaataaagaacaacctcaaaagaggacactagaaattacgtggttcggcttttaacctacgtccacgggtgaagacagaaagaaaatattttactagtgaaaaggaattacaagtattgtggtattttaactcactacccaaaatctcaatacacccaaactctcaaatcacaaatcattcaagagtttgttaaaacttttaaaatactctcactttctctctaaagaagaagaaataaaactgaaaaaattggatgctctaagccgatgggaaactcctctttttatagccaaaattggctattaaaataataattttttttcttgggcggcaccctttcttcttctttcattttcttctttcttctttttcttcattccaaatttgatgctgccaaattcttctttttttcttgaacaatttcagcattcaaaatgggctgcatctagaacggttggcttctagatttgcagcatccattttttacagtgattacggttttctatcg

SEQ ID NO: 88499 - DNA, 449 bp, Citrus clementina
  Intron number 3 from transcript clementine0.9_003559m (loc us clementine0.9_003559m.g) derived from phytozome v7.0 (c hr-ID scaffold_57; pos 245026 to 245474)
agcatccggtgtttgattttgaggtttgcatttatgttgtttattgctgatggttctagcttttgtgttggtttaagttacaaaatgagaattttttattgcaggcaattcaaaacttctgtatgtttgatgaatgcatgtttgggagcatccttgaattcgaaagaacattaaatttttttgtactatttttttggtattgatcagctcttaaacgaagctgtaggaaaatcacaagtaatccttgattagaatccaatagtaatataaatgccgcttttcttcccctacttttgaccacataaagttgacacatttttaagatgacaaactttcacgtgtatttttgtctaaagaaattttatgggctaagattttttttttttggtcctacagtatggatatagattcttaacatctctttgtttgaaccatgtgctgcactcagg

SEQ ID NO: 88500 - DNA, 672 bp, Citrus clementina
  Intron number 4 from transcript clementine0.9_003559m (loc us clementine0.9_003559m.g) derived from phytozome v7.0 (c hr-ID scaffold_57; pos 245520 to 246191)
ctcaagatactggattggctgcaaagagtaagaaataaggaatttgaaatgtgttgcatttagtagtacttccctgaatgctatcataaatttggagcttctttaatttatgctgcgtttggttaattgttggtttgcattgggtgcatcctcgtatgaaaaatttctgattaataaaatatgctttttttttctctttcataaaaaataatgaaaacattggtccagttgttttgccggtttcattaatatattgtatttaaacaatagatattttcgttgttgcctgtgatcttttttttatgccagcttttgataataggctgggacactcttctaaaatcgttcattaacctggcttgatcagttaaaattgatactttttagtaaaataatatatttcactaagctttcccaggtaacattatcagtatctagtttaattaatcccattttttgtttttttgcctttttcacgttgaatggttttgttgtactccatcagtatctctatctctatcagaattaactttttaattttattattggaggctcttactattgactggactgcacagaggttagaagatgtgttttactgaatagtttttgcacgtgtgtgtgttattgtccacagttaaaaggcaacaaaaatttttgcgggcaaagtat

SEQ ID NO: 88501 - DNA, 900 bp, Citrus clementina
  Intron number 2 from transcript clementine0.9_020611m (loc us clementine0.9_020606m.g) derived from phytozome v7.0 (c hr-ID scaffold_12; pos 3445625 to 3446524 reverse strand)
agaaggctgttggccttggtggttggcactggctggtatattattaatctttcatttatttatttttttcctgataagagaacactaattttattgataaactcattagaagattatgttatttatgtacgtatagagagatcacttttaatgtttcggttggccaatttattgcattgagtgtgatgttaaagttgctttccacataggtttctttatgtttggcttgttttgttttctttcctattttgaatctgggctttagcaagccggcacagtatattattgtctttgaatttgatgagatctggattttaggtctagacctttttatttatttatttattttcttttggccgccagagtcgtaaacagaaccaagcttttaccctctttctcatgtctaatattcccagcatgaatgacaacgtaagttaaagtttttcgtttcctatttgtaactataagatattgatgattgtatcctgtactgcaattttcttttgttctaacaaactagtagaaataattttttgaaaatattatgtgttttgatgtgtttcatgaattgacgcccacgtttttcctttgagggttgcaattccctttttctttgccattttttcgggtttaaacttgtcaaaattaattgccggactatgttctttgtaattgatctgggatattggatttctttattgggtatcaaaaaagaactcttctctggtcagttcctttgtttttcatcctctgtttggtttggtgtagttgtataaccttttaggtgaggggcaaataccacatgcctatattcagtcaagttattggctgtttttttataaaatcatattgcttggttcacaaggttcttaaaaacggggtggaagttaagctgcaaag

SEQ ID NO: 88502 - DNA, 595 bp, Citrus clementina
  Intron number 1 from transcript clementine0.9_020611m (loc us clementine0.9_020606m.g) derived from phytozome v7.0 (c hr-ID scaffold_12; pos 3446808 to 3447402 reverse strand)
cttttctcgtaaaggtatttttcggatattttatgattattattataattagtttttgtctttctttaactaatgcttgtcaacttatattattattttgtcgtctcaaattcagctgccactccaccgaggttctaattaacttcatttttttaatttctaaagcttcttcttcgagttttcgcttcttttgtatcaagtatttgcattaaatttctgattagtgagttagcaaagtcgctgacttttctttgaatttaaatttcttagcgctggtattattaacagtaattcattttacgttgtgtaattttaagcttcagtgtgatttgatgtcactggtaactcaaacgagggctttatgatactgagcttactcgtatcgtatcattcatttattatgatcaatctgactccgtgactcattttatttgaatttcttctatttcttttagcatttcatccaaatattcgtgttagataaactctctctctctctctatgacatcactgtggtatgttgaatctctaacgacatttttttttaatatattttttagttttggcttcaggttcttcagttgaagcttgggct

SEQ ID NO: 88503 - DNA, 494 bp, Citrus clementina
  Intron number 1 from transcript clementine0.9_005142m (loc us clementine0.9_005142m.g) derived from phytozome v7.0 (c hr-ID scaffold_91; pos 516646 to 517139)
aacgcaacaggttcttctctctctaactcacttttttaaaaattaatttttgatttttattcactactcttctattgtttgcggctgtttagttgattagaatttcattttttcgaattcgttttagattgatttctttttcttcagtgtttcttatcagttaaagcaataaatttcaagaaattctattattgttgctaaataaaatccgtgtataatgaaacaccaaatgccgttcacctggtgcttttgaattaatgtactaatgttgattctggagaagctatgagtttttgtttctaatcgagaagaatgcaactggataaacaatcccactgagaaaatgcacataaaatgaattgaatcgaagaagacgtgtttcaattgtattatctttggaaatactctaatagaggaagtaaaagtatacagaaagttaattaaaatgtgttgttttaggtacgatacgtacttttacaaggtattcaaggtgt

SEQ ID NO: 88504 - DNA, 954 bp, Citrus clementina
  Intron number 1 from transcript clementine0.9_006427m (loc us clementine0.9_006427m.g) derived from phytozome v7.0 (c hr-ID scaffold_8; pos 1132283 to 1133236)
ctcagctctaaaacaagccatcaagattgctagtaacagagaatatgaagaacgcggccttagtatgactattctgcgtgtgaacctgatggttttacgctttgggatactcgtttctgctgtcgggtcggtcttcggatgcgggttcttgacgatggcactggtgaatatggttcaaattaagttgggggtcttgggttgcaagagttttcacactttggctgcaatatctcctctcgtgactttagtccctttggcacttgctatttatgttggcctagtgctttatgccttctctcattaaaaatgaatatataattaatcaatatagttaaattgagtactgttattctattgactaatatttgcataatttggttgtttaggtacatggtttggttgactgtgcagagtagttaattgcagattcttgggaatggttcatttagtttatgtttattgtattattatatgaccttaggaacttgctctggctgtttcaaagttttgaagttttgtttgttccaatatatattaagttgataaattagaataaacaaaacttcaagccattgaaagtgagcagatgaaataactcgaagttttctcctatatcaaagaaagtattatttaatcttcaagtcaatggatcttgttgctgcttaggcaagattcattatttttcttgaaaaacttaccgtaattgcccataatttagatctgctcctcttgaatcaagggacctccatgtgcaggtgccttcatttccacaatcaaagctcaaaaaattccataagcttccatgtatgtagttcatctcctgcatgttgtctcattagagtttgctagttaggagaaaaagttgtgaagagattcattctgatctcattttcttgcaatttcatggcgagggagcaagtactgatcttcagctttcgttctttctgttgcgtc

SEQ ID NO: 88505 - DNA, 492 bp, Citrus clementina
  Intron number 1 from transcript clementine0.9_027039m (loc us clementine0.9_027039m.g) derived from phytozome v7.0 (c hr-ID scaffold_124; pos 301533 to 302024)
gtctccatcgtcggtgtcgtcgtgtggatcgtcgggtcggttaattttcactcttctgttcatttctatttttctgcccaaagttaagtttctagcggaatttgtcgcttcaactgtctctgtcaaaggcatccaatatttttctttatttttttatttttttggcttttcaattatcaaagatcatccccctattagttgatagtagtttaatcttcttctgggcgtctaaaatttctccgtttgacgctagaatttgtctctaaaattatgtgcgtgacaagtttagtgaatgcattgcttttctcttctgggtttcttgacttctcactagttgttgtaacttttcgttaaagctctgctggggtcgttgatagttttttcgtttttctagcataaacatagaatcttggcaggattagaatctgattgaagtcttttagttaatgcgaatattggtgattgtgggtgcaggctgttgttgacttgcat

SEQ ID NO: 88506 - DNA, 773 bp, Citrus clementina
  Intron number 2 from transcript clementine0.9_032965m (loc us clementine0.9_032965m.g) derived from phytozome v7.0 (c hr-ID scaffold_96; pos 642723 to 643495 reverse strand)
gagaggagtggagaggtaatgagaggataggagtgcaaaaattgatatttattgtttggtttaaaaaaaaaaattaaaagggaaaggaattacatgtttttttaatttggacaagtatacccattggaatttagtgttaaaatgttaatattagcagtaaatataataaaaataattaaactataagttaaattaatctataatataaactaataagaaaacatttgagtttatattatatttttaattcattcattattattttataatcaaaataactaaccaacaagtagtggatggacgactacaagtcgtatatcgacgtagaagaacatgacatacggctcaaacggtgattgatttactgaactgcaaccaaaggaaccattttttggataatttcagagcaatagtattcagactactatgtaaaaaacattctaatcttggaaaacttttccaccttatgaaacattggaaaaatcttcccaacttgacgcatcgacttgttgacctctcaattgctcttgtgtgtggcttctataaatttggcgtccaacgtgctcgttttctgcaccgttgtatgttttccaaaagctaagagtcatcaaaagatcttttgaatttcaataaaacttcggtttaactttatttatttgattgtgtttttggaatatcaatggggtcaccaaccctcaatacagttgtttcacttgttttgttgatcctattttttgtgttaagtttcttaataactgtttcttcagaatcta

SEQ ID NO: 88507 - DNA, 737 bp, Citrus clementina; identical to SEQ ID NO: 80640
  Intron number 1 from transcript clementine0.9_022443m (loc us clementine0.9_021595m.g) derived from phytozome v7.0 (c hr-ID scaffold_12; pos 4111496 to 4112232 reverse strand)

SEQ ID NO: 88508 - DNA, 795 bp, Citrus clementina
  Intron number 1 from transcript clementine0.9_022898m (loc us clementine0.9_020292m.g) derived from phytozome v7.0 (c hr-ID scaffold_56; pos 979547 to 980341)
aaaaaaaattctcaacttcccgattaaattctctggtgaggcaaattattcacctctactcttctttgctattgtttgtatctaaaatgatgacccttttgtgctttaaccatttcgttttatcttatgcatttgagcataattttttcggcagcagaatttctcctatacataattagttctactcgtttaaagaataaatttttgaggcttcttttgctttctcgcgaataagatgttctcgggggggcaaagtcagattgctagattaatttacttgtggattctgttgtcagtgtactgagttctgcttttagtagctatgtgttattaaacttttatgctgctgatagaatgtataattatgagcgtttaactgcggtctggtttcaaagactggacacctagaagtatactactggatagaatgtataattatgtactatccatatgtaatatgttttggaataattaaaatgatgtagaatttagctgtttatgatgtaatgtacactgaggctagctactacttgttgatgccaagtttaaaactctattcctctatgtttcattttggacagtcgctactatttggttgttgatctaatttcatggaatgtaaacatttgctgtatatttgtccaatatatatgtattaaattctatctgtcaaggcatgaatgattttacttttattgctttggttaaaggtaacattttttttccctttatttcctggtttattgatttggcagagcagtcattcctgtggacaggttataattgaagctctgt

SEQ ID NO: 88509 - DNA, 697 bp, Citrus clementina
  Intron number 1 from transcript clementine0.9_017819m (loc us clementine0.9_017439m.g) derived from phytozome v7.0 (c hr-ID scaffold_56; pos 1222646 to 1223342 reverse strand)
acggttttgatttttgctaccggatcgggaatcaggtgagaatctatatttcaaatttctttgaattaaatatactgttattagttcacgttcttgttttagccttgtttgtgtggattgaagaaaggtgatgttgcgtttctcaaaagtagttaatgtgtttctcaaggaagtgcttctgtgcttccaactaaagcatctcctagcgggttctatttgaagaagctggtatttgcctgcaaagaaacgtttttggattttgtcaatttttggccgcagtagatggaagtgctctttggagatcatgaaagcatttagaatgtttttattgaagcacttcataagtgctgtattggaaagtagttttgattttagaatatgaagtggtcttggacaaagccaaagaggctttctgatgctttttgctacagctttattcaaaagcactttttttacacaaaagcattgtgaaagcaccctgagggtatgtttgaaacttttgtgctttgcatagttttgaaacataacaactaaatgttccgtaaatacgcagttttacttggaagcttatgtataccagctagtcacccacttaatacatgatggctagtgatccattccccggcggttgttgatttgacttaattttctgttttgtgtagtccaatacggtctcttatagagtcaggatttagtt

SEQ ID NO: 88510 - DNA, 611 bp, Citrus clementina
  Intron number 2 from transcript clementine0.9_000438m (loc us clementine0.9_000438m.g) derived from phytozome v7.0 (c hr-ID scaffold_35; pos 95062 to 95672)
tcttcttggttccaaaagtggttctggtacctcaggtatgctcagatatgtgtttgtggattcctatccagtggaactctttttttctttttttcaaaattcagccagcaattgcagaggggggaaagattgccccttatttaatagaattgaaaagttttttgccattaagattttaaaatgcttgatctgggttaaagataaaagagataaatatgacatttctttgtatttatacaagtagcttccaaacaagcttcatgagttttagatttgtttgttgaagcttaagtttttgaaattcagactggaactaatgtgaaaatcattatatttcaaattcagatattagttctaccatcgaatttcagaacttgttaacaccaaagaagaaaatcttacacatttgacttctattgataactcttattaaaacttttagatttggtttttgtttatgtccaaaagttgtatattgccgacattgtagaattagtggatgttccctggagttcaaattcaaaagtttgacttttcattgctttgattttgattttatattttatgctttactttttgtttttttaaactagcaagctgaagctattaaa

SEQ ID NO: 88511 - DNA, 924 bp, Citrus clementina
  Intron number 4 from transcript clementine0.9_022368m (loc us clementine0.9_022368m.g) derived from phytozome v7.0 (c hr-ID scaffold_12; pos 2464956 to 2465879)
tcttaactcagattgataggtaagttcttggtttaatctcattctatgtttaatcaattgttattaactttgtattgatgttaccataagagctaaaaatagtagatttggggaaatttcttttgtttaattggagatcaaatctgatatggttctaagaggaatctgatcatttgattcaaaagatcaaatctcctctggcccttatgaaatacagtggatctgtgatgagagaatgagaatctgtcaatatttccaacaccagatttgggacaccaaaatctttatgggatatgatattatgatatttttctcctcaaatataaatataattggacagactggtggcgtgtgtaaaaaaataatgcatggataatataccctaccctacatggctttatgtctgttgactagggaatatttctaaatctatgaaataacacctcacatggtatgttcttgtaactactgtccgatttagaattgtagaatgctagaatcttttgatcttaatcatggtaaaagactatgtctgctgttttttataaatgaaatttaattgtatttcatcattccatatggagaaagtgaaggatactcgccacttaggtcagggtagttcacttgcattttcctttggccattattgggtggtgaggtttgactgtttgtttattgtctaacacgaagcagcctaatcaagtattgtaaaattatcataaaaaatgtttcctgcttatctaaaactcattttattgcctcttccctgcacaaaatttggattaagaaatggtcaaattgccctaattgaatcctttttttttaatccatttatgtctgtcctctatggcaagttattaacagcttccattttctctatgatgaacagttgtttggaagaaggggcagaggaatacatagtca

SEQ ID NO: 88512 - DNA, 671 bp, Citrus clementina
  Intron number 4 from transcript clementine0.9_027857m (loc us clementine0.9_027857m.g) derived from phytozome v7.0 (c hr-ID scaffold_11; pos 4492672 to 4493342)
agagggaaactttgcttgggattcttggtgatcaggttagttcatccctaactagaaaataattcaaatatagaaaattatatgtaaattactactgaaactattatcttctcataaggaaacttagttctaagatattgaataaaagaattttaacgttacaactctgaaatatttaatgttttatattaaaatcattgctagtgacatccatgacttaataattttatgggttcaaatgttgaagagaccttgtgacttcttacatcactagcaaagactagcgtgtgacaagttattggccgtgagttctctcaattgactccaagcattttcgataaagacacttgcatctatagtaaaatcaaatccatgagactgaaggatgcatgtggaagtcttacagccctaatttagatattttcataggtttatttctattttaaccttaaatacagaagagaagaacactaacctaatgccaatcatcctaagacccaaaattgcataaattatccttatatatgtccttgaagtaggcccaaattccatgattatgttggaggaactttttaattgaggttttgctctttcttttcatttttctaactatgttacaggtttttggacatgtaggtatctgagccactacgggcgttaatcaacggagc

SEQ ID NO: 88513 - DNA, 314 bp, Citrus clementina
  Intron number 1 from transcript clementine0.9_034698m (loc us clementine0.9_034698m.g) derived from phytozome v7.0 (c hr-ID scaffold_11; pos 4951206 to 4951519)
gttcgttttatctctcttcatcttttattttattttcttttcagatctctttacatctattctattgattccgttaatgttgttcaatcttgcaatctgatggctttacgaacagacccttttgttttcttaagcgcctgtttaatgttgaacttaaattcatgtgctctgcgaaatccatttctgttttttgatttttttttaaaaagtaaatgctcattttgtttcataatttacatgcggatacccttttgatagttatgctaaaacttgatgcagaaattgaggaacactgtaaataggcaagtttcagt

SEQ ID NO: 88514 - DNA, 956 bp, Citrus clementina
  Intron number 2 from transcript clementine0.9_026355m (loc us clementine0.9_025164m.g) derived from phytozome v7.0 (c hr-ID scaffold_13; pos 1124971 to 1125926)
cgcgagaacttgcacttggtctagcttctcagacagtaagtcaattagaaccttttacactgtttctttgattcattggttttattggctatgaacattataactttcccaccctagtgcactatttgtttctgtatcccactttcctttttgggtgtatgtgtgctaaccttttattcgtttgggacatggggaggaatggagttgttggtttcactcgaaactcattacatgattcaaacacacaacctcctctttttagagttagatatgtactacgtggctagcatttgtataggttgtagtatccggtcttacatgtgatgaaatgtaatatttgttggaaatataattgccttgtggcctagatttgttgtcgtaggtactgattttgattcacaatctgatatccatattatggcgcattaaaaaatccgtagggatcatgtgtaaacaaatatggtagaatggagttgggatgatgtcatagagcagaaaaagttttagatattagactagaagttactttctattatgctgtttcataacaccattgatcagatactagctgctaaaattttaacatgaaatgaataattcaactagttcaaaatttttatcatatttactagtaccggggtagatccacaaaaagaaaacacctctaaagaaatgccaagttgtcacgaaatgaaaagttgtggttatactgcggcttggaactaccgttacccaagtttgtctgaaattttggaattacccagtatcttttcaaatttgattccagtactgtgaatgaaggtgagtatgtatttccttttcttttcgttagtcctttgcatatttattttgaatgctatttgagcttccatatgacattttttatttcaaagcttttgtacagttaactaataaattgtaaatggttatttctgcaggtattaggagcagcatca

SEQ ID NO: 88515 - DNA, 771 bp, Citrus clementina
  Intron number 3 from transcript clementine0.9_013460m (loc us clementine0.9_013121m.g) derived from phytozome v7.0 (c hr-ID scaffold_16; pos 466886 to 467656 reverse strand)
agcttatccgccaattcggcacaatcttgcgtaatgtaaatcaccattgctttcaatattttgatttgttattagaaattatttgttctatgattaatatgttattgaattatatatattgccaaattgagatattttctgcatgtttgcgctttatatgcaataagtttgcagaaagtttacaatacacttgcaatgctaatgagatgttttgtacatggccatgctgagttttatgcactgtaattttacaaaaccgcataggcgtgttatactactttagataggtgacaatttgtttgtatcttttggattaagttttgattttattcctcaaatttttactggactaatgtgagaattagtggccgagttctgctaacttcagcgctaaaagttcaaaagggcatgtgaatcagatggtgtggatgcccatgctcatatatttgggtaaatgttgtagtgatatggtaatgtcaacctaactgtgataatggggtggttgagtaattttaagaaggaattatcaggtgacacatgtccatactactacatgagttagacggaagcataatggtcactattccagtcttcctttttgtatgcttttaactccgcaaacaacctcattatatattgtttcacatgtttcaaaaattctatgctttagatttggtcacttgggtgctttaacaaatggaatttgcttcctcttaggactcacctgtcatatctttatccttgcttacagattacccagcacaagtgggc

SEQ ID NO: 88516 - DNA, 965 bp, Citrus clementina
  Intron number 2 from transcript clementine0.9_010704m (loc us clementine0.9_010704m.g) derived from phytozome v7.0 (c hr-ID scaffold_79; pos 980566 to 981530 reverse strand)
cgctgagcttcgccgccctttccgctcccatcacggtaacttagcttctcctttttattatttgaacattttgttttttttttccccttgcagattctgagctgaaggttttgtattttcgttttgtttattttcttggtattttcactagtttgataactatcaagggtggtttgaatttgatggtagtttatgagaaatttgtagtaccgtagtacagtgtggcttttatcagtatgaaacatccactaacaggcttagtattgtttttcatcagaatggattttgctggttggtaattcttagaggcgatgatatggtatttctggtgatgaacattatcttggtttatcattatgcatctctgaaactgcaaagttttgttgacgcttcagcattaactattttctggatgttatattcgtccataatattgagaccgacggccagttttgtgtaaccatcgaaagctattcgtaatttgtcctttggacatatgttggcagagcatatggcaaccacttcatttgcaacttctcctcgaatgatattctgaagggatttcctggatggagaatttataactgttatctttatatcatgaggaagaaatctttgttgcttattgctcaactggaagctgtggatatgccagctaacatttatccgatgctactttgatatgtgatggataacagttcaaatatgggttttctgtttctatatttatatgagagaggttgtttctttgtccccattggcaatgacaaggatgtactgttactattcattattaagttacacgtatgtttctctgtgatggtaagattagatctgtactgtttgcgtgcctctgcttattttgactgaaaagtacactgaatacaactattttgctaaactggaaattctttgaattcccaattgcaggtgggccggactaccgagttggtgacttgagggat

SEQ ID NO: 88517 - DNA, 718 bp, Citrus clementina
  Intron number 3 from transcript clementine0.9_000425m (loc us clementine0.9_000425m.g) derived from phytozome v7.0 (c hr-ID scaffold_8; pos 2301247 to 2301964)
tgccaattgaaggcggtttattggatcctcgtgtatgtgtttatacgtgagcattttgattaattgcttaaattgaatgacagttactcagtttgattaattgaatgcataaaagctagtgctctcgcctactggggatgttgaagacaaatactatgagactgtagggggaggtatttgacaaatttgagagaagcttataaggattttcaaaattagaggaaggattctaacaaagtctgaagcttagtgttgctgtacttatagtttagaggatgctaagaaaatttaagcttgattggtgactgttttcatattcaactcctgaagattgcttcaagtaattcattggacattttggaaaaattatggttaaccttgtatggtttatttaatgtttcaaaaagtaagtctgttatctacttgttcacagcaacctaatattgcttaagaaatgatgtaacatcttactgaagattgataacttatgttttctttcttgccgtcttgactaatttttaaattgactttactattatgaaatttgtgttttggtgagccatcaagtacaatggctatactgttatgatggtttatttgcaatgtgttttgcctttgctttttctgtttattatttcttcttttttaaggaaaagattatatttttacaaagactcttctttcatggatttcagggccctgcaaataaaagctgtac

SEQ ID NO: 88518 - DNA, 781 bp, Citrus clementina
  Intron number 2 from transcript clementine0.9_018056m (loc us clementine0.9_014663m.g) derived from phytozome v7.0 (c hr-ID scaffold_70; pos 152302 to 153082)
gagagttcagagctaatctgtttgcccgggaacaggtgaagtattttgtctttagtgagttggtcgttgtttgtttgtttactctattccacaatggacagtattgaagttttaggaagtgcaacagatttgggaagctcacctttttcctttctaatgttttagtcagtttagttcacaacttctgataataaaccttagttggagttacattgtgtcttttggatttgctctagtagtgtagccctgcctgttatatcggtcaaattacactttcaatagaagtaaatatacttatttggaaaattcttgaaggagaagttgggatacttctatccttcttttggaaaaggaagtacaaatataatgaaaagggtttaattttaaagccattcaatgtttttctttttcacctacatttctaagatcaaagcaatgccccagagctgagacttgttgggtgaaaagattccaggctgagtgccattactgtttttcttccgtttttagttccacaaccaccccccccccccccccccccccttttttttttttttaaaagtagctgtttcaatgaccattaaaccactactttacctgagccaatttgatctggatcatagcctcatttttattcctttctgctgtgatacagtaattacttcatgacttgatatggagtgtctttttcactgacataatgaaagacatgcatagtgaaatttacactttaattatttgatcaggcagagaagtcagaatctgatacccaaaaccaagg

SEQ ID NO: 88519 - DNA, 647 bp, Citrus clementina
  Intron number 2 from transcript clementine0.9_025592m (loc us clementine0.9_025592m.g) derived from phytozome v7.0 (c hr-ID scaffold_16; pos 1041633 to 1042279 reverse strand)
gtcaccggcggtgcccctaacaagctatccaagatgtatactttctctctctcactgtctcgctctctcgctcactgttcttgtttgtatatttgtctagttagattatttattacattgatcgtgttggtttatgcatttgaattgcttttttgtgttgttttaaggtctgggtaatgtttacttttcgcttttaaagttctgttaggttgaaagattttttcgttatcgttttattcatatttcagttggcttagttgtgctttagtgttgatttagccgagtaaagttaaaaattgttttgctgatttgctttccaaaaaaattaggattatttttattaaattgatgaaaactattccaatgtaacatgtagttgttcatacatgaattgagttgtatgcttgagcatgattttttgggtagagtgatatatttatgaagcatgtgcagctaagatttggcttgagcatgaaattttggaatattttatcaattgatgactcatatgtcttcatattctcctaaattttatattttcttcattacttgccatttttggttggggtataactatcattaaatttttgttggattgtgttgtggatgcagcaaggtggtgaggttatcgatcgcacaagtgttga

SEQ ID NO: 88520 - DNA, 490 bp, Citrus clementina
  Intron number 2 from transcript clementine0.9_001036m (loc us clementine0.9_001036m.g) derived from phytozome v7.0 (c hr-ID scaffold_39; pos 637999 to 638488)
gaatcagagggagaaacaggggtactatcaaataacttctgattcatttgtctagctatgttagtttttgaagttaatgatttgtctttcattgtttcattgattagaaaactgagggggaaacaaaaaaagagaaagaaaatgattgtattgaagaaattttatgatgttttgcattctatggtgtgaagaacatcattccatttaagctaaacagtttgcgtgtttattattgtcttttaatggatttcatggtttgtctcaagcaactgagttggcaatagatataagcagtgcctgaactctcaactgttcttgatgtttttgatatgcagacagagttgggtttgctggtttgttctagatttgtcattatgtggtgttagattaatagatattgccttttaaggcctttgaattggatgggctttaataatttttgttttgctgctcaggtgaagtccattaagaacttgggtgggcaggtttg

SEQ ID NO: 88521 - DNA, 369 bp, Citrus clementina
  Intron number 1 from transcript clementine0.9_028199m (loc us clementine0.9_028199m.g) derived from phytozome v7.0 (c hr-ID scaffold_37; pos 1620107 to 1620475)
cttcctcagggattctcgagggcattctttggcaggtagtctttcttgttgagctcctggaattacttttaatttatcatctgttgggttttgctttttgattgctttgtgatttgtgtttttatcgctttgtcgctcattaatcttggctgttttgaatctgtgttggatttagacgtttggagttgaaaacagttaaagcttagactagtagaagagatttatacattcatttatcttggacaaagtttttgggggaaaagaaaaattataagtatacactttccaatggttcggtgatgtttgattggtttaaagatgttggatctctcatcagatttcttatgtatcgactgctgttgccacagg

SEQ ID NO: 88522 - DNA, 753 bp, Citrus clementina
  Intron number 4 from transcript clementine0.9_007067m (loc us clementine0.9_007067m.g) derived from phytozome v7.0 (c hr-ID scaffold_56; pos 627710 to 628462)
ttgatttgactggaaatttgctttcagattggaaggtgggtgttcctgcatttatctgtgtgtaagatttgcttcaaatatgtattgttatcgctctcttcccttttctgttcgcattaaattttgtactcatttaatcagtgagttatttttttgccatctttaccaactctcctagatgccagtaattcatgattgttgtataaattgttaaacgagtattttttttcatcttgagatatagatggaagtgctaatttcaattacaatcaattgcttggggagtgttcattatttacaagcaatagttagttttgaactcgatgtaatggtttgagtaacgcatttcttttatttatttatttctattcttttttccatttgcatatgcttttgttctctagatcatagatttatgatttgggtttgtattatttaaatggatggtgtcttctcttttctgctgcttgttgaaatttcgttatatgccaaataaatactggacatattggcttgatttaaacgagggatgttgagtctttaatgccttaacatttatatgacaaaaggaaaatagaaacaaaacagaggttttctgaatctttgatcttgcttcctatcatacatcagaatcggtaatggttcatttgcctttgtgaagagttatgggcattcccagggaagtgttcatagatgttgaatttatctttcgttgcaggatattggtgccattggtgagcagttgcctgctct

SEQ ID NO: 88523 - DNA, 642 bp, Citrus clementina
  Intron number 1 from transcript clementine0.9_018906m (loc us clementine0.9_018906m.g) derived from phytozome v7.0 (c hr-ID scaffold_13; pos 3749165 to 3749806)
acttctctagctttgttcgccagctcaatacttacgtacgtttacaaaatatcattttctcaattccattttcttcttttatttatttattttaaatttttgccagtagatataaaagatgtatgggtcctatcttaacctaactttagttccttcactagcatttttttttttttttggtgggtttgtaatagttgattatataataagtgttggtctaaatacatgttaacttaattgatcaaaagattcttgtttgtccttcaaaaaataccactcaaaggttaaaagcaagcagctatacatacacaggcttttgtcagattacttagcatacatgtaggatcctttatttattcaatttttttttttgattaccgtaaacaaaatttagatcagtttttttagtctctacctgctctacgaattcggacgagcagcaaaatgataactatttaaaaaccagtcgatgaggcgcaggctgaagagaaatttgattggctaatgcctagctagattgtaaattgttaaatgaataatattcgatttacaacattcatattgagatttatttgttattaaatagatggatgtaatatgaatgcagggatttcgaaaagtagcaacaagcaggtgggaatt

SEQ ID NO: 88524 - DNA, 1040 bp, Citrus clementina
  Intron number 1 from transcript clementine0.9_004227m (loc us clementine0.9_004204m.g) derived from phytozome v7.0 (c hr-ID scaffold_37; pos 501679 to 502718 reverse strand)
ttcaacaggtaattaattttttttaattaattaatttcttcgattttcttttctttcattttttttaaagttgtataaattagttagaaattttttttttttttttttgtatttgactgtgtgaactgtagtagatatagtttttgtagctttcttaaccagtggaagtgatttttggggaagaatattatcagtgcttctcctaccaagcgcttttggaagaagcacccttacgttaagtaaaattgcattaagatttttgtttttcaggtagaattgctatttatagttgattttgcttagaatttaagaattagagtactggaacattgtctttaattatctgccattgatggtatcgggctgctgttcaagtttttgaaaagccaatattcagctgtaatagagggggggggggagggggggagacagtagtcagagctttgttaactatgctgttgaaactgctgtgagttttgaacagtgtaatgtgtatggtaatttttggattaaagtgcttgttaagtgtatagtgtctgtatcaacatatgctttgggaaaaaaattgctgaagttgtaaatttatttattttttaactttttcatcactcaatttcatgcaagtaatggaatagattatgaaataagcactatgaaaacattttgacaaagcattttttggtacagattataaaataagctactcttaattttcgcaaaaagtaatccctaatgagccctttggttagtaatataaaaaacaacttatcatttttgaattccataatcactgcacattatacttctttgtaaatatgaatttaaatttgcagattcagcttgctttacatttctttgcaataccatttccgttaataggcaacatgcttctttgatttattctcgtctgtctctcagtatgtgtgtgttttattttagtttatatattttttccagaaatcgtatgcaccttttgacttaaatttgaatattttgcttataaagcctggctgttcaagtgaatttgctggaattcggat

SEQ ID NO: 88525 - DNA, 872 bp, Citrus clementina
  Intron number 1 from transcript clementine0.9_007376m (loc us clementine0.9_007376m.g) derived from phytozome v7.0 (c hr-ID scaffold_16; pos 1797414 to 1798285 reverse strand)
gagaaaagaatacggtaagcttccattttgaccccccccaaaaaaaaaagaagaagagagactttatattaatttcaagtttataaatatgttattatcactaagatggcgacgttcacacaggagaatcaccaatagtctagtactgagtgtgaacatacatatgtaagctggctagatgctaaaattttgccaaataatgccaggctgtgtgatcagtaagtcaactttacttgcataaaaggtgcatggctaggtctactcgttcagtctgactgaaacagctcgccatgagatcgactacgactaatttagtcggcagattttattattttttccaatttttatttttcactaatatgtgattcttttattgcgtgtattacgatactaatagtgatatattgtgttccaaggactaataatttaaaatttaaaacatatgtataacctaacgactttctgatggtgaatgatattttattcttatgatgatagattttggtcaaatccaaaaccaatttggctcaaacctggcttggtcccttcaataattaaagtctagatatcctcagaaccttaattaaggtaccccaacagtttaacacaatcattgtacaattctaaaacattagttattagtagaagtttgtatctattctgaacattagttttttcaattaaaatggactcaaaatggggatgagttgttaaaagacaattattttacttgtttttctacaaattttattgtgttcgaatttgtgttttttaacaaaatttttgtagtgctcatccgcaaatttttatttgtaatttgatttaaaggcatggcatggcatgcaggtccaatatacacgtattcaacagga

SEQ ID NO: 88526 - DNA, 579 bp, Citrus clementina
  Intron number 4 from transcript clementine0.9_016620m (loc us clementine0.9_009369m.g) derived from phytozome v7.0 (c hr-ID scaffold_21; pos 1516347 to 1516925)
tttgttcgacgccaagaaggtgagtgagccagcacgatttgtttctcaatttgcctaaatactttttatggttagtgcttgagaatctacagacttaggctccgtttgatattgctatccacaaaatttgaagtgtttgataaatacttgcaattgttgtccagaagttgagatcattttaccttgcagttgtttgataaaaaacttacattatttttagtaattatgtcaaaatcattatttaaaaattatattaccaaacaactatcaacttttgtttcatacccaaagcttcaatattgctgcagccgtgactcaaaagccataatacaacaatgccaaaaagagccttagaactgcgaattctaagtcagtgttctaatgatttgtatttagaaaatttttgtgttgtaagaaatgataaaattggtggttgaaaacatgtgactgttcattacttctaaagtatttacagttcgtctgttttttttttttcaattctattttctaaactcatatattttttttgttcttttctttgcagcgaagtaattgagctgatacagaaaggatctttta

SEQ ID NO: 88527 - DNA, 941 bp, Citrus clementina
  Intron number 1 from transcript clementine0.9_015482m (loc us clementine0.9_015482m.g) derived from phytozome v7.0 (c hr-ID scaffold_11; pos 3611474 to 3612414)
tgcgtttttgacccagttttctgggtttattgaaggtaatttcttgaaagttttatccccttttttgggatttttcttgttcatctgatttggattttgtttgttggtagggaaatttaatttcttttttctagtaatattgtgagagactgaagtggactttgttgagaacttgagatagtgagcaagaaatgagaggtttatatgatctttgcaaatttgattttagcttgattgaaatggctctgacgtaaatgatgagtgttgtgaattagacttcggttctctatctaatatttttcgtgtgatagctaattggtatatttagtaacttttactattaaacataatgctttaaatcctctttattaatacatgtttgagtttcataaaaaaataataataataatgctctatgatcaaatgacataatatttttgcttgcaatgtcagtggattggccaagagctttaagaacaagaaaattaatgtttttcgcgggttggagatggctattaatccgagtgaattgttgtgaagtgtgtgatacatgcaccttggaatatctctgaatgatgacacgtagataccgataggcttgacttgatccttctggagcagctgattgctgtaggatgctgtcttgattctattgtcacctataattcttactttacaatagagaaaaaagtgaaacctataattctattctaaatctgtactacaacatcaaatgatgcagttcaggatttcggtaccttgtaaggccattattgcatcattctgttattcctgtacatcatcttcatcatagccctaagtggaagcattttttacgcagaaatgtatttttggcatttgtggccttttgcttattttctttgaagaagaattttgattgttaatgttcatgctataacacattattcaatgaacaggtt

SEQ ID NO: 88528 - DNA, 798 bp, Citrus clementina
  Intron number 1 from transcript clementine0.9_011855m (loc us clementine0.9_011764m.g) derived from phytozome v7.0 (c hr-ID scaffold_21; pos 1710024 to 1710821 reverse strand)
ctcttcactaataggtatgtttaccaaatttttattcatattctgaaaggttgttgcttgtgggatttgatcaattgggttgtttatggttttggtttagtggtttcaatttttcatgtttttttcaaacttaattcttttaaagaccaagtgattttacacttgtattctaagatctgtattttagctgattgcaatatgtttcagtaatgaacatatatcagctggttttgtggtgtgcaagtgtttttgtttgatgggcagctgtgaagtttctttaatttgctgttttgatagtgtatttggtcttgcctgttgtgtgattgctttgcttattgattttaaagatgagatagatctgaatttgatgttcattgaagaaacaaacctaattggcttgatttctctaaaaaaattatcatatggatttggattctggtgacaatctggttctagtgcaaactactgcctacaaattgtagtacagttgtatttgttaggcttcatattcttgcttgaaataagaagttgaatgagttgcgtggcctgtctcattgtttcttttgggcactgtttttgttctttctaaaccaaccgttattatatcaaaaaaataaataaacaaaccaactgatattagctatagtgcatttttgtgagaaacagttatatatatgtggaattgggttcagttgaactccaatctgataaaaaaattgcttagtaaatgtttctgcatttggtcgttgggaataccatatatagtggcttattaattatgaaaaaattggtgacaga

SEQ ID NO: 88529 - DNA, 955 bp, Citrus clementina
  Intron number 1 from transcript clementine0.9_020718m (loc us clementine0.9_017849m.g) derived from phytozome v7.0 (c hr-ID scaffold_16; pos 2179321 to 2180275)
ccagttgcagggcgctatcaagttcaacggcggaggttagatagcttttttttattgttgatttttttttcactgtattttaggtatatgttgttgaattattgtattttaactgaacttgaagaagaaagaactgattttgatttatttttatatcaattttattaattaatatttagtgttagaatgattattgaattaatttttagagcatcaccaaaaattctaatttttatttggaaaagtgaaaaaggaggtcatttttcaaaagattatatatatatatatatatatatatatatatatatatattatcttaatcaatttttttctctacaaaagtaataataattataacacttttcttaaattatgagataaaaaaaatataacattaaattaaaggtttcaaaagactctctgaatcacatagtgtttctctctctttaatatgcactatctcatttggagattcttttagaattctttcttgttgatgtggctcttagaggcactgcatctcaggacttgaggtttggtgtgttgagatagctactttgaacaataatgataaaggatattcataggataattatcaaatgtgtgttcattctcaatgtattatcagcagtaagcaaatgcataatctttaaataccagccaaccgtaggtcattagagagagtagtgttagaaatacaagtgattgggaaacaatcatgtttaacgtagttcattttgttatgagtattttactattcaagttaataaatgctgcttaagaagagtgttgagaaacataatagttcatattcaatatctatcaaattaaagaacaaatatcaggctaacagctaccgttaagcttcctacgatcctcttcaaccatgatcgctcttgttttgatatctgttattgatttggttcatgtcaaatggtaatatgtcatgcaggtc

SEQ ID NO: 88530 - DNA, 679 bp, Citrus clementina
  Intron number 1 from transcript clementine0.9_029418m (loc us clementine0.9_029418m.g) derived from phytozome v7.0 (c hr-ID scaffold_11; pos 1658062 to 1658740)
aacggtacctctctttctcttgcttttaaatctaccttgaattgaaattgaaatgttgaattattcgaatgtatgtttggaaaatagatgtggaagaccaagcagctaaggtctctgttgaagagcaaacgcagatctccactattcagtccctggaaaacgacctcgtttcgggttcactctctgtccttctccggtttctcgtttactttgaaagtgattcttaaaaattgtttttattcttttatgaagtgtatgcagtagttgtggtattactttttgtttttgaaaactggtttggttgaaagtgcttttatgattagggtttaggaaaactaaaaagcacttatttgctgcttcataaaaaagcactttttcctaaataatttttccagtgctttttaatcctgaagatattttgtgtattttaagtgaacgctagaaattgaagaaaaccttgcttttggctagttgaaagtaattttaatgatcttggaagtggatagctattttaaggacaattttagtccttcttttcagcatttcaaaattttgaatttatcatatcttagacacagtagttcttatggaagaagctttttgttatagtcattgtttgtatttatgaacgttttttcatactttgcagcaaaaactgaaacaaagaaatttaaagaag

SEQ ID NO: 88531 - DNA, 892 bp, Citrus clementina
  Intron number 2 from transcript clementine0.9_029418m (loc us clementine0.9_029418m.g) derived from phytozome v7.0 (c hr-ID scaffold_11; pos 1658810 to 1659701)
cctctctcgagtctgattcatccacccttagccaggtactcatgattctaaatttaattgtactgtgtaaagtaagttagaaagactatttcttagggtatgtttggaatcaaggtgaattttatgctttaagctgctgtttgtagttttaactgcattatatttgtaaaatataatcaaaacaaaaaaagcaaattctatgccaactttggtggaagctacagttatagattgctactgttttgagatgccactcgtaggcaaaagagtaaaaggtttaaaattaaaattacttttgaggaaaacatattaacttttttctgccataaataatatggttttgtactgttacctattttagagggaaatgggcaagttaatagacatattatcatagatatcctcaagtaagcaaaagtgtgagctgatttcattgttttctcgtattgtttgctatttggtttttactctggtgttccgtctaattgttgccttgctggtctttgagagttgatcaattgtataaattatagacttaatggtatggtgaattttgaaaggaatgtcttcttttaagggaaaaaaaggtgtcaaaattatgggcctttcatctgtgtaggtttgactttgtgatgcatcatgagggttggtggcaaacgtttaagagaacattgaattttagacatggcttctggcattatacaggccatgtcatggtagaggttgttagcttttgagggttatcacgtactcttccaagtaaatgaaaaatagatattcatgattagtcaaagaaacatgtacttccaactttttctgttttcttgatcttgttcctactctttttggacatacagacgttagagcttatcacacaagaaagagtcagcat

SEQ ID NO: 88532 - DNA, 722 bp, Citrus clementina
  Intron number 1 from transcript clementine0.9_002871m (loc us clementine0.9_002871m.g) derived from phytozome v7.0 (c hr-ID scaffold_39; pos 863334 to 864055 reverse strand)
taaacagctttcacttcaaaattgtctcaaaggtatttcctttaccttaaatggttcggtgtttcttcttttaaaaattaatttgttattttttcagttttcagcttatgcacgacttttttttcatctggctgagattcgattttaagaaatgggataatttctgcttggtgcccacttgattatatgttatgttgtgtttacgtttgttttgatcattcaaatttgacctgggttgattgaatgattgttgttatatacttgcttcaccttaattgtagttaacagttaacttttctggatagagggtagactcagacaactcctttctttctatggccaaacagagcatgatcagtgggacaggacagtgtgtgttccgaggctcattttgtgttttgtgtcttttcaaatttaaacttggctttatctgttttgatttattgcatattatcatctctgtatcatttcctttcagtaacagtgcatctataacttttgtttttgttccctcctgctcagattgatctgtttgattactctgataaataagcgagcattgaaaatttcagaaatggatttttaggccataattgctagcaatagttcattgttagacaggaagtagtatagcttcactgttccttatatccatgttgtgtgtgtgttttcccatcatttatatataatgatgataactatctgctcttccaaatatcagg

SEQ ID NO: 88533 - DNA, 558 bp, Citrus clementina
  Intron number 2 from transcript clementine0.9_012740m (loc us clementine0.9_012740m.g) derived from phytozome v7.0 (c hr-ID scaffold_103; pos 136537 to 137094)
gagctctagtagtcaacgttggggaactcttacaggtgtgtaaagtgcagagagttcattattttttggcattgagggcaaaaaaaagttaaattaatgtaaggattggttggtgaatagtcttaactgcatttatgttcttagttgctactgccttaatgatgtcccaaacttttgaacatttagaatacctagatttcctttaagccatcatttgattagtgggaaacagaagaattaaaaagttcaaagatatgacgaaccctcgaaagttggttaaatcagtagcctcaaccacaccaaattgtttcatattgcttagtttctttcagtagaatttcttattttcttagctgcaaataataaagatgttaacttttcaaacattgcacctctcagcagctatagagagtctagtggtaattctggttgtgaaaaagagtagaagatgaagaaaatgaactgactgctttgtaaaatcaatactatatctgtcattatgttatcatacggaattgttaaaggttttgacttttgttttttggcaggttatctcta

SEQ ID NO: 88534 - DNA, 183 bp, Citrus clementina
  Intron number 1 from transcript clementine0.9_026661m (loc us clementine0.9_026661m.g) derived from phytozome v7.0 (c hr-ID scaffold_71; pos 1108101 to 1108283 reverse strand)
ctcaaagtaggtatgtccagataaattatactgggtattttgaattgaagattgtgttctgtgtttcttttcattattaaatattttttaatccaaattttcatgtacatttgttatttacaaaatccgatctctcgtgcttttctttttattgatttatcatattctggcagagagacatct

SEQ ID NO: 88535 - DNA, 914 bp, Citrus clementina
  Intron number 1 from transcript clementine0.9_004311m (loc us clementine0.9_004311m.g) derived from phytozome v7.0 (c hr-ID scaffold_96; pos 136291 to 137204)
tgcccattcgcagctttgtattagtgatttgtcaagtaagcactcctctgaaatgctatatatgtttagctcatttttttgataattttgcagttactaacggctgaatttcaagatacacagttcaagatttgatctctttgtcatgaaatcaaatggggttgtgtaatttagtttatttatcttaagttttggatgtttcttgcatcagagattgaatttcaaatggtttttgggtttactttagcccattttcacacaaattttgctaagactatatgctgattttatgttggtgaactcaattggggaatagatactattatgatgcattcatatgtccttagttatttttgtctaagcttaaacaaagttgtcttttttttgttttcctgggaatatttgtttgttgtttttcgaaatgcatcaagtttatcataatttttctaattccttgaagtaggtctgtgtagcttatctttattcctatactaattttctgaagacgtgtttttgttacgtcttattttatttgatgttttagtttgatcacaatctttcaaaattgtactggcactaaagcttgagtttcaagaacccacttgaggggataaaagtttgtgtttcttgttgtgatttgggatggacggtgttgaattttgcgtattattatctcaataagttgtataaaattcaagtcggtacaattcattatttaccaagtccatcacaatttggaagagaaggtagaatcttaataaatgcacacataaaaaaataaaattgtacaatcagaattgaaatgacaaattataattatcttcttttgatcctaattggaagatttgccttctgacattttaaattttgattagatttcttgtaactatctttgctgtggaatttaaacagat

SEQ ID NO: 88536 - DNA, 692 bp, Citrus clementina
  Intron number 2 from transcript clementine0.9_004311m (loc us clementine0.9_004311m.g) derived from phytozome v7.0 (c hr-ID scaffold_96; pos 137257 to 137948)
tttgctcagccacatcaagctgttcccattcattggtgagatatgagatgacacttcctatgttggttattttctttttgagttgcttccaggctcttgcattaataaaattaggcaatgagcgaacaaattatgatggtttcatactaacctaatttgtttgagatcactagatgattgtctttagttaaaagtttttgcttatctcaatgttagagaaaaaaaagagaatttcattaagtgaactcgggtatctttcgtttcatgtgataagtattgataattcttcagttggactcataattatgacatggttctttctgcaaaatgtttcatgtatattcaagaaattgtaattttttcttatcagataaaaaattgttggttacttgctgagatattgctaatctggtatgcaccttattcctcagtcagcattgttctttattttgcaaaaatcaatccacatagatgttgtaggtcattgttgcatgattgatattgtgcactcgaactaccctacattacaaagatgacattttcactcagtaaggactttgaatcgaaatgtacaaaaaatgatgggaatcttgcaatacatgccctgaaatctcttacttttttgttgccttgggaatcttgcgtttaaacattgattgcatttgcatttttcaattagcagacatcattcc

SEQ ID NO: 88537 - DNA, 188 bp, Citrus clementina; identical to SEQ ID NO: 78708
  Intron number 2 from transcript clementine0.9_010120m (loc us clementine0.9_010120m.g) derived from phytozome v7.0 (c hr-ID scaffold_39; pos 492314 to 492501 reverse strand)

SEQ ID NO: 88538 - DNA, 446 bp, Citrus clementina
  Intron number 1 from transcript clementine0.9_009438m (loc us clementine0.9_009438m.g) derived from phytozome v7.0 (c hr-ID scaffold_37; pos 1206238 to 1206683)
tcttttggagactcgcatttttcatctcatccacggtataatgaattaaagggaccaactttgcaattttgttttttatttatttatttactttattctctttgaatattttgattttctttccttttgggtaatgcatttgttctttcttgactcttgaagtcttcttattcttgactttttagggtgacttgtgagttcttgttcttaaattttctatttttgattactttagttgtggtagttgattatttcggtttcgtgagtgttaaattctgcacactaattttttgagtcttcatttttttggactacagtttgaattcttgtaagggttttgctttttactgtttaattccatgctatatgttttactattgaaaatcaagtttcggaaattctgttctcttatgctatttgatgtggttgcagataaattggatcac

SEQ ID NO: 88539 - DNA, 1020 bp, Citrus clementina
  Intron number 2 from transcript clementine0.9_021925m (loc us clementine0.9_021925m.g) derived from phytozome v7.0 (c hr-ID scaffold_60; pos 378152 to 379171 reverse strand)
agaattgaattctaattattaccttcagctttcaggtacaattcattttttttaaagaattgtccacattattgtgtaacattattttatttttgttttgtttttgttccctacatatattaatttatagtatctagcagtgaacaatagataggagttggatgcatttgctaaataaattatgtaaagaatatttagatggtatcaagtcttttatgaaggctgctgagcaatgtgcaaatgagaataatcttgttcgttgtccatgtaaagaatgtcaaaatgcattcttcaagtcgttgcatattgtcaaagcccacttaaaaagatatggcattgcagcaagctatacaaaatgggtttttcatggtgaagaacccgagtttgtggacaatagtaaaatgaatgtaggatctatgcccagtaataggagtgcctttaaatttgacaatgaagaggatgatgatgaaatgtataatttaattcatgacatgtgggagccaatgtcaatggatgcattcacttcggagacaaatattgaagagaatgttgacatgatacatgatgataatagagaatttagaatgtgtgcaggattgttagaaaaggctggaaaaagtttatttcctagctagttctaagttatctgctttgagttttattgtcaagctaatgcatataaaagttcttaataaattgagcaacaaagcaatagatatgattctccaattgttgaaagaggcattcccagaaggcacaacactaccaagtactacttatgatgcaaaaaaaaaaatgttgaaggacttgggcttagggtatgaagtcatacatgcatgtaagtatgattgtgctttattttggaaagaatatgaggcattagagaagtgtccatactgtggtgaaccgaggtacaagtttaaaggcaataaaaagaaaatacctcagaaagtgttacgttatttccctttaaaaccaagattataaagattatttatatctaggcatacagcacgagat

SEQ ID NO: 88540 - DNA, 384 bp, Citrus clementina
  Intron number 1 from transcript clementine0.9_007808m (loc us clementine0.9_007808m.g) derived from phytozome v7.0 (c hr-ID scaffold_39; pos 1807092 to 1807475 reverse strand)
cgacccgccgtttggccctcctctacgtctaacgtgttagtctctctttctctctcctctgtaacctaaatccattttcaagatctctctcttacaccgttgttaattaatcaaatttcatttcattttcatgtactgtttctaattttgtaaatctttattttattttattctttttagttttattggttaatgctattgtattattgttcgttaatttctcctcatataatttatatacaaaaagaaaagaaaaatctggcagctcaattttcattttttgtgttttgtgttatctgaattatatttgttgacttctttttttttttttttaaatttttgtaattaggattaatactggagtaatattgtgtgggagtaagt

SEQ ID NO: 88541 - DNA, 660 bp, Citrus clementina; identical to SEQ ID NO: 78806
  Intron number 5 from transcript clementine0.9_021312m (loc us clementine0.9_021312m.g) derived from phytozome v7.0 (c hr-ID scaffold_8; pos 2050358 to 2051017)

SEQ ID NO: 88542 - DNA, 888 bp, Citrus clementina
  Intron number 1 from transcript clementine0.9_033646m (loc us clementine0.9_033646m.g) derived from phytozome v7.0 (c hr-ID scaffold_37; pos 765297 to 766184 reverse strand)
aaacaaagtccttgactttaaaaaatgaaatatgcaatgtgcttgctcggtacaatcttttaattaaaaatttaagaggtcaagggtatgatggtgctagtaatatggcgggtgaatggaatggattatgatctttatttctcaataattgtctgaatgcttattatgtacattgtttttctcatcgactacagctcgtattagttatagtatctaaaaaagtgcatgaggtatgactcttttttttcaaagttgagttctattattaactttgctagtgcttctttcaagcattatctttagttaaaatctgctggagaaaaagaaattgtagatttgataggtttaaaagaactttagactggtacagggcctaatcaagttagaactttacaaagagatggagatacacattggagctcacattttacttcagttagtaggtttattgagatgtttggtgcaattcttgaagtttcagaaaagatgattaatgatggatttagttgagatatgcatggagaagctaaaagtgtatataaggagatgaaatcctttgattttgtgtttattttgcttttattgaataaagttctcgaaatttctgatattctttgttgagtattatagacaaaatcattggacatcttgaatgctttgaattatgtctcaagtacaagaagacttttgcaggagttttgagatagtggatcagataattttattagaagtgtggtatctttatgtgaaaaatacaatattactatacttgatatgaatgattgttatatggaaggtacagggcgttcttgtcaataaaaaaattatgttacaatttaacatcattatcactttgctatatttaatgttataatagattttcaattg

SEQ ID NO: 88543 - DNA, 820 bp, Citrus clementina
  Intron number 1 from transcript clementine0.9_034680m (loc us clementine0.9_034680m.g) derived from phytozome v7.0 (c hr-ID scaffold_61; pos 743961 to 744780 reverse strand)
acagccctagggtttttttttattctttgtctagaaacaattaatgatgtaaatggtgaaggctgcttacgattagaaggagcggagctgctgcttgatagattaagcggggaaattaaaaaataggtagagagggcaaaaaaaaaaaaagcaaatcgaagtgaacataacaacccaaacctagcctcgagtgtgaaatcagtctcccaactgtaatgaattaaagaaaaagattagtcgtacaagtccttacaaagtaatccccaaaccaaaattacaagatggaaagaatcacaacattctccaatagcatatgcaatattgacttcctcatagtataatattccttcagccaatgacccaaaaaaaaaattggattacaacaagtagtaaactagccttgcaatcgatgtatagagtaaacaataggccaaggagagattaataataagacactaaagaaagagttgcaatactactgacctggaaaaaaattgttatttcatggcataattagcgattgcggacaaaatgtgtggcaatctatgaaaatagataagagttaaataaaatgttgcaaattttccattcaagaattagagactgattgtgagtcagttggaggagcacacactatgtagtaggtgctcaaactgattatattacaaacagattaacctaattaatatataaattgtgatttctgaagacactcgcaatgcgtggcaggttggtgaccgaccgttatgatgcgcgagttagggttgattagtggtagctcgaagagacgtagaagacgtgcaattgagggtagtgcaga

SEQ ID NO: 88544 - DNA, 534 bp, Citrus clementina
  Intron number 2 from transcript clementine0.9_025358m (loc us clementine0.9_025373m.g) derived from phytozome v7.0 (c hr-ID scaffold_28; pos 1986146 to 1986679)
aaccctagaatccgtcgctgccgccatcgttgaaggtttgctgctgccaatattctgactttcatgtaacatcttttgcttgtcagttatgaaattgttgttgagaattttagaacatatgaatttatttataaatttttaatctttatgtgttttaagttaaattgatttgctgtgctgtaattgtacgactaggtgtttgagaagtgtttatgattttttaagctacctgatataataggacttgatattattgttttttttttcctagtgttatgtatgtgatgaaaatgagaaaaaaaagaagtcaaaattaaagtgaaatccccaaaaatccaggttgcccagaagaaaaatgattcattgttttgggtttatttggttttccgagtaaatcaaaccgaacccgaagtgtgcagtgtaggctgcaatttggtataaatatcagaagaactggctttcctttgtcgaaaaccctttacctgagacgggcgtgaaagccttgcggtgttgctatttgcagtgcagacggtg

SEQ ID NO: 88545 - DNA, 793 bp, Citrus clementina
  Intron number 2 from transcript clementine0.9_020330m (loc us clementine0.9_016263m.g) derived from phytozome v7.0 (c hr-ID scaffold_8; pos 2018916 to 2019708)
ccggtactattgacagggtacttttctttcttttcttctttctctgcaatgttgagtatgttcttcatactaggttagcttgaggagtttagatgtgtgtctatcatgctaacacacatagtgatcgacattataaatgtctattgaagtacgtaactgtgccagactgtatgcacaggggtagtcacatagatactgctaagattttggatgggtaaatcacctggcattccatgtatacagagatattttttaggtataaagccttagttgagtatatgatcacttgcattgtttggttatggtcatttgactcatttccgttttctacagattgaataagagcacttaaagctaaaggatactttcttttgggtttcattcaagtgtcaactaacgaatactctggtgccttttgaaaaccaaaagatgctgtagttctttgttaaaattttgcatcatcaaaaacaaaaatgcttaatgcttcctggatggaagagattccaagttccctgtaattgttttgttcaattcttttggttttgcttttgtacaaaatctggtctttagaacccagacaagcattgaagtaaagattttatctacaaatgaatacctgatcaaatttggggggtggggtgggaggagggagacttggaaaatccaaattgatctatagcatgatggaaaatatgtggatagagctgaatttaggtcttttttttaagcagttcttccttttaagttctatactgcagtattacattgagccagggactggatttcgatttcg

SEQ ID NO: 88546 - DNA, 896 bp, Citrus clementina
  Intron number 2 from transcript clementine0.9_001916m (loc us clementine0.9_001916m.g) derived from phytozome v7.0 (c hr-ID scaffold_21; pos 743406 to 744301 reverse strand)
gaggtgcccatgactgtcctcgtggactccatcattccatctctttttatacttttttgttacatatatttattatgtatatgcaatatgcttttgtatgttagtacgtatatatattcaaataacacgtgaggttggatgaatttgtttgtgtttatgtatacatatttttttatatatttaagcaattaatccatagagacacatgaaatttgatcaaaatagtatgggtgtccgcctgttgtgcttacatgtaatgagtgtacagcaatttaatctatgaactcagattatgtaaattatgaaatttctgttctgaactcatattacaatttcaggattccactacttgaaacttcggtctcacaatgagttttcccgagagcatgtattcaagtattagagctaggtgtactgtaattatatgttcatttttctgcccttctttgttggatctcggtgtttattttgtttttggtttctggtaaaggcatgcaatgccctgttatgatacacttaatcaatccttgtggtttctgttttttgttttatttttcagaataatactttaacacgacattcacaaataaatatgttggatactgtgtttgtactggatttgtttttgtatgagtttcagtttagttactttcatatgattgaggatatgacttttacaattactttctagttgttttacctcgaagaatcctgccttgttattttgaagcttcttcacattgggctgttttctttagtgatctcatgagaattatctccatgttgccattatgtaatatttctattggaatttatgtgtgtaaagtccctttaagtgtttccttaattcataattagcccattttttcaacttatttctctctctgtagtagaag

SEQ ID NO: 88547 - DNA, 842 bp, Citrus clementina
  Intron number 1 from transcript clementine0.9_001916m (loc us clementine0.9_001916m.g) derived from phytozome v7.0 (c hr-ID scaffold_21; pos 744317 to 745158 reverse strand)
cttctcgcatactccaactactacgaagcctctcggtacgattaaacttattttgcttattttcgcttgattattctcttccttgctgtttccatttttgaacttctttgttgcttcgattttgacttctttctgcttgagccaagtcttaatcgctgttttgcgattttgtattttgtggtttttgtactgcattgtttccacttttgtgttcatgttcgtagatcgtcttctgtactttttttttttaattcatttttgttcgcgtatacgaccaaatattcgtcatatttgttaattacattttgtatttttttttccttttaaacttctgttatgaactcatctggtagcattttttttttcctcgtgtaatcaatttgttttacacaattttttcgcatggatttttgcttaagttttttgtgcgtgtgtatgtctatgtgtgtgtttttcttttttattttttttttacaatatttaaattcaccatagtcgtgagtttaattttgaactagcacgtgtggacgagatttctttcgttcgattttctgtatttttttctcaagaaactgattctgcttgttttaactttttttttagctcaagtgttttgtgtttccttttcttttgaaaatttaagttcattttattctcgagatgtttaattttgaactcacatgtgtagatgagattcacactgtttggttttcggtacttttcattaaccattaattttttgccatgatgtgaatttttccttttttaattttaactatattgtctttcttatgttgtccttggcagttcattaaccattggcactttgtgcttgccccatt

SEQ ID NO: 88548 - DNA, 1008 bp, Citrus clementina
  Intron number 1 from transcript clementine0.9_012348m (loc us clementine0.9_012348m.g) derived from phytozome v7.0 (c hr-ID scaffold_16; pos 1172190 to 1173197 reverse strand)
actgcctgggagttttaggtcattaacaaatttctttttttcgattcctgcttgaatgggcaatattcagtagcgaattttgttttattagtgtcttcttaatatacgttatcttttgaaaaataaattcttaaagtttgttgtttgttattaatgttttctttcttcttagtggagtatttattcgattcttgaagtataatttgtgtgatcggtaagaattggaatataattgactgaaaaaattaaaaattaattttagctttaaaaaccggctgaagcacaaactacaggcagttaaagccgcaaactagagaaggtgtgtgatttgctgtgtttgcttgaattttgaggtccctatggaagacttctgtttgttaaattttgggagtcttagtttctctattgagtggcttgttttgcagcttttggtcttgttaggaggtagaaacttttaagttcgcatcttgtgcttctgtgtggattgtcttattgttttcggttttgaccgcaaatggttgaatttttctttttggatatagaaaaaattgtttatgtatggtgcctcacgttaaaacacagcatatctgagcttctagtatgattgtgattatttatttattctttcttctgtatttgtttacaaaactatttaaaccccaaaattagttagtaataacctggaaataccgagattaattcattgagtgatgcagaattctttctcctttaattacaattactgatcagttacagtaactagatttcttttgctgtttctggttactttgaagttttaatattagtgttggatactgatgtgaaagctgaccgatgagaacagaattttggaacttatacggtgtactatctttctgttgttccttgttataagtcatgcatggttaagtgaaatatgggttaaccctgtctcagttattttagaaataattgttatgtttcttggattcaggtccagaagataacgtggctgaatactatcaacag

SEQ ID NO: 88549 - DNA, 809 bp, Citrus clementina
  Intron number 1 from transcript clementine0.9_013158m (loc us clementine0.9_010583m.g) derived from phytozome v7.0 (c hr-ID scaffold_39; pos 585301 to 586109)
ttgattcagttcccgccgcgcgtatcttccttcacgcaagccctagtctctttctctcctctctcttatcttttaatatataaatattttcttatatagtttgtgttcattcgcttcattgaattcacatttactacaaactctctttaaattcgtatatgttaagatgtttatggaacttcttttgtgtatatttttcaattaaggttctttatatatatcatatgttgtatagtgttcttctgttcaattttattttttattttgtattcaaatctctttgcttacatacatgttaatgttagttgttatttggatgtttttatgtgggaaattttgtgtgcttaaagtgagggaccaaggcttcgtttgggattcttgttcaagttcttaatctatagttgctgtgactgtataagttaatggtggttggtagccatttgcggtccaataaaagcagttatgatttcaaacttaagtagaggcacaacagttacaaacatatcctagaacctagatcttttaagtgaacaaattccaagcatcttttttagtgtgccctgatgcctttggttactgcacaagtaaatcaactttactccatggactcttttgcaaggttatacttgcttctgtataatgtagttttatttaatggataggtacctaaaggagaaggctatgtatgattagagggatggtgaagtttgcagggtcttctttgatatcttcatttactccatttgattctgttctcctgaaaaaacatcgcagattttcagtaaatagtttcttcaagaattcaaata

SEQ ID NO: 88550 - DNA, 509 bp, Citrus clementina
  Intron number 4 from transcript clementine0.9_003318m (loc us clementine0.9_003312m.g) derived from phytozome v7.0 (c hr-ID scaffold_8; pos 2996287 to 2996795)
ttgctggaacagtggaagaggttctttgaatttctttcaacttgagctctttatatatgtgcaattgtgttgaattcttattcacattgttatgcctctaggaccaagtatatgtacttttatcatattttaaccaatggaagagatgattagcatgtggcgcttgaattttaataatctaatcaagaatgagaagaatagtctaggtaagaagtgaaatatgagtttctaaatgcagttattgttgcctcaacacattgcttttaagtgcattatagcagatgcagcaactgaaatgctgctaaacaactgccgctactttttaaactgcatttatagacataaaaatgtattttcttttggttgatacttggttccaaaaaatcttgaatcttcttcatagagatgccaacagctttaaccttcttattgatggaactttgcacatacagtgctggtattgattgtcaggtagcttatttagttaactgttatgtttttggcaggta

SEQ ID NO: 88551 - DNA, 959 bp, Citrus clementina
  Intron number 2 from transcript clementine0.9_025750m (loc us clementine0.9_025750m.g) derived from phytozome v7.0 (c hr-ID scaffold_44; pos 1050014 to 1050972 reverse strand)
acctccgcctcagattcgaagccaacaaacacgtggtacattcccattcgctcttcttaaaaaattcatttttaatttcggattttttttttaatgttgaaatatcttgcttgctagcgttttatttctgaattataacagtttagtggaatttccatgtggactagaatgcattttattaaatttatgggtgcgtgtgaaggaaattaattatggtaaaaactaattacgagaaaagtagtaatagttaaagtgtctgattggtatagctgatctaatgggcataagtgcttatttaattttatttaaatttttgttgtttttttagtagagtttttgaagattaaattattttatttctactaggaaaagttcaaatttagactttgggagtagaggttgaattttttttttaaatgttaaaatgtctaaaatatcttgtacttatttgataatgctatctaattatttttataccataactttaaaaaacttgtctattaatgtaattttgtagtctttagtaaaagcgcttcttgacaatcaaataactagaattattttggtaaaaactttacttataaaagctctactagcaaaagctctacttaaataaattttatttgaagaaaacggagccaaagtattatgaagtgctgtcttgctaccatgaggttttgcaaattatttatgggtggtatcattagttactattaagtggaatgcagtcttcctcctgtttagttatcatctcagatgtagtaaatctggctaaagtctctttgtgtaagcttgctgaagttcgggcattgaactttccgaactatgttgtaaattggttcttgtggttgtgcttgcattacttgtgagtgacggctcagtttttgtgctaatatttttctttctattaatagggtatctggtgatgttttgtttggttgatatgcagacggaccttg

SEQ ID NO: 88552 - DNA, 627 bp, Citrus clementina
  Intron number 2 from transcript clementine0.9_003167m (loc us clementine0.9_002516m.g) derived from phytozome v7.0 (c hr-ID scaffold_8; pos 2157110 to 2157736)
gatcagttcgtgctggagctcattggactccaactgtaagtgacatactctttaaattaacttattctgatggccattacactaattttttggtttcaatcaatcacttgttgaggttttacataagattaaattccggtagctgctttcgttgctggagtatatcaacttatgaaatctttgatttcactggacaataataatttttgagttttgaaatcttttgaattgtgcacttaccgttaggtcacacattagaggatagagaaatagaggctactagcttgcttttatgctgtattgttcaatttcatacttgtacgtgcatgttctgtacataatattttactgggtggatcatatgcataactgataaggattattactacttttatatagattattttgatttgattgctagtttgtccacaaaagatctcaatcttttttgggggttttatgggtttcattcttcaccacccctcccttttttccttctcttcttgaagtggtgagggtgtagttttcatgttcttgtgaagcctagaccaattgccattttaattagtgacttctattgatatggagggaaattttgtgacaggtctttgctattgctcaaaggga

SEQ ID NO: 88553 - DNA, 397 bp, Citrus clementina
  Intron number 1 from transcript clementine0.9_026551m (loc us clementine0.9_026551m.g) derived from phytozome v7.0 (c hr-ID scaffold_8; pos 4095319 to 4095715)
acggaccatcggatcccggttatcatttgtacaattatccttaattttctgacaaatgcaatgaaccgatccctttgttttgtttttgtttttcaatctaagttagaaccgtcctgtaaaactccagtagcattagatgaaaattttatatagatatatagacggcacagtgttcaaggataaaccccacaaccacagtccacaattgaacattgcgaataaaagtataaaacaaaaatgaagattataaaatttattttaatttagaattcaatgaaactattactttattaaaattcaacaaaaagaaaaactaaacacttacgtatctgtaaatattttctcaaaattcgaattagaacaagtttagcctcatgtaatatccaaccctagctac

SEQ ID NO: 88554 - DNA, 907 bp, Citrus clementina
  Intron number 1 from transcript clementine0.9_006851m (loc us clementine0.9_006851m.g) derived from phytozome v7.0 (c hr-ID scaffold_39; pos 1475891 to 1476797)
gtcgcttgaagtttgaattttgcatacttgttaaggtaaattttgttattgactgtaattgtttatatgtcagtgctatttaaccttctttttatgtattgatatttggcaattttttttcattgagttgaatgtaattctgtttctaaatgtattatgttatttgtttgttaagacttagatactgataagcttacttttctctgtaagtttcttttggatatttatttatcagtgctggaatgtgagtggtgctcttcgtagcaaatacatttttggaatatttttttaatagtgcatttatacttcaaagaatgccccaattgtgtctttgttctacgtgttatttgtttgaattagtggatgcactgatttcaagcaacatcttgtttgacaaggatcagtgtgcctagctgtgccattgtgcataaataaaaggattttttattttgttttatatttggtcgctggttgagaatatgcacaaaggggatgacctaaatttgaagtttcaatttggcttagtgcctatttggtatgacttatttaagagccataagtgcttatttaattgtataagcactttttaaaaaattttatggtgtttggttatttttttagtagagtttttttagcgtaaataagctaatttacctctactagcaaaagcccaaaatttaagcttttgggagtagaggttagagaacttttctaaaaatatataatataaaaaatatcacacagttcaatagttcaaaagtgctttttttattgacaaccaaacacccaatgactttttgtccaaaagctctattggtataagctctactgttataagctctatttaataagttgtaccaaacggagccttaatgttggttggttgtccttcaggtcgaggtaaaga

SEQ ID NO: 88555 - DNA, 612 bp, Citrus clementina
  Intron number 1 from transcript clementine0.9_003016m (loc us clementine0.9_003000m.g) derived from phytozome v7.0 (c hr-ID scaffold_39; pos 1952090 to 1952701 reverse strand)
tgaggccattgtccaatctgagagtcaagaactaggtaccatacatattttaccttattatgtttttaaccactgtactaaagcttaactatatatttaatttttttaaaaaaataataatttaacagctaacaactaataattttatctatcaactatctctgattccattccacaaaaacttttggattaattcaaacctgcccttatattgttttttgcagcttacttgtgtctaaaattttggtatgattttcaagaatggtatctttgagtttgagagtgcaattggtggctaattattcttttgtgtttgactgaaatagataaaaagtgcctctttaatgtagacaatacttcgtatgttagttaatattgttccttagagattacaaacatagatgaatctattcaatttggtcatgtaaagacataataattaaattgacatataacatatttactttcttcctctcctctcgatgccaaatgatcaagagtgatatacaatctgttttttgttaatttatggtaatgttcttaatcattgcatatatttcatgattgaatacagcagaatcaaaagattttcagccacgtgctaagtacaga

SEQ ID NO: 88556 - DNA, 418 bp, Citrus clementina
  Intron number 1 from transcript clementine0.9_012650m (loc us clementine0.9_012650m.g) derived from phytozome v7.0 (c hr-ID scaffold_16; pos 1428704 to 1429121 reverse strand)
attgttgttgctccctttgcccttattttggataggtacttttttcaaaaaattattttatcttgtttttttttcaggctgaagctagcgtttagttttatctttttttatcgcatacgtaaatacgtccacactttagaaaatgctgatagaagccataaccaatctgcattttgttaatcatttttctcattttgtcactttaacaaatgcatttcttctctcctgcaaaagcctaaaatttgtccacagaacaatgctgatattatattgtctgcattttgcacgtgcagtgcaaatgtttacactgatgattttcatatattacattgacgattttgcatgcaagtagagaaggtgtaagaactaatcatcaaatgaatattaattgttatccaacaggaaagtgagaccaaag

SEQ ID NO: 88557 - DNA, 698 bp, Citrus clementina
  Intron number 1 from transcript clementine0.9_013292m (loc us clementine0.9_013292m.g) derived from phytozome v7.0 (c hr-ID scaffold_56; pos 379188 to 379885)
tttgcaaagagataggtattgcatgttcttctcattttttttttgccctttttcagtttgtataactgttctttgtttctttgtttctgcttatgtcttttgtttttttattcgctttatggccgtgaagatatggtgtaggtttgataattcgaaactttgttggtcttttgtgattttggtttgcatggctggttaaattgagatatgagagttatgtcaattcagcaaggttaatgtttcgtttaggatgaaacaaatttcattactagaggccggtttttgaatttttaagtttttcccttggattggatgaattaagctctattctgtagtttcttcatttacatgaagattactttcaagtgttggtagctgttagcacgattctttctttattcggtagctgggttgaaaaatttttaatttctgtctttgaagtagttagatgttaatatccgaccaaattgtatgagaaagatgtaattagaatgtgaaaaatttcttaccgggttagtagtttaaaataatagtaatatttctgattttggagtttcaaggataggggtcgtggaagttgaagttgcagtttgttttgtttaatacctgagcatgcagtgaatctgagtaagcagattttggtcatcctgtttgattttgtaggatttagtaaagggtcggcgattcagtggcccttc

SEQ ID NO: 88558 - DNA, 559 bp, Citrus clementina; identical to SEQ ID NO: 83185
  Intron number 5 from transcript clementine0.9_015142m (loc us clementine0.9_015142m.g) derived from phytozome v7.0 (c hr-ID scaffold_12; pos 995077 to 995635 reverse strand)

SEQ ID NO: 88559 - DNA, 561 bp, Citrus clementina
  Intron number 2 from transcript clementine0.9_029011m (loc us clementine0.9_029011m.g) derived from phytozome v7.0 (c hr-ID scaffold_52; pos 91619 to 92179 reverse strand)
cttgaacagtaagtgaacttatcattgctatcgtcaactttcttttgagtttctgaactacttttgatgtcctggaagttgttgagactaccaaaagctatagtcaaatgaagctagggctgacgtgattataccttagtatttcttcatgttaaaaggtttctgttgtaccatctttgctgtttacaagaatgtttgtggagaaagccttaaatctgaaaccgaagtaaatattcatagagtggagaaaactgaactgaaaagttattgtttaggattttggcttgtgggacaatgtgtaatatagaaacctaatcagttaattcgttcttgtgaggatttcaaacttattgggttcttttgtttcatgaaatctgtgattgaaccaatcatcatagaaactcagttcaactaaacgtagtggttggtggggtttggtttaacctttcaatcagtatgtttaagccaggtttatatgttcaattagacatctatttgattgaaatatttttctctattcgtgctggtccttacaagcttgtcaaatcttgcagggatttg

SEQ ID NO: 88560 - DNA, 949 bp, Citrus clementina
  Intron number 7 from transcript clementine0.9_002313m (loc us clementine0.9_001559m.g) derived from phytozome v7.0 (c hr-ID scaffold_44; pos 1061853 to 1062801 reverse strand)
ttactgactctgagcactgtcattcgcaagctaaggttagtaattaaattttcttcctgataaacatgtaatttgttttggctgaagttttttggacataatgtaggttactttggctgtgtaaatttcacttttctggaccaagagataaacaattttttacagtggaagcttgagataatttctcaaatgcaaaaaactgaaggtgacaattcggaattgtgtagtccgattctagttattgttcacttgttgaactactggactttgtggttttatgcaaattgttaatatgaaagaaaaacagtcatattggattacggggatgcaataaatcgagcaaagctagactgaatctgagttattcaagcctggttgatttgaacttgataaacaaagctgatgctccttgtgaacattgtaatataatttgagttcctttaaattggttcctaaagttattgagccaattgagtgctaatttgtttatgactaataaattttctgattacgtataaaatatatagtagtggattatatcaaataagaattcatatcatataaactaatgtggtatggaggtactcaagctcttcatctgaactggattcgaacttctaaaagttcgtgtttgagcttgaaaccataacaagtttaataatgagctcaagctcaagttcaagcagaattcaatggttaaacgaatcaaaccacattttcaaatgacaaaaattgactcattagcggtagggattttgaccccactagcttgtttggtacttgttgatatatatatatagagagagagagagagatccctataactgaagcaagagttatatctttgctctgctccctagaattccttgctttggagctttatgctatggggagctgaacttaacttgcttattgttgtggtgctgtgattcatgcagtaaaggaagaa

SEQ ID NO: 88561 - DNA, 999 bp, Citrus clementina
  Intron number 1 from transcript clementine0.9_004649m (loc us clementine0.9_004641m.g) derived from phytozome v7.0 (c hr-ID scaffold_8; pos 817649 to 818647 reverse strand)
tctgagagttgcaaagagcgaagtgataagaccaggttctttttctcatcttcaaaatcatcttttattttcacttccatttacttgctttatacgactccgtttcagtttctgtatgtttatacttcatgcgtttcgtgcaattttactttcacgatgtctgttgagcgcgtgcctgccttgttttcgaattttattaccgtaattcgcgtatacaatccatttgaaaatcaaaattttctcacgaatttgttgtatgaatctgtcaaatttatcgcgatccgatgtgttagaattttgtaggtctagggtggaacgaatagagagtgtgaagattctgtttggattgaaatctcttgagcttaaacaagagatctcagattcgaacgataggtgggagaggatttaattaccagtagacagtagtctattcataaaacaaaaaagaaaaaggaaaagagaggacttaaacaacttggtgagagtaatcaagatcaaataagcgaaataattttcttgtggtttcagatcataaaaaccgttcctttttcaagtttctgaaaataaacatgaaatgaacatctttttttttttttttaggttgggggagagggggaataaataaaatgattaatgtgaaaatattgattggttatcggattattttaatattcagtattgtttgtctaaagttgtgtttgaggattaggtgatatggcttttaatatgcagctgttgtggaattagttagtaaaaacatttgctaactaatgaaggcaagtgtttaacaaactatatagtcgctacgattttaaaattaagtaggagcataatagttacctggtgagttattcaaagattacatttgggatttaactactgttattgtctgtatcaacattcttggttgtaagtactacagttgtaggtttattggttgttgatgttgttgattggattttaatctgaatgctttgtcattttttagcttgaattgag

SEQ ID NO: 88562 - DNA, 291 bp, Citrus clementina
  Intron number 1 from transcript clementine0.9_004375m (loc us clementine0.9_004375m.g) derived from phytozome v7.0 (c hr-ID scaffold_13; pos 1648923 to 1649213)
tgattacaaaaatttcaaacaaatcacccgtgaaagtgagttctccttctgtacaattctaattattattactattatattaatgatttactttataattcttgaagcattgtgttaataatgtttgatacttttcgaagaaacgcagtgattcagcataatattttttaaaaaaatttgtgtaattaattgaaattaaaatgttaggaaatgacgtggtggttactgttacatggacaattcaactgatttgtgttttctctgtttgaattttgaatttagggttgttgt

SEQ ID NO: 88563 - DNA, 782 bp, Citrus clementina
  Intron number 1 from transcript clementine0.9_001415m (loc us clementine0.9_001415m.g) derived from phytozome v7.0 (c hr-ID scaffold_12; pos 3155662 to 3156443 reverse strand)
gagctcttgtcttgttctacccgtcctttgttaacgtaagttcttacgttactctttttattttttattaatatacagcgtagcaagcgtttaatatttaatatataattccaattttcttttgtttatttgttatataattaattacaaactatatacatacagtataatgattcaacgtcttgttaaacccggataggtatcagaattcttttatttgattactaagctggcagttgcttctttttttgggtttgtattcttctgcttgtgccatgaacaaatgttttaaacaacttgtttggtgtaatttgtttctgtaatacggatttttcttttaatgaaaaagatagactcattgtaaattctattcttatgaattttccagaactggtcctgaattcctttgcttttgagtcactggttagcgatttagcaccagcttgctttttcttccttttcgtccaatttggtgctttactttgccttcgcagttagttgcggacaattgagagatacgatatgtctgccatcatcattatcagaatatcaccatctgtgcccttgatcatgacatacatataatatattttatacaatagtcaatgggtggatttgggcttgtagatgttaaatcatcattgactatgggcctcgggctatatatgcttgctaccccctgaatattgaacttgtaatttgccattgacatcaataacgtgtggttagttgcatctttacgttctcttcacaggaggagacaattcgtgagaccattgagg

SEQ ID NO: 88564 - DNA, 783 bp, Citrus clementina
  Intron number 1 from transcript clementine0.9_011773m (loc us clementine0.9_011773m.g) derived from phytozome v7.0 (c hr-ID scaffold_8; pos 2761900 to 2762682 reverse strand)
tgactgacacggtatcaattccttctgtgtgtgtttgtgggtttttttttttttcaatttttgtttgcattttgggagctgggtttctttattgcattattttgaagtttattagttgttatgtcgaatttggtttgtgtgtgtgtgtgtgtgtgtctctctctctctctttctctttttgtttggggtaatgtgatagcttgatgagattttgtagattgtgaaaattcgacacagcttgattgaatttggcgtcttcattgatgctttatatctagcttgtaaataatttttgggtctgataatgccaatgcgacttattagaaaatctttaagtctgatttaggaaagggcattggtggtggatgccagctagttctgttggtaaaatatcttgtgtggaaacaagaggtctggggctttaaccccactcagatgggagggaacggaatttggttgcgattaagttatatcagaaaaagtttgaatttgccatgaataggtatgttatgcctttttcctgcctaatggatttagccaagtttgaacttcctcataattgctttatgcgactgaaaggaatcagaccaagaatacgttgttaaatgattctttctgatgcagtttgtcttgtcttgtatatttgtataaacgtataattatatgttggcatgttgctatgaggctgggaggacattctttcaaatgtatggaaaataagctttataaggttgatttgctagtttggtttacctttgttcatattttgtgttaacaatagga

SEQ ID NO: 88565 - DNA, 661 bp, Citrus clementina
  Intron number 1 from transcript clementine0.9_020436m (loc us clementine0.9_017268m.g) derived from phytozome v7.0 (c hr-ID scaffold_69; pos 1249117 to 1249777)
atccaggtacacatttgccctttcgctttattttttatgttaattcacaggaattgtcggggttatcaaatatcaattgtttttgtgcgtcaaatgaattgtattatatcgtttaatgtttgattttcgacttataatgttgatgatgaagaaggagagagcaagcgaacttactcatcttttagccaaatttttattgaattatgttaattctatgatcatcatgtgaagacttttattgatggatatcaatttagtggagttgtctggttaaagtttagcaattggtggtttggctttttttttttttttttaacacaaatagttggcattgagctcgaaatgaggttaaattaaaaatatttatttctggctctgtttgtttattgtaaggtcaagtttggtttcagttttcaactttaagattttgtcgcatgtacaaatcagatgaaaccaaaccagccttgagcaccctatgttgaagattaaatggatgagaagtcagatttgcataagaatggctatttatgtaatagtttcagatttcttcacagctattgctttacataactaaaatggctgggcttgttcggtagatattgttttttattttatatctctttctttttctcaccattctaattggtattttgcagagaac

SEQ ID NO: 88566 - DNA, 858 bp, Citrus clementina
  Intron number 1 from transcript clementine0.9_029206m (loc us clementine0.9_029206m.g) derived from phytozome v7.0 (c hr-ID scaffold_60; pos 326958 to 327815 reverse strand)
gtcataaccctatcctcatcgacgagggcaaaaaggtaggaacatttgcatacgttataatcacttaattccttttattttcttctttgttcataacccataattgattttgatttggttttaatgtacggttttttttaatcattaatccgaatgactgaatccattaaaattttcagtttttttgttgaagatgctttttatttgaaactgatttcttttaaaacacctcaaaatacacttctaattatctagttttggtaaagatcttctagcatttgttgacttgtttcggtagaattttactgtatttgttagaattcattcggggagcttgatgtctgttttggtgctgcatgttctttgttgcaagtgcttgtgacaccaccaaaagcatgtcttttaattaaatgaaatcagttgtcttgggcccgcgggggaataaaaaaagcgcttttagagaaagcacttgttatgtgtctctagatggtgttttatcttgtggagaaaaatttaataacatgttgaaatcaacaataatatcttttgggagtgaaaaagcagttggtagtgtgaaagggaacttgatttgcctttttcttgagaaacatttgataactgataattgctcttataaaatgtgcttttgcacttccacaaatatttttaattcaaaagtgatctgtccaaaactcatctaaacacttttgaagttgaagtgcttttttgggaaaattttaccgtcattttcatgcggttttgtcttcttctttccttaccttgttaatataagcaacggtgcatatctaattgtgacattcagcagagcttttcgttggacaagcagagtgggaagaa

SEQ ID NO: 88567 - DNA, 702 bp, Citrus clementina
  Intron number 3 from transcript clementine0.9_023940m (loc us clementine0.9_023940m.g) derived from phytozome v7.0 (c hr-ID scaffold_91; pos 541218 to 541919 reverse strand)
aaggtactctaattattttgtacattgatgaatagcttaacagcttggaattgaactttttctttagaagctctgattttcaaagttccattaaagccaaagaacttgatcgtgaggatgatatagacaattgcctgtaaggttgtttcctatatgtaaaagatcttactgatgtagataaattgtcagttatcattacatttcgagaaaaaatgaacatcgcaagtcagtttagacctttgtctatgcttgtggaatgggcgtgtttcttctatggattgggttttactttgtagattgttggtcgtttataaattttctgtggggttccattgcttgattaggagctcagttatgtggtagatgagtaagaggccctgtggctgttggcatcagaacatgtcgagaaagatatgttaaattgagggaaaaaaaagtttctttatggattatattcagctaaatatttcagttgacttctcgatgaatgtcaacctctttatacttttgattcacttttcagtatatgaaacaatcaaaattatgcgggaaaaagtattatgcttgtgggttttgtggtcgcttgtttatatttggttaatgcttaccatccttttacatggtgcttcgtacttgagagcctatctacatgtacagttcttaaaactgatggacaaaacgcttgtttatctgtatacagga

SEQ ID NO: 88568 - DNA, 946 bp, Citrus clementina; identical to SEQ ID NO: 88207
  Intron number 1 from transcript clementine0.9_021346m (loc us clementine0.9_021346m.g) derived from phytozome v7.0 (c hr-ID scaffold_12; pos 4372144 to 4373089 reverse strand)

SEQ ID NO: 88569 - DNA, 535 bp, Citrus clementina
  Intron number 2 from transcript clementine0.9_006901m (loc us clementine0.9_006901m.g) derived from phytozome v7.0 (c hr-ID scaffold_8; pos 2849612 to 2850146 reverse strand)
tgcattttttgaggctgtggagaagctcaaatcaggtgtgtgcaaatgaagaaatatttttatttcaagtatttgatgtacaattaagtttgtcttcttgctgttagttttcagggaaaagaaaaacagccgagaactcttcttttgcttggcaaattgatcatttccctactagtcatgttttaaaacttatggcctatcaacaatactcaaaagttctgtaaagggtaaacagttgtttcaatcttatattattagtcgacgcaaaaccctatgacataaaagaaaaaaaaaaaaaaattccgtaacctatcaactttttgccctttatttaattaaaaagaccaaagtaccctccaaaaaatgtatcacgctatttgtcattgtaatatcaggggggttcttctgaagtttccaacgtaattaattttgccaaataggaggaggcttttggttaatctctcttagttgcccttaaactaattgtgtttttcattgttgatgggtacatgcagtgcttatagtgttggggttc

SEQ ID NO: 88570 - DNA, 803 bp, Citrus clementina
  Intron number 2 from transcript clementine0.9_030964m (loc us clementine0.9_030964m.g) derived from phytozome v7.0 (c hr-ID scaffold_64; pos 1097587 to 1098389 reverse strand)
tgagtacctttcacttagcagcaatcgcttgcaaggtagaatttcaagtgtacttctagaaaacctgagttctatccaaagccttgatctctcattcaacgaacttgaatggaaaattccaaggtcattttcaagattctgtaacttgaggtctattagcttgtcaggcatccaattgagtcatcaaaaggtatctcaagtcttagctattttctcaggatgtgtatcagatgtactggagtcattggatctgagtaatacaactctttctggcagtttgacaaatcaaattgggaaatttaaagttttaaacagtgttgatttaagtgagaactccatttctggtcaagttccatggtctttaggaaaactttcttccttgagatatctagatatttccaataaccaattgaacggaacagtttctgaaattcacttcgcaaatctttcgagtctaacttttttttatgcatctcgaaactcattaactttgaaagcaaaccccaattgggttcctgtttttcaacttgaggagttagatttgagatcttgttatctaggacctccatttccatcatggcttcattcacaaaatcatttggttaatttagatatctctgactcagggattgtagacaccattcctaataggttttggaaatcgatcacccaattcaattatttgagtctctcaaataatcaaatccatggggagatcccaaatttgactgaggtttctcaacttggaacccttgacttgagtgctaataatttatccggtcagttgcctcttctagcctcaa

SEQ ID NO: 88571 - DNA, 453 bp, Citrus clementina; identical to SEQ ID NO: 81438
  Intron number 1 from transcript clementine0.9_001271m (loc us clementine0.9_001271m.g) derived from phytozome v7.0 (c hr-ID scaffold_12; pos 4971419 to 4971871)

SEQ ID NO: 88572 - DNA, 983 bp, Citrus clementina
  Intron number 3 from transcript clementine0.9_001271m (loc us clementine0.9_001271m.g) derived from phytozome v7.0 (c hr-ID scaffold_12; pos 4972543 to 4973525)
tccatcttttggtagttcatcatcttcattcggtggtgagtatgcctatgaagtagcattatatatatgtatataagttttctttctcctccactctttacctgacttgttgttacttttgattttaacttctgagatagatggttatggttctaggtcaatatgtgctttggggcattaaatgtggttagtgtcctaatgttattctggcaataatacatggcttatgaatataatttactgcctggtatccatatgtgagaaatttagcttaggtggatgctggcttaatggcttttgagtttttgcttatgatgaccgaggttcttcttgtatgtctggctcacatagtttctctttggtttttgatgctttcacgtgtcttttattttgtttctatcaaccagacaaatttttttcgatgatggtaattggaacgagtaatgttgttcttgggttttttttttttttctcatcctactatataatgtagcttcattttattggaatgagtaatgttgttctttcttttttttctcccttttctcttcctactagatataacttcatttagatgatagagaaacacaatatgttaaccagagttaacctgtttgatagatgttattgtatttgctttatcatccttccatagtattttatttagtttatcttttttcctttttattttttattttctcttgcactggtgtgccgtgatcctatttcacttaagggtcagaatgtgttgataagccccttaaatttaaggggaatttttttcctaaagaaaataaactaaatttgaggagtaattttcatctttaactgtatgtgtgcattatatcctaaaattatttaacatattttattattcttttttccagttcccttttcatgagaacttacattaaatcttgctctctaaccatatgcatatatctctagggtcttctatctttggccagaagcctgcttttgga

SEQ ID NO: 88573 - DNA, 771 bp, Citrus clementina
  Intron number 1 from transcript clementine0.9_005865m (loc us clementine0.9_005646m.g) derived from phytozome v7.0 (c hr-ID scaffold_21; pos 3832339 to 3833109)
agcagaagaacaagtcttaaattttttaacttttggtcagctctgcttcattcaaatacattttgtatttctgggtttgttttaaaaagttctgtttttgtaatctatctgtctggtttattttttaaaaaagaataaacttttctctctttttttttttactctctttattttctttccttgataaaaattctgatttgatgtcttcagctgccctatatatacatatatattcttgaaatttagttggtcactactagcaatggtgtcacgaggttcatatggctgcttttttttgtttaattttgaaaaattctgctggaattgttaatcatttttctttccttcttttgggagaagagttttgaagattgttgcttttcatttacttcaaaaaaatttctttcccaaataaataatgaaggtttaatgattgtaagttatgaacaaaatctagtcttttactacttaaggcataatttaaggagagcttttctaaattgataattaagttgtttccacttatggtataggcatttattttattttattttattttattaattgactatcatatgcttttgttctcttttttcagttagtcaactaacacatgaaataattaaataatttatgtgaaattagtggctgtaaacattctcggactctgttcagtctaaacacagagaattaaattatgatttttaaattcaattaatatattgatctgttctgtcttgctgtatgcagcaaatatttgtctactcagcc

SEQ ID NO: 88574 - DNA, 798 bp, Citrus clementina
  Intron number 2 from transcript clementine0.9_022212m (loc us clementine0.9_022212m.g) derived from phytozome v7.0 (c hr-ID scaffold_115; pos 201611 to 202408)
cctctggtacgcgatgcttagctgctgccgtgcttttattctgttgcctctatataattgtgttgtgtttgctaaaattcttgtgagtcaaacaaagttgtttcgatggtcatttgagtttgccgcaagaaatactgtttagcactcttcatatgttccaaatggtattaaagtaagattggatgagatactagttatttgtgtcgaagaagatatatttcttaggacctactttgcaagggaagttgcactaggctccaattagtattgtgatatggtggcttctaagctctaagtctaaccagcaagtgaaagtcgatggatttttggttaataattaatttcaattgagaaagttagttttgaccaattagtaatgcttatacagattttttatcgaacatctgtaagggaatatcacattagcttctaagctacagttgttaagtgttaaccaaacactcttaaaaacttggccttggaagcacggtactagacagcaataccaaaacgtagcccttgcttgctgatgctctgcagcttcagtttctcatgtgtagctttgtggcattttgatcccactttgggcattgttgggtaccacaagtgatcttaagctttctacctgttgctaggcggtgtttttgaaatgcttgaaatgcttggcttgagacattggtactctttaattttccatttgggttataatgtggtgttatttttgggatgtgatttagtttctgtcctatctgataagtcactgatctgtaagttgatttatctcacagctctacatcc

SEQ ID NO: 88575 - DNA, 817 bp, Citrus clementina
  Intron number 1 from transcript clementine0.9_000253m (loc us clementine0.9_000233m.g) derived from phytozome v7.0 (c hr-ID scaffold_12; pos 2314921 to 2315737 reverse strand)
aaggtaaaatttgggtaatgcttatggtttttggtaattatgagccaatttgaaattttctaatttctatttgataacgtggtatcaaagtttaagccttttctgggattgcattttatgcatctgaagttgaagtttattgcactgtttcactgtcctactatctactacttttaagcttggtgcttattgtaaaagtaacttcttcatttaacatttttgcatcagattgctatctgtttcttttctgttgtataatattctgcttgaaattttcatatcttctctatgaatatgtttggagttcttttttaatagagaaatataaccatgttgaaacaattcatggtggttttatggttggagtgttacttacgggcaagatggctgtgtccatgtccaatttcttgggcaaactgcttgatgaaaagtaagtttccgggagattattgggatgtttgtagtctggctaaattggtaaaattcgtttaaatttgcttcttgtcgggctgagaggaggagacacatccttggggtttagttttccaaaccattaaatgcatcagaaatctgagcatagatttgcatctatttggtcacttaaggaaataaaacttatggtatgcatcagaaatatgggcataataagacatacccttgggtttagtacttttctttttccgctatcatttaatgctattattctttttgaatgtttctgtttaatatatcttttgagtgctgggttttaatccttttgtttagtcaactcactcttttgtctcaccaaaccagtttgcctgtttttctccacagg

SEQ ID NO: 88576 - DNA, 430 bp, Citrus clementina; identical to SEQ ID NO: 81533
  Intron number 2 from transcript clementine0.9_019214m (loc us clementine0.9_019214m.g) derived from phytozome v7.0 (c hr-ID scaffold_12; pos 3483543 to 3483972)

SEQ ID NO: 88577 - DNA, 658 bp, Citrus clementina
  Intron number 2 from transcript clementine0.9_009126m (loc us clementine0.9_009126m.g) derived from phytozome v7.0 (c hr-ID scaffold_16; pos 3023491 to 3024148 reverse strand)
acaaaactggatccctagctgtttttagaattgaggtatctcctttttatttattattttttttttttgcgaaatttctctctttaattttttgcttgttacttttaacttttctctcctttttgacaatatatagaattttaatattttaagaatggcattattgagatttgtttggaagaaaagattatggctctgtgaagttataaccaatttaacttttctaacttttttgggaggttataacctacatttaaaataatattattattatagttcaatggaggttctaaaaagactctagatgtgatgaataatcatatttttttatatttaatacaacgttttaattgctttgtgaatagttttataatttttatttttataattcatggatattcatatttttttcgtccacacataaatataattacatactcaattctattcagtgtcggtagaataatttgtaatcaaaattttttcatgcatatgctattgaaaattggaaaataaacaagataaatatgtggactcctttcttctatcttcttccaaaataaataaataaaaaatataaatgaaaaaaaaattggcggcatttgcatggagatttgccccgcgggatttaaggtgatcatgtgtttgcaggactaca

SEQ ID NO: 88578 - DNA, 962 bp, Citrus clementina
  Intron number 3 from transcript clementine0.9_024443m (loc us clementine0.9_024443m.g) derived from phytozome v7.0 (c hr-ID scaffold_16; pos 4198602 to 4199563 reverse strand)
acttccttggtgaagccacgtaagtccatgttactatcagtcttaaaatcactatatattttttttttttggaacaaaaaatgaataaataagtccaaagttttgagcttgggtatgttcttttctttctttgtacataatttcactacccaaagagaatgttcaacttacagtcactgcaaaatttcatttgtgttaatctacttgctttattcacctcctggatatataacatggaggtttcctatatggtgttgatactgatatctgtcttgggttttgatgaaatggcatctttcccctgtggacatgtgcactaaatcccttttttcaacaaatatgtctgctaactaattccaataacaagaagaaccaactatttagctgagtaatgccaagcaaaaggtaaaatatagctgaacagaaactgatttgagaggatcacatagctctgtttgacctctagatgtttttgcgtgtcacaactgaaggcaaactctttgtgttggattacatagttatccatctatcatttggtcctttaggattacctaaatttgctttacatatgtcaacttaatagtttatccaaaaatcattctaaatccttcccgaagatgagatagataactaagtatcacgccacttgaatgatctatacactactcattggtgaggataactacttttaactaaactattggtaaggttcatcagacctcaccaatgtgtctttgtcaatatatttgaagtaaaattgattttcgtgaaaccacactaataaaagccaccataatgttcaatgaaaggcttcttcacagtcctatttatgagacttcctgtcacaaaaacaatcatagtacttatattgttgagaatatatacattgccaaacaatccaatatctctcttatgatgtgactaaatagtagtggtacattgattttccgcttctagaatct

SEQ ID NO: 88579 - DNA, 648 bp, Citrus clementina
  Intron number 3 from transcript clementine0.9_023916m (loc us clementine0.9_021119m.g) derived from phytozome v7.0 (c hr-ID scaffold_12; pos 3122378 to 3123025 reverse strand)
ctcgctttaaggctgagtttcccatatttgataaggtactcgctctgcaactttacaaattttataaacagaaaatacactctcatggttttgcctctgcatgtagcattcctactctagcttctcacacacagcgagctatatgcttctggataagatatagaatagctggagttggtcaccatttctttatttgattacatattttatataaatcattcatttgatatgcagtaaatcatctagatatgatgctccattaaagtacctcgatttgatcatttcttaaaattattaatgcctgaagcatttcactgattgctttgggaattaggatgaaacgagaggaatctggacttaaaacattctttttcttctagaatttaactttggctgccccaggaacttgagtgtctcttttattaatatattctgatgataatattgctcttaggtttgtttacattattgtgtgaacttttgggtgaaccttgatgagtccattaccttgatgtgagaagtcacttgttaggagtgcctttgagatattgctggaagaaccaaatgtttatatgtatttcatgagtttctaatcatatttggagatatttggcaacaaacttaatattgtttttttgatacaggttg

SEQ ID NO: 88580 - DNA, 950 bp, Citrus clementina
  Intron number 1 from transcript clementine0.9_026185m (loc us clementine0.9_026185m.g) derived from phytozome v7.0 (c hr-ID scaffold_11; pos 3158250 to 3159199)
cagtgtgctgctgtagattatttagcttttcctgggtaatgcacattattgtagttatttgatgcattggtatgctacaagcttacctttctgccacaaagagtgaggatttcatgttgatggattcaaatttactgagaggttttgaaaggttttcagttggggtttagtatcttatctgaggatctaaccactgtgagaatagaaagcaaagcttcattgtaagcagttgaatttgttttagttgtaaggtcgttatttgcttcattttgaatttttggttaacaaaatctcgttgaacacccacactagacataaggagaaaacaattgattattcttccctttaatttcatgttatagttttgttttccgttgaaatgtttattgtttaatacaatgcaaaatctgttcaaagtgtggttaaaaggctgggttagttgttatagctgctgctataagatccttgtgggctccatttaccagaataagaaaccagttaggttatgttagtaagtagtgacatcccctgttatcagcttgcaaggctgatgaataagcctagaaaagcattcgatttctccctttattgttatttaaatcaactgaggttgagtgctattgaatatctgtaagggagagactccattgtaacaggatcttagcaaagttctattgctgcttttcacccatgcatgttgccatttaggcaattgaatggatcacaatatacactggtgccattttcttcattgttttctcttttttttttttttggttcttaatcaaatcttgtgttgagaattgggtattcttgagaaaattaattctgtctttatatattggttcgatttcaatcattgttagtgattgaatcaatttcaaagactgaaatttactacatgtgtcatcagattcaaattgatatagttgtgttataattgcagtcag

SEQ ID NO: 88581 - DNA, 734 bp, Citrus clementina
  Intron number 1 from transcript clementine0.9_030336m (loc us clementine0.9_030336m.g) derived from phytozome v7.0 (c hr-ID scaffold_11; pos 4307457 to 4308190 reverse strand)
tggtctgtaagcttcaaagagtgaagaatggttctagcaactcttttgacactatctaaggtataatgccccattattgcttttgctttatctgttttaccttacagcattttggaatttatgagaagcccaaaattattgagtcagaattgaggatctgaacttctgtaaagatatttatatttttaaatcataaagtattgcatctgatgcttaaggtggaacttagttcactgtagaaaggaaaattatgtagggcaaaactagatgcttttcaagagaaaatttcattgatatttttctgaggatttttgcttggccatctaatttcaagctgcttgaattttttctttatatcatcttggttgtataactataactcgttgaatttgctagcacttttgctggttgtttattttatatgagactatggtggtaaagtttgaaagctctaaaagtaatggaacctaggaagagtatgatatagaatactgtatcattcttcaggcatccaaagatgatgtattcaaaatagctagttttgacttttgaggtagtataaataactattatctcatatggttgcatcatgataggtaggcattagtttaatcactccaattcccctgaagttgttacctgatttattatgacaatgtgcatcacggtaagtatccttgcatattaagattttccttccggctctttgcaggtactttttgatcttttccggc

SEQ ID NO: 88582 - DNA, 809 bp, Citrus clementina
  Intron number 1 from transcript clementine0.9_014863m (loc us clementine0.9_014863m.g) derived from phytozome v7.0 (c hr-ID scaffold_64; pos 777486 to 778294)
tgcccttctcctccttttgccaactctatctataggtatttcttttacttttttttttctcctcatttattaagctaagattattctgtagcttctgcagctgctgctgctgctttattttattttatttttaaataaaaattttttagcaatttttgatgaattgggttttgattgaatttgcgttccaaacttttctttcgtgccagtggctatgagggcactttgagaacatgattatgaaaataataagataaagttggttaagagttgttctttgagttttttagtgcatttgggtgtcgatgttcactgaatgtgcaaaatgtagaaggacctgttcggtcttatgggcttaattctgaaattcatgctttttttagatgcttctcatcacatcaagggaagcacttattgatattattatctatttttacaatcatgagatgattttcagtcccttaggttgcaattagttgagcacaatgaactttagaggatacccttttagatggatttaaattgtttaccagactcaaaaggttgaaccctttttctgagcattggtcatcagtatctaaatattcacttttgagatcgaataactcaagactgatgtttggctgtcgtaatgtagctctgaaagaccaaagtgaaactatcagaatttattttccatcaagtttggctatttagcatttcgttgtccatggaagatgtacaattttgtaatctcctacacggaatttctactaaattattttgttgttccgcctgtctaggggaaatccaaggaaaaaggtgtataa

SEQ ID NO: 88583 - DNA, 814 bp, Citrus clementina
  Intron number 1 from transcript clementine0.9_012459m (loc us clementine0.9_012459m.g) derived from phytozome v7.0 (c hr-ID scaffold_35; pos 1579443 to 1580256 reverse strand)
aagtccacaaatattgtgagtatattttctttgctatttggtattaagttctgttttgatataattcaacttgtagaatgactttgagataatcacacgtttgagaaaatattcaaacgctgtctcatgtcttcctttgcactgcgaaatttgattgtcaactctttagcgaatattcattatatgattctgtagtgatggcaatatttgaacctctttaaatttgggtattggagctgtaattcagcttcagggtattttcaatattacacattaaattcattagagttggggtttcacagactttagcattgatttcgggcctcgagctttgatttttcttttttttttggggttgatagtcatcatctgctctgtacttgtaacgttggctaaataattataaaaatactccttgtacaatgctgggatgttatttcttctagcttcgcgtttacttttatggctttgggctaattcaacactctatgctgctgttaactcaatattatggtcgaaaacatgtagaaattacaagccgttacactcatggctcattgatcatacataaacatatgaaattccctgttctctcatcaatgaaactatatgcagaacttctatttggttttttagtccaaaagtagcagatggcctgtgtagctgatgaattctgattacatggatgcatcttctgggcaaagtttatgtcattaatgtatttgcttcaagtcataaagggaaagtgttgtttatatctttttgacatatttttgcaggtatctctgtttgaagatccacacaatagaagatc

SEQ ID NO: 88584 - DNA, 654 bp, Citrus clementina
  Intron number 1 from transcript clementine0.9_011839m (loc us clementine0.9_011136m.g) derived from phytozome v7.0 (c hr-ID scaffold_92; pos 285498 to 286151 reverse strand)
gaattccaggttcttccctgtgcatatttggctattttctttacctttctgtgccttttatttttattttatgggtgattccaggttcttccgtgtatagttggctatttcctttacctttctgtaccttttatttttattttatgattttctttttggggtgttgtgggtgggtggggaatgcttgagaaacggtggtttattcttacatttcatcacttatgctctaattgacatattctatctcataattgcaaatagtcacttcaagagaaaaacataaatattttctgatagtagtattgtttacacttaggttaatgatatagtcattaaagctccatatttttcaagattcatagttgttgcatgtacttccttttccttttgttgctccattatgtataatctaaatcatttccaacataaaatgagatgtgattcacccaattgctgacattatatagttcatttttgttaacgagaagtggacctcataatatgcaaccaaagactggtggggtgacagtcagagaatttcttatgacatgatttttatattttgtgttcagtttgtcagctttgatcatgacacctagttctgtctactgttgcacaggaagctaattgtgtcaaacaagcggctcctgccaa

SEQ ID NO: 88585 - DNA, 564 bp, Citrus clementina
  Intron number 3 from transcript clementine0.9_021014m (loc us clementine0.9_021014m.g) derived from phytozome v7.0 (c hr-ID scaffold_213; pos 36928 to 37491 reverse strand)
ctgttgctgcaggagtgaaattgaaagaccttcaggtttgcagcgtttgagtcgttgggtggtaaagtgtatacgtgtttagtcctagagaaaatggtgcaattatgtaataattatggttatggttttcacaattgattaatatctaaattgctctgagctttgaagatagcttgctcattttggggatatgattgtttgctagtgcattagtatttttggattaaaatgaaattttatactagctactcctctgtaagatgctagacgtagtaatattgtaccattggtggagaactgtatgggagaaattggagggagaaaatagagaaagaaagaggaggaaattgaattgaaagatcagacagtccaactttgtgaatgtaatatttcctcttttaatactataattgggttgctatagtctcaatttttttttcccctaccactttataattgcaccttctttctactcattttatgcatccgattgcttcttttaattttttagtttatgcttcagttttgggtagctgaaaaaaaaaagttatattttgttcagga

SEQ ID NO: 88586 - DNA, 864 bp, Citrus clementina
  Intron number 1 from transcript clementine0.9_004561m (loc us clementine0.9_004561m.g) derived from phytozome v7.0 (c hr-ID scaffold_25; pos 155228 to 156091)
tcaattacaacgccgcccacgaaggtttgttctttttcctttactgaatttgagatttttccccccctagaataatgcaatgtctgatttttgtttttgcaactataagtgaccgtgcattttcaactttacttatatgcattatatataatatgcatttctaatggttaatgtgtgtgtgtgtgtgtgtgtgtgtacacatatatatatgaacagaatctcaatgttcaaatgctttgatttaattgtaaacgatttgttttataattggtcgagcaatgtggggccattaaaccaaacgttagccaccccaccctctctgttgatgagtgctgttaactgcatattcagttggcctgaaagtcaaattcattttacctttaaactatgtaggtaacaactaaacctagtaattaagcaattacagcaaattgtgtgcaatttgaactatacaaatggaaatgggaagagagaacttataatctacttggtgtgaaagtaatttgattattgattttgatagggcaggcactctctttgctattgatagatcttacctaaaaatttgacctgtctgtttcttgagtgattcaagcctaatccaagctgttttagtgttaatatctcagtacatagtgctaaatgtgtaatactgccgtacgttattacaaacatggccagaaatagatggaaataacttttgacggtcactgatgatgtgactctctttgctgcttttcagcttgcaggaaacaactgattggtgttgcaacaacttgctcttttatgtgctactaatcttctcatattttctgttaataaattttttatttttcttgttgaaaacagcaacacgggcgttgg

SEQ ID NO: 88587 - DNA, 758 bp, Citrus clementina
  Intron number 2 from transcript clementine0.9_020086m (loc us clementine0.9_020128m.g) derived from phytozome v7.0 (c hr-ID scaffold_8; pos 2802829 to 2803586 reverse strand)
ggaggttagttcttatgcctaatatttgtattgatttttcaatgcggtttgttttgtgaatgtaagagttggatttgcattgtaaatttgtgtttttttttttgttttttgttttatatttttaatgattttgcttcaagtgttctaaatttaactttcctcttgaaaccatgggcattctaactttgtgttttatgataatttcatgtctaatagtttcacctgttttatttttaatgcaaatggctacaatggtgaatctcttccttttaggaaaactggtatgtattaggttgatggtgcagttaacagtctattgtctctatgattccattcttggggtgagaatttcaaaggcatccatcaccaattagaaacatacggagtagcccagtttggggcttaaaagtttacgtttagtggttatcaatgttgttccttccataaatgtatcttgttttatctatcacaaatgaagtatagtctggaattagaaagggtgcttagtgataaaaaagctaaggaattaacagactgatatgtaggtgtggaatgttgtagagaccaaatgattgatctttagttctccatagtttgcttcagcttcctccgcattgttgtttagttaaataaattataaattgcctggaatttggaatgtttagtatccttttctaccatatgttgttttatattgacattttttagtatgaaggctgacttgttgctttaaaaataatgtaaaaattcaggttcct

SEQ ID NO: 88588 - DNA, 820 bp, Citrus clementina
  Intron number 1 from transcript clementine0.9_004203m (loc us clementine0.9_004203m.g) derived from phytozome v7.0 (c hr-ID scaffold_12; pos 3873260 to 3874079)
tcttggctgatccttctccaagctcccctgaacaggtaatgttttgcttcgatgagttggttgatttgagtttttgtttctattttttttttttatttcatttcatgctcccgctgattgctgcgttaattgaattctgctgattatgttgggtttagattaggcgtggattagtgtttgtgggtcccttttacttctgttttgcttattgattctgatttgtgtgattacttgtggtgatcatgaatatttgctttcgtctttctgctgtttagaaatgccatatctagcaggctgattccaagttaattcttttgtaaatagagaactttaacaataagaaggcttgccactcatttgcaaggttctagattatacttaaacatgaagaaattttatttgatattaatccatttttttgtttgcttaaaattgttagattttctgtcaaaaaaaaaaaaaagaattgttagattttcttgtggttcctgtagttactgaggttttaggacaaattcttttggctattctatgttgtgcatcatgctccttgagataattcgctgaataaagatctcactcttgataaattggtgggttctttccgctattggggtttgtagaagtgttcttgatgctaatgctatgtattgaatgctgagatttccatgccaattgctactgctttaacccaatgcaggttatagactctgcatgtgatgtctcggaccatcctctgaagaatggaattatgccattaatctttctgttgtttcttataccagccggagagtgcaagcagtctaaggaggcatattgc

SEQ ID NO: 88589 - DNA, 533 bp, Citrus clementina
  Intron number 1 from transcript clementine0.9_026076m (loc us clementine0.9_025723m.g) derived from phytozome v7.0 (c hr-ID scaffold_64; pos 1212731 to 1213263 reverse strand)
gaaaaactcttactttgctatagttatcgagactggtaatttttgtttttttttttttgggttttcttttttgacttttttgatttagcttctttttgcgttaagctttctttctgcagatccagggtagtaacttcgttagagagttgctcagttttgatcttattgaagttctttgctaatgtgtgtggttgtgaaggttaaaattttttttcctgtggaaaattgttgcttgatttgacaattcaatagttggatgagaaacaagctaatgactgcttagcaacttagcatcaagactatgttttcaaccacataaactgaaaagagatccttcataatctatggatttgagaaaagttatgattaaggtcaagcatgcacattggagtagatttaagtgatttataagtaaatgagtgaaattgtgaacattagaggtcggaaaatttgatatagtgactaattttttttggttgtctttctttcttttgatgcaataatgcaagagtttcgatttggtcctgagtttt

SEQ ID NO: 88590 - DNA, 622 bp, Citrus clementina
  Intron number 1 from transcript clementine0.9_008791m (loc us clementine0.9_008791m.g) derived from phytozome v7.0 (c hr-ID scaffold_16; pos 4023123 to 4023744)
tgaaatcatcgacgccggcgagctccctatcaaaggtactttgtctctgttttttttttttttttttttttgcggtaacaatttacaatatattcgtatcttttgatttttttttttttttttggtgcccttttgtggacttttgttttagtcctaaacagtgcacacaataattcaattaaaaataatacatacatatatataaatggtggacacattggaaatgcgtacgcctaagctcaaaaaatgggagaaaatacgtgaaaacagaggaaaacaagcaagtaacaactttagtttttattatattcaatttgatttctcacttgggattttacatcacaaaaccaactctacatacttcgtttcccccctgtaataatcctcctccgtagtgtccaaattcagtctgacttacataaccaaaaaataatgccacatttaataactaagtgaatttgttaaactgcagttgcttcccaaataaaactccacatttatcagtagtctcactttaacttactttcttgataaaatttacatttggatcctattaattttccaattcttcttatttctttctaagatcgaattcctttgattcaattttcatgtgaaggaa

SEQ ID NO: 88591 - DNA, 892 bp, Citrus clementina
  Intron number 1 from transcript clementine0.9_002573m (loc us clementine0.9_002573m.g) derived from phytozome v7.0 (c hr-ID scaffold_12; pos 1525787 to 1526678 reverse strand)
gttatcaaggtctgatctctttctttttcttttcttagttttgggttccttatgtcatttgatcgtaaagttgtaatttttacagctaattttagtgcaagtttgtttctttcttaaatttttttgctcaatcgttgttgaattggcagcgaaaattgaaaaacgtgtggaatttgggaattttatttgttttccagttttaggttttcgtacagttggattgaaatgggtgttttggtttgatctattgtttgttatgatctctctattggtttggctgagtcagctgagttaaagttcatttctgatccggctagaaacattttcttctggttgttctaaagctttaaaattattcaatttctcatgcaattgaggtaatttctataaataatagtctgggaaacaaaaataactaattttttttcacgattttttattttgtaattttttataatgcctaatgggatttcctgatacatgtttgatttcaaccaatatttagccagtgcatattaaattttccccaaagggtccatgaaagttagtttgtggaatgacatgtatttacgatgtttaaaggctgtatccttgagagctggactagtgaactctgggattgaaaagaaatagtgtatgctcttctgagaagaacctaattaatgcatattcatctttatttactgattttaatttaaatgaactgttttgatttatctctatttgaacattatgccttttggcaaagttttaaatttatggaatatcatgttggcgtttcaattattacgtgctagatatttattctatatgtttccctttacttttatggaaatatgtagctgaaaatttctggtgattaaacttgtgatgtactctctgcaggttaagt

SEQ ID NO: 88592 - DNA, 324 bp, Citrus clementina
  Intron number 1 from transcript clementine0.9_033242m (loc us clementine0.9_033242m.g) derived from phytozome v7.0 (c hr-ID scaffold_11; pos 2008627 to 2008950 reverse strand)
ttcttcttccttttcttcgttctcttaacggcaatgtttctgcttgaattttttttttgtttgttatgatttgctgtgaacgaagtcgttttggtttgcaaatggcagtcttcttcttcctctttatttaacccagctgaaacaagtaattaattaagcttcttctctctttttttctttttttctttttaaaaattttatttgtttaggggtgggtaaattttaattattagatctaaaaaaactttttttttaggtgggggtgttttgaatttgtgtattgtgcaagtggtcgttgatagttagaagattatcaagaagcat

SEQ ID NO: 88593 - DNA, 725 bp, Citrus clementina
  Intron number 1 from transcript clementine0.9_004494m (loc us clementine0.9_004332m.g) derived from phytozome v7.0 (c hr-ID scaffold_61; pos 1047082 to 1047806)
gtggggtctttgccaatcttgtagtatgtatgatcatttaatattatcattatttttttacactttgtttttcttatctttaaatgattgtgtcgttttcagtatttgatttgtctttagttgtatataactgtgtaagttcctaaatttgcttttagacatctggtggggatggataccgacttgtttaaagctatatatattttatttattcggggtttcaatttgtgtgattgttaatagcccggttggattttcttaattcgtaggtgtaatcagcttctgggttaacccaacttttgtttttctttctttgcattgctgaaactaataatggctgtggcatcttttaatttttggattagactttaccattgtgtgacaatgatagtgatatttttgattttttatgggtttgtttttatcttcagttttattgatttttcagtgatagtgttgctatgatgttttggatatgtgagagggatgtcccttgggtatttctttttgagcaagttgaggctgtgcgtgtatgtctgttcaatatgtccacacttttttctctgtcctttctatttggtaacttagtgtgaatcttccttgtgtttggcaccaaacttggccaccgttagatcttgttttttaatggtctctaatgcctcttatttaaacattaatgcccttaaatagtcagagttggattccagtgcctggttccatattcg

SEQ ID NO: 88594 - DNA, 686 bp, Citrus clementina; identical to SEQ ID NO: 88279
  Intron number 1 from transcript clementine0.9_022411m (loc us clementine0.9_018622m.g) derived from phytozome v7.0 (c hr-ID scaffold_13; pos 3435966 to 3436651)

SEQ ID NO: 88595 - DNA, 575 bp, Citrus clementina
  Intron number 2 from transcript clementine0.9_012804m (loc us clementine0.9_012804m.g) derived from phytozome v7.0 (c hr-ID scaffold_39; pos 583226 to 583800 reverse strand)
aagagctagatataaagccaatcccgagtaaacgggtgggttcggttatgttgatgagattctagttcttttcttttcttttagtgaagttgtgatatgtaaatacaaagttgatgtttgtggattacaaacaaattgagttaacttcatctatcaatgcatttcttcatgagaaatcatgtgaaacgtcatctcattgttacatttgctgaggatattaagcaaaatgttgaaagtttttctgtgaaaaagccttttaattttggaattttcatgtaatttcgagttcttcttggagacttttaggcatttttgtggttttgccattgaagtagtacttgaaagaagagaaaatcgactgaatacttgttgcttgccggtcaatccttaatgaagttcttatccatatgcgcaaaataatcaaatcaaactgctataaagaaattagcttgtagtttcatacatggcttcagtttctacctggaaaagctccattctgttatttactttgttatttctggttgcttcgtcatttttcagtgtctatcactacttctctggttggaggaacgcta

SEQ ID NO: 88596 - DNA, 754 bp, Citrus clementina
  Intron number 1 from transcript clementine0.9_022178m (loc us clementine0.9_022134m.g) derived from phytozome v7.0 (c hr-ID scaffold_121; pos 404963 to 405716)
aatcctgaatagtaagctcctctaattttttaatatctatttttttttttaagtagtatatgtagtattatattttgtattgttatgcgccgtcgttttagggtgttgattatgatctgagaatcctgtcctcttatgttgaattgttagttagtattgattgtcaatttaatgttcttagatccgttgatttctgttgagatgatgattctgttgaattaattacccgtacctctgtggatcaatgattccgttttgaacaagtttgttgtctacatctctgttgactcttttgagcttatttggaaattacgacgtccttttaattttattaactgttttgttattcagtgtctatttgggatcaattgattcgtcgtgttcaatcttaatgtatgagaatgttttgttttctaatcactatagcacttttaaaattaaatgattggtgaaagcgtcctctgtttgctgaggtgaggtggatgataaattgtgaggaatttgcagcgatgtggagctagatcaggtttaagaaatctccagtaataacatttctcggaacaacatgtaaagaattacatattttgcaatgataagcaactagttttgttttctcatctatcattttcttttcttcaaatttcctttaatgtttcagtctattccaatgaagcataagcctgacacaggaagttggattttctcttgtgcttttgcagtgactatctgtttaagcttctgcttattggagatt

SEQ ID NO: 88597 - DNA, 764 bp, Citrus clementina
  Intron number 1 from transcript clementine0.9_002570m (loc us clementine0.9_002559m.g) derived from phytozome v7.0 (c hr-ID scaffold_52; pos 89101 to 89864 reverse strand)
ctggaagttctctgccagtccaattcaattggcaggtacttacactttatctttttaaactactaaatgtctgaaattaaatggaattggtgacttttgagatttcagacctactgatagcaagttcttgtcatttgttaaagctgcaggtcacttttggtatttattttcacaactgttgagtttaaaaaacaggaaatgttttttgactaaaagccttggattagctgtttctagaaatagtttgtaagacaactaatcttgaacctgttttcaggaacaagtatttgttgttatcagaattacttttaaactgtgaaatattgaactctggcttttgccccttctatctaaatgtatatctactttaaaacaacaagaaatctgttctcttaactttattttcctaataatgcaaaacaaaagaactctggcaaaccgctatgagttactcgaggattattttcactgccaaaattcacgtctattgccttgctagtgtgagaattttgcgctaaaatttgtttccagattgttgaggagttttgaaaagactagggtagtaactttttcttcaatgtctgcatcactatggctacttatgttaaaactttaagcttatattcctttattaaatgacattgagatctaatttgttatttcaaatatcaacatatatatattctcagttagttgcttctaaattctaactttatatcttttacctagattccattggcagataattcctcacactttttaaa

SEQ ID NO: 88598 - DNA, 932 bp, Citrus clementina
  Intron number 5 from transcript clementine0.9_011715m (loc us clementine0.9_010087m.g) derived from phytozome v7.0 (c hr-ID scaffold_54; pos 595037 to 595968 reverse strand)
ccaagctggtatgataactacctagtttatatttttttggaaaattttccaacatctctcttgcttgatcacctttccatgaatgcattgtattcttatggtttttcttttatggtgatcaatgatataatttattttgttttttccacttattaatgaaggggcatgccaagataagctttctttgcttaaatgcatagggagattggcttagtggttgcattcgacaatgcattttgctaaaagccctttgctctgtttaagctctagataatagtttatttgtaattttgaaaaaagtttttccttttgggatagggaagaaagccaaaactcttttcctttactgtgaagtgtaattggactgcaaataacttaagatcatatgggtcatcctgaattcatctttaatattacttttagataatagttgtctttggtgaagggaagtacgctaaaaccttataaagatgtgttgttcagctcttttatggttatcaaggctagacaagtaattgtgtcttagttgaaatgaagaaaaagcataggtagcttttgggagggagtttgtgtctggtctgcttttgcctcttgtttctatgaactgttaggattcgtcttatttctttattgatctaaaatgtttaggggtttaaggattgtttgatatagatggatatctttcggattagaagaagagatgattaaacttgctttttcacatatcgggtttctagatatattttgttgagatttggttcccattttcttcattttccatggacatttgatccacaatgtgtctcttttctttttctgtttacctacgattttctctatttgttatcaaaactctatattttattcactccacataaagagagaatcccgacgcagggaattcctataagttcggttgaggttttggagat

SEQ ID NO: 88599 - DNA, 888 bp, Citrus clementina
  Intron number 1 from transcript clementine0.9_021749m (loc us clementine0.9_021749m.g) derived from phytozome v7.0 (c hr-ID scaffold_16; pos 3988607 to 3989494)
agcaatttttcttcccactccgcacgacaggaaaggtaagaaaaacttttacaatttttgatcgattatttattatttttacatgtttttcaaaagcttcggattatatctttagatcactgaattgaagaatattcattatttatgatcttaattattcacgtgtgctgacatctctcatcctgagtatttgatcgatttctgtaatctgttgttattgttcgtaataccttcattcgtatttgatacttgaagcgctgtcgttttaatgaaaagtttgccttatatagtcacctagatgtttcaaacacaacttcttttggctgagaaatgcttcaactgatccagattttaacttaataatgatttttgttttcgtatgtgaagcaacttgagctttgaattccttcttgttgcaaccattaatttacccgatcagcgctttgtttccatcaaaatcaagctgttcctatttcaattttggctttgtgtaattggcgttgattgacaattttcatgataagaggcttgatcattctgattgtaaatgcaactggaatttttttttattttggagtgaatgaaattcagtgtttaagctgttgataaggttgtagtaaattcacgaaatgataattccatggaattattcaatattgagaaacatggaattgtaatctttgttgaatttcagtccgatttcttattgtttgtatctaatacctgaattggcaggaagacttgctggcaaagctgacaagtaagctctcatggctaacgtactaagctctcatgtttcacgtactaagctctcatgtttgaacaataaaattaatatattctgttaaacaagattcttagaacggaagaagaagaaaaagaagaaga

SEQ ID NO: 88600 - DNA, 592 bp, Citrus clementina
  Intron number 5 from transcript clementine0.9_021749m (loc us clementine0.9_021749m.g) derived from phytozome v7.0 (c hr-ID scaffold_16; pos 3990667 to 3991258)
tccagaaggcaagaagtgctggaattaaaatagaggtatgaaccagtcatctgaatgtgctttcatgtgatccagacatctttatgcactttcatatgatctagacatctgaatgcactttcatgtgatccagtcatctgaatgcactatcatctgcaacataaaatgtttttcttttctgcaaaattggcggaaacaaaagatggtctccctagtgtttatttgtattttggtctgtttgagcgtcaaaatgtttgactggtaaaacaataacagtaatgataaatattccaaaattttatcccaaatttcatcccaagtgacgtggcatgtgacttttcattcattaagtggttgatgatttctcataaattgtaagtgaattattacattatctcaccaacgggtgaatgaataactcattatttgagatgcaattttggaatgcaatactcaaaaaataaaagctatgacgaacaaaaatcttaccttttctttattcatttgggatttaactatttattgggatgagcctatgaacctcctcctttctacagtgcggatcaatcagtggagtagaaatctctctcat

SEQ ID NO: 88601 - DNA, 963 bp, Citrus clementina
  Intron number 1 from transcript clementine0.9_027795m (loc us clementine0.9_027795m.g) derived from phytozome v7.0 (c hr-ID scaffold_16; pos 3940662 to 3941624)
agcagtcaggtctcagccaatttcacttgcaacaagtatgtactcaactcatcgtaagcttacaataataataacatttacatcatggttttaaaaataaataagcttctaaaaatatgtaggggtggaactagaaattagaatttgggttgcccgtccttagaaacattagaattaaggtactcagaacaatggaatttgaagtgtctctaaaatagactaaaacaatgtgtaaaacattattttttattttaaagatttgttttcttagcctgccaccaaaaagggaggggggggggggggggtttttttttttaaaaatgctgggtccagggcagcagccggggtcggaagggcccccaagaatcccggaaatttttttttttttttttaaaccaaaaaaaaaaatataaattggatctatacagaggtattgtagaatttctctataacttgaatctatataacagataaatctggactttagcctcggtttcttttgaaatataacattctaccccagtttatcgctttgttaagattatttcacaccctatctttatcactttgacacttcgccccccttgggttcccaataaatggagtagcataatatcataggataatcatgctcttaataacaataataatgcttgatacgtacccaataattatcaaaaagaatttatcacaatcatgtattcatgtgtcatgtgacgtagcatttttgagaatggtaattaattttgtataatttttaatttacttattcttcatatgatgaaaaccatatcatttgagatgcattttttttggatatgttcagtgataccacaatagagatatacaaaaccttctcaggaaaatcacatgtgtgtccgagaaaaccttcagtctaataattcccgcgttcatgtcatgcttaatgcagcaaaattgtaggagcaagatactacaaaagtg

SEQ ID NO: 88602 - DNA, 605 bp, Citrus clementina
  Intron number 1 from transcript clementine0.9_000325m (loc us clementine0.9_000325m.g) derived from phytozome v7.0 (c hr-ID scaffold_39; pos 1671034 to 1671638)
gagttactgctgtcaagcaggaggtataaacacatgttccaccttcctcatatgtcttttattttattttgggttggggggggggggggggttccaaggatgtgctaaaaggggggaaaaaaacatggggggaaaaaaaaaaaggtagaggttgaattgttttaattggtttgataatggatttggccagtaattgattcttcttcatatgtacccttatacttcttggtaatcaaacagcagaaaatgtaagatacagaagatgtaagattttctactgttttttcttgtttccgtgggttcgattaggcaactcagtgcatcatggtggaattatgttgtgcttttcaatccaaaatttataagtggtgactgccagacaccattgattgcaggtgattgactgggtttgctttgagttagtgcgttttattattagagattgcatttttgttcagttgttgttggctgtaactgtaactcaagctctagctagttttttgttgtcggaatagagaaacgtatctgttgttctatggttgaacactgacatggtttatggtcgatgaattatgcaatgcagattggtgggctggacactgatt

SEQ ID NO: 88603 - DNA, 821 bp, Citrus clementina
  Intron number 3 from transcript clementine0.9_031732m (loc us clementine0.9_031732m.g) derived from phytozome v7.0 (c hr-ID scaffold_8; pos 3794792 to 3795612 reverse strand)
tggtggaacctgaaatagcttttgcagatcttaaggtatgttagacttaaatgtagcagaatagactgatatcaacaggctaccccagttaattggcctaatgatatgaaattggagaaaattacaaaatcaattgatgaactgttgttcctatcactgaattttgccattagaaatagagtatgcactaggagaaaaggattgagttaaatgtaagatattctggtagaatttagattacctattctcgataaattctttgcatgtaagtttgattcttaaacaccccttatgggactttactacaatctagagtatcctgtttcaatgaattggggcattataagaatttaagtcggtaaacttgttttgagaattatatatgattgtggttagtcttcttcaaaactagcttactgatttcttgaactgtgatcaatcttcaatgtgtttgaaaggaatctttaatattatccgcactggaattgtgattgcaatttgtgattcttaaagtttcttacatttgcagatgatattattgactgagcggaggcatatgtgaaatttatgtgccagtggttacttgacaaaaatgcattgacaacgtgaagtttatggctaaatatttcgataaaagctgcattgactgtctaagaatggttgcttcagctccctttgaacccatgacgtacacaaaagaagtggaactactagagggtgctgtgaagaaggatttggagtggggggattgatttagagtcagagcatgaaagatgcttaactgaggtcaatcaaaagcctcttattgtgtacaactatcc

SEQ ID NO: 88604 - DNA, 745 bp, Citrus clementina
  Intron number 2 from transcript clementine0.9_025514m (loc us clementine0.9_025514m.g) derived from phytozome v7.0 (c hr-ID scaffold_28; pos 218687 to 219431 reverse strand)
gaaaggggctaaattcgttttttaccctttgaaccgtaagtaatttgatctttgaatgaatcaagataaagttaactattgcaggagtattgccaacggggctaaaagaagaaaatgattcgaggttaatgtgtccgaactggattatctaatacattgaattttattattttgatttgggaaattattcactaaccaccttaagaatattgagtacaggtagtcatcacgaatttctgataacatctcaagatcgcctaaagttctaattttatattcaccaactaattttatgtcaaccagctacttttccattaatttcgatagccaccctcaaataattcaagataaagactatttgcccttgaattcattcaaaaaggcaaagtgatgttttgcaaggctccaagagcaaaataatctataatcctagttttttttattcatttaagaaggtagagggatgttttcttttactggttggtaatagaaatagtggaaaaatagttggttaatatcaaactaaaattttgaagataattcggagatattatcaggaactcgcggtagctacttgtaggtttttgtacccttgaatgttttggggataaattagattttatttttttaaatctttcatattttaatgcagtgcagttagtgggtcctcactggggactaacggacacttactattttctgaaaaacatatgttcttgcttcttttcaggatcccccaacaacg

SEQ ID NO: 88605 - DNA, 910 bp, Citrus clementina
  Intron number 1 from transcript clementine0.9_000231m (loc us clementine0.9_000231m.g) derived from phytozome v7.0 (c hr-ID scaffold_12; pos 2306679 to 2307588 reverse strand)
cctcttctcccaattcagttactttcttttctcaggtaattgttcgaatactgatttttttcggcctgcttgattttttcgttttgatggatcaataagtgagggattgaattggttttccttttttcttcattattattattattattattttgggtgggggaatggaattctgttggggtttgattgatttgtgtggaaacgtgtgaaattgatctaatctttgtagacatgctaaaattagggtagttctgaaattttttagcaatttttaatgttttgatcatttggggcttttatagcgtggagtttttaagcgtatgcaatggttatttttcttcaaagttcttgttaaatttaaaagatttctattctcaaaactgttattttactcgttctcaacgaagaaagaaggaggtcttgaagatcgctctttttaggggggaaaaattaattgaatggttttctcattccaattctgagttggtggctgattatctgtctacacggttttcatgtgtgagattatgaacattaatgatacacttgcaatctctaaattgggcaagttgtaggagggacatttaattgcatattgaaacatttgattacctgaacaacatgatgttgtttatctgatagccaattgttactagcatattattttgttagtagatgtatttttcttggatgacagtgatgatgatgatgattaatgggaagaattgtcagtggtagtgtcgtttaatgtttaaacgtaggtttctgcaactaaagtttttgaatgcctttacaccaggcttcatagtttattaccatgttaatggattgagtatttattacagcattttccattttattgtgtggagccattttttgtttgaccaaattttgtcaatttctccatagg

SEQ ID NO: 88606 - DNA, 505 bp, Citrus clementina
  Intron number 1 from transcript clementine0.9_026794m (loc us clementine0.9_026794m.g) derived from phytozome v7.0 (c hr-ID scaffold_21; pos 1689748 to 1690252)
ccctcatcatttcaccagtgatcactcttcacaaggtaattatatcatcctctaaaagtctttctggttgtgcctactctagcttctaataacaattcacagaacttttatctaatttttttctgcaatcttcctttccattgatccatttccattctttttttgtcttgttactattgcggttcgttgtttttgatcttctattttattgagtttgatccatgctgttctcaatatgtgatgaatatgtgaagctagaaagtgggacaaagaggattagtgtccgactggttaaaattattagtttcataagacataatattgtaaattttagttattttctgtctgctgcaagaaaccattggactttggactgctgaaataaataagctgttttggttccatttacttcacacaggctgcatacgtagaatctgttaggattgtttttattagcatggcttactgatgtatctacaaatgctggattgacattcaagaaact

SEQ ID NO: 88607 - DNA, 1014 bp, Citrus clementina
  Intron number 1 from transcript clementine0.9_027289m (loc us clementine0.9_027289m.g) derived from phytozome v7.0 (c hr-ID scaffold_12; pos 3958968 to 3959981)
tattaaacgctttgagagactgcgtcgtcagcaaggtattttatttttcaattcgcactatttctattccttttttttttttaatatatcctgtggaaaacttgaatctctttgtaaatctcccgtgaaacatgtaatgaagcgcttacaacttacttaaatcgtgtcttaaggcatggagaagcaaaagcctatgcagttgattaataggtgttaaaaatgcttcgattcagttttcatatggaaggctcgtgtttaagattgtcaaactgcttgtttaggagagaattgtttaaattttgatcagagctctgtttctgttccatccccaaaagaaagctagagagagagagggcgagggaaagcttcttaagcttaggaattttttggcccatttacctttttttttctcaaggactccttataaatagtttgcaagttctgtctgttcatttttgctttttctcctaaatgagaaatgtggactcattgatcattaagcttgcctcggcgaacttatcctcttctggttagttatcacgtggcggtaagattttaatggaaaagcttactgtcatgacggttgtttttctcgttttgatatatgacatgaggtaaatgaaatgctacagcttcaatgcgttgcacattctgtttggatgtgtccatattcaaactaggtgtcataaaatagaaacaagcattatttgatgatgatgatggaatctagctattagatgatcctggtgttgaggattcaaagctcagtgaggcggctgctttgcgttatttgtttttttgaatctttagagcatctaaatcactgtatgattagaatgtttactggacttcaccatggagacaacatttacaaacattcatgtaaagcagttaacatgcctttggtccgttttgattcttgttcttatgggatgtgtttcctcttttttttttttttttttggtcatttttcccacagaaagtgaagaaattttcattggctgagcagggcaa

SEQ ID NO: 88608 - DNA, 584 bp, Citrus clementina
  Intron number 2 from transcript clementine0.9_017407m (loc us clementine0.9_017407m.g) derived from phytozome v7.0 (c hr-ID scaffold_12; pos 2517447 to 2518030)
gccgatctagcctctttgatattactactgattcggtatcatttctttctttcgtttttctctatttctgttgctttgaatcctttgatttattaaatctcaatattagtctacgtgaatcaagtcaacgaaactcttttcattttttttttgggggtaaagttttaaaatttgttttaaaatattagttttaagtctgaaagaatgaagatgaagttgttttttggatcctgtaaaacaatttcttttattaggtgttcggttggttgattttttaggaaattatttaggatatagaattttgggtacaaattatttttaggttttgaagtagcacttaaaaatcatgggaaaactgttgcttgaaaccgaaacttaatccgattttcctaagatttttgatagagacttgtatttggattctaaatcaaacagggtgtttagttactcaggtcctaaaaattcatgaaagctcaaaattttaagcttttgtatctttgttttttacttttcttttggtcagcaaccgtgaagaagttaataatttttttttttcaaaccatttgcaggttgcagctactcca

SEQ ID NO: 88609 - DNA, 684 bp, Citrus clementina
  Intron number 1 from transcript clementine0.9_035284m (loc us clementine0.9_035284m.g) derived from phytozome v7.0 (c hr-ID scaffold_11; pos 1169589 to 1170272 reverse strand)
tcgttaggtaacaataattctctctctctccccctctctctctatatatggtcttgctaagttacatcatcagtaacttatagtaaacgtcactcatgagctcccaagtgtcttacaggctgccatattcttgaattaggtgactgcttatgggctgtattattatgcggtagcttgcctgtatatatttgtctaattctagtacattaactgagatactaattaattattatcaattattgataataattaatttaatagaacaaataaataattctaatatcatttttccattaatatcaggtcgttgccttggatattttaagacaaaataatcaaaactctctttttttttttttggatttgaataattttcctcacatgtttcaaaatcttatcaatggagtgatttactgcaccagtgataaattcatgaataaagtaacaatttttcaaaacacgttgggaaactgattaatttattaaaataagatggggtttcttcattttactctgttttgtttgattaagttacagcaacgttaacctctgcgttaaattagctaacactgcatggacacaactgaaaacatattctattaatttgtctccttttcaaatacttgaacttattgctattattttttgctaggcctgaatctcatctaattgaggaaatcgcca

SEQ ID NO: 88610 - DNA, 958 bp, Citrus clementina
  Intron number 1 from transcript clementine0.9_016748m (loc us clementine0.9_016746m.g) derived from phytozome v7.0 (c hr-ID scaffold_8; pos 1198732 to 1199689)
tcttcttgagcttgctgcccccatcaagatctgcggtcagtttttgtacttttaacttttattgaatttttgtgatgtgggttttgattgtgatgagaaattagtttgaaagttcgtggcttttttagggaattttttttttttttttttgtgggttattttgagtatgcgttgaattgggttttattgatttggctctttcttgggatggtatattcctatggctttctagtaataatcgtatcaaaaatcttaaattcaataagcggagataatgggttagttagaagatatgaaaaccaggctatgtgaagagcattttggatcgttgttattggccgatgtgttcatttggaatggttcaatggttattgttaaagttagctctgtattaagtttgtttattggtattggtgtttctgttatatggcatattgttgtctgttaatttgaattctgtcacttggtcatctatatatggtaaatgtattattataacttacagcattatttatgtgtgttgagttattcccctgatgttcaacttggtttgtttaagctactgaccttttttctttttaaatatttccattgtctcgttttagtcagtctgaagcatgtgctcttactgttctcattaagtatccaatcggatagatttagattgctttgggaggcagggatggacttgtcattttatttagtgaatctgatgtatgttagtattgttacaaggtggaacttggatcttcagattgtcaaattgaagtagtttaaattaatgagttctgaggttactgttgtttttaaaggatactattgtggttcccaaaatgttgtccagaaagtattgtggtcagtggtcgggataagttaattatttggctatcagataaagttaactatcattaatctttgtgtttccgttttgtattttgtggattaccaggtgacattc

SEQ ID NO: 88611 - DNA, 896 bp, Citrus clementina
  Intron number 2 from transcript clementine0.9_025634m (loc us clementine0.9_025634m.g) derived from phytozome v7.0 (c hr-ID scaffold_37; pos 722418 to 723313)
tgagaatctgaagctattgccattatatattctaggtattacctcttgtttatggtttaacaaatattagttgtcattctagtaaaagatatttattgtttttctctgattatcctgtgttttcttttgcattatttctgccgagcacttggcttgttttctaatatgatatgcttcttagttcagctgctgacttttatatcttgaacaaggactatagagctagtttaatttgctgcaatatcagctaaaatgttctgccactctcttaacctcttatgccaaaattgagcaaaatgaaactatggttcaactgttggtgactagtacatcaaaagaattgccgaagaaatatgttttcaaagttgattgtgctgttctatcagtactttaagagtgctttaatttcagaatttctttcgtttttgctagacaaggtacttcatcaacttaggagcccatatcttgttttgagtgtcttagtgttatttggggggcatgaaaaaggatcatttaccttcccatgtttgttttaaaattgttgatgttgaagtacataaaaactgtataaattgtctgttttgcctctcataattcaataaggtaagaattttccaggaaaacagatattgtaggagtgtttttgaaaattttgaatattcttagacttaacaaaacctttggtctttgtgggggcaagtgaacaaattcacacctgtaagtatttggtcttcctagctgttaagaatttttctcacagctaattacttaataagtctttttgtggacggatttcagcattaataaaaaatatgggattgcaaactgctggaaggatagatgattgctcctattggattactcgtgtgtccttcatttctgtttcattggcagta

SEQ ID NO: 88612 - DNA, 346 bp, Citrus clementina
  Intron number 1 from transcript clementine0.9_028577m (loc us clementine0.9_028577m.g) derived from phytozome v7.0 (c hr-ID scaffold_56; pos 668320 to 668665 reverse strand)
aagaagatagctgtgaggatcagttatgatttcaaattggtgagcatttgattcgcttgtcaattgtcgaatagtgcttggttactgaatgaagaaatatgtaaaagagtgttttggcataatcacttcatacttcttctcattctttttcattagtttatttttccttgagaaagcgccaaatcttctctatcacaaaatctaatattgtttattaagaaaacaattaaggggtaaacaatgagtaataaaattttgaatattgaaggccttgatatgtagtattatatacaaataaattatgtgtaaagctcttttgtcttgcaatccaaaaatagctaagcaa

SEQ ID NO: 88613 - DNA, 648 bp, Citrus clementina
  Intron number 1 from transcript clementine0.9_008481m (loc us clementine0.9_008481m.g) derived from phytozome v7.0 (c hr-ID scaffold_8; pos 2891310 to 2891957)
gctggctgtaaaggtaattcacttttctttatcacctttttccaaatcatcaactttgatatatatgcttgcaacattgtgtagacacataacattgtacgtacgattctatagctagctactctatttgtcttattatatgtatcatacaatatatgtaagtatacattcctctaccacacacacacacacacacacatatatattatatttatataataatatagacggtggtccaggtgagtctatggctgactgacttcgagagaagccgtgtaagataaggagagagtgagagaagagagagaaagatagagagggagaatattctctcaaggttgctttctttttggtgttttcttctgagtttcaaagcaaactgatgaagaatttttttttttggttgggcaacaagagtctaatttcttgaactagaacaaagttttgatttagattcgtttgttctagggagcaagagcaacaaaatttgagagaattatttcttttggactgtttttctttataagctctctctgtgttgttttttctttgttttggtagctactgctgctactactgctttcagtttattgtttagctcttcttgttttagatatatagcctgggacaaaaccatccattactttt

SEQ ID NO: 88614 - DNA, 845 bp, Citrus clementina
  Intron number 1 from transcript clementine0.9_023098m (loc us clementine0.9_023083m.g) derived from phytozome v7.0 (c hr-ID scaffold_12; pos 2266389 to 2267233 reverse strand)
ggttattcattttctgtgaatctggataagcttctgtaagaacctaaactctttttttttttttttgaaatgattataaagtaaatttttattcgaggccatagatcttgatttaactttttgtttatatttttctctaatgaattgaaaaataaggaattaggtactttttccttgaggatttaaatcttatttacaaatctaaattccttgcttttatttttgtgctcgccgtttctctcgcaattggaccaatgtgattgctgtggttgcgtcttggatcaggcgccatagtcctgtatttgatgatattctgataatatttatttgaattcatagtgcaaattttgtcctttatagtgaagtaaaattgtttgagggcagttaattatatttccattttaagttacgataattgtttggttctattcttagtcatttgtgttttgcaagttgatttatttatttatttctgataaccgtgagcttaattgggtacaactgtttaacttgattgtatcttaaattagatgttactcatatagttgtgtcatcaaatgtcttgacatactgatttcatttattttatcgacagacttgtcacctgttccttgtttgagcattggacaaaagtctgaggtttctgattctgtgatatttgttttactgtctcattttgcttggagcttgtgtatctctgtttggtaggtgcttattctttttattttatgaacttaaactgtataaagatcattacttcttcatttgcactgcctctgggatagagcgttgatctatataatggatatataacaggctgtgatttaaattgcataaagatcaaa

SEQ ID NO: 88615 - DNA, 729 bp, Citrus clementina
  Intron number 3 from transcript clementine0.9_026594m (loc us clementine0.9_025903m.g) derived from phytozome v7.0 (c hr-ID scaffold_11; pos 3601048 to 3601776)
tagcaaaagcttgcttaaagacggcttcggagtcggtaagctgaattttgtttaattgtatatacatgacacgtgtacatttttgttctttagaacattatcacatttgtaatactttgatgcatctgattcttttctgaggagctttacttcactgtgttgtccattagtgagttgttaaagagaatcgtcaagagaattttattttggttctggttgagctgttttttaattagcttccttatttgtgttttgtttatttaaattatttgattacggcagggcttgtttatgtgattgtgctttttcagcaatgggacttttgtaatcatccattgtttaacagtttttctgtactagattagcttgtcgagaaaagccttggttaagtatcttcaaatcatgtactaatttctttcttgttaactatcatattctcagacaagctttatatgcagtgacttcatgcagtttgataattgtctagacctcttgctttgattcttagagttgttggagggagattgtctagattacttacctggtgtttactgagaattttgtgaagtcaatccaattaaatttctgatccgattcacttaatatatcttttttctcaattttgggtgactactttttgatctttatcaagaattaggagtgtagagtatgctactgggtttaggttttaagtctcaagctgaacaaagttgatggtgttttcagaag

SEQ ID NO: 88616 - DNA, 614 bp, Citrus clementina; identical to SEQ ID NO: 78756
  Intron number 1 from transcript clementine0.9_015941m (loc us clementine0.9_015941m.g) derived from phytozome v7.0 (c hr-ID scaffold_87; pos 851882 to 852495)

SEQ ID NO: 88617 - DNA, 742 bp, Citrus clementina
  Intron number 2 from transcript clementine0.9_005334m (loc us clementine0.9_005334m.g) derived from phytozome v7.0 (c hr-ID scaffold_11; pos 1851151 to 1851892 reverse strand)
gacggggcacggatattttccctacaggtttgtgagtcaagtttagtgggaatttaattttattgtgcaaagttggagataaatgaatattaaaaaaaggagtgttaagttgttgatagtattgagcttttgtggtttaggagttgagatatgaaatgttgatttatttacccagttgaagttgctttacctgcatttgaagtatgtacaggttatgatgacgttgtttttttttttagaaggatgacgttgttaaaatgcgtttaaagttggagaagatattagctagtatggatgcagtgggggtatctaataaaatcctgtcatgtgatttaattttttctttcccatttacatattcactgtcatggttttggaatagttttattggacggacatacagatgatgtggaatgcccataccacctaagactttaactgaagtgaacaagaataataaaattttgggacaaacttttgggaatctcagtcggactgcaagttaaaagtggaattgtgttattagaattctacatagccgaagatttatttatgttaatgcagatcatctaatggtatttgtgtcatagaatacttcgatgaaactcgagataatgggagattcttttattctgtgcactcgtaatattttgagttttcattttcttttgtttgctggtttgatgggttgctttttctttgagcagtttttgcactgtggaaggtccctgagcttctgccg

SEQ ID NO: 88618 - DNA, 823 bp, Citrus clementina
  Intron number 1 from transcript clementine0.9_005160m (loc us clementine0.9_005160m.g) derived from phytozome v7.0 (c hr-ID scaffold_16; pos 2807123 to 2807945)
agctgccggttctgtggccaaagagcaaggacgtgagattgtttgatacctttttttggtaagatgatttgctttgttttaatttttacatttttttggggtggtggggtgctgctctttaagatttgaattgatactgatgtttaatttgtaattaatcattaattaggtaaaattttggtgaagtagtggaagaatgaaaatattcaagacaaaataagtaaataaataaacaatgtgggacctcatttagattaattaattatctaattgtgttaagtgttgctgttgttgtttgtttcctcctaatttgctttaattagttacttgaattggtgcatgggaagtgtgcttaatgtgtttaatctgaatttaaataggctgaattattggctaagttggcttaatatttattttgatgcatctttaattcattctatttggtactagttagattcttggttaagaatagagtgagtgttgaataggttgatctttttgaaagacttcatagatgttttggacctaatttagcttaattattagtgaggtcagataacaatgtgttagtctctattgattttataaattttctattaaatattgattaatcggagctaaaggttcaagtgtaggtgaaatctattaactgaaatattgactttgacgaaacaaagaaatcaatttcccaaaatgaagttcccatgattactttagtggcaatttgttaggataacaagttttcattaatgtctattactgcttagattagaaaatgttggtgatgtggcttcttaactttgtgtccagatctggtacaaca

SEQ ID NO: 88619 - DNA, 1007 bp, Citrus clementina
  Intron number 1 from transcript clementine0.9_018157m (loc us clementine0.9_018176m.g) derived from phytozome v7.0 (c hr-ID scaffold_79; pos 900233 to 901239)
tgtccaatctcttctcgatctctttccacaacttggtacttttgtctcttgcttggcattgccgtgaaattttttttgtgtttatggcggatctgagactgtttgattgatagaaatttatgggagtatgaattagtgtagtgattttagtgaacgttgtttagttggtgcgtcagtggctttgctactagtaattagatattgcccaaataaatagggatagcaaaattagaatttgcttcttgttttgtttaaattggattaacatatgcgattaagtaaaatatatattggaaagattgatactggattggtgctacattggagagtattaagcatatacatgaattggatggaactatattgccggttgaatggcaagcgaaatttaatggaactgctgttgtcttttgatatccttatgtatatatgtggtattttaggtcagaaaaagaaaaaaaaaaaattcaccctctagaccattataactatattcttcactgattcttagatgaggaaagcgtttttctctatggaaagtttgtattttgcatgatttggaactagacttaagtccaagttgggatggggttgctgtgtctctaaccactaatatataatgtatgttggatatgaccaagtattgtcatctgtcctcattcggtattagtccagtatagctttctgtaaaaagaatagttatatattcttaataaagggttccttcagtttttggcttttgcattaaggttattggcaatacaaaccagcctggtgtatctcgcccagcccaagaccactccacttgacctgagcacaggaaatctgggtcaatctacgattggcttcagatgcatagcctgaagctcagattgatctccccaagttttagtttttattttttgagaataaaagaaaaagttctatgttttcattatgttttgggttctgacacttttatcttggtatcaggattcacggtctgttggagctattgcaggccttgc

SEQ ID NO: 88620 - DNA, 605 bp, Citrus clementina
  Intron number 1 from transcript clementine0.9_003626m (loc us clementine0.9_003626m.g) derived from phytozome v7.0 (c hr-ID scaffold_12; pos 1221246 to 1221850 reverse strand)
ctgctatttctgggcttttttggtgtggaaggtatgggactgttgttctgttttgatttaatgctcattatgtgttgaggtggattgtgaagttgcttgagaacaacaaagaaaaataaatttgcaactattaaaaatttcatactttgctcacccttgctttagtttgggttccattatgtcaagtggaaaagtttgtaagaaattcttttagagaacctgtgttcatgatatgcataggtaaaaatttaaatgaggttggatattgtttgttcataaatattttttgctactttgtacggtgctatagtctttatatttaattctgctacgtcatttgtgatactggggaggggatgagtctagcagtatattgtaagattgattcttactgagtacagcttgctgcttttcatgattttactttctgtcaatgtaaatggagattttttttttcctggtggtttggaaaattaactagtaaactatttgagaacaactgtcaggttgcatttccaagcaaaggaagaaagatcttaaccataaagtattgtttttccaacacttagtagggcttattttgaatttctaataacttatcaggt

SEQ ID NO: 88621 - DNA, 1015 bp, Citrus clementina
  Intron number 1 from transcript clementine0.9_017660m (loc us clementine0.9_017660m.g) derived from phytozome v7.0 (c hr-ID scaffold_121; pos 298649 to 299663 reverse strand)
ctctggttagttttttgtttcactttagtcagctgattttctgtgtttgtctgtttgaaaaatgttggcgtttccttttgcgggttaattttcgatgtgggatcttgcattatttaggatgcaaagctgtaacttttcagctaattttcttgataagttttgttgttttcgttttctcgaggtagctgaatgtagttatttgttggcgctggaagagtttcgcttctgaactttgttttcattaccgaagtgaggttgatacaggtttatgggatctgcatttattgaactttgttattttagtaattggtgattcttttttttccttttttctctcttgtgttatattagcaagaagatatttgtactgaaatttgtttctgaacattgctgttttctgtctttattatgcttgagaaagcatttgatatttgaattcattagtatgctgatgggacagaaaagtcttataataaggtttttttttttgggtatagtatttataagctccttgattttgttttcaaggtatatttcataaatgagttattatgttatttatagctaatgttgagataaaggtttttttaccacttaatttgtgatgcatataccatgttagtgtatagctatgttttcttgtgggggcaaaggtgatattttgatgctattgattattgatatggcaaaagatcacatttttattacttccatatgtaaaacatggtgtggtatcagctaattatgatatttttggtcatttaaggaatgaaaatgtttaatattttcttggtttcgaagtagagtaccctggattttaagctgtttattcatggtacgaatgataagttaatatctttgaaattgactgtcatgtgggacacgttcaaaaacataattctgttatttgtaactgactcaattgcaaagtttgcttctccttacttatctgttgattatgaacatgtgtttgcattaactgcagaggaatctgaaacagacagtgaagaatctg

SEQ ID NO: 88622 - DNA, 519 bp, Citrus clementina; identical to SEQ ID NO: 77922
  Intron number 1 from transcript clementine0.9_018893m (loc us clementine0.9_014652m.g) derived from phytozome v7.0 (c hr-ID scaffold_16; pos 1539740 to 1540258 reverse strand)

SEQ ID NO: 88623 - DNA, 756 bp, Citrus clementina
  Intron number 1 from transcript clementine0.9_001221m (loc us clementine0.9_001221m.g) derived from phytozome v7.0 (c hr-ID scaffold_11; pos 2449742 to 2450497)
gaaactactctgctgccagcaacacaatcgacgccgtaagttttatgctacgcagttcccttgtatttttattttgtttttgaattttcagggctaataagaagaagaaggtcattaatttccgaaacagaaccattatcaagttttatatatttttgaactggttaattttggtctttgagaaatatttgcgtctataattcttaatctaatcgtgtaagattacagagcaaatacatagattttttttttttaataaaatcaaacattcgctataaccttagttttagtttagtttttttttttttgggaaaaaaatgaaaaacctcacttattaaacaaaactcttgcctctttatgctctggcaacctatttaattttcttagttctttttatgatatatatatatatatatatatatatatatatcctttatataaagaaatttttctgccatcgtgtgcaggtagctagctagcttatactactatcccatatattccccatataagttttggatatataaatttctttgttttcataataaaatgatgaatgtttcgtcagctgcaatttataattaatgatttgaccgtatttgtttgttgtatgaaatcttataaattagatattgtaactttgtttggttattgtttatgattacttaagagacatttatttatagtgtggatgttaattttgatccaaatttattttcaggaacttaaatagaaggctgtcggatcaattgcttg

SEQ ID NO: 88624 - DNA, 570 bp, Citrus clementina
  Intron number 1 from transcript clementine0.9_001240m (loc us clementine0.9_001240m.g) derived from phytozome v7.0 (c hr-ID scaffold_16; pos 1442421 to 1442990 reverse strand)
cctctgtcttctctcttacacttcacgtcattcaggtacgtcatgtcatcccctctgtcacttactgtgcttgctacttgtttcgtatggcttcggttttttttttttcgtgatgaataagattttttttattatgattaaaataaattaattttagttcttattgttctatgaactatctgacattgattaaaactattaattttatttaatttgtaattaattttagttttctcctaactgaaatctcgcctctctcagtctattttgtttgtcagatgcaaaaatgaacactaaaaatttctacttcgaatgttcaagcattgtggatcaaagagtcattcttttgattcggatgatcttatgattacttgctaatgctggtttgtttacattatttgtgaatcagatatgacaagaatcattataaatttaacttgctatgtgcttgatgctaattattatctaatatgatatttgcagtaaagttatctgtttttgatattgttaattaagggtttttattgtttggtgaattggatttattttacagagtgaggattgatagtt

SEQ ID NO: 88625 - DNA, 634 bp, Citrus clementina
  Intron number 2 from transcript clementine0.9_022323m (loc us clementine0.9_022323m.g) derived from phytozome v7.0 (c hr-ID scaffold_79; pos 411681 to 412314 reverse strand)
cagggcaaactatgtaatgtatttactattttatgttacaactgttgcatgataacaaaaattgttagttgaattcggttctttttgactcatgagttagtacatcttcacttctttcagccttggtctgagtttccacttatttgcatatgcttcaacttctaacccattgacatcaaaatggaatattgtgagagaatagatttctggaaatttatatttcaagtaattttgcagtctagatagcaattatatgtttaaagatgcgcgggatttctttaattttgtctaaagaattgacaagtttccttgtgatacgtgcaaattatgcatgcatgcaatatgttcgtgggtagccaaaagcggcgttgatgatgaagtagatatagtcatatttgttgagatggtcaagacggtagacatagtcaacttagtttggtagttagacgaataggctgcttaacttaagcataagtggtagcatggttacatgtttgtttccgattattttgccttgttgttgcagttgttttgctacattatctgtcacgattgtaaggctataaatagccaaaagcatctggataatagaaaaacagattttcagcgaaagaactcttccttcctttcttaa

SEQ ID NO: 88626 - DNA, 604 bp, Citrus clementina
  Intron number 1 from transcript clementine0.9_020609m (loc us clementine0.9_020609m.g) derived from phytozome v7.0 (c hr-ID scaffold_39; pos 502981 to 503584 reverse strand)
gtcaacaagcgcaagcctaaacccaccaagcttaggtattggttttcatcttttcatttattgctatatttctcgtctgtgctttcgcttctattcgttttgagtttagtaatggagtcgaaaatttgatcctttttaatgaatttatatctcttgtgcttgtaagttatttagatttcagtactttttttatctttttcatgtatatgttattcatttgtggtggttaagcatgaatcagcggataattgatttattgttatattgtggtttgatcaagtccgtttgtgttcaatctttttatcggcagcttactagatgaaatgctgaagatgttgactgcttctgagaaagcattgtgtgaatccttttgcatttggcttattggttgttgtatttgtttatgtttatttagcattcattgttttcttaggtcctacttagggtttgtcaaatcagcttcactgactactgtttatatgtccccaactatgctatgcatcatttgatttctagggcatgttttcttagggctctatttaatttttttccacggattatgttgtcagagcaagcatcaccccagggacagtgctgattatac

SEQ ID NO: 88627 - DNA, 739 bp, Citrus clementina
  Intron number 3 from transcript clementine0.9_014931m (loc us clementine0.9_014931m.g) derived from phytozome v7.0 (c hr-ID scaffold_11; pos 1482335 to 1483073)
agtatttgagggttcgtaagtttgctacagatcttaattttcctgagttcttaaagattttgtgcttatattttacttaaggggccatgatgacctcggcctaacggttgttgtacgcaccaacgtgagtcccctcacggagattaaaaaataaattaatcttcctcccatagatgtggtatggatagatatgacgccctcgtatttgtattttcatgtgaatatgttaataagtcatatgatttaatagagtcaacatagatatactattaaactatatgatttaatagcttgtctatttgaagaaaatgaggacagcaacacttgagattatatataggtagagtgctgtttctaattgttgcagatttttgaactaggctcagtagatctttgggttgaaatgatgaataaatgaattttgactttctaaatcctatgttattcttattattattattatttaaaagaaaattttggtgtgggaaagcacaatttaatttttttaaccccttatatatttttaaatttgaacttaggtggccagttaaaaaaagctaattgaaaatcactcggccaagcccagactactaaattctagattataatatttatgattttgtttttattaaaaacacaaaattttgcttctgtacttttgaacttcaaaaagagagagcaatttagatttaacttttggacaatattgttatcatcataggtatacatagagtcaaag

SEQ ID NO: 88628 - DNA, 746 bp, Citrus clementina
  Intron number 3 from transcript clementine0.9_026871m (loc us clementine0.9_026857m.g) derived from phytozome v7.0 (c hr-ID scaffold_69; pos 152322 to 153067 reverse strand)
acagcaggtgaaaagtaataaaatttgatctttgtagtatattttgagcaaaattttacccagtcccgtcatatctagttaattgttattctctctctttaatgtggaaacatgacacctgaagttgatttattaattaaattcaaagtatcaatcaatggatgcccatatacatacactaggtatattggaaggtaccattgtttggttgggtgatcttgattttgatatagaaataattttcttcctgcgtttgtgatatatagataaaggtcttaaagcataattttagttgcttcaccttgtactgggacaagacctgctggctcatgagtttttgtagctgctataatgttctttggcctgagaacttctgaacgtgcacgaagttatatctcagagcacatttatttgatatttttttataataggaatgctgtgagataaatttctctttgctttttacttttttttactttttgcaatgattttcatatttatgctattcagatacatttaaaatatgaatttatataattcctagtttatctattaaagtggaaatcaaggttcatttcatgttcttcatgttctacaaatggggaagtgcttcttgcatttgccaactgcttcttcgtatttcctaataatcggtgttgcctgacattattgtaccatcttggtttctcttgataattctttaccctttggttctttaggagaaaaacttaaggataaacctggat

SEQ ID NO: 88629 - DNA, 473 bp, Citrus clementina
  Intron number 1 from transcript clementine0.9_012748m (loc us clementine0.9_012748m.g) derived from phytozome v7.0 (c hr-ID scaffold_21; pos 2534143 to 2534615)
gtaccggaaccgattccaggactaagaagagaaacgtgagtttcttttttcgtatttttatcttctttttcttttaatattttaaattttaaaccgttgttaatttttttaactaaagaaaaacaactcttgagttattatttctgtttattttgcttaattttggaattattaaattgattcaaaatgggtttgtagttaaactttgttttttttttcttttttttaaaagatgaggaattttctttttcaagtccagaaaattttgaattttttggtttttctttgacttggagacattgtgagttttttttttggaaaattttgacttctaatgaaatctttttgctaaagaactggattccgtttatttctttgtgtttaccagttgggtgattggctagatatagaatgatatcttacagggattctttaatttgattacaaatttgattgtttttaatgtcagattc

SEQ ID NO: 88630 - DNA, 806 bp, Citrus clementina
  Intron number 1 from transcript clementine0.9_019771m (loc us clementine0.9_019771m.g) derived from phytozome v7.0 (c hr-ID scaffold_56; pos 756542 to 757347)
cttaactcttcagcattttcaggtatctttctttctgttttctctctaaatgcaccaattgcatttgcatgtgtcttatttcaaatttccatctgtatttcttttttctttttttaatatatcaattgatcgtccaatatgttgtgtgaactggggaagttgccttttttgcttgaattaaatgggcccatttgagattttatggttagctcagagaaattcccatgttaacttgtttgcgaagtattgaattcatgatgaaacgtgacaaataaagggactgctggcttctgagttcctaatttgaaatttttgaatgctgatgatatcttttggaaattactctcgtttgaacctatttttttggcaagacaaatagtgaattgggtttgctcgaataatttggaaatttacaatttttttggggggggggaagaattagtcaagagctttgaaattgaataccagtgatctagttgagtatcaatttgttcaaactgcttaaacggatttactcatcgtgtttatttttgttacccattggactatctctattttgcttagatagaagttgtttggtcttttattttatttcctcatcttagggtaagtttatagtaattgttttcaataaaattgaatttgcgatgagatggtatatcctattattatctttgccagataagttttgtggaatcaggcttggtcattgatttggttttagtcagaatactggctgtagtaattcaactttgtgttctggtggtatagaaattgagctgaacaactatttgcttctggcacac

SEQ ID NO: 88631 - DNA, 574 bp, Citrus clementina
  Intron number 2 from transcript clementine0.9_011121m (loc us clementine0.9_011136m.g) derived from phytozome v7.0 (c hr-ID scaffold_92; pos 287361 to 287934 reverse strand)
accgaaagacgcttggctttctgacttattgtgagtttcaaactttatatttttgaattttttgtttttcaattcctctgtataatggtattgaaattgaaagttggcacttttgaggctattttaagttgattggttgctttggtattggaaattcattttgtgaattgagaattgcggagcaagcatattagtttattcacatggaaaatgggagaaaatcagagctacttcttttccaagtttaaaacctgggtttcctggtcctcatttgggtttatcccatcatcctccttttttagcttgcaggaaagcaaatattcaccggttgcagggagactggaactggacccggtttttgtcatccctgcctgaggctacatgtatcatattacccaggcttagagttatatttcttcaattgcatgtaaaaattttccattattattattattactactactaatactattattattattattattgctgctgttgttgctgttgttgttatcacttggctaaaatctctcttcctttctcttggcagccaaagcatactattttctgaaac

SEQ ID NO: 88632 - DNA, 659 bp, Citrus clementina
  Intron number 1 from transcript clementine0.9_011121m (loc us clementine0.9_011136m.g) derived from phytozome v7.0 (c hr-ID scaffold_92; pos 288082 to 288740 reverse strand)
tcagccgttgccatcgcgtcgaagagtcggagacagtgagttgttgtcttgttgacttcgttcttttttcaatttatttgattgtgctttgagaatgaatattacataaaataacgctttttcgtcttcaccctctgtagacaatttttgaagttttccaattttaagttggtggctttcaaaaattttgtttattttgtaaaacatataataaagtttaaatttatgattcattgagcattagagattttcaacactattttgttgtactctagttggtggttttcgaagatttctttcttattatatcggaaataattgattcttaagtttgaagattaattccaacaactaattaaacaagattattgggtaacatcaacatatctaaaatttagaaatgaattccaaataaattccaaaccaagaatgctgaatcacaccgaaaccgaaaccgaaaccgaaactgaaacgaattttagaaatgaatgaactgaactgaaatatttcggttcagttcggcttcggttcaagtttttggaacccattggttttggttcggaactgaacgaaccataaactgcccatcccactaaaagaatctaactactaaacgtttttcagtctttacagagccgcaccttattccccagaccata

SEQ ID NO: 88633 - DNA, 1005 bp, Citrus clementina
  Intron number 2 from transcript clementine0.9_023871m (loc us clementine0.9_023871m.g) derived from phytozome v7.0 (c hr-ID scaffold_8; pos 1865490 to 1866494)
agtgttacaattattggaccacctgatactctttagtatgtgttttttttttttaatagttaatttggtttaattcttgtgattctatttttattgtctttgttttaaagcttttgggatttgggttttgtttaaattttaatgattctatttactgagattagatcaacccatcggattatgtttttggtttattttatcaatttacctgggttttgggtacttgggatatttgttgatgtgctgccgggattgtattgggttttatctattgttatcacctgaattctgaatttagccggattttggtatacctttaaaaagttgttggtatcggtgctttctagaatagtgtggtttctaatagtttgtttagtattttgaaattgggttatttaattgctttttaggaaactgttgcttgctgatgatctgctgtagtagttgctgggttttagatatggttgatactagagatcactgcttggcttggctgtgatattagattgggtattttggtttaattttgataacttgaaagcagtaacaaatttttgttaaatgtattattctctactgttaaagtgaattctttttcaaattggttcacctctgcctccttgttttactggttgtaaaagtcaccatatttatcggttttgtgcagaggctatggaggcatgcatgtgtttctctcttgtgatttcaggatgctgtccaacatcatattcttgaatgcatttaatgtttggtttgaatggtcttgttgggttgcagctatataacgtatttgagatgttggtttgtaccatatttttgtgttctttgaattgagcagtgtgtatgattttgtttctctgcatgtggtgatgtatgtggtttacgtatttgtaatcacattatctaggtgaataagctgtttttcttggctttccttaattgcttaaagggatgaattgtcatgtgttttaaatcttttttattacagtgaggggggatttttca

SEQ ID NO: 88634 - DNA, 910 bp, Citrus clementina
  Intron number 2 from transcript clementine0.9_008541m (loc us clementine0.9_008521m.g) derived from phytozome v7.0 (c hr-ID scaffold_35; pos 1324989 to 1325898 reverse strand)
attgtttgggaggttagctccttctcatgttcatgtgtaatagttcaattttcaacatgatttttgtcctgctcttaacattagatttacatttgaatatatatatattttttgtgaaaagcttcttgtccatttgtttatctcttgttactttcttagacagtggaagagtagtctatttgattaacagaataacaagtaatacttattgtggaattcagtgagcaactgttcaattcttatcatatcctcattttactttttatttttaattttccttcttcagagatgtgttcagtttaagaactctgtactttctggttcatcaaacaaacattccctctatcaatgggctgctgtttcttcactcttttctttttttgaacttattttacggatataatccatttcttctgttgcttcatcaaaatatacttctattgtgcaaattgaactctacttttgattttagtgtacattggtacatcaaaatatgcttcataatgagtccctgttcgagcatcaaaagatttggtttaccctcattatcatctttttccaacttcccctgagacaagctattttggccctttcttatttctgcaatgtggcttctgtgttttatgaaaaacttggatgattatattagattgctttcaattttgtatgcatcttgcatcctaccagttcatttgttccataaagtgttgcttatgttttctcaaatttatgtgaccttatttatcttagctttttatttatgtgatatcggagctagttaatttgaattgcatacaattttttttttttgttttagatttttttaattgcactctaaaacattcctggctcaccctctgtgtgggaatttacagaactttgcatcaagggcagatacaatattttgtgg

SEQ ID NO: 88635 - DNA, 701 bp, Citrus clementina
  Intron number 1 from transcript clementine0.9_008541m (loc us clementine0.9_008521m.g) derived from phytozome v7.0 (c hr-ID scaffold_35; pos 1326217 to 1326917 reverse strand)
gtttcagcttgatctggcaagaggtttctgtcttggtaatgttttgaagctcaattttgtggaaatttgtgacaattttgccattgtttcaagttttttctttgtttgatttgagatttattagtttcagtgggttctttgtaatcggataagctgtttgttgcactatagatctgctttcacacatattatataaccactttttagcttttttattgatattggatttatattattataaaaggaagaaagaggaagtgagaacaaatctttatctccaaaaagtcatctttcttttcctggtaagctgctcaaagctattgaatcatatttcgttttggctctctggttgattctgttttcagctttttgattttgtgattcgttagaacttatatgaggttttgtgaagttatctgataattaggctgttagctcaaaagggtacgtggcaaatcaaagagatttgatatcaataagatttagtcttattgttaaactgtgtattcttcacaagggtatgtgcaattaagtagttgaggatgtgtaaggataaatttcagattgatctgttattttggttgtcaattgtaaagaattcttggagatttggttaatgattgtcatttgaggagatttcagtaagcggattaatctgtttttcaggccaggaaggttttcaccaacaagttctgacggat

SEQ ID NO: 88636 - DNA, 581 bp, Citrus clementina
  Intron number 2 from transcript clementine0.9_009619m (loc us clementine0.9_009625m.g) derived from phytozome v7.0 (c hr-ID scaffold_84; pos 498503 to 499083 reverse strand)
attccactggattcagcatacagcatcattgccaggtaagtgaaattctttttacgaaactctccaagctgaaacagaaatgaattttatttgggacgctcagtggaatagcctcggcattactttcttcatcttttacggttcattgaactaggttgttatataatcatttaatgcttgttttggtgcattactggaaaaatggaattggttcattgatgcaacgaacacaaagttggaatctgcataaagctaatcgtaattttctggaaaactttctttgggcttagagtcctctttgacggcatactgtttaatatgtgtgtatgaaatgacttgcgttgaagatattttttgtttaatgtggaggattttgtattaaatgtgcacaaatttatagacattcaagagcacataagcacaaacacttacttcagcccttaaatttgataatcaatagtgtaaacgttttgatttgtgattttcttgcaactcttagtgacttaatttcttcacaaatgtggacccatcggaatatctctgattgcagactgaatattctgttgatccctgtaaagcca

SEQ ID NO: 88637 - DNA, 893 bp, Citrus clementina
  Intron number 1 from transcript clementine0.9_030727m (loc us clementine0.9_030727m.g) derived from phytozome v7.0 (c hr-ID scaffold_104; pos 505601 to 506493)
gaaaagagaaaagagaaagagaagactagtacggggctaaattaatattcaaactaaaaataatcttgttaaagtgggtggggggttgtaggatttttttaagagtattggcatgaaaacattactttctaagaatttgctgcactctgaaaaaataatatatacaaataaaatattctatttaaagaagactattgacccgaatgaagacttgcttcttgaaaaagatgtttacactactctagtgcagattataatgacccggcactggcattttgtaattatttattgtcatctgtaatgtattattatttgatacatgtgtttctgagattggttagagggaacaggagaggagaaaagaggaaggagacatgaaaagattagtttgtggagctaaatccatggtgacattaatcggtacttaaattagaagtcctgttacagtatgctttagattcgtaaaattcaagatcactgttactgaaatttgaacgaagagaactttacaagaatttgctgttgttgcattcggtttaacattattatatttctatgaagaaaaaataactaaaagctgaaacacatgacatattacgataatgaaagacaaatgtaatattttcaaaggacactattggcatgagcgaagactttctgtcgttggaataaggctaaaatattattttcaatattgcagattatacaagtataaatttgcatggattcatgggcttcagatataactataaacacatatccttaagactgatgatcatatgtacttgcaattcaatgtcatccaaatgtttccttctacttcaatatgtatctttgatttctgtgattctgtttcagttggagccaagagttgctaattctaacaacataat

SEQ ID NO: 88638 - DNA, 848 bp, Citrus clementina
  Intron number 1 from transcript clementine0.9_032577m (loc us clementine0.9_032577m.g) derived from phytozome v7.0 (c hr-ID scaffold_104; pos 763949 to 764796 reverse strand)
gtcactgaagccagggtactgtgtctatatttagcaaattgtttgtttttgttatacacacacacacacacaaatatatatgtatgtacttaaacacacacacacacacacatatttataattatgaaaagaaaatctgaaatttcattctctgtgaagagctagaaaacacatgatgggtagttgtcattggagaaggtccttacttttgaattattgttgagataattgaggaacgagtttaaaacaaaagtttggaaattgtgaaattgtcatttgtatgtggacatttttgataaattgtgaattgtgtgaagcagagttccgtgcctttcaactctagcacttgcaggcagagatggcctaaagctcaagacatgacaaaattgtttctggaaaattctttgggaatcgaaaatgagaatttgaattgttgccttcaacatcctggaaagtgtttaataacatattgtgaaaagacaggaaacagcttaatttattttgagtttgaagctaatttttggagaatgaatttttggtttgcagaaatcctgtttctgaaatacagtaacaaaaatttatttatttttttttgtattttattttttctttatttgtgattgtaaaacggaaaatgagttctgaaacagtggcaaacactcccataaaagtttcattatcttcgttcgattttattattcttcattttttcagcatttatgtgtctatctctgtcttcttttttatcagcactatgttgaacattaagcttttttaggttttatcttttttgtttcctcggattacatattaatgtcaatcgcatggatatttgtttcttcagataa

SEQ ID NO: 88639 - DNA, 458 bp, Citrus clementina
  Intron number 1 from transcript clementine0.9_009346m (loc us clementine0.9_004617m.g) derived from phytozome v7.0 (c hr-ID scaffold_12; pos 937253 to 937710 reverse strand)
cgttggtccttcccttgtctctccatcaatctccggtaagatcttcattacctgtgaattttgaaggagagacagccgtaagcaccaaaattcatcttctagggttttgtttgtgctttgattcgcatctcaatttgtttttttaatttttaccttcattcatcatcataatttgtttgatttctatacctgatctgtattcttgatctgattttcgtgtttttgactgttgaagtattgttgtatacttgattagggttttgtgggaggaaaaaggggaaattttaattcggtttgaaatttgtgaaactgttgaatttctgaggataagggttgggattttgggttgaattgggtttctttttccttacaataccaatattgtatttttttgtttgagtttgatttttgattgagaagagttgtggttgttaataatatggcggcagggcgacctg

SEQ ID NO: 88640 - DNA, 1039 bp, Citrus clementina; identical to SEQ ID NO: 82498
  Intron number 2 from transcript clementine0.9_008503m (loc us clementine0.9_008503m.g) derived from phytozome v7.0 (c hr-ID scaffold_99; pos 697067 to 698105)

SEQ ID NO: 88641 - DNA, 601 bp, Citrus clementina
  Intron number 3 from transcript clementine0.9_019078m (loc us clementine0.9_019068m.g) derived from phytozome v7.0 (c hr-ID scaffold_124; pos 462084 to 462684 reverse strand)
aggtagcttatcaatcaatttcttaattattttatgacgtttacaactttaattttcctattatttatcaagggaactgtaatattgctccttgatcaactaatctcatcaagtcttttgtgctgttggtttctagtctcttgtgaagttgttattgaatttgaggtcattgggcctactgtttccattggtgtaatatcgagttacttttttctgggtgatattatttcccagttacttttgaagaaattgtgattgaacttcagtttgtgtgtcaactgaaataatcaaagcatcaaagagttttgctttatagagctttatatagacctggtgaagcaacctgttttttgaaaattcattattgtatttttaatttttcagttactttttttcttattggctttaactatttttgaactttgtggcttttattgatagatatctctatttgctgcattttttttaattttaattagatcagattacctaacattgagagaaagctgcattacatacgcacttgcatgagcgaaattatcttttgccattttatctatttgcagacagctaccactgctgcagaggctgatttgccacc

SEQ ID NO: 88642 - DNA, 814 bp, Citrus clementina
  Intron number 1 from transcript clementine0.9_007997m (loc us clementine0.9_007997m.g) derived from phytozome v7.0 (c hr-ID scaffold_112; pos 439491 to 440304)
aaagcttcaaactcagcttcagcagaaaaccaaaggtttggctttgactctttgatttctttctcttgatcgtcttcatcatctaatataatatatgatcatctatgaacatgagtctttgacctatttctcttgatcatctttatcatatatgtaacacatgatcatctatgaacatgttaacaagaacttgttgatcagtgatcatcaacaccatatatacttaaattcttgatcatctgtttagtagtagcagtattttgtaagcttggttaccttatttcattttatgcttgatgatcaaataatattgtgcctgtgtactcaaaaaccttcttttttttttggtccccaacttggtttatactttatattcagttttattaaagtaattgtttctgatgatggttttcatttttcagaatccttgtggttttggttttggttttggttttggttttggtttctgcttgtgattacttttgatggtttcatttcttaaatcatcatcactaacatatatatttttcttttatctctagtgaatttatttcgttatttctaaaacaaaatggtgatttagtaagtgttttgatgttgtctgcctgaagatatgtttgattttattgattatactacatgttaaataattttcatgagtgcaaaattgtttatgattgacaattaatttggtgattctattattattctagctgatgttgattctttgatgtcaaaactttcaaaattaatagttaattctgagaagcaaggccagttctgactcttttgtcatcttttctgacagaacatc

SEQ ID NO: 88643 - DNA, 660 bp, Citrus clementina
  Intron number 1 from transcript clementine0.9_027174m (loc us clementine0.9_027174m.g) derived from phytozome v7.0 (c hr-ID scaffold_61; pos 777057 to 777716 reverse strand)
cgtaagtgaagattgaggtatgtttttcataagaattgcaaacttgagagtgttagttagcgtgcttgtgagtaattaatttgtgtaattttatagggggtatattggggctctgaaatgttacaatgggatgaaattatagaacaggatacacacagtataggggtatttgcttgtctaatgtagatgtaagtcgggtttctttttgtagtcagcgtattataaatttaaatttattcactttgattatttctctatagaggctttcaaaattgatttcacaagatcccaaaagcttaaccattaaataagtatcttcgtatatgactagttttatctcgattgtacgtgtcactgatactgttttgtcttcctgcaataactccataggcttcaaaccgagttgtgatcgatttcttagaggttcgacactgtcaaacaaaattcggtgtatttttgtggttaaataatggcaattgttgttgtgtgggctgtttttcccttttgtcatttcagggaaattaatatggtatgtaatcttgtgtatgttttgaagtcataataaaagttgtcataaccttcttatgtgataatatgattacaaacttgactacaactagcagtttaagtggtatttataattcattttagagcattgta

SEQ ID NO: 88644 - DNA, 506 bp, Citrus clementina
  Intron number 4 from transcript clementine0.9_002768m (loc us clementine0.9_002768m.g) derived from phytozome v7.0 (c hr-ID scaffold_12; pos 3458519 to 3459024 reverse strand)
cactgagtaagtttacatttgaaaactatatgctttttccttccttaaacacatatttaaatttaaaaaatttgtgaatcacaacattataggcaggatattgtagctcactatgagctgtctgtttgattgtctgagtgtagctgatgttctttcactctattccgattttgaatgtcaaactagttcttgaagatttttcagtctttcttggttaaggcttataattggattgactatggtgattctctgtaaatacgtcgtggtggtttcatgcttatcgagtgtgttgagatagatgttttgctttctatcttgtgcacacgactgtcctgtaaccctcgaaaggctgttcatttgcattttacatcttttaatgtcacaacgatgcattgttttgatcagttattcactaatctttttgtaagttttggcagtgaacctttagtttgctttattaatgttaattgttacattgtgtaggtggggtcaagtttttatattgg

SEQ ID NO: 88645 - DNA, 814 bp, Citrus clementina
  Intron number 1 from transcript clementine0.9_002768m (loc us clementine0.9_002768m.g) derived from phytozome v7.0 (c hr-ID scaffold_12; pos 3459845 to 3460658 reverse strand)
ctgaactcaaagaagagctcaattctcagtataaggtaataattacgtttcatattgtggtttttttttcaaatctttttttcatgttgatctctgatctgcattaactaatgctttgatttgcggcagtttagcctctccttgttgctgattgatcactgttcttagcagatctattcctttgtttcgttgtatagactaatttatggatcgtatgccgatgggtgtagttcttttgaaggaaatttcgttttgtttggttgatcagaagactcttggatagaaaaaatacaaaactttacttggttaagcgatttgactttagacaaattggaattggacttagtgaataactaatctgttaggatactgatttatgagaactttagaagaaactattgaatgttttcgagtgtcaccctgattagaaaccattgttggatttgaagttaataattagtgtataaaactgtgttagatctgcaatccaatgtcactgttatggaactttcattctggattcgaggtagtacatggaattagttttaccatggatggatgtggaattgatgtccccattgaatttgtttggattttgcttcaaaataagtgcatacagtcattgttcatcacttcaacatcactaacgtcccaatacttttatagattggaatgccgggcagtattaaagattattgtgtcaacactacctctaatagggcatttctttatattttcttagatttgcatgtgtttatagatcatattttgaattttcccccctctttctatgttacataggacaagagaacag

SEQ ID NO: 88646 - DNA, 541 bp, Citrus clementina
  Intron number 1 from transcript clementine0.9_026577m (loc us clementine0.9_026577m.g) derived from phytozome v7.0 (c hr-ID scaffold_12; pos 489716 to 490256 reverse strand)
gaagagctacagaccttcgctccaacgccacagtactacctcgctctctctttctctctgtttagattttggtctgtttgttaatgatgataaagaaatacaaatgtgtataaaatttctcgtgattctgatttgtcgatttgacttgatttttccttttttttttccttaatcttcatctgtatttgtggaattaggactaggagtggttttgtttttcaaatttgtttaatgtttataaatttgaattttgttgttttaaaatatttctgctcatttcccaaattgaaaaattgatgccttgttttgtctcagttccttataagatatgatcactttcactacattataggtttccaaattaatggttttatatataatacataaaaaaagagtatttggaatgtggaattactgtgtttgagtgtgtatgtcttgctctgtctgcatatgtgagtatcttttctatgtggtgttctaagctgaatcatttttctttggtgcagaccaagcgtacgaagaaggctggaatcgttggaaa

SEQ ID NO: 88647 - DNA, 766 bp, Citrus clementina
  Intron number 3 from transcript clementine0.9_015823m (loc us clementine0.9_015823m.g) derived from phytozome v7.0 (c hr-ID scaffold_88; pos 577611 to 578376)
ccaatctctcacgtcaaaatagagacgacgctaaggtactgttttttcatttcttcattttttttcagcgttttctatctatatcattttcctgttttggtatgtcataagattacttttatgtgtgcttctgagttggatacttaaaaggaaacaatttagatggctgcacgaaaaatttaaaccaattccgaaagttaagttttacaatttgcataatgtggaatttaatgctcataatttgttgcctgaaagcaataaaaagcatttctttttatgctaactaggttcaaagggaaaacttgagtttatagacattagtgatatggcagatgctaagtgtgggtgggttatggctgtttcaaccagttaaaaacatcacgggggtggtacagtatgtcaacggttcaaaagctactgataccacggttgtagaggggtttgatttgcatctatggaatttttaggaatgggaaaaaaaaaacttaaaaaaaaatgcacttagcagctattggcatcatggaaatgaactacattaatcattgatttgaattagccatgatattgtacaaaatttggatgtgcgttttaagcataattgtattaactttcatttaatttgttgcaaattcaatttaaaaggcttccagaagacttggtcaagtttgagtatcacttgacattgacttgagggcagtgactattagatctttgtataaacaatgcaaacttatttttaacagatctacaataccatttgcagaaa

SEQ ID NO: 88648 - DNA, 612 bp, Citrus clementina
  Intron number 2 from transcript clementine0.9_017834m (loc us clementine0.9_017834m.g) derived from phytozome v7.0 (c hr-ID scaffold_11; pos 1278898 to 1279509 reverse strand)
agttcagagatcgaagccctcaacaccaaaacgtaaaattaataactcgtttttcttttcttttttttgtttcatttttttgatgacatattcaaaatgaagatagggttttgattgatatatcagatctcgtaaaagtttcatgaaatctttcaagtctttcattaagtcactgttggatattcgctgctggctctagttaattctattccaattaatcttctacaaattttgtattttaaaaacaaaaaaaaaaaaatttttgtgggttcaaaagtactctcttatcagcagaacacaatttcaaagtcaaatccagcccttgaatattcctccaaatttagaaagtttttatgttttatcagccttattgtacaaacattctttcagtttcagcaaacaaaaacagcagtctgcattctgcaatatacataagaagcattcataacacacacacacacacacacacacacacacagagagatatatctttttttcttttttcttttcaaatagattttattaattgatttagatgaaagaatgagatagtaattaaaaatggttaatttggtgggggcaggaggaggaggaagaaacaacttgaggtta

SEQ ID NO: 88649 - DNA, 987 bp, Citrus clementina
  Intron number 1 from transcript clementine0.9_002480m (loc us clementine0.9_002481m.g) derived from phytozome v7.0 (c hr-ID scaffold_13; pos 1580425 to 1581411 reverse strand)
tggccgctcttcgccgcctcagtcatcaagcagcagttagtattatgtttgatttatgaatccttaatcaatttaaggtttgatttgaattttttattatgcttctattttgaagttgatttctgaatcttaaatttttaatgctccaccactatagctacttgcttcttttttattttgttcataatgtgttttgttgtattggttatgttctctaagagtggtgcaagctctgctttgtgtagtatttgtttatttgaacttatagaaactttgaacagttaaatttttgtttcaaagcacaacataattgctcctgcaggaatctattctcctcagaccccataatgggttgcttacacttgaattgagcttcacactgtaactactacctaagtgttaagttcagttggttaattagaaagaaactaaactaagtatattttgagattgttgaaacttgaaatgagtcggccacaatctcacatttctttgttttattgttgctgttgcgacgaatataagactagaacaaaccaaccaatcagtcaaccgagagttagatggaggcttgctttgctttgctttttaaagggggcgcttttaacctgaagctgacatcatgtatatttgctcttctgatgccacaaacaagattacaagagaagaaagaaaaaatttgaaaaggattgattttaaaattaattaatttaatagagatctaaaggacaaggaaagacaaaagtaaagcaaaaaggacttgactgactgagatactcaagagaaatacactctttcctttcctgtctatcagaaattccccatacatgctttttggtccttttcttttcttgtttttctctcttttttattttttattttttatatttttaaggttcaattgcatgaaagaaaaatacgaaacaaaaaagaaatttaaattggaacctagccgctgctacaggaagctcgccttgccgctgctgc

SEQ ID NO: 88650 - DNA, 305 bp, Citrus clementina
  Intron number 2 from transcript clementine0.9_019622m (loc us clementine0.9_019622m.g) derived from phytozome v7.0 (c hr-ID scaffold_64; pos 1192014 to 1192318)
gctctcagcttgaagactttgcccgcaagcacaaggtcaaattttcttcttttttctttttcgtgtttaaatttcatgggttcggctaaattttgttaattgatatgggaatctgcgtaattgctgaatatgtgtttaatttgattaaattaatgactgtatggtgaagtttaagttatttacacattgaaattgttgaacgagtggatggtttgtatgagaacttgttgaattcggttgaaatgttgttctttttgttggaaaaatatgaaactgagctgagagttgaaatgggtcgatgcaga

SEQ ID NO: 88651 - DNA, 800 bp, Citrus clementina
  Intron number 3 from transcript clementine0.9_019622m (loc us clementine0.9_019622m.g) derived from phytozome v7.0 (c hr-ID scaffold_64; pos 1192448 to 1193247)
aacttggtgagtgtatcgtctgcgtgagttgtgctgcatctctcatgagtcaattcatttgtgtttgaggtgtcatgttgtattcattgttggtagaagaatttcaaatgtatttataaacacacagtctcagcaagggaaacatttgcacatttaacctttagttagccacattgtagataaatgaagaatatgaatcttttttgtatgaaatttgcccactaagatataaatatcccagaattctttacatgtaaatgctgatattttagttgagattttgtgttcaaggtaagggtgaggaggattctctgtatgcacataatacgcgaatttgtgagatcattcatactaaaggcttgtgttgtcctctatataatactaaataataatttgaagccggttcttcttgcatatctgaaagagttggattagtgcacttatacttttaacttcctgcatttggcttaattcatgctttgcaactaggatattaacttgatctcttttgactcctggaccgcagatggcaaaacttagagaggcctctatatcagatttgaatttacaactataattcttaagaacaaactttgcaacattgctgcaacaagtatacatgtggcatgaaatcttaatttatgacttgtaaactaatctgttgactgttgtctagttatttatagacgtagattcactatgttatagagtgtttttcataatgttataagttaacactgaaataaaaagagtttggctagacaggggtgcaaattgttgagatttgcttggcaacaaga

SEQ ID NO: 88652 - DNA, 645 bp, Citrus clementina
  Intron number 1 from transcript clementine0.9_023534m (loc us clementine0.9_023534m.g) derived from phytozome v7.0 (c hr-ID scaffold_12; pos 1972792 to 1973436)
cggttgtggctctgccatcgcttcatcatctgttggtacgggattattttgtttgctatggtttagtttatctttgattgataaattagggttcgtttgataaataacgaagtttatagctgaatccatatttaatttgctcctttttggggggggggggggaggcttggtttgtttttgtttttatttttattttatttttatttctcttgaagctaattgatgttttatgcaagttttctatgcaagtcaatatgaattaaaaaaatcaatgccgatgcagtgaataggaaccatatcaaattatgatacactttggcttctaatgaaagcaatattcttatgttttggtgagagtgaaaaggagatttgattatggaattcactccttctatagtcttctcaagaacaagattctgagttgcctattatctggcttttatgttttgattatcccaattttgtttttcattaaaatccttttaatgattttaatcaacaagtctatggagaatgaattggcatttgcatggcatttgatttgtcattgtagttgatcttagagttgtgtatgggtttttgaacttctatcttgctgcaaggatttactaattgattatgggtttcacatgtttcagccacaga

SEQ ID NO: 88653 - DNA, 909 bp, Citrus clementina
  Intron number 2 from transcript clementine0.9_023534m (loc us clementine0.9_023534m.g) derived from phytozome v7.0 (c hr-ID scaffold_12; pos 1973459 to 1974367)
gaggaagttttgtccattaagaacacgtgagttcttatctccttgtagcatttggatttttgttagtaattgctgtttagatgtcttggtgttgatttatgatatcatggaaaattttaacagcctgataattttgtttattatttttcagattcctattggcaataatttggcctatcattatttttttgttaaagtcatgtgattacaaatatgctgttacttttatctttgctgtgctttaatttcttattcgccctttcttgttcctctggtttgccgtttgctaatatttagtcatgccattcaaaattccagactcttattggaatatcaggtgttgacctgatgtctgccatacatgtgaattattgagtctggctatgaattttaggctatataaaatcaatgaaacaaatcatgtgtttctgcaaacttgtgcatgtttgttaagtgctttttgtcaagcgtggattatcttgtgagtgtttttggtcgtctgtagatgtggcacgagtaaatttcactcgtcaacctttttcatagaacttgcttgactgttttgtggcagaagctttgatgatttgatgaagtgactcttttttcactagtatgggttttcttttccctgatttatgtatgcttttctggatgcatcacttgtcttgaattgttattccccttttgatgactatctttgttgtcgtgtttgtcgtcttattttagatatggttgcagaggttgtctatggtttagtcattagtgattgaagacataaggcggagctgctttagaatggcaaacctgagaaatctttcaggtctcagcaagtgaaaattgtactctcacctaacttttttaaatgttgttgcagggaaattgcaaaacatctttctctaccaccggtta

SEQ ID NO: 88654 - DNA, 707 bp, Citrus clementina
  Intron number 1 from transcript clementine0.9_013357m (loc us clementine0.9_012612m.g) derived from phytozome v7.0 (c hr-ID scaffold_123; pos 40690 to 41396)
gaatcggccccgagatcgccgagtccgttaaacaggtattctctgtttgtatttttattataatttgcttgtttgactaaatattgcttcttcttcttttttttaataaataattgaatctgtgctagttcaaattacgcgagttatttactactatgccatttcaagcagatgaaatcttatgatatgattgtgacttgaagtagatttagcaactttttggaacatggagtgagcttcattatattttacttcaattttcttctgccatattggcaatttgaagtgtatgttgatatataggaaaagaaaatataaagattttctgtggttaggcgtccaaaagttgtagtccactcaaaggaaattgacgtaaagtttgggattaggatgttgaggatgagctttgaccttagtttgttgatgggaaaatgttgtatattgttgggctgaaggtttttttttttcattgtttcattcttttaaatgtaaatatgtatctttgcattctgttcccaatacaggtttttttttttttcatccttgtattcttttactctaaacttttatttttgatgactctagttggcaaaattaagcgtatctaaggagtattaattggccataatgtacttaaagttgtgatggattttgatatttaatctgttgcaggtatttaggacagctgaagtgccagttgattggga

SEQ ID NO: 88655 - DNA, 803 bp, Citrus clementina
  Intron number 3 from transcript clementine0.9_024297m (loc us clementine0.9_018575m.g) derived from phytozome v7.0 (c hr-ID scaffold_84; pos 525958 to 526760)
cgacgttgaggtggggcttctaatcttatttatgaattctgtaaataatgtttatatattgcatcattgtgatttctttcttgttttcggccgctagaagattttcttttccatgtatgaggaggcattagagacttttcatggtgcccctaatcattcctgtgatgattgttcttatcattgtaagtaagagcttgcacatttgagacataaagcatgctgtatatggaaactacattttatgttgattacaccatgtgttattggaagtctgaactttaaaagagttggtgacaagcatccatatactatcagacagaggaagggggttgagtataaagattctgttgacctagggactgactgcttaatatcacttgttagcaatctattatttgtttcatattttgaagaatttaaggagtgctttattcttttggattaaatgtcgcacaaaatatcagttacacatggaactgttctagttgttgctagttatcagtatcattgttttgtatgtttggtagcacggcctctacggctttcactatcatcattcaaacttgcactcagtttttaaaagtgatgccataagtagattttggacattagattcaattttgaattttttttatgtgattttataatttttggaaaattgtattcattgtgcggctgtgcacagctattctttcctttattgtcttttatataatgcattgcaatgagtttcattttttagttgctttagagcctataattaaatattttatatttgattttgaatggacaggtaagttcat

SEQ ID NO: 88656 - DNA, 767 bp, Citrus clementina
  Intron number 1 from transcript clementine0.9_023641m (loc us clementine0.9_023641m.g) derived from phytozome v7.0 (c hr-ID scaffold_145; pos 107738 to 108504)
aacatctcgtaagccaccttcttttcatttatttgattatatcttagatgggtttcgtatttttccattattaaggtttaaattttatgtgtcagtgtgggtgcttgatttgtttggtcgttgataaagtaggagaatttggatgaaattgacatctcttataagcttttcccttttgagtatctgggtttgcctcattttgaatgattgttatgaatatgattttgggtttgtttgatagaaacacgtgtgaaactcagttttagtgttgggtaaccatccttttttttttttttttcaagatatcgaaagttgaaacacttgaacaaaatctatacttaaggttgtgtctgtttacatgctcaagaatattgcttcttacacagttttaactgtagacactgatatacttcctgtataacctatgtctctgataatcactgttattcaaattacctagtatatcttcaataaagattgtagggtctggcttactctagtccttagtttcagaccgagcacttaagtgagccgaagggatttctggatatcaaatgttatattgctatcattgtaatttagctattcattaccttgttagagaaaaagtattattcattctcatatcaattccatgtatgttcttttaatataattaggatctggtgaaacgtagatatccttggttaacaatgagcttctacattgaagtgatcgtgttttgttgtgaaaattttcttttgtagggtacctgtggacccgcttga

SEQ ID NO: 88657 - DNA, 767 bp, Citrus clementina
  Intron number 1 from transcript clementine0.9_026468m (loc us clementine0.9_025764m.g) derived from phytozome v7.0 (c hr-ID scaffold_13; pos 1724581 to 1725347 reverse strand)
cgtcggtccatcacgttaatttgtatcgtatcagctatgatctctttaaaaagcacgagtaattaattaattatacatgattattctttaacatgcatgatttatgctctcgttggtcaagtgaaagtgatgactaattagtaattatatgtttagaagaattaaggacagtgttattaattaaccaatgaattagtcatgatcatgaaaggcggggagctaatgttaactgcatggaatcggatcttgtaactctttgtgcaatgattaattacttaattaacttaatcatcaaatgtataccggttctgacatttgtataggacaagaatgccactgcctaagattgtggcaatgttgaagcacctttcccaaaaaagaaatacataaacaaattttgtattcaactgcctataaatataaaccaaaatgcttcaataatcactcattctcacttgcaactcgttgcttcctctatatctctttatcccttctctgtacttgctccacacttactgaaaatggcaagcaagcttagtgttgtagcattctctcttgttttgatttttctttttcttgtggagaatcatgtaagtctctgtgtgtgtgtgtgtgtgtctatgccgtttaattctttaactaaagcaagatcgattcatcagactgcatgcatacagttttatttatcttcattctcgtaaatttaaaaacgtaattttgcgactcgcccaggctaccagcattgttgaggctccaactccgcagcc

SEQ ID NO: 88658 - DNA, 958 bp, Citrus clementina
  Intron number 1 from transcript clementine0.9_001390m (loc us clementine0.9_001393m.g) derived from phytozome v7.0 (c hr-ID scaffold_12; pos 3413533 to 3414490)
gaaacagcggtctctatcaaatctatctctaagtaaaattttattcacttccaagtccactgttttagagactctcatttccataactttaaagctcaaaagttttgagtttctgatatttgtttttggtaattatatgttttgacaaaatcatttcttgttttgcagtttggttaagttcaatgtactgactgcaaagggcactccaaagatttgatttttttcgtcgaaatttgaattatttttcggtttatcattggtttaaagcaactgggttgattaatttagaagcaaactttgaatctatgctaccatttttaagatttgaagcctcgtaagttctcagatctgaattatcgttggaatgttatgttttttctgttgtattgagatgttcttcagcattctttgtatggtgaatagcttctttagatctgtgtaatgctctgtgcttatgcttaagatatggcagttacagtgttttagttcaagtttagtatatgtgtttcatggtttttaatgtttatgacttatttgaattaggttctgtggatcttacgagcataatagttgcacaaatttctccgcattattgctttatagatttctgaatttgtaatgcttccataaataagaactttttgtcattcctgcaatttcccttttttgcagtattgttaagccatatcagttaattttcaggttccccaactttgctccttatggcttatatagatgcgtaactgtatattgatttttcattcttgctaaggataaaatgtgataatgcttccctttgtagtcatagtggaatttgttactagaatgacaatgccacttttgtaactgttgatactgatcattatggataaactttcactttttactggaactttccgttattttctatttgtagggagtttcgttactaattaatgctactctctctattttcagt

SEQ ID NO: 88659 - DNA, 832 bp, Citrus clementina
  Intron number 4 from transcript clementine0.9_003892m (loc us clementine0.9_003892m.g) derived from phytozome v7.0 (c hr-ID scaffold_25; pos 2035076 to 2035907)
caaccacatgtatgacttttatttctccccttcccatttttataacttatcatttttagttcactacggtacttgcctctttgtgtaatgaaggtagttggttgatgtagtaaagtagtatttaagcttggatacttaagcaagaagatatttcaattgatctgtaacatttaggaccaccagaaaaaagcaagggaaccatgaaattgctatgcaaataataaagtattgatgaacttattattctgtggaggttgcatgcaaacttagaataactagtgcttttgttcattcctttaaaacagtcaatttgagtgtggtccttgttagcacttacttgaaacagtagaactcataagatatttggaacctttaagtttgattatgtgtgctgaatgttctggcaacaacacttttcggttatttcacagatatgaaggtcattgttaatagattggtgatgtttgaaacaaattgtgttttatggtgtggttcacatgtttccgacttcccgtgctaaatgtttttttcacttaaattgctgcacaatccatctttttaattcttttcatattgtactcaataactgatgtatgtcacactgatctgatttcatcattttgtcagccctccttgttttaaaactcttatagcttcagcgtatggaatcttttgagcttgatatcttatttcttagtctttcttcttcttcttcttcttctgttttttttttaatagattggattgcagttaatgattgtaaacaataatttttaaatatcattttctttgctgaacataatatattgtcattttatacttgtagactatc

SEQ ID NO: 88660 - DNA, 903 bp, Citrus clementina; identical to SEQ ID NO: 81733
  Intron number 3 from transcript clementine0.9_015948m (loc us clementine0.9_015948m.g) derived from phytozome v7.0 (c hr-ID scaffold_16; pos 638217 to 639119)

SEQ ID NO: 88661 - DNA, 868 bp, Citrus clementina
  Intron number 2 from transcript clementine0.9_012435m (loc us clementine0.9_009436m.g) derived from phytozome v7.0 (c hr-ID scaffold_25; pos 3213998 to 3214865 reverse strand)
ttcagtctaaacaagacgccactgctcgtatccgggtacttgttgtttttgttaatggggattgaaagttttgatctttcttgttgatttgacataaattaaaggattacctgaatgagtattctttgctttttcattgttcggctactacttgttggttttcactgagcattaaagggcacgaaagttattgttaagaataaagcttgtgtgcttagtattggaattgtgcccaattcattctttctaggtgcgttatcacccccttgaaaatacgagcttggagcttttgtgggtcattccctcagctgcatataacatctcctatcagaacttagggtttcattgtattgatattccctttcgtacttttaatcttgattattttgttcgctaaaaagtatccctatgttcctttctctagttgttcaatgctgctagtactttcagctttactaaattcatctgttgaattttgatgtgagatactggcttgggttcatacggggtttcaacttcctcataacttgaattggttattatgaagaccttcaatgaagttccatgccttgttaatcatgcgaatagagctagtagatacgcgattatgtaaacttgcttggtcaggacatgattattgtgcaaacaacatgctttccttttatctgccttgttaaattatgcatagtaacacaactcaaaaactgatatctagcttattttgaggatcatttggccattttgtactttcatccaaattgttcttgctttctgttctgcatttggggctttggcatctggaaactatagtgtatactgtatacattactgattttccagtgagtgcttctgattttgtaggttgaac

SEQ ID NO: 88662 - DNA, 710 bp, Citrus clementina
  Intron number 1 from transcript clementine0.9_002324m (loc us clementine0.9_001559m.g) derived from phytozome v7.0 (c hr-ID scaffold_44; pos 1064785 to 1065494 reverse strand)
ttaacggtttcttgacgaggacacagcgtttgaaggtaaataaataatctacgcgagtttattttatggatttttgtttttgtttttgtttttttgcttggctttcaagcatggttgttggtcgccactgtgataactgataagttttcttttctgacaatgtaactgatagcttctgaagaaaagaaaaatttttaatttttcaatttttttggattgagaaagcttaggactaaagattaaccaaggacaattaatttttaactacctcattgagccttaattttgtttctatcgttggttttaggtggttggttgatactaataacttgcttttggccccagctgttaactttgttagcattccaattttttttttttattagaatttattaaagtgacccattttggggggttggttggttaaaactgatgattggtttgttgttgatgatgtaacctgttattagtcttttgttagtatggttcattatattagggttgcttcttgcttgggtaacagtattatgtccatgattagcgttgcaattatcttggtggtgaaaggttgacgatgatatatattttgcaactgcagcagccttgctgttaaccatattttaattttcttgtattttgggaaagcaggattgactgtgagtgtttgactaattgagtttgattattttgtatttgaagagttgtaagtt

SEQ ID NO: 88663 - DNA, 910 bp, Citrus clementina
  Intron number 1 from transcript clementine0.9_006957m (loc us clementine0.9_006983m.g) derived from phytozome v7.0 (c hr-ID scaffold_8; pos 2150500 to 2151409)
atttcggttgctctccaaggccattcccacctctggttttgcttctattttccctatatttctttttttttttttttgtttttatctgaacattataattttgattctgaaaaagaatagaaaatgttcaagccaacgttgtcatcatcaccacctttacatacacaaaaaatgaaaaaaaaataaaagtctcctctttattagtgtttagagattggctttctgtttataactcctccggctttgatctcagattcacaaacaataaagtttttgttgctgctttacatgtgcgtgtttttaatgtttttgcgcctttaattataatcattttaatatctgtcttacattatattcctttgttcttcttcttcttttgctcctttttccatcgaaataaagaacctgcaaaaggtgtgaagattttgtttttcttgtattttataatctgttcaaaggctgtcttttttgtaccttttttcggtttgttcacattatgggctcttatgggtttgaaggaggagagccaaagattctccttcgttcaaaccatggtaaaatcatgcatgtttatgttcatacgtttttggttcttatttcgaatctagtaactgttagaggaaaaaagaaaaaagaagaagaagaagaagaagaagaaaagctacacattgttttgtttgatgtactttatgagggtgatggtttttattatttttgataaagttattagagcttattttttcatcgatcatgatgaagcgaaccctgtgttctttctttatacttggggtttgtttactctttcatgttcatgttttggatgagtaattgtagctggattcattgatggtgggggcggtcttttctgtgaacaggtcaataatttggacttgaagagacaggtgatcaa

SEQ ID NO: 88664 - DNA, 464 bp, Citrus clementina
  Intron number 1 from transcript clementine0.9_014136m (loc us clementine0.9_011543m.g) derived from phytozome v7.0 (c hr-ID scaffold_44; pos 1470531 to 1470994 reverse strand)
attttatttggttcttcgagccctcgacactgttggtatattctgttattattaatccttttgttttctaactggttaaatttaaccaatttgtttctagctgttatgatgaaccctattgttttctaagtgactttcataatatgctgttgggcatactgaatcttctttattgaatattaaatgtctgctttaaactactagctgttgtatgttgttatatgtaaatttgatgtgacggtttccagaatttcactcattcagatgccagtttgcatttacgccatttatagcttctatattctgatatatgactataagataaagagtttagttgaacagatcctgttttattccaaatccttcttgtatatcttctatttctgctgctgttatatattgtttttaaaatactgccaaatgcttttctctgatggtatttatcatttttataattgcagagg

SEQ ID NO: 88665 - DNA, 757 bp, Citrus clementina
  Intron number 1 from transcript clementine0.9_026564m (loc us clementine0.9_026564m.g) derived from phytozome v7.0 (c hr-ID scaffold_68; pos 744876 to 745632)
ttgaagaaaagatatatacttctgccacaagtcaggtaattccagtttgaggctttttttgtttgacttgtatgtaaatgctcttttcttatatatgtgcttcaatgcagggctgttcctatgtgtttcttttccttttaaagattcctgatatttatttgtgtaaatctatgtgtgaaccgtgcacatggaagcacagacatgtatatgtggtgcaaagtagccatgtacttgggaaattgggaaagaaaagtctccaaagagggagagtggaaaaaagaggagggaaatggggtaaataagtatcaaatgatattggctcttgatggtcattaatttgtggtgacgataaagcggatgatgccgttgttgaaattttttttattttttttaaaaaagggagagaagaatgaagttggaagaggaaaaagttgcaaatcttctaacctgtgaaactgaagaaagaaaaaaaaaagaaaggaactgaaatatatatatatatattcatttttgtcgttgccatcatatagtggctattgttggaaagaagattttcacctaatagcctccagcatttttattatctgttcaaaccatattttattattttaatttatttctattcattgcacgacaattaggtcatgttttctgttttatattctttgatcattttggcaacatggagtactatgattaatcattttgtactggtctcaaatttcagtcggattatctgcggaaaatatctctgaag

SEQ ID NO: 88666 - DNA, 799 bp, Citrus clementina
  Intron number 1 from transcript clementine0.9_020070m (loc us clementine0.9_018392m.g) derived from phytozome v7.0 (c hr-ID scaffold_104; pos 291606 to 292404 reverse strand)
tggaggtatggcatgctttgtgctttcccaacatgaaatcattccattacttcatctatattttcagtatatacaatgaagtattttcagtattactttggcatcaaaaacttattaccattctaacataacgcatattttatgaaatgagctcatatgttgtttttggaaaatgttaataaaagttgaaacatcattaggagaagtcacctaaacatgaaaagtcactgtgagttccaaagctttgaaagctgaaatcttgatatctgttttgttattgttggggattccgtttctatagagtattgagttttatttgggttcttatactaggttagaggatttgatttgggttcatatacttgttggtttccctatcatggtattagatattgaccatgttttggctcattttgaggatcttcttccttttcacaatgtctatgtcaccactatttttgggttcttttttcttataactttgaggtcattgtaattacctgtccattttgtcatgttttgtggattcttttttgctctatgccttttgggcttttccacatattagcttgagcctaggttactttgctattaactatttggaaattttgagtgcttcgctctcttcaaaatccagggaatatggtacttgtaccacatcaatacctgctgtttgtaccataattggccagtaaattgatgtttcttttcttttcagtcccatgagcattaagattcaacatttgcaattatttagacctgttgacaatctgcaaatgcttatttcaatattctgcag

SEQ ID NO: 88667 - DNA, 781 bp, Citrus clementina
  Intron number 1 from transcript clementine0.9_030246m (loc us clementine0.9_030246m.g) derived from phytozome v7.0 (c hr-ID scaffold_56; pos 1367047 to 1367827)
gaagctgcagcctcccgtacaaatctttttccctaccttattactttttcggaaatttttttcagtacattcttaatccatacgcctattacgtgaattgctcgagtaatattgttgatgtggcgtttacaaaagttccatgtttataaatacttatgcattcaaatgcaagggctttgtttttgtttttcaatattgtacgtaataaagaatttgtgaactatctctaagagcataccgatatgacctttaatttctgtttcttttcacttttgcaacagtttgcatccacaatgcaggagtagtggcaaagattatttgctacccatattatatacgtaagcatatccttatacatctttttgatcatgtgttttcgacgttaataaatgcgatgggttcatatattctctagtcttttactctatatttttttctgaatcatctctctgattaggcataaagcttatttttattttttttccctctcaccaattgcagttaacttagtaatttcccaagcaatcttttagccttccacaatgtactcatcaggaatgtgggattagataagttttctgtcaggtaaaatctcctctccaggatcctctttttattgctttgcttagtactatttactttcaaatatcattctccttaccagggtttccacttgatgttccgataattggtagatttattcttgctccaatagtctttctcgtgttccttatccaaaaatatagaaaatcattggagagagtcgatagtcttgagaaat

SEQ ID NO: 88668 - DNA, 708 bp, Citrus clementina
  Intron number 1 from transcript clementine0.9_000899m (loc us clementine0.9_000899m.g) derived from phytozome v7.0 (c hr-ID scaffold_16; pos 1827121 to 1827828)
aagcttcgtctctttctctccacctggagttcaaggtaactaaatcttccttcagctcactcacatttcacttgtttgcttgttttttttttttcggctagattcaatcaacattttgagttttaagaacgagtcttaaatttgagattttttttttttttttttggttttctattggctcttcaatttatttcatgcttgctgtagctttcagcactgtcggtggtgttattttactgcatcatcattaatattgttaatatttttttttctcatttgctggattaatatatttttttctcatttgctggatctgacttcaatgcattagtttttgttaaataatttttgtgtttttaattagtttctaaagtataattcaaacgtaccagtggttattcaatgagtttgccccgtaaaggtaattccaataatgcttgtatccgtgaatcctgcaaatgcatagaattgattttgtgatgagttttcttttatttttaattttttttcaaatttctcttaaatttatttccactactattggagtaatatctgcacatagtttgaaaatccttgggaacttttggtttcattatactttacataaaggaaaattgaagcattacatgatctgagtctagtttagcatttcgttgatccttattagtctattctcagtttctggtgcttctgagccagtttattgaa

SEQ ID NO: 88669 - DNA, 674 bp, Citrus clementina
  Intron number 2 from transcript clementine0.9_000899m (loc us clementine0.9_000899m.g) derived from phytozome v7.0 (c hr-ID scaffold_16; pos 1827889 to 1828562)
acccaaaataggtgagactgcttttctgtaaacttcagttgactattttcaaagaaacgtatagatgatacccctgttttatatcattgcaagagagagaaacttgttgcatcaaaatatctagtttaaaattcattgtcgagatagttatcagatgatctattgttggatttgaattggatcttacatctttaagattttgatttgactttgatgtcagaagctagtgggttctcttgcaacggcatatctgattcttatccaacttgttaccatgtcaatattattgtccttcatactccacaattcatgctatgaaaatacatgaacaatgagcaaactacttgtttcatgcagtcacattctggtacatgcatgcagctgaatcaccatttctaaattataccgagttagtgtattcaaggcttccagtcgtaaacatggcacatgtctatatcttcaaatcaaagtactattttagttgagtagcattgctactcttgcaagtaatctttgtatcctgtagggctaacctttaaattatatcaatcatttgaatgtctgccagtttaaatataactttatcttcttccaacttctgctcatctactttaagctttctttttcattttagtatgtataaacttctgtaattttttgttgcacttgtaggt

SEQ ID NO: 88670 - DNA, 594 bp, Citrus clementina
  Intron number 2 from transcript clementine0.9_015105m (loc us clementine0.9_015105m.g) derived from phytozome v7.0 (c hr-ID scaffold_25; pos 3518214 to 3518807 reverse strand)
cggctctactacacgcaaacacactgctgcttttggtactgtctatttatactattatatatttttttaatatataattaactaatgctgtttctttaatttaaataaatgttgttcatgtattttttattggactgcactgtcaatgacgtatatgcccttgttagttattcttgtttattttaactgctccattgctgatttgcttttgatttccatcctttttttctccattttatgcttcttccatccctttttttctccattttatgcttcttactgccagaaaaggtttttttttttttttaattgtgaatttttaaattgcagtttttttttaaaaaaattgttttatatattttgatctgtctctcttctaccggaacaaggaggaagtagaagctcacaacataaatagttattaccattaattgactactggagtggtactttgttttctttagattattaattctcagtcttataaaaatgtgcgcaggcacaaatgtggggtttctgttgttcattgtgtcattattattattgttgttgtttcttacatctcaggatcagctggggttggttttacacctc

SEQ ID NO: 88671 - DNA, 592 bp, Citrus clementina
  Intron number 1 from transcript clementine0.9_022982m (loc us clementine0.9_022982m.g) derived from phytozome v7.0 (c hr-ID scaffold_69; pos 1240599 to 1241190 reverse strand)
aatcgtgtgcgaggctcaagaaactgccgttgaaggtccgaatcgttaatttagcctctgtttagattatgtaattttgtttaaataattggaaaattaatgctttgaattgttgtgtttatgttatacttgagctgttgtgaaattgaaattaaaaaaaaaggttttgttttctttgaaattttgaaaataattaaattgtttatttatggggattttatagaaatcaataaattttttaagagcaatttgaaatggtgacgaaataatgaacaatctgttttgtgggatgacaacgtatgactggctatattagggtgcgtttcgaagtgctttgttctttctaagaaagtacttcggaagaagcacttcgggtgcatcatttgcctctccagagtattcgaagtgtatttttatattcataagcaattctgcacttttctatttcaaccaaacatagcttcttgggttgtttgaaatatctttgatgctgataaagtctcttccgaacatattaataatgcacaattacatcatattatgaacataagtcatctgtttttcttgaaatttgcagtgcctgctgtgacag

SEQ ID NO: 88672 - DNA, 727 bp, Citrus clementina
  Intron number 2 from transcript clementine0.9_024857m (loc us clementine0.9_024852m.g) derived from phytozome v7.0 (c hr-ID scaffold_57; pos 309487 to 310213)
agcgacacaaagctgatctgtccatctccgccaaggtttcttcaccttcttgtcctgtctttttttttttttcatttttccatttggagtatgtttttcacctttgacggaaaaagtaaggttaacgtgcaccaaaagttgcctgtaaaattctcagctgattatctggctacatgtgatgcttggttatctttgtggttctggaacatttttattttattctgattagtccttgggagtcatgctttttccactctggggccgttgatatcttattgtgccttcttctgatacttttggtccttatatttgattttagtagatgaatgtatgcaataaaggctagtttactttatagttctataacaattcatcatcgacactgaatctttttcttgcaagttaaaaaaaactgttaatctcagagctcataacagtatttaaaaaaaaaatgaaactgcttcaaacgattttaaatatttgatgtaaactttggcttttgaacttttggttggttaaaatagaacccagatttgacccttgtttgtggtttgctgagcacaaagaaacggttcttctatgtcttggtcttagattctttgctgcagtaacttgttgcttggggtttctctttgtacaacgtgaaaaatatgttgctcttgataattgtttaatttacttcttgggcataggagaggaaagagaagcttggtgaacgaatcattgc

SEQ ID NO: 88673 - DNA, 204 bp, Citrus clementina
  Intron number 2 from transcript clementine0.9_021992m (loc us clementine0.9_021992m.g) derived from phytozome v7.0 (c hr-ID scaffold_8; pos 662748 to 662951)
ttactttgacgttgagattgctggaaaacctgccggtatgttttactatgtcaagttttgaattttgatcgttatattgaaaaagaagaaactttgtatttaataatgctaacttttttcttcttcttcttcttctctttttaaataaaagatagtattaatatttagttgtgacaaaaatgtttgttctcaggacgtattgta

SEQ ID NO: 88674 - DNA, 361 bp, Citrus clementina
  Intron number 4 from transcript clementine0.9_021992m (loc us clementine0.9_021992m.g) derived from phytozome v7.0 (c hr-ID scaffold_8; pos 663093 to 663453)
tttctttgcagaaaatttccgagctttgtgcacaggtaaatttgtgcagcgatcttaaatttttttgagttaaaaatcaaatttgctgcaccacctctctcagttcatcagtgatcttactatagttacaagatacgtgaaagacaatacattttcttcaagcaaattagaaatttaaacagctaatattattcataggaattcaaaaaactgtgtaaaactgcaaatgaaattttaatggcatatcattttcaatgtatttgaaccattggatagtaacggtgtacttggccgttgttttgttgtatatcactttatcatttcaggggagaaagggattggcaagagcgggaagccactc

SEQ ID NO: 88675 - DNA, 884 bp, Citrus clementina
  Intron number 1 from transcript clementine0.9_004193m (loc us clementine0.9_004193m.g) derived from phytozome v7.0 (c hr-ID scaffold_44; pos 1755929 to 1756812)
tccccacagcacccacaactattgcttgtttccaggtatttttttattcttgttgtattgactttttcttcattatctttccttatcatatataagaagtctatcgatttttatttttttatcaactctctctttgcctggatgatgatgatcataagaaagtaaactatattctttcttgaaaattgtttacggcttgtgggtttgtcttgttcactctttacctttgttaccttctttatttttttattttttggggaaatttcgaaccttttctgggatttttgtaatttttgttttctgttgaaatttcgttttatttggtgaaggttaacttaattttgtatgtccatatggctgaaagtgttattttttttttccattttaagtttttttatagagctaatttaagatttcttctggcttgatgcttgcatgctgtttttttttttccttttcaaagcctatgaaatttatgtatgatgtatggatattttgctatcatgcatacagagattgattttttgttattgagcttatgagtattgcctatttgttgcggttgcaaattggaactccttatcccactagtagaatctttggctttgtttgttatacaggcttatgtgatctatttctgtgaattgctccttctgcttgtaatttgcaatgaaattggagtagttacctcatgttgaaatttttgcaatggttctattaaggtttgttcatggcatgaagttattattcagaatcagatctaaaaaaattgttaatttgattttagaacattctcaaagctgttgataactggaaatgatttctactgtcaatttttcagctgagaagatgattttataatctaatcttcataatgttgcagg

SEQ ID NO: 88676 - DNA, 580 bp, Citrus clementina; identical to SEQ ID NO: 78323
  Intron number 2 from transcript clementine0.9_004193m (loc us clementine0.9_004193m.g) derived from phytozome v7.0 (c hr-ID scaffold_44; pos 1757730 to 1758309)

SEQ ID NO: 88677 - DNA, 685 bp, Citrus clementina
  Intron number 1 from transcript clementine0.9_033950m (loc us clementine0.9_033950m.g) derived from phytozome v7.0 (c hr-ID scaffold_13; pos 2849955 to 2850639 reverse strand)
gttttagctcaatctgaggggagcaataacttcaggtactctcatttcgtactgtttggcttcctagaaagccacattcccccaattttccggcattttatctctgttttatgcacattcttcctgtttatcacttgcaaatttttttttccttcgttgaaatctaatgtgagctgaattttaatgttaattttaattttaatttgtattatgattaattgcgctttaatttacaagttaatgatgtattatttgagacttaatccagttgtgcacttgtgctggatggcaatgatcatttgtgtgctcggtggagcagcgataatagagctatctttttttttttttttgttcatttgtttaattcagatttatgtgttatttttttatcatttttttaataatttccttttgacacgttgctgcgggttatcattcatttaataataatttttctttttacctttgtgggcgtgcattttgaatgtctctatatgaaatttgaatgtgggctatctttctctgtatttccaccagacctttcataatacattgtttggaattttctttttaaaatttttgcggcccctattttcctgattacttgaatattcatattggcatcgtatcttgtgggagaactttaatgttgtttatttaaattttatggtttcagtataaacag

SEQ ID NO: 88678 - DNA, 370 bp, Citrus clementina; identical to SEQ ID NO: 82634
  Intron number 1 from transcript clementine0.9_023675m (loc us clementine0.9_023652m.g) derived from phytozome v7.0 (c hr-ID scaffold_121; pos 113052 to 113421)

SEQ ID NO: 88679 - DNA, 599 bp, Citrus clementina
  Intron number 4 from transcript clementine0.9_023675m (loc us clementine0.9_023652m.g) derived from phytozome v7.0 (c hr-ID scaffold_121; pos 114132 to 114730)
cttatctatcttccaacttgtgcggcctattccaggtgagagtttaatctttatcttataggtaataaatgtggtgaaacaaaaggaacataacgctttacaacctaatcattttgtgccccttttggatgttccaagtcattttttgggaatttacaggaatgtgcaaaatccacgtctcaagactgacccttgacaaaatgctactgttttcttggatatatatatatatatataacattttgtattggattttatttttctcaaaacatttgactattaaagtttcagcattaatattgtctttagggggcaacaagttttactgtgcatcctatttatttttccaacatctttgagaactgagtaacatttcctttcaggcttgtctgacgaaacttatgccattgacttactaagaaacaaatgacgaataatataaccaacctcatgctttgatggtggggtgaaatcaacatgctttctagaaatcgggctgctctctgttcatttttttcttgtccctccttttgctgatcttagtttgtgtaaaatttgtttcagaaattttgatccttggctgtggaaggtacattgaa

SEQ ID NO: 88680 - DNA, 653 bp, Citrus clementina; identical to SEQ ID NO: 79808
  Intron number 1 from transcript clementine0.9_025911m (loc us clementine0.9_025398m.g) derived from phytozome v7.0 (c hr-ID scaffold_52; pos 585458 to 586110)

SEQ ID NO: 88681 - DNA, 746 bp, Citrus clementina
  Intron number 2 from transcript clementine0.9_015225m (loc us clementine0.9_013349m.g) derived from phytozome v7.0 (c hr-ID scaffold_44; pos 1582053 to 1582798)
ttttcttcgaccaattcaattgagtggaaacggaggtatgcctcctgcttttttcttctcctagagctgaatttgatattgctttaagggtatgtttgtaattacatatattgtgcttctgctacttaactttgaaagtacaatgtttaaaatgtttggtggtttatagtaagcaataaccacttttacttggcaactaatgttctatttcatagcaattgtagactaaaagccacagcttgtcaatccaaacatatcctgaattattgaaatgagttgttgattaatgattagcttgaattgcagggtgtagattgaaactcactgttgtttagcttaattacacgggacttatggactcattaagtcgggaatcaggagtaaaaagttgatctgaattggatttgatataactcaaactggctggaattcttgtgtgtttccgactggttctggataatttatcttgttttaaggatattccattttttttagatatatatacgaagttcttatctggctagcaactgtttgttttgttattttcttgctcttgaatgtcagctggtagccaagtgctaatcatttaaaaaggtatgtgttgtggattaatttttttttctaatccttgtattagtgaatggttagagttagttatttattaattagtattcttctatgtgctggattgggctgttgatggtaaattggggtgtttggatctaataaaacaggagaaatttaat

SEQ ID NO: 88682 - DNA, 696 bp, Citrus clementina
  Intron number 3 from transcript clementine0.9_031689m (loc us clementine0.9_031689m.g) derived from phytozome v7.0 (c hr-ID scaffold_1156; pos 1053 to 1748 reverse strand)
tgcagatcactttaaagaagtcttgaggtacactatatttcttctcctgctccctctatctggtggtgggctttcctttctgtaaatgctggtccattttcttcctagtgcaataatggaagtgttttgctgactgatggtagatgacatatactgttattcctattcctcaccttaattaagggcttagctcaagctgtttacttaaattataaaccgactcaaactttgtgtacattctattaactcagtgcaatttagttcaagatacaaagaaaaattgttcgtatagctgtaaatgtcagtaatagttgtttaactaaagcaccaccactactgcaagttgattatttcttaggaaaaaattgaggaaagatagcaaggaagagtacttgatttgacatgagactaacctaatcttctacctctcaaaaaaaaaaaaaaaaaaaaaacaaatctcaagtacttcaactgaaaaattttcataatatccagttacatagttacgctgatcttatcatcattacactgttacatggctatatgcttaaaaatgctggaagaaagtgaaactttattgttctttgtccataaggctgccaaataaccgtctgtactgaatacaatgtatgcctttactgatagatgtattcttattaatgtttgacagagcaaatcctgtgcaagctggatctc

SEQ ID NO: 88683 - DNA, 609 bp, Citrus clementina
  Intron number 1 from transcript clementine0.9_003000m (loc us clementine0.9_003000m.g) derived from phytozome v7.0 (c hr-ID scaffold_39; pos 1952093 to 1952701 reverse strand)
tgaggccattgtccaatctgagagtcaagaactaggtaccatacatattttaccttattatgtttttaaccactgtactaaagcttaactatatatttaatttttttaaaaaaataataatttaacagctaacaactaataattttatctatcaactatctctgattccattccacaaaaacttttggattaattcaaacctgcccttatattgttttttgcagcttacttgtgtctaaaattttggtatgattttcaagaatggtatctttgagtttgagagtgcaattggtggctaattattcttttgtgtttgactgaaatagataaaaagtgcctctttaatgtagacaatacttcgtatgttagttaatattgttccttagagattacaaacatagatgaatctattcaatttggtcatgtaaagacataataattaaattgacatataacatatttactttcttcctctcctctcgatgccaaatgatcaagagtgatatacaatctgttttttgttaatttatggtaatgttcttaatcattgcatatatttcatgattgaatacagcagaatcaaaagattttcagccacgtgctaagtac

SEQ ID NO: 88684 - DNA, 851 bp, Citrus clementina
  Intron number 2 from transcript clementine0.9_001070m (loc us clementine0.9_001070m.g) derived from phytozome v7.0 (c hr-ID scaffold_104; pos 658995 to 659845)
ggcgcatttggcatcttacccgcaaaaagaaacaggtccttcaatttttgtcttgcaatgttacttagttttagtggttgtcttcggatgaaatgtgatatgtgtttttgttctttatatggctgttaatgctttggaatcttgaatattcgaatagtgagtgtgtttatttttaaggattggttgcaatatatttcatggttgtgctagtgattaataaatcgaactacatccgattttggtaaagcatcaatgggtgacgatctattaatcagtctcggagcctaattatcaaagaaaaattttaaatgttatcatgcggttaaatgagttgaattcattatacttcacaatctttataacatatggatatatttatggactgtgtgcttttatgttcctgttaattattttgctaatgattaataaatcaaaatgtgtatgtcctgttttggtaagcatcaaaggaaggatctattactcggttttagaacctaatcacataaggggaaaattcataattgtaaagtaatagatcttttcagtgtcagtgctatgtgtgcatgtgtgcttgcacaagttgtttgctgatttgacaaaggttttgcaatctctccattagcattattcccaaatcagccggcaatcacattggctattgtagtttctaaaactgagagaaacctatgaacaattttttttttttttcacttgtgcacaaatggtaacattctagtcattaatccaacttctgtgctagtaaatttcagtttagataaattttactttggtttttataataacaatataattatgttgctaaactagcaaacattatctgtacagttgga

SEQ ID NO: 88685 - DNA, 719 bp, Citrus clementina; identical to SEQ ID NO: 82582
  Intron number 3 from transcript clementine0.9_033980m (loc us clementine0.9_033980m.g) derived from phytozome v7.0 (c hr-ID scaffold_54; pos 414568 to 415286 reverse strand)

SEQ ID NO: 88686 - DNA, 909 bp, Citrus clementina; identical to SEQ ID NO: 83772
  Intron number 5 from transcript clementine0.9_016987m (loc us clementine0.9_012558m.g) derived from phytozome v7.0 (c hr-ID scaffold_16; pos 417106 to 418014 reverse strand)

SEQ ID NO: 88687 - DNA, 219 bp, Citrus clementina
  Intron number 2 from transcript clementine0.9_016987m (loc us clementine0.9_012558m.g) derived from phytozome v7.0 (c hr-ID scaffold_16; pos 418380 to 418598 reverse strand)
tctaccaagcacaaaaattcagctcctttgcaagggtaacttcattcttctaatattatccaacttttaaagtttcgtgcattttctgtttggttcccgagaaaaccgaaggaaaataattgaagcagtgtaacaacgttcattcttctctattttttatttttgattgcttatttcaaacttactaacgattgagcagttggttgcagagaattcaaa

SEQ ID NO: 88688 - DNA, 534 bp, Citrus clementina
  Intron number 2 from transcript clementine0.9_015045m (loc us clementine0.9_013761m.g) derived from phytozome v7.0 (c hr-ID scaffold_39; pos 597416 to 597949)
agatattgttcacggatccactttgctctcccaaggttagccgaaaagagtttagttgttcagcttgtttgtgttcattttcagtcttttaagaaacataatgtacaatgttcccatttctttagaattatgcgagtctatgcttcaggaggcaggtccattgttcagcttattttttattcataattgtggtgaaatagccatgagcatgagttgtgtaggtgaaacaatgctaggacctccgaatactggtgtaccacaaccatgatcttatttatttttcttaactatttttgttattgcataaaactcttggtgtgtttgctcagaatgtatagtgtcagttgcattcagcttatgaagactttgctgtgtgttttaacttttgaattgttgtgcaggtcgtcaattccaatggattcatgtatttgtaatagattaatggtgtgagtttgatatggtttttgtatttctctgctatacgttaataaattgttcttttttcaggctgtcagagaacaactagtgcaattg

SEQ ID NO: 88689 - DNA, 379 bp, Citrus clementina
  Intron number 1 from transcript clementine0.9_024143m (loc us clementine0.9_023421m.g) derived from phytozome v7.0 (c hr-ID scaffold_21; pos 1231695 to 1232073)
gctcttgctcaattcctcaagatcttcaccacttggtccgtcggtttaattttctccatttttcgttgtaattttattttatttttttcgcagcatttctcttcatttggttggttacgtgttgcaaattttgttgatttgatattttgtctgtataaaaaagtagattgaccttttcattagggcttggagctccaagatgctccctttgattgtggttgatctccaattcaaagaataatggatgtacgatataataaatgttaattgaattgaaaattagtttaagcaaatgtaattaaaaagttgttattttgaaataaaaatgtctcagttattctgtatgtttttgctagatgctcaggtataaagaaaagag

SEQ ID NO: 88690 - DNA, 1004 bp, Citrus clementina
  Intron number 1 from transcript clementine0.9_031288m (loc us clementine0.9_031288m.g) derived from phytozome v7.0 (c hr-ID scaffold_11; pos 1048682 to 1049685)
gaaggagaagaaggaaagtgaagagaaagtgaagggtttgcttgatattttgctcgattgttctggagaatcagaattcggagatcaagttaactagagatcacatcaaagccctatttttggtaagtcaagtttcactttatttatttatttactgttattaatgtttttgttacggctgctaagttacattgtttttatcttacaatttcctcaaaattaatttgctatacgttttaattgtttgacaagtaacaattcagtgatattaaaaaaaattaattttaagttgatgttaattatagtggatgtaacttagcaagactattatttattattattattatttggtaaataaggtctctgttcatttgtttaggaatataccatttttgtactttggtttcttttttctattttttgtggatcaaaagctactggcttcatattacctatatttaattttacaaagatgtctaccgaaagatgtttcttaatcaatgcaaattacctatatttgtctcttttaacatcatctttaaaaatattcatttatatttaactaatacatattgtcaattctactcaatgtcttcattgaagtggcataaatgcattaattattaatgtgtcattaatgcaagaaattctagaatacctcgatgtattacaaccaattgatgcgtgcatgatatatgtagttaaatttaatagaactaccacttgtatgatggtttttcaaaataaatgtacacatgtcataatattatttatttgttgtatgactgacatggaccattaatgcaattaacggtgtaatggtgtaatacttttaaaacaatttgagtaatgaatctccttgttctaacagatgtcttgttgctttcgattaatcggaagcaacacatactgtttttagaattttttttttttaactaacatgtagcatctttgttgctatctgtccaggatttcctcacagctggcacagatacttcatccat

SEQ ID NO: 88691 - DNA, 469 bp, Citrus clementina
  Intron number 1 from transcript clementine0.9_004443m (loc us clementine0.9_004443m.g) derived from phytozome v7.0 (c hr-ID scaffold_57; pos 1394902 to 1395370 reverse strand)
ttgctgaatttccatttgctagctttttgcactcggtatgttcttggtttgtattcagttctcatcatattatgttttccttttaaatttcttttcttgattaaaatttttagaaatatgttttagcatttattcttatgatatatgcccagaacattcatcccacttatccatgagaatccttgtctggtttgattttcaattgagacatttttgggaaccttgagcaggttccatatgctaataatctttgaggtaaggtgttgtaggatgccttgagaagccaaaaacctattacaaggaaaagctcttgcattgttttgtgcaatctgtgtgcgagcaagtcatgtctctaataatttcatagtttgcttgattggaattttttatcttgatatggattgtttattctagattccttggtgccactgtaggttgaaacagcaaaagattcagcaccgattttgtc

SEQ ID NO: 88692 - DNA, 772 bp, Citrus clementina
  Intron number 1 from transcript clementine0.9_001565m (loc us clementine0.9_001559m.g) derived from phytozome v7.0 (c hr-ID scaffold_44; pos 1064785 to 1065556 reverse strand)
tgtcagtattattactgtttcatactttatccgaactgcattgctaaaatagtctctgttcattaacggtttcttgacgaggacacagcgtttgaaggtaaataaataatctacgcgagtttattttatggatttttgtttttgtttttgtttttttgcttggctttcaagcatggttgttggtcgccactgtgataactgataagttttcttttctgacaatgtaactgatagcttctgaagaaaagaaaaatttttaatttttcaatttttttggattgagaaagcttaggactaaagattaaccaaggacaattaatttttaactacctcattgagccttaattttgtttctatcgttggttttaggtggttggttgatactaataacttgcttttggccccagctgttaactttgttagcattccaattttttttttttattagaatttattaaagtgacccattttggggggttggttggttaaaactgatgattggtttgttgttgatgatgtaacctgttattagtcttttgttagtatggttcattatattagggttgcttcttgcttgggtaacagtattatgtccatgattagcgttgcaattatcttggtggtgaaaggttgacgatgatatatattttgcaactgcagcagccttgctgttaaccatattttaattttcttgtattttgggaaagcaggattgactgtgagtgtttgactaattgagtttgattattttgtatttgaagagttgtaagtt

SEQ ID NO: 88693 - DNA, 717 bp, Citrus clementina
  Intron number 1 from transcript clementine0.9_012934m (loc us clementine0.9_012934m.g) derived from phytozome v7.0 (c hr-ID scaffold_8; pos 896241 to 896957 reverse strand)
aggcaagagagtagattttacaagtacttgatacggtacgttcctcgcttttgtttccgccatagttatttgtaattttgattcccgatgagatctttagtttcatagaatttgcttttagttatttagcaaaattaattaaaattcaagtaaaagtagtagaattgaaattttctggtataatttgaatataatatttgcaattttttagcatgttggtataattatttgtttccggaaattagaaatacagaacagaagattgagaagagtcttgaaaggtagattttagatgctaatttagaattgtatatcaatttattttacaattggagcactaaagtttctgatataatttaattaggatgctggcaatctttagcattttatgtataattctttgtttctggaaattggtgaaacagaaaattgattaggagtttttagagatataattttgatgcgatcttaaaatctaattttaaatttgaagatagttttatttttctttttcgatgttgtaattttgtatctaaattgaagaagaaaggtctcaagtgtatgtttggatgaagattttgtgtttaattagtttgtgtaattgtatatgtatttgtaaattaagtggctttttttctagtaaaaaaatgaaatagaatttaatatcacatgcaattgatgattaagaatgacgtcttggcttttgatttgttatag

SEQ ID NO: 88694 - DNA, 919 bp, Citrus clementina
  Intron number 1 from transcript clementine0.9_012634m (loc us clementine0.9_007593m.g) derived from phytozome v7.0 (c hr-ID scaffold_25; pos 3018912 to 3019830 reverse strand)
ggcaacgatacttatcgactcaattctttgggattgtacgtaatctcttcacttgcctcagcctatcctctgatatatatatatatatatatttacttcctctcttacttgaactgtacgaattgtaattttggtctgttggtagagaaccgcagaggtgatcaaagctttcaatatattctttgtttgtttgctgacaatctttttttttttttaacgattttttctgaaacaggaggaaggttaacttaaaatcatctaataacagctcatgcttaaacctatctagtattaattttcattgagcaaaattatttaattatcgttgtagtctttatatatatccgatcaatgcggttagtatcaatttgttattaatttggaagttctggtacgatttcttctcgtttgcataaaatttaatgtgaaatgagttttcctaatactttttgacgcgcgtaaagggatcgatcatttgcattttcattgatattgttacaaaattaatttttacaacattgatcagtgttattcatttgctgaatcatattgtttgatgcaattagattactttttcaagctgtggaactgtaattcttatgcatggtactgaggtttcatgtttatgggttttttttttttttaaatactggaaatctttccttttgtggatttattttaatttttatttgattttatattttagaaatattttctagtaattttcctgcttatttcaacagcttatgtatttaggggtagaaatggtattcaaaatgtcaaaactttcaatttctttgtattcttttagtactacgatatcatcaacaaccaaatgggtgcctgctatggttttcaaatgacagcgatatggattaatgttttctttattttttttcttgacatttcagcttacatt

SEQ ID NO: 88695 - DNA, 191 bp, Citrus clementina
  Intron number 1 from transcript clementine0.9_018265m (loc us clementine0.9_018265m.g) derived from phytozome v7.0 (c hr-ID scaffold_87; pos 538997 to 539187 reverse strand)
gattcaccaaactctcttctcattcattcaaatctgtataactcttaatctaactcttaactcaaatcactctattttcttcaaaaatgtttttttttttaatgaaaagaatattgcatagactacaattatttatttgttggtttgtttgtacaggttactctgcacgattggtggctggttagggcaga

SEQ ID NO: 88696 - DNA, 912 bp, Citrus clementina
  Intron number 3 from transcript clementine0.9_018981m (loc us clementine0.9_018981m.g) derived from phytozome v7.0 (c hr-ID scaffold_60; pos 1110858 to 1111769)
gcaaagccagactctgtctactttgttgtcaacaggttaatttcctttcttattttcatcttcttatttatatgtgttactgttagctctgcctctgtgttagcatatattatgttttacacttgattggagattcgtggcaagaattcagaaaatatgattatatatatgtcccggctgttcaaaatgggttagtagctctgttgatcatgaaagagtacacacattaaactctgttcaaaggacaccaataatatggtagctgaacaaagaaaatgcttgtctactacccggatcctgttttaagaaatcaaaaaaagttaagataacagtaaatggtaaaatccatatgattattggtagaaactctgtctctttataatctttctcattataaatgcaagctatgagacaagttactggtattttttctttaatatacccaggaaagtaaaattgggactcatctaactaatgttgggtcaagagttgctaatgtggaaaagcaaaactcttgaaataggatatccgtgtaagggagcgaaatttgaggactgcttgttagctctagtaattttttgtctatgaattaataatggtctagttgtgtatcaaaattgaggtcccatgatttattttccttttagctgactgatttttgtttttcaatttcttataaacaaattactatgttgatttctttgttgttgagtaattttggtccattcttatacacatagtttgtaccaatgaaattggaaattttcctttgaagaggaaaaagtatgaaaggaataattaagcaaatggatgtctcagaaacggaagctaaatagtttcattgctttgttttctatagctaattgatatgtcaataaattataaatatgcatccatgcagaggaggtgcag

SEQ ID NO: 88697 - DNA, 438 bp, Citrus clementina; identical to SEQ ID NO: 78514
  Intron number 1 from transcript clementine0.9_002584m (loc us clementine0.9_002584m.g) derived from phytozome v7.0 (c hr-ID scaffold_39; pos 591456 to 591893)

SEQ ID NO: 88698 - DNA, 786 bp, Citrus clementina; identical to SEQ ID NO: 81531
  Intron number 1 from transcript clementine0.9_014341m (loc us clementine0.9_014341m.g) derived from phytozome v7.0 (c hr-ID scaffold_16; pos 428121 to 428906 reverse strand)

SEQ ID NO: 88699 - DNA, 519 bp, Citrus clementina
  Intron number 1 from transcript clementine0.9_028846m (loc us clementine0.9_028846m.g) derived from phytozome v7.0 (c hr-ID scaffold_13; pos 2508586 to 2509104 reverse strand)
ctaatcgctaccctggacacaacaagtatgtatctttcacgagaaaacgatcaaaatctccatgttcttcatcaaaagttaattatttcctccatgctgtaaaattcatcagaaccatccttgaccgaatgatttttttaagttgttttttttttactaactactccagttcgaaacctaaaagaaatatattagtttgacttctgtccacgccttacatttaaaaaagacgaaagagaggcatcaaaatcaattttgagttttagtgttttaccacatcatgagtagttagtaaaacatagaaatttttaaaagacagattttgaacatgaggctaaatgattaatttactcgaatcaacaccgtcgtttgatcatattcgctatctctctctatgaattaatagtattcattactataagtttaaattttttttttttttttttatataagtttttaatttgttgattctatatgtacattacatatatattgcaggtgctcaaataggtgtttgtt

SEQ ID NO: 88700 - DNA, 465 bp, Citrus clementina
  Intron number 1 from transcript clementine0.9_021699m (loc us clementine0.9_021552m.g) derived from phytozome v7.0 (c hr-ID scaffold_16; pos 764233 to 764697 reverse strand)
gccacgccactgttcccctaaattcaaatatcgtcttattttctggtctacttttttattaaaatttcgtggtattattttcaaatttcgcggactattaattctgaatttgctcgctatagaattagaattagaatagaagatgatgcttgttacgattccactcaattattttgctgccttggttcaataatattgttcgtttctgttcttgcttacactgttagttaggataatggatatacagtttgtaaaagttcaaaattgacttatcactaggattgttactgttttatttttttttttgcccggctataactgaacatgattataatcaggaaatttaccatcgcgagcagcaaaaatcataattgactgattcacatttcaaatcaaaccctatgtatacgttgatgtatgtttatccttttgttaggaccctcagccgtttggaaagacatcagc

SEQ ID NO: 88701 - DNA, 588 bp, Citrus clementina
  Intron number 1 from transcript clementine0.9_014352m (loc us clementine0.9_013184m.g) derived from phytozome v7.0 (c hr-ID scaffold_28; pos 2697573 to 2698160)
tgttccctgcagtcactcctcataaggtattatgtcaattatatttgcattaggcttaatgatcgattatgagaaactgtggaatttgattgatgattgatgattgatgatgagtaagtgttagtattggtatgtttgctttcttatgttaggggtaatacgtttgctcttcttaatcaaccacaactatgttgtcaagattagtgttaggatacttttgatgctattgcttctctggcatgtcaaattgtcgatgactaaaaaacttttgacgctttctgcaatgaagaaaaacattgaaactatgattatattgaatgttttgatatctttcaatctcaggattgttcttgcaaggagaaaaccacatgaaacacaatgatacatttttatcttatatttcttgttttataatgatgctgctcagataagaaaatgttttgagctgcagagttttatttgtagaaattgtgcttctgttgcgaccgtgctcattagaatctgctcctttgttacctctctgtttcttgatttcttgaggtgcccatgacaggtgcaagcattgctattactactgggagagtgtga

SEQ ID NO: 88702 - DNA, 605 bp, Citrus clementina
  Intron number 2 from transcript clementine0.9_022911m (loc us clementine0.9_020023m.g) derived from phytozome v7.0 (c hr-ID scaffold_16; pos 433644 to 434248 reverse strand)
tccgtgtttgcagagtcatcaagtaagcatttttcccattgtgtttcttattctaatattttcttggcatggccatagtgcttctctaatggttcactagcttattattttgatttgacatgatatcatcaactttcgctttgttctttttctcattttctttctgtggaaattgaacatagaaggcaagcatgacttgttagagtgcttcacttcaaggcaaagacctcctaaattttcaactttatttgaaagttttgactaaagttctgtatacaactttggcattaacaagaaattaaagtacaaatagaataaagtgtgtgaccattgtgttctgacatctgagtttatcttcaataacctaaaaccacaaaattttgcttcatgtccatgccagtttatacacccgccaatgagcaaacacatcagtaattgttctatttggagcctaatggtacaacaaaccttttctttctcgcagtttgattggcatttcctgtctttgaagaaattgaaattttacttgagaaactcaactaaagcaggtgtaatccttttgcgttgcaggaaagatatctgtcgaaggaaaaataaagaacaaa

SEQ ID NO: 88703 - DNA, 858 bp, Citrus clementina
  Intron number 1 from transcript clementine0.9_022915m (loc us clementine0.9_022916m.g) derived from phytozome v7.0 (c hr-ID scaffold_16; pos 3619671 to 3620528)
ttacggtcgataattttcatctcatcacgatacgggtcagtcccataatttatcccctctaatctctgtttattttacttttcagcattcagtaaattacatatttatttgaaagtaatttatattgaagagtgaacccaaaaaaaaaaaaaaaatttctcctttggcttacagatagtatatgacgcataaaatacatggaacaaaagtcaattttggtttttgaaacggctgggtttagatttattggatttggttacattattagataattttattaaattggttataacaaattgaaagttttgtaatctgaaatacattcatgcatgtaagtttttgtttctttgttaaaacttcttgattatttgatcttaaatttcaattgagctgaaattcagcttaataagttaaggcttggaacttgaactggggccccctttcttacagattgtgtctgagggatgagtttaatccaatttgttcccttttcttacaaactatgtcatagggatgagttctatccaatgtgttcgtaacaatttgcaaacaccccatcggaaagacctttgttatggatagaggggtggattgtaacaaccctaattgtacggcaagttaaggctcggcaagtgagcttataaacacttggttaacagtcacccaggctataatagagaggagtttagtgttcgggatttagggtgacatttcataactatttccaagttgatagtagtaatggttgggcatttatttattttgtagtgcatagtgttgtgtgtaatgagcgagggcctttgtgactaatggttggcctttttgggtctttagtagggttttaagcgttgataagtt

SEQ ID NO: 88704 - DNA, 608 bp, Citrus clementina
  Intron number 2 from transcript clementine0.9_002616m (loc us clementine0.9_002616m.g) derived from phytozome v7.0 (c hr-ID scaffold_75; pos 743694 to 744301 reverse strand)
aaggttacttattacttgtagaaaatgtgaagcttatatctatccttatatctataatattctttaatcatccatttttagctgttagtagactacccaccaacttaaatcttatagttgttgatttgtgagatgcattgtttattttgggttgctaattgatagtgttatatacaagttgaatttttcagtgttatgttctcaagacgcattgtggtgaatcactatttaattgattgagaagttctcgcgggactagtggtacgctgatattctcctttgttagcaagttttgggaagggcgatgatgtgatttggtagaaacttagtaatagctagctgtttgagattcaaccaaatgattgaaaggaacaaacactcacccatcaaactccataggattaaaattaatgataagactatttattttaatgttctgcattttgtcattgacccggtgaagagagatattttactttgaacaagaatgtttgatcttgctgagagcttgttgttgtcttttgaattttaatgtttgctttagataaattgaaaagctaagagatgctgctatttttttttatctgcagctcctcaactgggctttg

SEQ ID NO: 88705 - DNA, 736 bp, Citrus clementina
  Intron number 3 from transcript clementine0.9_000739m (loc us clementine0.9_000739m.g) derived from phytozome v7.0 (c hr-ID scaffold_11; pos 2803010 to 2803745)
ctaaagaagttgtgcccctgcaattttggaaacaagttagtccattattcattttgaattctagtatcagtttttccattttacggattctcttcaggtgtgggagttggctggagagggatgtctttttttaaccttttttccctcccccgcccccaaaacacacatcccccatctaagcacatgaaacttatgagaatctttataggaataactgaactcgtgcaccatgctaattattttgtaggtctacatgcaatgggccaattatttctaataatggtgtcggctctgtccttatacagagaacaccttctttccttttctttctcgagaaactagcttctattcatacatttgcataggcacaaatgctcactcttaacaaggtcttgattctgttttcttccatttatacatgagaatacacagataggcacccagaacgtgcgtgtgttgcattgtccacaactattcatgtttggttatagttaggaaactgaatgcaagatgaaggtaaatttttttcttttaagtagttacatgtttgatcatgtctctcctagaaaggtccttttctttctttcaacgggcagcttttgtttttgaccactttgcttattcaattgtgagatttcgtactgcctttttcctcctctcttttatttttattctatttcttcttgctaaaaatttatttcactcggacagtcagcagtctcttcaaccccagtgg

SEQ ID NO: 88706 - DNA, 486 bp, Citrus clementina
  Intron number 1 from transcript clementine0.9_024409m (loc us clementine0.9_024409m.g) derived from phytozome v7.0 (c hr-ID scaffold_12; pos 4518831 to 4519316 reverse strand)
tggcttggaccctcgttcatctctctcattttttcgtatgttctctctctctctctctctctctctctctctccttgtagtaggtctttcagatccccttggaattgtaatttctgattttcataaattccaaattatatattaaattacttagaatattaattttttttaaaaaaattgaaacgaatagagcgtatttgtgatggatatgacctaattgattgcctacgcccgtgaaattgttgaaattatacatataggctgaggtgataattggataacaaaacaaataatttcttctttgattattcgattcgatgcacacttttaattacatattgttgtgctgcgtagaaacaagggcctaatgttgtttttggaaccgaataaaagattgtagaggaacttgatgtgtttgtcgtcacttgcattattggtgtttttttttcaggttacttatcacttctttcactggaagaaggggac

SEQ ID NO: 88707 - DNA, 580 bp, Citrus clementina
  Intron number 1 from transcript clementine0.9_018359m (loc us clementine0.9_018359m.g) derived from phytozome v7.0 (c hr-ID scaffold_16; pos 3211514 to 3212093)
ctggaaaggtacgtatcttaaaaatctagcttaacttcttggtctccatgcgcatatctgcactttataagacgtgaatttgagctctttcctactgaagctgatgattagctaagaatttatctgaggacaagggattacacactgcatcctttaaatcttgtactttgaaaaaagaacacaaacaagtaatttaggttacttggactttggaacaatccatatttttctcaaaataaaaaggtaatagtgttaaaagaatagtgtcgtatatctctttggtcccaaatcaaattgtaatcttttctgtacagacatttgcaataccgacaaactatacgtcgatattttggtgccccaaaattcatatataaccagcagaaacatacgtttcctgaatcgtgtcttcttctcatccaatcattttcttttgttgaatgacaacaatggtgatatcgatagctatggccacaacacagacaaggaataggctctatacactaaacctgcaacctttttttttttttttgggttcctttattcaggtggagctggtggagggttcatcttatcttggcca

SEQ ID NO: 88708 - DNA, 1051 bp, Citrus clementina
  Intron number 1 from transcript clementine0.9_019050m (loc us clementine0.9_018098m.g) derived from phytozome v7.0 (c hr-ID scaffold_21; pos 2154155 to 2155205 reverse strand)
tgctgcttacttgtattcctctaagaagcccaaaggtttgacctttaactcaatttgttacatttttcaaataatatatgtttggatgtgggactttaatatctttgatatgcgattaaaattgtttgtttgtatttagcggttggtgggtattttttatttggagagatcatgctatgatgttaacttgaatgcaatcaatgttaagagtagagataaatggaaattgtgcatttttgtgaaaccaaatgctacacaatttgaaatcttggatttgatctcaagtatatgagatccatcctattgctaatcctttttattttctaatctccctctctgtgtgtattgttgaagaagttatatttttagctacatcttcatggttcctttgtgttgggtttttgcacaatgcaaagacaatcattttggtcatggaaataaagctaattagttccgtatgagttacctgcaaagcaatgctttatgcactgtgtgatataggttttctcatgatagctggttttttaaatgtttgtcaaccgaatttgacaattttgactgtaagctcaacaaaaattgcctcaatccgactacacggattctagaaggcactcacagaataaaaagggcttatagagtttagtttgtctctaagaatagataatctttattatgatcactaatttttgtttgacaatgggttagtttatatttgactttggcactgaaatgactttagattaagttaataatcgcaaattggcttacaaagaagctcaaacttgggtaagtgtacgagaactaagctacaatagcaatcccaactctgagctcaattaagccaaaccttattcatgaatgctttgtaatgtttcagttcttcttgaaatattgtatcaatagggtttattcgttgcaaattggaacctgcttctgtgtgaatttcttttctctatggtttatcagaattgttatctgtgctgttacttgtataaaccaataatatgtgtctacagtttccttagatcctgagaatttcaaggagtttaag

SEQ ID NO: 88709 - DNA, 319 bp, Citrus clementina
  Intron number 3 from transcript clementine0.9_012084m (loc us clementine0.9_012081m.g) derived from phytozome v7.0 (c hr-ID scaffold_151; pos 77791 to 78109 reverse strand)
ggcatttaggattcagaaattccaatttctttttggtatgtgcatgtagtatgaaatatgttgcctgctttttatctattttttttttcttaaattcttctatgccgtttcttctggatatggtgtctgaactcaattgataccatcccatgttcttttctgtgaccatttttaagatgctagtttaatcgtataaatgtttgtcaactcaaaaatgcatatttttgattctgttcccaccaactcgggaaattttatgccctcttcaggctgacagcttttatactttcaaaaataatcaggttgattctcaacttgg

SEQ ID NO: 88710 - DNA, 657 bp, Citrus clementina
  Intron number 2 from transcript clementine0.9_013757m (loc us clementine0.9_013757m.g) derived from phytozome v7.0 (c hr-ID scaffold_70; pos 82755 to 83411 reverse strand)
tctttggacgcggtctgtcatctcaccttcattagattgatgaatgaacattacttggaattggtagtaatcagtacacaatcatttgataacaaagaccatagatgaatacaatccaatcaatgaagttactttagtttccctcaatagtaaagaatcaaaagccggtcgcaatgttgcctctgctgaatgaaaaatcttaatgtttcttttaacattgtagcatttcccgttgtaaaattttacccgatttctagcagattttatctgttgtcgcaagcttattatatttttctcgattgaacccaattgctcagtgcttattcatggaaacctgagagattttctgacaatcttatcattgtctttgttgttaatagtaattacttgttaatgaaatttggtctttgaagtctcttcagttaatcttagcatcattcaaagattccttgctgctcctatgctctaaaggcaacattgcatcatatgcatttgcttgctagatgatactttggttaataaagtagtgtcatgtcagttaccaaatgggaattctagtgaatttctagttatctatccctttactttttcctcttcttcaacttaatctccaaccttgcagtggaccatctcgtaaacacagcaagtttgggacat

SEQ ID NO: 88711 - DNA, 430 bp, Citrus clementina
  Intron number 1 from transcript clementine0.9_007883m (loc us clementine0.9_007883m.g) derived from phytozome v7.0 (c hr-ID scaffold_83; pos 705255 to 705684)
tctgtacgtaacgaacaagacgtctctgtttccaggtctcgtttaactctctctctctgtgtctctctgtctttatgttttcttcgtcgcttctctaagtagttcggtatcttgataaaatgaaactacaacgttttggcttcggttttgagagcaaattaagctacattttcaatttatttaccatttttggcctcgtttttttaattcctaattcattgacaattccacattattatgcaacttcgatttagtaaacaaacgttattttcatggtcataaatctggttctctgcttcatattaactgcatttatcagctgaaaatgaccgtaaacaaaaatgtcaattctataagtacagaaaagagtttatttatttttttgttgttaagctttaatttatttgattaatttaatgtttacaggaag

SEQ ID NO: 88712 - DNA, 621 bp, Citrus clementina
  Intron number 2 from transcript clementine0.9_007883m (loc us clementine0.9_007883m.g) derived from phytozome v7.0 (c hr-ID scaffold_83; pos 705718 to 706338)
gcggccaagtaagtaaccagaagtacctcctcaagttgtcaattttgatctgagccgttggttctgttatttcgagtgtttggagaccgtttgtttaccgtttgcttctccctcttttttccgttaatagtacgataacgatctcaaccgttgagatctggatccttagatctggatcgtttattccgttatttgttattagtcggttggggttccgctgggattccttcgttggttgtattgagtgagatcaagaatcagaaaattcgtaccagttttcctcattgcgatgactaccctcacacactttctttttctttcgcttttcttgaaggttatttcagtaatttaactcgttcccgccgacggttcccctccttagtttctctctcttcagaaaaagctttgctaacggttttactcgatagtgacccctgcctcattcttgagcagtgtacttcgtatctactcttattttcccaactcgcttcatctcaccgacacgtgtctttcatttgactactaattaaaaaattcttcggttattaattattaattaattgaattttgttgtttattatttttacagagctgaagtagtagccgaggccttgagtaaac

SEQ ID NO: 88713 - DNA, 496 bp, Citrus clementina
  Intron number 1 from transcript clementine0.9_004943m (loc us clementine0.9_004943m.g) derived from phytozome v7.0 (c hr-ID scaffold_12; pos 469270 to 469765)
taattgggatgtaaattgagcgtttataacgacatccaataaagaaaagagtggagtttttaatacccctctagaattttccttcttataacactcccaaatttaacttattataaaaaaattaactatcttcccacaaaatttcaccactaataaaaaattatctcttttaaacttttattgtaaatacatatcaatcctaaattctttaattattttctactcattacattatttgtatctccgcaactcaaaactcttataattttcttaaaaagaatatttttcatttaagatttaaatataaatataaatcatatgataaagagggtgtaaaaactttattaaaaaaatctatttaattaaatttttattcaaaataaaaactaaattaatttgttttttttattatttaagtaatttcaataagaaagaagttttgtgatgaattttttatatagaaagggttactctgaaaactcaataatcaatttat

SEQ ID NO: 88714 - DNA, 448 bp, Citrus clementina; identical to SEQ ID NO: 78174
  Intron number 2 from transcript clementine0.9_021582m (loc us clementine0.9_016623m.g) derived from phytozome v7.0 (c hr-ID scaffold_79; pos 1133734 to 1134181 reverse strand)

SEQ ID NO: 88715 - DNA, 675 bp, Citrus clementina; identical to SEQ ID NO: 78173
  Intron number 1 from transcript clementine0.9_021582m (loc us clementine0.9_016623m.g) derived from phytozome v7.0 (c hr-ID scaffold_79; pos 1134262 to 1134936 reverse strand)

SEQ ID NO: 88716 - DNA, 727 bp, Citrus clementina
  Intron number 1 from transcript clementine0.9_019890m (loc us clementine0.9_019890m.g) derived from phytozome v7.0 (c hr-ID scaffold_12; pos 878788 to 879514)
cgcctccaagccagacaagcgcctcattctcgttggtatctcttacttctctccttgtaattcatgcagataatatttctccgttccttttttcttcgaaactttcagatccgcaattgaattgtagtttctgtcgaaaagttcgaattttgattctatctatatgatttaaaaccgaattttgatattccaaaaaacgaaaaaaaaaaacgaattttggaaagttcaaattctgttcggtcgtggtggctcgtaagtttttttttttttctctcttaatagttattaagttaaacaggaagctaacaagcattgttacttatttaaggtgtatagagttttggtagtttacgaagagtactgcttgagttggtatccatgtcggaaggtctactttgtgtttctgtttagtcgaagaatactatggtttcaatatgtgaatgacagattgaaatgaaactgtaaactctggcaggcctgtttagagtgggacttgttgctcttttattttctgtttgctgtattttagtaacttagatttttcccgctaaagtaattaatgcagttgaataaccaaaagggacaattttctaattcctggtgattgaatgcaaatgtagagatgagtttgactaatgattcaagtcattagttagatgtttgtatccattagattattgtctggttggcaggcccacccggatcaggaaagggtactcaatcgccc

SEQ ID NO: 88717 - DNA, 461 bp, Citrus clementina
  Intron number 1 from transcript clementine0.9_014832m (loc us clementine0.9_009950m.g) derived from phytozome v7.0 (c hr-ID scaffold_8; pos 1601512 to 1601972)
ttgctattaagcagcttaatcgtcaaggtttccaggcatgaacccttttcagctctttgaaaaatttgaacattgtatttttatttttttgtttttagtcatgtggggctgtttaatttgaacgaaaaatgaaaatagaattttattatttctgtccaatttcagttaattggtatttgccagttctttaaatgttggatcttgcttttttatgtttctacggttcattttatttttttcgaagaaagcattttagcctttcaagcgttaggaatgggacataattatttctctcaatcacaggttaaacttgtgtagttttatgggaaaaaatttgataaaatatcgatccctatttatgttgaatgtataagtttctggaaaataagtatcaagactgaagtgtaattttggtggtttcgaggttttgcttatggggttcttctgttttgcattctagc

SEQ ID NO: 88718 - DNA, 992 bp, Citrus clementina
  Intron number 2 from transcript clementine0.9_026371m (loc us clementine0.9_026371m.g) derived from phytozome v7.0 (c hr-ID scaffold_11; pos 1662340 to 1663331)
aaatctaaacttgtttcagacaacaacaaggttactaattcaaacaagactttttcctgaatttatttttcttttctattttggtcaatggaacatatgctgacttctgtggaagcactacttgcttatagaaagactgcattactttatttgatttcaatttgttaaattgttgtcttaaatcttcgccaactgctctgcaaaaagttaaattgtttccttccaatcatcatttcagttgtttgtaaattcaattttgattttatgaaagttaattgtaaatgcacttatttgagttgaatggaaatagttttaaatccttgatagctaatatatgcatttgttttgccgtgagagtagatggaaaattcttccacaattcaatttgtgactgcctttgcattttggactacattacatattgggacaactttattacaattttaatgttttctgcttcttatagttgtgaaaatatgcaaatgaatctgcttcttgtagttgtgaaaatatgcaaatgaaactgtctatagatatatctggtttccatcagtcaaaaaatagttcttcaaagggctatatttatacattgtttgttttgattttatatcttaaatatgtgttcatgaatcttagttgtggtttcagataaaggagtcagttgagcaagtgaagagcagggcaaacaagtttaacgtgtctatacccattaacagataaacttattcatgtacattcctgcatgttcatgcatacatgattgggcttgttgtttaattaagcagtgcatagatgattaatttacaatgaaaaaatatccacaaacgactgtgttcttcactacccagaaaaaccggattaaatgctatggtttgaagtgatatcattgggtgtgtggagagttgtggctctggagattctactttatatgctcttatatagaatacttatttttgagttatttaatttgtggaaaattatagccagagcta

SEQ ID NO: 88719 - DNA, 950 bp, Citrus clementina
  Intron number 1 from transcript clementine0.9_013358m (loc us clementine0.9_013358m.g) derived from phytozome v7.0 (c hr-ID scaffold_8; pos 677168 to 678117 reverse strand)
ttggtttgcctaaatttgattcaagggtcttgcaggtttgtcaagccttttttttttttttgggttaaaatagatactgttggatttatgttttctgttagttgtgtgggaaacatagttatgtttgatgaagctatagctaataggaacatggattgagctttaactatagatttggactgttaaacttaacttcaataagcttgctatcacagcttcctattagtacttgagaaatcatcccttcaataatgtgttgcagaagtttgcattgttttgtgtaactgatctttggtttattataacctaacatggaagatagtagatttcttaattggtagttggagtttttgatttggtataattattatcatattttaagtgatatactgatggaatataggaagtttcttgccaaatattcacaacaaactgttggatggctttgtaaactactactcatgtagagtttgtttatagacgacaagattagataatgctggttatccatgtgtgcatgtttatgggtagctaagtgtcaattggtaacatatgttgatatgggattaagtctattataaacttcccatgtctttgctcttaatatgctggtcttgtgaaaatgtcaagggtcgcctcttggcacgtttggtccgcatgcatgttttttctcagctttgagaaattatgatttatttgttgttttgtatcttgaacacctcatggaggtcaaaggatttgattccttttgagtttgcaagaactttcattgtaaaatggttgagtacttcatgaatggcttttgttgggggtagttcatgtagccaattactgagtgctttctttacataatgcagctgtagatttgcactatcaaaatctgctatgtgctatatcttaagaaaaataatgtgtactcatttctactttcttctttcagagagtcaagg

SEQ ID NO: 88720 - DNA, 763 bp, Citrus clementina
  Intron number 1 from transcript clementine0.9_019938m (loc us clementine0.9_016796m.g) derived from phytozome v7.0 (c hr-ID scaffold_8; pos 946063 to 946825 reverse strand)
attcttatttttgttaattaatcactcccctgagtctctccctaaactttgcttacatgatttttataatgtgtatcaatcgggttaattaccagtttgtttttttgtagtaaagcttaactacacgcgctttgtttggctttttgtgcatttttctttctgtagagtttgattctagtttctgggcttgttatttgagttgttaaaatgaaactgtaggaagaattgtctatattttgattttcagaaaaccacaagatgaaattgtgatttaagtggaaatttgagcagaagtttagtttgcttttttcatgatgttaccaatttaagcttaaatttggctaaaaaaaagtttgtccaatccacgtgtttaatttggtttgaatcgtttttgattctttgaactcgagagtttcacattttaatatatgtacctgcgcgtatccagccttaatcaacttgttttacttatttaatcaactattttaatatttttaacaacatttggtttgatttactgaaataacaaatacccatcacttgaatttggcttgaatttggtatttgacatgagtcacaagtttaattacttcgtagtttgtttgggatcatgctgcttaatgctttgaatgttgcagctgatcaatttatatttgttcttcttcttgttatcgtttttaatgagttctggttgcatttactagttattttgcgaatgggttttgcagctttgtactatccctttggatacagctaaagtaag

SEQ ID NO: 88721 - DNA, 1007 bp, Citrus clementina; identical to SEQ ID NO: 81234
  Intron number 1 from transcript clementine0.9_034042m (loc us clementine0.9_034042m.g) derived from phytozome v7.0 (c hr-ID scaffold_68; pos 1160148 to 1161154 reverse strand)

SEQ ID NO: 88722 - DNA, 503 bp, Citrus clementina
  Intron number 1 from transcript clementine0.9_019442m (loc us clementine0.9_019442m.g) derived from phytozome v7.0 (c hr-ID scaffold_91; pos 110175 to 110677)
cttcttcttcatcttccacatctcattttgctcaggtactcttctctttctcgtaaccattctttttatttatttattctgttatctgtttcttgatttagttataacaatgtaatggtgctgatctgttatttattattattattgttttacatttgattttagaatttttcttgttttcatttgattatggaactgaaatttgatgcatttgattgttcgtctgcttttgtttaattgttggatttatattcttgaatatgttgagatataaatctagagaaatatcatttggcaagaaaaataataacaacccagaattttagatctggtatttttcacttatttgagctgaaaaaactttctttataagtgattcattttcacttaccatttcttttataggaactaaaaaagaggttgaattatttgctgttgattcttaaccgttttccaatgaccatgcagatcctgttgtattcaacaatttattactagctgca

SEQ ID NO: 88723 - DNA, 684 bp, Citrus clementina
  Intron number 4 from transcript clementine0.9_012064m (loc us clementine0.9_006274m.g) derived from phytozome v7.0 (c hr-ID scaffold_69; pos 1050868 to 1051551)
ttgttgtccaggtctgcttttcttctttttctctgcttttcttctttttcacagtttgtggaaaaaaaaataaaagaacccttttgtggtacttttgactactctatgaacatgtcataggttttactatgaattgttatgaggttaagaataaatacaggctacagttaggtgatgatgttcctccagttagacaatttttattgttttatgtgagaaactagaagatatttattaatgtgatgtataagtgatcactggatgagcaagatgattggttgtaggtgtctgtatgcgccataagttttatcaatattctgtccacccttgatagatcatacacttgccttttaggcaatttttattgtgtgctcaagatttttcttacaattaggtgataatgttcatcctcatggacaattttcattgttttatataagaaactaggagatatttatcaaggtgatgtttaagatgatcactggtgaggaagatcattggttttaggtaaccgtgtttgcaagatgttttatcgatatcctggctagccatgattgatcatacacttccctttttggtaatttctaagacaaacatcctcctgtgcccccaaaccaaaaaaaaaaaaactgttaaaacttatttttattttgtttttgtttaactttttcctgcaggttttgg

SEQ ID NO: 88724 - DNA, 451 bp, Citrus clementina
  Intron number 1 from transcript clementine0.9_008845m (loc us clementine0.9_008845m.g) derived from phytozome v7.0 (c hr-ID scaffold_12; pos 1778219 to 1778669)
tcttttctacccattttggtaaatccaaagttcaggtacttactttgttaattgctcaagttctatgtatgtaactgcttctttttttttttggttggaaaaaaaagcttgttcttggattctattcatttgttgttaaaattcaatcttcctttcctttgcctgtaattcggtccaatcatggttcaacagttgtgttattaaactctctttcccttcctctttgtttccccttatttgtttgaggctttgatttgagtgctaactgagttcggagtgcgcaaaaaagctttgtgctttggaattaaatttacacattattctatttgttgctatgttcctgagctaaaattggacaaactactctttgtttttaatgttcgtgttagtgttttctgaattttttgcacttataggttgcggattgtggcatcagagaattcactgacca

SEQ ID NO: 88725 - DNA, 470 bp, Citrus clementina
  Intron number 4 from transcript clementine0.9_022163m (loc us clementine0.9_022163m.g) derived from phytozome v7.0 (c hr-ID scaffold_12; pos 190652 to 191121 reverse strand)
gcaaaaccattaagctccaaattgtgagttgccattttatatctgtttaattattaggagctaaatggttgttaggcttatgggttggccgcattccagttctactgaaatttctaagttcaacaattgtgtttcgaactgagttgggtgtaattaagatagacggctggaagggttgtagttatcttaaaattcttatcacaatgctctttaagtttcagatgatttattcaaaacaatttcctctttcttgagcataagtgtcttcttcttttaaaataattgacaatgcattttcttttagataatcctatgtcttgcatttttctttatttccccttgtttgatatatgaagaactttcgtaataatgtatagcatatttttagattttgtttctatctgattgttttgatgccttttcctggacaaacagtgggacactgctggccaagagcgttttaggacaat

SEQ ID NO: 88726 - DNA, 915 bp, Citrus clementina
  Intron number 1 from transcript clementine0.9_012654m (loc us clementine0.9_012654m.g) derived from phytozome v7.0 (c hr-ID scaffold_12; pos 2189015 to 2189929)
tcgccggttagtcatccgcctgtcgtttcacttcttaaatttcttttttcttttttcttttaattgtaatagttttgtgatttgaactccaaagtccccccccccttttttttaattacttactattagttgtagttatggttcctggatttttttctccttggatttggatacccatttgcagttttttttttcccaccttgtccatctaaatttctgatttgacgagcgatttgaaacaatacccagcttgtttgcgccggtgaacgtggttgccgctatttttgcagaattattaatcttccctttagaaaaaaaaaattgcatttttactgcaaacaaggttgaaaatccacccccccccccttcatttactggtttagattaatttggtttcgtgcacttttgttgttcaacgtgtttgctgcattttggtttgttttgttatgtacagtgtgattcatcaagctaaattctggaattttattactgttttacagttatggagtttatgtgactggccatggtaaatgtaatcttaagaaatccgtgactcatgcacgagattgggttgaattttgctggttacagccttaatttggatgatgttgctgtattattcaactttcatgtgaccccagctgttacttaatatcatatcaattaaatagtagaaaaaatacaggcaagctggactggtagcttgaaattaagatcccaatttatcaaatgtcaatctaataatgacaattcttctgacgatcattgtcttaatccaactaggtttagatattctcaatttttaattaactaatatttactttttgaattactgattgtaatttcactcacattactttcttgaccacttaattctcagtcaagttgctagactggggagaagaaggtcacagg

SEQ ID NO: 88727 - DNA, 681 bp, Citrus clementina
  Intron number 1 from transcript clementine0.9_004476m (loc us clementine0.9_002089m.g) derived from phytozome v7.0 (c hr-ID scaffold_8; pos 4697367 to 4698047 reverse strand)
gaagctcgtatgtttttccttcactaattttggtttatacctacaaagttacccttatatttctatctattcgtttaaagatgaggcattaatcaaacccttaagctcttaaaagcaagtagaagcaaagtagttacttatatgttaataaaactattgtgatttgtttagcaaatagctcgagaggattaggaagttactttagtttgttgactgtatttgctcatgagtgggatgattgctatggtgctgtttgattatgtgttacttttgctgacatctgattgtgctgttccataatcgtctgtttgatgatactagaggaattgaagtgattatgttcttgattttggatgtgtattggagtgctagggatttggctttttgtttaacagtgagtttgattatgtcaaaccttaatacattattgatgtgggaggttgacaggatgcagttgcttttagataagttgtttcaccgtctgtttatttatttcaacagtttgcttgtcctctaggtcactgtatcaggattgttttcattgttaatcttctgtattttttgggtggttaatgttgtttgaattactaattacagcactcatgcttgctttcacttattttctttgctgattactttaaaaatacgcttcctgttcaaggtatgaaggtactgtttggg

SEQ ID NO: 88728 - DNA, 641 bp, Citrus clementina
  Intron number 1 from transcript clementine0.9_028942m (loc us clementine0.9_028942m.g) derived from phytozome v7.0 (c hr-ID scaffold_88; pos 548729 to 549369)
ctgaaagctttgacggttcgcacaagttaacccccacagaaaaggctgatcaggttgagtcaaatacgtttcttctttctagtgcacaacattatgaacagtatgtgtcacgggcgagtatgcaaatttaaaaatttactttattttggaatgaataatcataaaatactgatttgtcaaaagggtgatgcaaagtccaattagaggctccaaatgctgttaaggtctgactgcgtagcagtcaaagtggtggggtcatcaaagctgggttggtaagagaagttagttagaataactaacttttatttgctctgcctttgctggagctggttagtgaggcatgttatagagttcataaccttcttggcagatattatagagtgattaaggtgtcaacagagttcccataatctcatcttgaattcttggtttattcttgtcattaatgagagagtgaggcctattcttgtgccaagaaagtgagttgtgtgtgcttcttttgttctctgtgttcagtttctgagttgcttgtttcttcaatctttgattcttgagattatttgtgaccaatcatggttagtcttttgcttttgtgtccaagattagttcatctgggtttgatcgatcaaaatttacagcat

SEQ ID NO: 88729 - DNA, 523 bp, Citrus clementina; identical to SEQ ID NO: 81746
  Intron number 1 from transcript clementine0.9_021080m (loc us clementine0.9_016215m.g) derived from phytozome v7.0 (c hr-ID scaffold_99; pos 247868 to 248390)

SEQ ID NO: 88730 - DNA, 977 bp, Citrus clementina
  Intron number 1 from transcript clementine0.9_026315m (loc us clementine0.9_026315m.g) derived from phytozome v7.0 (c hr-ID scaffold_21; pos 1169576 to 1170552)
acaggtacatgtgtgacggttcttagcctaagtctcttattttacagaaatatgacagacttgtgataaaaaaattttatgtcaataaaatacgataaaattgtgataaaaatttgttctatcataataataagactgatttgtgataaatatttagattatcataaattaatgactagtctatgatagtgatttgacttaaaattttaaaatgattttgtcaaaaaagataaatcaaaaatgaaaaaaaaagaaacggtagcgtttagagaaaaagcaaataacaatgaataaacacaaaacactttatatcggtttttttttcccaagtgttcatccaaaactcaaacatctctcaccctcacacggtttcactctcgtaacaacctatcgcctcaaacccttacattagtaacagcgttgattttgtctcatgtctcagcatcgatttgccttgtcacccgccatcgatttggccatcatcgagatccacatgaggaacccactgaacgtgtgctgccaccgttgcatttcaaaaccctaactgaaaacccaccattgattaagctcaatttttttattaacacaggtaattattctccttattttctcttgcatttcaatttaattaaatttttttgtcaatttcaacactaaaggtgtagttctaagcactgaaggtttatctaaaatttgttcattgtgttggaaaaatggaatttttccttaaaagttatgtgcacaaatgtactagtttgttgaaatgaacgaaatctgaacctttagaatgatttcggttttgttcttgtgcggctaatgaccttaacattttgtccagttttcaaattggggatccaattattttcttcttagttcttgcacggtcgatcttctttgttggccgagggctttgcacctatgcttccattgatgttatcgcagccaacacagtcgatttgggtcttttaatacttgat

SEQ ID NO: 88731 - DNA, 969 bp, Citrus clementina
  Intron number 1 from transcript clementine0.9_000233m (loc us clementine0.9_000233m.g) derived from phytozome v7.0 (c hr-ID scaffold_12; pos 2314921 to 2315889 reverse strand)
cttcttcttccaattcagctaattcgttttataaggtattcgatttttgtgtcttagggtttgttttatatctcggcgttatgccaaaaatgttgagtactttattttatttatttttgttagatagggttttgtaaggtcttggaataatgaaggtaaaatttgggtaatgcttatggtttttggtaattatgagccaatttgaaattttctaatttctatttgataacgtggtatcaaagtttaagccttttctgggattgcattttatgcatctgaagttgaagtttattgcactgtttcactgtcctactatctactacttttaagcttggtgcttattgtaaaagtaacttcttcatttaacatttttgcatcagattgctatctgtttcttttctgttgtataatattctgcttgaaattttcatatcttctctatgaatatgtttggagttcttttttaatagagaaatataaccatgttgaaacaattcatggtggttttatggttggagtgttacttacgggcaagatggctgtgtccatgtccaatttcttgggcaaactgcttgatgaaaagtaagtttccgggagattattgggatgtttgtagtctggctaaattggtaaaattcgtttaaatttgcttcttgtcgggctgagaggaggagacacatccttggggtttagttttccaaaccattaaatgcatcagaaatctgagcatagatttgcatctatttggtcacttaaggaaataaaacttatggtatgcatcagaaatatgggcataataagacatacccttgggtttagtacttttctttttccgctatcatttaatgctattattctttttgaatgtttctgtttaatatatcttttgagtgctgggttttaatccttttgtttagtcaactcactcttttgtctcaccaaaccagtttgcctgtttttctccacagg

SEQ ID NO: 88732 - DNA, 863 bp, Citrus clementina
  Intron number 1 from transcript clementine0.9_017548m (loc us clementine0.9_017548m.g) derived from phytozome v7.0 (c hr-ID scaffold_8; pos 426126 to 426988)
gggaagaaaccgccagacgcgacctcttcgatcaggtgtaattagtaagcaaaattaatatttaagaatgaattttattattttattttttgcagttaaaactattaaaattgagaatttgggactctagtctagcggcttgcaagttataagtaaaagctgacttgtcatttgcgatatgaagaacgtgcttagctggcttttcttttctttgtattttttcttcacccaaaaaaaaaaaattgcgataattatcaaacaatttcagtacttagttagttctattctgtgttgatcaaaatttaaagttttttgtttctaaaagttttgcatgtgagagtggttttgcttaaaatgatagctgaactgatttttaaaagccatattttgcatttcgattatgttcttattgcaccgttgttgagattaatccgaaatcggctgtttttcttatttatatttttatgtttcaagatatcttacgctgatttttggatgggtaggagattgattttgcatttcttatacttatgaatcaaagttccatgtagtgatgcattctcataagcaagtgttttatctgagtatatggctagcataatttctttgttaaggtcttccgtgtaataactgccagatgttttatagatttatttgtctctcaaagcaaagtttcagtatcatagattaaattagaatgtgctgaaatgggatggaaattttgctcgttaactatgcttaataaatgaaagaaaccaattaatcgaacatctcatatattttgttcactgacaggaagttcttatcctttacattttctttgtttagaaactgaataggaagcttgtgcatattagtatcgg

SEQ ID NO: 88733 - DNA, 736 bp, Citrus clementina
  Intron number 4 from transcript clementine0.9_007863m (loc us clementine0.9_007863m.g) derived from phytozome v7.0 (c hr-ID scaffold_12; pos 1280777 to 1281512 reverse strand)
aggtatttggtactcttgtatttgttgaactgcggacttggaattttgtaatggctctgctaaggagattagataccttagatttggtgaggaaaaatgtcatgtaattggtctcttagctgatatctataagttgctttagtttggtgtatggttggtcatatttgtgcataaaagacctagacaatatgtagcatgcatgctattttcactaccaaacttgcgagcaagatttatactgaacagtcttgagttggatgttacagaggagatggctgtctttactagtggctgtcgtcttggcctcctttttattttacttgacatgattctgaggccatcttctttaatttaatgaatacaagttattagtagccaatagaattgcaaagtagtttatgaatatttgagaagcacaaaatatagttggtgaaaaaattcaaatgagcaataatgtcacttaaaatgttgatgcatcctttagtggctgaattttgtaccttgttttgaaagtgataggattttctattagcttctatcagtcttcatgttaaattttgatgcctatgaaagaattgcgaaagcattgctgttttagaattggagttcagagtttaatgagagtggatttttcccatttattctgaaagtgtgtagatttaaattcattatttccttttttttcttaatgtgtttttcttaatttaacatgaattcctgtcacttctttaggcaa

SEQ ID NO: 88734 - DNA, 576 bp, Citrus clementina
  Intron number 1 from transcript clementine0.9_003953m (loc us clementine0.9_003953m.g) derived from phytozome v7.0 (c hr-ID scaffold_151; pos 169664 to 170239 reverse strand)
ctaattttgtttctttatccattctatttcaccaggtacattttctgggtcactatttttattgtttattgtttctttttctgtgaataaatttcggtttataaagtttgtagatcgtgggtatttgagttttgatatgggattctttcagatccattttttatgtcttgtataattgattcttatcttctttaagttctttatcgttagatctaatgttgaatttccacccattgaatttctttccacccaattgaattttattgaatcttgcagctcatttggtcttctacttttagtgctagatttgtgtagatgatatcatcattgcagtgaaagctatccaattcatttgaaattaatgggacatttaatgttcaggttgaacttaacgcatagttcaagtttttatttattttgtatgcacttttgatgtggaaaattaatttttcttatgcttcttgttaatataatacttttatcaaagaaaaaaagttggaatttttatgacgcatttgggcttctatgtggcttctgttacgtatgcagtgaattttggtccaaacggttacaatt

SEQ ID NO: 88735 - DNA, 799 bp, Citrus clementina
  Intron number 1 from transcript clementine0.9_029917m (loc us clementine0.9_029917m.g) derived from phytozome v7.0 (c hr-ID scaffold_88; pos 172897 to 173695)
attcccaagtaaatatatatattttatttttacatacgagtcattctccaaatggaacgcttgtcataaaatatagatttaatattataaacatttcataactatgatacaatgttagactacaagcaacacaatagagagctattaatattagtcattctctaatgcggatgcccatacttaatacaccatataatataaaaatgaattcatattttaaaaaatacgggtacctcataattatatatacttgtttctcatgtatccatacaccatattctatctcgctatacattaaatatgtttccaaagatttaaactgtgatcctttgtttttattatgcaagtcaaatcaactgaactatcatttggagatgattcaatccccagtgccacatagatatatgagagcttttggtaattgaaaaaccacaaaatccaaccatgcaaacttgacctaaaatagaaactgtcaagctctgattagaaatagtaaatatattatgtatgagagatataaaacgcacgatatagaatgaaacatgagacacggataagtgaaacaagaattaaaatgacaacatcgaattaatactcactttcgaaagaagagaaaaagaaaaaatcagtaatcaatagaataactagagtctagagattaattacagctagtttgcctttctcaatttaaaatatcaaagctctttagtttctgttcttcttaatttttttttttccttgtgttagtattttacggtaacttctgtgatttaattcatttctaggcttttattaaagc

SEQ ID NO: 88736 - DNA, 758 bp, Citrus clementina
  Intron number 2 from transcript clementine0.9_016200m (loc us clementine0.9_016200m.g) derived from phytozome v7.0 (c hr-ID scaffold_25; pos 2277555 to 2278312)
gtcctccacaggtaattaagcattattcttctctctctctctctctctctctctctctctctctctttcagttgctgagatgttaaattaaaatgatgaaatcaaaattgtcttcattatcttccacatggtggccttgaacagtaccccttgacctaatatgcgtgcggaactatctctttcaactttttgttaccaattaaataagcgttcggaattcattagctattatcagtttttgtatacaaattgcacagtaactttcttgcattagatgtcaagtacgtgcctcataacttctccttaatttggaactaaattttagtcacatttagttcggattgaaatttgtcaaattttagcttaatcatagaaattaatgacgctgctactgctttgcatattcatagaccactatctgcacttgccctagaatatatgttttctataaatttggcctcttattaattaaggtcaaaaagtactaaatagtaattctaaagcactttgaatagctttctccctgttccttttcgagcatggctttctctcttcattcattttgtcaaaagcaaaattccatttttcttcttactcctatatctacctaattctcttttatcaaacagtttgaaaactcacaaaagcaaactgaaaataaatggactaattaaaaagaaatatcactttttccttccaaaatatcatcttaaatatctaaatagactttgttcaattaaatattatcaggaagaagg

SEQ ID NO: 88737 - DNA, 782 bp, Citrus clementina
  Intron number 1 from transcript clementine0.9_005591m (loc us clementine0.9_005591m.g) derived from phytozome v7.0 (c hr-ID scaffold_16; pos 3513028 to 3513809)
aagtatcacttggtgttcttggtgttatttctcaggtatgtttctcattaatgtattaatttacgcatgaaataattttttaaattttaagtaacttcatattatgagagaattttgatccttctcattgattagcctctcatgaaccttttaaaattttgtgctacatgcctattttttatattacattttattttattaacaactaatcaaaatcatgattttaattactttcacaaaaacttataacagacctaatcatttactcgagatgtttttaattaccaattagatagttattgagaccaaatattgaataaacattaaaaaatcacatagattataactagtgtataattgtgatgggatcataatataaaatccttaaatttgatgtagaccgtaataaaaaaaagaataaatatgatgggactaaatatgatttttttttaaaatgatgtaaacttcattaagatctctcttcttttcagaaatttattttcacctcagggctccccctgctccttggccccagtttggcaggattaaaattccaagcctcttatgccatccaaattgatctactaatcaaatactgacaccaattatacatatagagtataattctgcaatttgaattacatacaggtatacacactatgtgaaatattgaatgtaagtgatgcagtgttcaagcgacacataagaaataaccaaagtaaagacgaatgagtgtttgtggcataggttacgctcaagttggaaccgctcttcaagaggtc

SEQ ID NO: 88738 - DNA, 741 bp, Citrus clementina
  Intron number 1 from transcript clementine0.9_018084m (loc us clementine0.9_018084m.g) derived from phytozome v7.0 (c hr-ID scaffold_39; pos 887310 to 888050)
ggttcttcaggtccattgagtcgaacattgaaagggtaaaccatatttttttagtttgctttgcttgatttactgctttgtttatgtgatataggtgggttttccttgtttttttcccttttttttttcctgtgtttcattttttattcgtgaattatgagctttaagtagttgatcgcttctcaacatgtaagaatttcgaatatatttatatattatgtatgtttcgtaattgacccagatagagtttaccggtgggattgagaaaattcggggaaattttggtaattttggataggttgtttgaaattaagaagtactgggatgatcaatctagaaaatttggcatatcatacctcttcagggcgttaataacttttgcatctgatatttgacagattgcagagtggtgaataatttcctttgattcatgaaaaaatatatgcattagagctatgttttgcatgagtattctgtcatagagattaggaggtcattgggcagacaatctatccatgtcttattcttgagcatgcttgagattttttttttttttaagccattcacattaggcaggaggtggacgtgatcatgttttttgagtcaagtcgactaattgcgtgcttcggttatatctataagatacttctttcaactttaatctactgtcataaaataatatttttgcttttccatcattgtgcagctaatttttgacttccgcttcttggctcttctggc

SEQ ID NO: 88739 - DNA, 477 bp, Citrus clementina
  Intron number 2 from transcript clementine0.9_024014m (loc us clementine0.9_021523m.g) derived from phytozome v7.0 (c hr-ID scaffold_8; pos 1187601 to 1188077)
ccatcggtgttgaattcgccaccaggactcttcaggtgatgatttgtcgtttgatctgtttataacaaatgactttgatcgatttgttcatcctgttgcgtttcatgttgttagattgtccaatgagttgtttcaggcatatgaaattggctgatctgaaatttgaactgcctagcgtggggaccttagtaaacgacaccgtatgaggattattttttggaaattctatatggtcatgcttaggtggtatgtcgaatgaataaagcattgccacctgtacatccattttgtttaaaatgcttggaagcttttaaaaaagaataaaattgtggtaatgatgtggcatgcctcacattgaagactttttcttgtaaaattgcaagatcaatatgaatgtgataattaagcctgggtggtgattcgtatgtatttaattgggtttacattcagtttccataggagaaggcatcttgagtg

SEQ ID NO: 88740 - DNA, 772 bp, Citrus clementina
  Intron number 1 from transcript clementine0.9_016240m (loc us clementine0.9_016240m.g) derived from phytozome v7.0 (c hr-ID scaffold_138; pos 291809 to 292580)
attctttccactgttggtcgctgttaacacaaaaggtgagcacgaatttccagcaaatcaatttctgattttaagtgaattaatacgtataagcataaatgcataaacgtagtttctgttttgtagtgttttttatttgtggattttaatggttgtgtacttaaatttagttattttttatgtttgatttatattgtgatacttttatttgtgggttttatgatgatgttgtattttttttcatgttaaattggtaattgttgattataattgaattttatttgaattacagttgtcatacactaaactgattttttttttttaatttgaaatctgaatcgttttggatttagttgaagtctaaatgagtctgaatataaatgtttgactgacatgtttatttttttttaatatttaaatttatatccttataagtcaaaatgaataaaaagattaagttttgtagtttaaaaaatatgcgtagttaatcgacatagttttgagatataatatttacttctcataatagttttgagatataattttatcatgtttaattaatttagtggatcttttttctatttatattatcttaaatttaagttctaagtttgaaatataagtgtaccggcgatttcttaataaccccccttgtaattctcaatttttattgtatcaattgattgattagcaattctcagtttttgtaatttgtaaacttattattatggttcttcttttctttttttcccctggttgcaggttaagaaat

SEQ ID NO: 88741 - DNA, 797 bp, Citrus clementina
  Intron number 1 from transcript clementine0.9_032533m (loc us clementine0.9_032533m.g) derived from phytozome v7.0 (c hr-ID scaffold_69; pos 45254 to 46050)
tgatttccttcgctgctaaagagataaaacaacaggtgatcgaagttatattataaatacttctaatgattttaattggttttgttttatcgaaaacattatctttgctttattttacttatttagtcattttaaattttgaaatttgaattgaatttaattaaaaggtgatgtggttagtaaccacttatatttattttgtttcatttatattctcaataactacccatattttttataacttattgtaatcccgtgtctaagaaattatcaaaacccacaattttaactctacataaatattctatgttgagctaagtttttgcataacattcaagtttgtcaagtagtcattaatttaatgtttagtaaaaacttatctctgaaaaatttcataattttcttacattctttgagtttggtaagtgacctcatataatttcttttcaatttaaattttaatttggtttctatatagtctctttacttaatttgtatcatttatgattcttagattttgggctccaactttctaggatttgatagtcacattttatggcatgcttggattgattttcatgatttttagtactcgttaagtgacttagaatttgaaaaacgtttgaaaggaaatctgttttacggttctgttttaattgaccttttagtggaaataagatgcttataacttaatgtggatggttcgcaaaatcatgaaatttggataggattcactagaaatatgagactctccataaagtttcataatttttattgggtctgggctgttacaggtg

SEQ ID NO: 88742 - DNA, 477 bp, Citrus clementina
  Intron number 2 from transcript clementine0.9_026574m (loc us clementine0.9_026570m.g) derived from phytozome v7.0 (c hr-ID scaffold_112; pos 167897 to 168373)
atccccagttcagtgcccatctcttcatattataggtcagcacaagattcaaaaactctgcataatttctattgtttacaagcttccaaggaaagaatacaaaattaagcatatggcatcaatcattaatcttgaagcttaatggattttttcatttttcaaggcattgtcacatttcaattttcaaggtcacatgttcctgttacatgtccgggaaaatttgtaacgaaccattacatgattgtgttttcagtgctgtaacacattttaatttaaattattttcaaaataatctaaattaaaatgtgtaacgcagcatttccgcatcttctgtcgaaaatgacggaggtcagtttcatttgttcagttttgttttctgtttgatttttgtctcaatagtaacttttaatgtcccaagttgctgattttttggtgcttgtagtgcctgaaagagttagagtggcagtgagattgtgg

SEQ ID NO: 88743 - DNA, 917 bp, Citrus clementina
  Intron number 1 from transcript clementine0.9_027975m (loc us clementine0.9_027975m.g) derived from phytozome v7.0 (c hr-ID scaffold_11; pos 4503376 to 4504292 reverse strand)
aaggtgcttcgtttaatttaattaatttactttctcccccctaatttaagttgaatatcaagaccgagcaactatacgcatattcatttagtcgacaattttgacttttttttaagtgattaattaattttaaaattacaccaatatctatgatctttttttttttttaattttgcttgcaggtctagagaggctatcaagattgaacaacttgaagatgcttaatttaagtgaaaactcgttcaacaatagcattttatcatctctaactcatctttcatcattaagatcattaaatttattttggaatagattggaaggaagtattgactttaaaggtacataattaaaacttcatcccttctccaagctctttcattaacttgctaaaataagactcaaggctttgaattcaattttttttatgattagtattaaaaaaaacagttttaagcaatttataaatacaagttttaatggttatcgtaatttcatcttgtaatttcatatgtcttgaatttaagattaaaaaaaaactctaatagcgaaccaaacacctccacaacttattattattattattattattattatttatggtgaggttggaaacattcaacttaatttgtacttattacagaatttgattctttgagagatttagaggagctagacattggcgcgaacaagattgacaaatttgtggtctcaaaaggtactacaaataccacaaaaaatgtaaacttttacaaattaactggattctttgccatttggtttattattttataggtttgagtaagttgaagtctcttgatttaagtggtatcaaactcaaccgtagtatcttatcttctctaactgtcttttcttcattaagagaattacatctacgtgatatcggattcaaaggaaca

SEQ ID NO: 88744 - DNA, 389 bp, Citrus clementina
  Intron number 2 from transcript clementine0.9_016593m (loc us clementine0.9_012449m.g) derived from phytozome v7.0 (c hr-ID scaffold_96; pos 209725 to 210113)
ttgtagtgttaaggacaggtgagaaagataaaattgcaactctagatactcaaaactttcatgaccatcttttggtttgtgtgcattcatcaccagaatggaagttttatggtgaaaattcttgatgttgaactgtctctttattgtccctaaagacccttcgatattaggtttttgccaaaagtccatgtactaaatggttaaaatctgacttgtcagtcctaaaccattggttatagcaaattaattttgttatgtccttatgaatttggtatattctagcttccttgcttcttcttagaatcactagcaatggaacttaatcaataataatttacatcctctcaatattttttattttgatttctgatttcaggataggtttcagt

SEQ ID NO: 88745 - DNA, 392 bp, Citrus clementina
  Intron number 1 from transcript clementine0.9_020877m (loc us clementine0.9_020879m.g) derived from phytozome v7.0 (c hr-ID scaffold_8; pos 3950252 to 3950643 reverse strand)
ttctggctcaaaagaaagccaagaaaactcgcaaggtgataacttgttcatttttctgaaatgggttctcacattttccaattttcatagtttaaatccttgctttctgtttggttcctgagaaaattttatgaaaagaatgaacaagaaaactcaaattcaggtttttatctttcttgttcagttattcttatagcatttccatattttttgttgttttttatgttgtgagtggatcaaattgaaatgggttggttgcatttagcttaatatttgttaattatcattatagttccttatacttttgtttagttcttgagcaaattcagaacaacaaaagatgacttcctttttaataaaatttttttcatgttagataatattgaaagagg

SEQ ID NO: 88746 - DNA, 554 bp, Citrus clementina
  Intron number 3 from transcript clementine0.9_011489m (loc us clementine0.9_006273m.g) derived from phytozome v7.0 (c hr-ID scaffold_25; pos 1615900 to 1616453 reverse strand)
ccccaacgacaaagattttaaacaagtggtttgaggttgtcatagcttaatgatttgaataaattcaatgtcatgttcttttattcaataaatcttgtaatttaaatcttatatactaggcttcaaaatttgtgaaactatgaaggtgtttctgacatgaatatttggtgtatgatcccatacaactattgcatttgaagcgcaatatataatttgtgtcagtagtgttattgatgtgtttttttttttcctgaaaaatttaaaaattattcctgcaaatggaatttcctctgcttacgttacaaatttactattagatgaatgaattgaagcttggtttcagagtgatgagggtgttgtcatgaatatgaaacttcttactgaatgtcgctctttggttatctctttatatgttacatgttgttgtattccactaatttaccattagtgattaaattcatcaagtgctttgatcttcatgagtgtgtgggggtgtttgttttattttgtctttcttgattttcctgattttatcttttgctaaatacagagtg

SEQ ID NO: 88747 - DNA, 314 bp, Citrus clementina
  Intron number 2 from transcript clementine0.9_020477m (loc us clementine0.9_020477m.g) derived from phytozome v7.0 (c hr-ID scaffold_16; pos 1321775 to 1322088)
aagaaagtaagatacccgtcagaagattcttctcaaattcaatgtctatgctcggttggataattttttcttatgtcaaacatgctttcagaaacacccacatggattttgctttgattttgagctctcaatttaatgattaatcttacaagccttgtttctctcttatattgaactgtgcatttttggtcacttacagtgaatattttcatttcaagcataaaagatgctttaacaaacatgttttaagttttctaattctttatctcatggtctctattaattcagacaaaagcaagaggcggctgctgctg

SEQ ID NO: 88748 - DNA, 450 bp, Citrus clementina
  Intron number 1 from transcript clementine0.9_002937m (loc us clementine0.9_002937m.g) derived from phytozome v7.0 (c hr-ID scaffold_12; pos 3797908 to 3798357 reverse strand)
tttcctcatctaatcagcagacagcagataatgtattacgcaatacgcaatcttttcatttactctggaaatttcataattaatattttaatctgagatcaattcagctgtggggtcgatgtcgtaaatgttttatctacgatcaatcttttgctttgtcccagtcccacgttaagcaaaattagctttatatgaaatccaatgtaataaattgctgtagttgttcatctgattaccacataatatgccagaaaattgtattttgtgattcatcaaatgctagatttggattttgttggactgatgtactgatcttcgttccgcttcagcttacgagatggtgggtgttttgaaacttttatcttctgattccaatactcaaaaactctaatgtgtttgtttgcttttgaagcaggttgaaactaaaagcccgcgtcaggaatttcttct

SEQ ID NO: 88749 - DNA, 635 bp, Citrus clementina
  Intron number 3 from transcript clementine0.9_004900m (loc us clementine0.9_004900m.g) derived from phytozome v7.0 (c hr-ID scaffold_39; pos 1370803 to 1371437 reverse strand)
ataacgaagaaagtggtaagtcaacatactttctcttctgccttgttcttttgtaccttttttttttgttaatatagatttggcaagtattgtttgaaacatgtcttaattttactaatccactgtaatggctctgccagtaaaatattattcaaaggcgatgttgtgcttaatgttttggccattgtttcattcttcaaatcttatgaatagaagaataattgaaactcaaatttgaagaattatttgggcatagtatggtaccaatgtgcttcccagttttgcttaaaggtgtagtttgccaccgtatttatcctgatttttttttttttaatatttcactcactattgttgatctgtcaattcttggttttgtaaaaattgaattgaacatttgttgtataactttatccaagtttgttaatagtttcttgttcttgtgagtgctaaaactatggtcagtgctcagtcttatacacccaaaataagtcagttttgccttcagttaattaattcttttttttttcccccttagagatgcatggtcagtgacgtgtgttttttccccattctagagaggggcaaaaagaaaaatattaagttgttttagttcctgtgcaggcaaagtcttgtta

SEQ ID NO: 88750 - DNA, 698 bp, Citrus clementina
  Intron number 1 from transcript clementine0.9_016256m (loc us clementine0.9_016263m.g) derived from phytozome v7.0 (c hr-ID scaffold_8; pos 2017819 to 2018516)
ctcactctcctacccgccctgaccggatcgacaaggtgcttcagtttctttatttacgaaagacctacagtataattataatggcctttcaagtattttaattttataatgcacaagctttcttttttttttttttaacacaattagtgtttttaatttttacctttgggaatggtaattttgtagacctgacagtccgaagaagttgcagagaaagaatgatggaattgggtttgattcatatagaaatgaaatcagctagaaataaataatgctcatcatttacctttgattcttggttaatgagtctgtactctgttaaaatctagaccaataaatcttaacgttgtcactcaaggggtcagacaatttcacttagagaattgtattgttcatgcactaaatttgatgtttttctttgtgcgaggctctatgccaaatagtttattggtccagattttaagacaatgagggcatccgcacctgataatgtttctttcacttggttaattagctagatgatgagacctgtagcttaacttctttcttcttacactaaagtgcttttgtgtgaagctgtgcatttattttgtctccacaaagggcttgaacattttaattaactttggcatccttctgtatgatcctttcaattggatgtcgtttcatttgttttccttgtttcatgcagtactact

SEQ ID NO: 88751 - DNA, 964 bp, Citrus clementina
  Intron number 1 from transcript clementine0.9_005299m (loc us clementine0.9_005312m.g) derived from phytozome v7.0 (c hr-ID scaffold_71; pos 340408 to 341371 reverse strand)
ctccaagagcccaaatcaacaggtactgtacgtctcccgttaactcgttcttctgtacacttagtcttattttagagagctactgcttgttgtaattgctcaaactaatcaatgtcattgaatttttatatgtttgtttctttactttaaacaaagctgtggaagttttctcagaaagtaaaattgggaattttgtgggttaaagttgtctgttgggtagattgccatttgctgcctttagttgaaaatgatttctgcatagcactacttctcaagtctagtgactgatggataatggattcatttcagattgaatgatgaaatttgctttttgttcttctgctattcaccattaaattcatcaaaataaacttcggttcaggtaattggagttttcagatagagatatttttaattgattgtcttgaagaatcagtttgatatgtaattcctttttgcggattgtacattttctctgtcggattatagcttattgtcaattgaaaggtagtcaaaatgttgaaaggctcaggagataatgttgtatactagtatttgcttgtttttcgatctttgtttacccagttgtttgttgtccttcaaaattgtttatttgttttttcttttttgattgataaaatttgtttccaaattgggggttaaatgtatatttaagggtaggtttggcaggacttttatttgtagatcgtctgcgtgttcatgaattgatctttgaagtgcatggtaaagcttgatggacttacattaaatgatatttagatattatcagtgtgtttttttctttttttatgtgatattcaaaagtctatcaaattgattattccaaatgaaattttagattctcatctgttggatctgtttccagatcttgctcaatacttaaagatgttttggtgcattttgcctaggttctatcttcaaaaaagtgttttgatcatctcca

SEQ ID NO: 88752 - DNA, 752 bp, Citrus clementina
  Intron number 1 from transcript clementine0.9_006189m (loc us clementine0.9_006189m.g) derived from phytozome v7.0 (c hr-ID scaffold_123; pos 338685 to 339436)
gtcctcctctgcttcttcgtcttcttcttcttcaggtaacttttctacttcctgtgtttctttcttttgtttttatctcttttcatgtttcttttgctacccggttggtggtgtgaggaattatttatcgctttcacattctatgaaatttctgtagatgatgggtagctgctatgaattttcattttaagttgatacacactgtatgttcatgtaccaataaagggaaatggggaatctgaactatgtgttattgggtttgcattgtatttgtttcactatgtgtagtttgctgcatatgtagatgcgtacgataaggtatataattgcaaacttcaagagagtgtggatttttaatccacagtactgtagtaccaaacatacccttagttacagtctcagttatattttatcttattgttctatttatgatgatgagtctattttaagcatgatgatgggtcgatatatttagaaatgggattttcacaggcgatcttagtgtcggatgttttgcttgctaattaattgctatagttgtcttgagtgtgtgcatgtgttatgtactttgattgtttggggatatagagatttcctctatttttgatgaagcaaatgataggatttgtttgaccattttaatttgtacatcgataaatgtcttgatcttctgtgagatacttagagatttgtagtgattctactttttagataacatcttgcatgtttatgtgcataacatagcagttttg

SEQ ID NO: 88753 - DNA, 586 bp, Citrus clementina
  Intron number 1 from transcript clementine0.9_018753m (loc us clementine0.9_018777m.g) derived from phytozome v7.0 (c hr-ID scaffold_21; pos 3623218 to 3623803 reverse strand)
gcaacttccggtgacataatttttctctgtttcaggtacatacatacccaaaactagactttgcatgtatcattcttgtatttttgtaattcattcacatattcttcttttcttttctttttcttttcttttttgctgtattttttttatgaaacactctgtttcagttctgtttctggttttgtttcagtttgatattattggttccgttcggttctactctgttctctgttgtatgtatatatgtatgtatttttggccttgaattgctttgatcaccggttttgttattcttttatcgtgaattttagacaccccgttaaacttgtttggccatgtattcacttgattgttacattcagctgccatcttcatggtgggtttgtaagatagtctctgactaacatatggcattgattatgaatgatggttttgtgagatacatcatacagacgttaacttgtattaacatgtacttcctttatttaaaagattattgtttttctggcttttttttttttgtttgaaatgcccctttttgcattttataggtgaaaggaaaaaaacataatatcgcagcactaga

SEQ ID NO: 88754 - DNA, 879 bp, Citrus clementina
  Intron number 2 from transcript clementine0.9_013387m (loc us clementine0.9_013387m.g) derived from phytozome v7.0 (c hr-ID scaffold_8; pos 2372892 to 2373770 reverse strand)
agaatgtatttacttctgtaaacttataggcttgtttactgtcctgtgtttttctagcattattactctactttcacttgcaaatccctgcttctgatcaaaagatgttttcctagaattgcctatatatatgtgtctgtattaatgatctagtgggcgatgttgctcatgttatggtgagccacgctgctatgtggtgtgctctagttatctatagcttcaactctatctttaaggtgttacagaatcatgtcatgtttgcagttgctcaatagatcatttttctgtgtatacatatccacacacaacaaatgatctggtaagtgcagttctataatgccttgtgaatggtgttgaagttgtttaatctgacaggccaacatgacagtgttgctcactataacgtgagcaacgtcacctattagatcattactctctctctctatatataagagttctaaagtgtagacatctattaaaattcaaatcaacaatcagagagttgctagaagacaaaaaaatttcaacgccaattaattattaattaggcaatttcttaacatagagttgaacaaagttttgtttcttcagcaatactctttacaacaagttggtttggattttaagaaaagtaggcaccactaggcaacacaggaaaggaatatgtatatatgtatattttcatttcagtaatgcgttagtaatgtgcatggtgttcttgtggagcttttgcagactaattgtaacatttgccaaaaggagtattgtacataatatccatctatgaccatttgttttattttttcaatgatgtgaatgggagaagatcaagacattagttttgtgcagattgtcaaggtgaaggacataataccaccg

SEQ ID NO: 88755 - DNA, 560 bp, Citrus clementina
  Intron number 1 from transcript clementine0.9_013387m (loc us clementine0.9_013387m.g) derived from phytozome v7.0 (c hr-ID scaffold_8; pos 2373861 to 2374420 reverse strand)
cagcctattggtcgcggcgcatacggcatcgtttggtataattttttttcaatctttctttttttcttttttagcttttggaagtaaattatgtcgagaatttaggctgcttaatttcctgcaacttaaaaggagtgtttgattcggtatcggacaagttctggttttgcttttttttttttaaagtaaccatttaaattatcttaaaatatgaaataaatatttaaaaacaattcgctgttttctactacagttttgttcatagtacatgaagaaaagctaaaatgatattcaaattaaaaaaaaaaagtatttttcttacaaagaagattctagaatctctctatttaattatatttttattgtttgggcatgtttggtctggcttttttaagctgaggatttataatttcagtttaatttatttttgtattaattgtgtatttaatgatgatttggttattacttattaatgtaattaatgttttttctgatgaacaattgaactttgttaatgtaatgcagtagtgctgtaaattcagagacaaaagaagaggttg

SEQ ID NO: 88756 - DNA, 490 bp, Citrus clementina
  Intron number 1 from transcript clementine0.9_013362m (loc us clementine0.9_013338m.g) derived from phytozome v7.0 (c hr-ID scaffold_99; pos 254047 to 254536 reverse strand)
cccacctgcacaaaggtttaaacaaaaccctgaaggtgattttaattatagcccttttttgctttctaattgcttcttgtatttgtatttttggttaatttgatgtattgtggagatgggttttgtagcttttattagtttatccaatgagtttctaataaaatttgaattctgcatattttgatggtgttttttttttttaatttttaaacgtgtttttcttgatgaatttgttgatttcttgaagtgcggagtttagaaggttcatcttcaaagaataggaagtgaagagaatgaagttttggctgtttagttcttagttgtattggagttcgtcaatggacctttttaatgaagaatgaattaaagattaaaagttttagcttttccttttattgaatatgctgctgatttaaagtatttttttcaatagagaatgtaagttgagtgttttatgttgtactattaggtgattcacattttttggagg

SEQ ID NO: 88757 - DNA, 638 bp, Citrus clementina
  Intron number 2 from transcript clementine0.9_010717m (loc us clementine0.9_010717m.g) derived from phytozome v7.0 (c hr-ID scaffold_99; pos 644732 to 645369)
gtgtcagcatctggaatacccgagtattcttacaagtatgtttttcattaatgttttttaacttacatgttatgaggatgcaagattttgaattttaagtatcatggaaacgcttcatgcactgaatttttctacttggattgaatattccactctgaaaagaattggttttgaattgtcaatatcttacattctgcaaccctgagttttaaatcataatttggtaaaaggttattaaagcttgaatgagttttaatccagtctttccagtgtaatatagtatcctagatgagaaattaataatactcggtaaatgtttggcttttgttcaatatgagaaaatgtatgtcttagcagttaggatggcttagattcatctttgttgaaacagtagtagcaataaagatgagcaggacatgcaagccccttatatagttgctgaatttactattatctgcttctcgaacttatattttgtttagagaaatatatttacactagccctgtcgatctttttttacatattttattctattgatggttcttgtgaacttggaagttttacttgaccttcttacccgtttgatctatttattcttttcttctttatgggcatgcagggatttgcagaaagctac

SEQ ID NO: 88758 - DNA, 520 bp, Citrus clementina
  Intron number 3 from transcript clementine0.9_012367m (loc us clementine0.9_012367m.g) derived from phytozome v7.0 (c hr-ID scaffold_25; pos 2731091 to 2731610 reverse strand)
ttcttgatctttgtgctgctcctggtaagcaatcttctattcttattctgttatgttattctcaccaattgtttgctaattgatgtgatgttgtgaaattgaatttgatgatatgaaaagtgatatcttcaatgagaacttcttaacctgtgggtcaaagtagtagtgctgatacttgttcacttttaattgttaaatggtctacgatatttgattatattcctttttaagttccatggaaacaggaaatttgatcaaatctgaatattgaagtaaaaaatgaatttgatttctttttacaccaatatgaactaagaactatgaagagatatttttggcatctaatattggatagttgccaacttgattcaggaaacatatagtctataaatggagtcatgttaggacattggatgattttgttatatgtcttttagttgtcattttctctgactcttttgacagattgctcacttattcattaaccgtaaattttgtatgtctaggtgctaaactttgt

SEQ ID NO: 88759 - DNA, 474 bp, Citrus clementina
  Intron number 3 from transcript clementine0.9_017244m (loc us clementine0.9_017244m.g) derived from phytozome v7.0 (c hr-ID scaffold_64; pos 419841 to 420314)
tagcacatcatcagctggagctgcagaagtagaaggttattggtgttctgttttgcatttactattattattattattttttttttcactctcttgctcttgtgttttcaagctattgtggtatatatatttttttggattggtttctgccaaatatgggttacattaaaatgcaaagaagcgtttctagtaactgttagggtaatttggaaagcttttggaagcaagtatagtggatgatattttttccttttggtttgttttggaattgttctgagatcctgtatttgaaatgtttttggatttttagctttgtaaattttgagtgaatagtgaacatatgctatcataagccttgtcatgatggaataataatgtattacatttgagtaatctgaaaaatcttgaaaactggttatattgaatgtactaattgttgtacacatctgaacacagaaactattgaaggaagtg

SEQ ID NO: 88760 - DNA, 455 bp, Citrus clementina
  Intron number 1 from transcript clementine0.9_010782m (loc us clementine0.9_006299m.g) derived from phytozome v7.0 (c hr-ID scaffold_68; pos 781886 to 782340)
tcaggtcattactcttttgctcttacttaagaagcattaaactgggtagaaaatgcaaatgttttcttgttttgtttgaaaagttccaaaccacagttgaagtttttgtgtcagcatacatgacatgatttcaccttgttacaatttaaagttcttatactgtgcagtttacatggattctttcacctcctttattttcgctctcactgagtcatgttgccttttatttagtatctaaaaaccttaggaagtgcatcctggcaataatttgcttaattttcgaaagatgattgtggtttcttgacaattttttgaattctgtcttcaaaacaaaattccaaccatatttttgtttgatgtgatactatgggactgttggaagatcttctacaatttcatttggaattatcataattgcagatcaaaagcaattcctcggacagtttggattacgt

SEQ ID NO: 88761 - DNA, 264 bp, Citrus clementina
  Intron number 1 from transcript clementine0.9_016872m (loc us clementine0.9_016872m.g) derived from phytozome v7.0 (c hr-ID scaffold_35; pos 1475431 to 1475694)
agagacccatctgaaaaataatctcagatttcacggttagtttaaattccttttttttattttctaacaatattttgaatgtatttataatgtgctgatgatttacattatcaaaataaaaagattgagactcaagtttagagtaaaagaaaaaaaaaaagaaaaagatgtcatatttggtagaaacaaaatgcaggtgtaactttctaatatcttttatttttaatgttttcttcgtttatttgaagatttctgttgattcta

SEQ ID NO: 88762 - DNA, 989 bp, Citrus clementina
  Intron number 2 from transcript clementine0.9_021150m (loc us clementine0.9_021150m.g) derived from phytozome v7.0 (c hr-ID scaffold_39; pos 364442 to 365430)
atcctctcccgcgattactccaaaatcattaaactgtacgcgcgccttcatcagatatttctttcgttcgttttattaatttcatctcgtgttcgtgtgttgtatgctttgagtcttattagtgatttaaggaggggtttactaaaatttcggtttcaagtttcagttgttagggttttactgatgcttgccttggtccgatttttaggattttatatgtaaaagatgtgggaaattattgaaacatgctgcttaattttgataattatatattcaatttcatcaaagaatcatatagtggataaataactaggcacagtatctcgggcatatgattcttaatttgccgaggtagttttagattcaatatattgagctataagatggactgcattctataaattcaaatattacaggctgtgagtttagaggttatggcttctggcagacattggatgtctgttccagtttgacctaatctagcagtttgatgacctggtgaagaatggatgtgttcactttgacttgtgttttggcttatagagtaattgcaaagcagagttcccataattccttggcttctcttatgagtatactgccggacggtgatcttaggcttttagttatgcgaggaaaactgcaattggacaacattttgattttctaggcactcttgagtcaaaacacaagtcaaagtgaacacatcaattcttcccaaggtcatcaaactgctagttacttcaaaattcatatgggtgctaaaagaaggaaatttatttatttcacgtactcaacttttattttgtttatgatgttcggttcttgtgctgcactgtgtttgttgacctaggatggtcatcccttattcttttgtttctcatattgttggacactttacggttggcaaatggttgttggcaaaacattttcatctgagtctgaataatgggttctttcttttatattttaaccttatgcagggcagacaa

SEQ ID NO: 88763 - DNA, 470 bp, Citrus clementina
  Intron number 1 from transcript clementine0.9_034500m (loc us clementine0.9_034500m.g) derived from phytozome v7.0 (c hr-ID scaffold_57; pos 1505454 to 1505923)
ttgctgaatttccatttgctagctttttgcactcggtatgttcttggtttgtattcagttctcatcatattatgttttccttttaaatttcttttcttgattaaaatttttagaaatatgttttagcatttattcttatgatatatgcccagaacattcatccccacttatccatgagaatccttgtctggtttgattttcaattgagacatttttgggaaccctgagcaggttccatatgctaataatctttgaggtaaggtgttgtaggatgccttgagaagctaaaaacctattacaaggaaaagctcttgccttgttttgtgcaatctgtgtgctagcaagtcatgtctctaataatttcatagttcgcttgattggaattttttgtcttgatatggattgtttattctagattccttggtgccactgtaggttgaaacagcaaaagattcagcaccgattttgtc

SEQ ID NO: 88764 - DNA, 612 bp, Citrus clementina
  Intron number 2 from transcript clementine0.9_002488m (loc us clementine0.9_002488m.g) derived from phytozome v7.0 (c hr-ID scaffold_44; pos 1633213 to 1633824)
ccgctcaggtgagtgcctatgtatgctaaaaactttctgtttacgtaaactcaagacctatgaaaattagataattagttaatgtggtgaagctttgatttttttgggggggggggggagggggtcagaaccaagataattatatagatgtagaaaatgtacgtagaggagggacaagaaacccacaaataaaaagcgaaaaaatccctaagcctaaaaactaaaaatcctataggatcataaattctatcaatgatatcacaccatagtggtgaaactttgagtgatcgatactcacttggtatgatatatagtctcagctttcctaagttgtttaggggtacgttttgattgaggtgttgtggcttttaatccataactacaatgaaatggaatattaactcttaaaatataaatgaatagttgtttggtaaataaataaattttaattgccaaataaaaggggatgtttaccaaactctttagctgttgtgcttacaaatttaagaagaagcacagcagttgcgaacataccctatattgatctttgccaaagtggagttttgagtcattatgtgtattgatttgtgacttttatgtgaagataaaaaa

SEQ ID NO: 88765 - DNA, 685 bp, Citrus clementina
  Intron number 1 from transcript clementine0.9_028728m (loc us clementine0.9_028728m.g) derived from phytozome v7.0 (c hr-ID scaffold_13; pos 157888 to 158572 reverse strand)
ataagccttgctacttagtggttgaacttgagcacaaattattttaggctattaaagctttgattcaaatattgatgatgctggtagtgaacataaaacgcaattgaataaacttgaggaattaagaaataatacatacgggaattcaagaattattaaggtaagaaaccaagcttttcatggtaaaagcatttttcaaaaaatatttatattttctttatagagcactgcttcccagcatatgggtccacactgtagagtttatataatttttgaaaactgaaaaaataaaagaggaagctcagtagtcgtagttctggagagagaaaactaaaaaaaacttttatacaacacgatttagataatttgcagcttgaaataaaaattccaaattgaacaaattaaatttagtttagaatttgtagcgacctgttcattatcgaattgaatcactcatttggaatttgtagctactggagcttcgtcattgtagcgtcgccgttgagtcttttttttcaagtgagttgcatgttgatttatattcatcctctttaattatttattttagctccctaaatttgtgttttttcttctttttttccctttatttcagttgtagtaaaatgaatgctcagaatgtggctggccagtcaaactgtgaggatagtctctacataccagaagt

SEQ ID NO: 88766 - DNA, 537 bp, Citrus clementina; identical to SEQ ID NO: 82691
  Intron number 1 from transcript clementine0.9_034061m (loc us clementine0.9_034061m.g) derived from phytozome v7.0 (c hr-ID scaffold_12; pos 1022898 to 1023434 reverse strand)

SEQ ID NO: 88767 - DNA, 824 bp, Citrus clementina
  Intron number 1 from transcript clementine0.9_021661m (loc us clementine0.9_021634m.g) derived from phytozome v7.0 (c hr-ID scaffold_12; pos 3439103 to 3439926 reverse strand)
cgctgtttctgatcaccgagttgtttgataaacaggtaacaatcgaaactccgttttgttactgtatttttgtatcgaattcgaactccttcgttgaactagaatgatcacttgctttttggcttttttaggtttttttttttccttgaaactctggaattccaagtatttttaattgtagcttcactgtttttttttttttatttagatgttatttgtttagctgtttgttttctatgaaattagtctttaattgagttttttttttaatggttagagtttatccactgtaaatttattttttcctggtctagattccaatttttcatatattttagcttttggtttatttaagaattatagttaatttctttctgttcttcatttaaaccatttgattaaggataagtgattttttttttttaaaaaaagtaattaattagtggagttggtgagaaaagtgtgctttgacagatgctcacaagtgtatgatagagagatcgaattgcgatagtagatagctgaatgagaaaatactttttgatcgtattatcgtttggtctctgactctcttttagctttaggatttgatctgttacttggcttcgtgtttccccttggaatgcttgacaagttttccatcttatcctcgttgtttttttattagtttccttaattggctgctgtggtgcttgcacttttagccttttaggtttgtgtttcacaattcacctattatgcaggggagtatttggctgcataaggcaattaagtttattgtttgcgctaacctgtgtggcattttcttgcaatgaagacagaat

SEQ ID NO: 88768 - DNA, 759 bp, Citrus clementina
  Intron number 2 from transcript clementine0.9_008929m (loc us clementine0.9_008929m.g) derived from phytozome v7.0 (c hr-ID scaffold_12; pos 3575097 to 3575855)
ctgttcttcttgcttcccaggttagcagctctgtactatcgattgttccttcaactgatcatacacattagtttattcattttactgggagattgaaaagactgcctgcaaggcaatgtatattttccttaaatcacggccgttaggtttcggataagggaaaatttttccgagagaaaaacgagaagaataacaaacgtaacaatagaaacgcactctataacagttttccagccattaaaacgtataatatcattcatgcgaactgcctcataataaatgtgttccttttgtttcagccgttaatgtgtgtcttgaatactagaactagtctttttattgttgataaatattgactttagacctgcatttcctaggaaacacttatttcaggctaacaggttgactttggcagcacatctgattatttcctacagctactaaatcaaaaataagctctaaagtctaccaatgacatttatcaaacatctattaacttttccttgacagcttgagctttcattcccaacaattgcggcttaaagagctatatcactagaataccaaaaacggagtctaaagcatgtttctctactaataacaagatgcatcatgctgactattagcatcatagtttctattttgagaactttcatttataatgcttaaataatctgatgattagatgatgaaatgatttgtatcacgatctaatccgaattgattattctttttctattttttatcaattgggctagg

SEQ ID NO: 88769 - DNA, 892 bp, Citrus clementina
  Intron number 8 from transcript clementine0.9_000145m (loc us clementine0.9_000145m.g) derived from phytozome v7.0 (c hr-ID scaffold_81; pos 341348 to 342239 reverse strand)
ggcaggtattatgctgtcctacactataattttttatttatcataaatagttaaattccatatttaataatccaatgtatgattgccggcttgaggtcgatgttacttctaccaagcacaacgaacccccccctgccccccccaaaaaaaaatccctttttctaattcatctttttgacacaaggtcactgtggagtgctttgcagaaggttgaggatgagttcgtaaaaatttggatttacacgtgtacataatgaagactacctgtgttaattatatgattatgaagattacctgtattagattatcataatttggtgttctggcgaatcaatttatttatacacactgttgtcatttctaaagtggtacaattgataccagggatactttctttaaaggctttctagcacttttggtttgcacactgggtttaagctagacctgttgccatttttttctttgtttgggggggggggggggggggttggatgtaaaaattttatgtagctatttccgttttttttcctaactcttgtgttttccaagattggtaaatttttaaaatcccctttcatggccatctcccctttaggatcttttcccattttaaaggtttgggttggaaggccccccccccccccctcccaacgccttcccctttgacaaatgttaaggatttattaaatattgtccttgtgtaagttgccattgctgatttgatgctgtaatacctgttagcatatcacattagtgttgaatagagatgtgctttcttttatttgacacatactactggaattttatgtatatcgttcactggatggtttctactgactgacatcttattgacatagtcttgtgcaggttttctgtgcaggaatacagcaaa

SEQ ID NO: 88770 - DNA, 557 bp, Citrus clementina; identical to SEQ ID NO: 79999
  Intron number 2 from transcript clementine0.9_000145m (loc us clementine0.9_000145m.g) derived from phytozome v7.0 (c hr-ID scaffold_81; pos 345899 to 346455 reverse strand)

SEQ ID NO: 88771 - DNA, 638 bp, Citrus clementina
  Intron number 1 from transcript clementine0.9_000145m (loc us clementine0.9_000145m.g) derived from phytozome v7.0 (c hr-ID scaffold_81; pos 346526 to 347163 reverse strand)
tctctaagctcctcactgcgtattgcagcttgcaggtactttaatttggtttcatttcgtaattttaattggagtgcattctattaatagatcaaaatcacgctgcgacatgattttatttttgttttaattatctgtttttgcaatgtaattgtgcaaggctataaattttttatgtttagtttttcttcacagaattgagtgtgtgtgattgtgttctgtgcattcaataaaaatggtgaaaaaaaatatatatttattgttggagagaggagattccccagctttaattgctgaaccattactccgatccgttacctaccattaagcagaacagacgtccacccctacttcgaagataagcaattctaaggttttttgactcttcaaacatgggatcaaatataatttgttttaaataattcaacccaaagctttttatctcgctaccaaacatgccttaaaattattttgctttgttactgccatttatataaaattctgaaaaagaaaaaacaaaaattaaaacaacatctcaatcaagcacaatagtgctaattttctcctgaatccaaatctctttcaattttttttttaacattttgcacagaattcaattgagaaccacccggaccacg

SEQ ID NO: 88772 - DNA, 899 bp, Citrus clementina
  Intron number 1 from transcript clementine0.9_029676m (loc us clementine0.9_029676m.g) derived from phytozome v7.0 (c hr-ID scaffold_54; pos 202804 to 203702 reverse strand)
acggtatattgaagatcgtttgtttatttttgtaattttttaattttttgctccgcatgttgtgtgcttgtgttttatgtggattttatcagggttttggagtttgtttgagagaaaatggctattattattattattttttgttggatgctttttaattactatgtttggattctgcattttcttttctgtttttctgttttgaatatctaggcttttgatgtcgtttttgagattttgtttttttggtgaaaatgtgattattttagtagtctgcattttggtttagggtttggtttggtatctctttataaagtgtttaatttttagttccattattgctttcgttggtcaaatgttttcaatgtgttgtttattttttattttttgggtcaaattaattgtaattctcagttcagcaattcaggttctgggattattgtggctgtttggtgatatttactcatccactctttcatttgattgttttgtggttttgcatttaatgtgttttttgtgggttttgggggttttcaagccgctattggagtttttaggtggaaatgatgatgatcagaggggtatttgtaagatgtggaacgacattcatgctttcatatggttactttgctttcaaaaggaaaagaaaaattttatgcatgatattgggctttacctcaggtggtctttttattttttagtttatggcatattaagatatcatttggtggaattggcttaacctcttgatggaattttttttaatcattatttatttatttattattaatgttattataatattaagtctgaggaggtttggttgatgttgcagagtctattttgattaatcttttaagctgaccctcctccttttctcatcactgaaaatagatttt

SEQ ID NO: 88773 - DNA, 674 bp, Citrus clementina
  Intron number 2 from transcript clementine0.9_006927m (loc us clementine0.9_006927m.g) derived from phytozome v7.0 (c hr-ID scaffold_21; pos 1536557 to 1537230 reverse strand)
aaccatttctcatctcttggttagcaccaccttcttttctaacgtagtaattattattattttttccgttactcttggagattctttatattaacacggtgaaatagttaaaggacctctgttttcattaaaaaaaaagaagaaataatctgctttaaatatggtagtagtttcattttgttgcgcgacgatccaagatctagcggttgccaggctgtagtttgatcacacatctttacacacatttggttgtcttgaacttcatctatatggcccctttaatcaccctgtaagttgcaacttactgatagaatgagactaatttgttaaatcatgatactgaattctatagccttttaatgttttggatttagatccaacaaacggaaaaaaaaaagtaaagaacagagatagtctactttcttggatttgtggtccttgttagattattgtaagtgataatgatgtataaccaattttcaatctaattgatgcacatgggtagaatcaaaatcatatcttttttgcacatgagtttgatgaatacgcaaatttctcatggtttgtgaacaaaatatgtgaaaatcatgtggccctagttcatgttaaatctagtttaataacaatagactaattaaaaacttaccatgatatgctgtaatttttgtccagga

SEQ ID NO: 88774 - DNA, 871 bp, Citrus clementina
  Intron number 3 from transcript clementine0.9_013462m (loc us clementine0.9_010702m.g) derived from phytozome v7.0 (c hr-ID scaffold_12; pos 525791 to 526661 reverse strand)
acgaaggttcgagaccttcaaggcgacctcagaaggtaaattttgaattttcgcttgtgaattgtctcatcatcacagtcatcattcgtcgagcttaagtaatggctctccctttaaatatattaaatttaaaagagaaaaagtttctgactctaatttgtcacttattagttgtttcatcactccggatttttgaattgtgatcattttaattaggccttttctcttgaagggaattttagaggagaaatatgtatttgttacggtgttttgcgtctactaagttattgtattttatattaagagttacttaattatgccacagattgttactgtggcagatatcaaatgcacaattttggcacccacaaatgtgacatgggtttgtcgatagtgattttaaggagagaatatttgcatcactatttccagtttgagacttaactcctggggattaataatgcattactaatgaagtggaaggcctttattttacatgtacgttatatgatatacgcgtagagcaccttgcagagagaatttatgtcgcccctcacacacacacacacatgagtttttatgtgtgtattttgtcagaaataacaacttaacgaaaagatggttccaccttaagataagtctcttaataaaagaaatgtaaatgactttcagaaccgttaaaatctgtacacgacaaaaattgaaccctcagaaataacatcaattattaatttatgaattttgctttcaatgttatactattataactttcctgtcttcatgtgcagttatttggattttctttttcttttttttggggcattggctcaatgaggtgtgtgctcttcaatgtctgtaatacaggctgtag

SEQ ID NO: 88775 - DNA, 398 bp, Citrus clementina
  Intron number 1 from transcript clementine0.9_020409m (loc us clementine0.9_020409m.g) derived from phytozome v7.0 (c hr-ID scaffold_54; pos 1338535 to 1338932)
gataatcgattcccgtctccgtcttcgatcacttggtcagctctcatcaccacttcccggttctgcttatatttcaatattttcgtagatccatctttttttttaattatcaaatttttaattttattatttaattttctggaggtaattattagatttttactacgtctgctggatttcaattcatgatactcatcttcactggaattttctttatttctttgttttgtttttttttttgggtcttaaattaatataaatcttgaagctctgtttctgaagatccttaaatcctttgatatgagtttggtgcaaacatgatggacattgtaagaattgattgtatattttatttttttttaggctcacatataaataataatactacacgtcgtgga

SEQ ID NO: 88776 - DNA, 444 bp, Citrus clementina
  Intron number 1 from transcript clementine0.9_000960m (loc us clementine0.9_000960m.g) derived from phytozome v7.0 (c hr-ID scaffold_71; pos 1214387 to 1214830)
caagacaaaacgcaaataaaaggtactttgcttttctaaaactttagggcttttgtggtataattttgataaatacttctattatctgaagctaaggtttcttttgctaacgaattatttttcttatgatttatcgtcaatagtgcgagtgaattttcgagtgaagaacttgtacacaacatctatctccgctatatgattcttcctcggattttttgttaacagttcttggttatctcgttatgttttgaggttgtgatatgtttccaattgtcacattaagtctacgattctttatgcacgaaatttttttgtgcaatattcctcaaattgcaggttgccatttggttgataataactcgtggatgtttatgtatttgctagttggatttgccttgtgttatttacgatttttattaaattatttgtgtaaaatttgcagga

SEQ ID NO: 88777 - DNA, 526 bp, Citrus clementina; identical to SEQ ID NO: 81748
  Intron number 1 from transcript clementine0.9_010736m (loc us clementine0.9_010739m.g) derived from phytozome v7.0 (c hr-ID scaffold_123; pos 199883 to 200408)

SEQ ID NO: 88778 - DNA, 499 bp, Citrus clementina
  Intron number 1 from transcript clementine0.9_001002m (loc us clementine0.9_001002m.g) derived from phytozome v7.0 (c hr-ID scaffold_12; pos 3985875 to 3986373 reverse strand)
agctctcagtattttgggattgaactcaaagtttggtacgttgcgcttctataattgtttatgcatttaattttctttaattcactttctgtttggttcttgggaaaatcaagaagaatataaaacaaatgaaatgtttagtattactgttatttatctatttatttatttgtttgagtgagtagcttatgtccctgcacattaaattttcctttttttcgtattttttttctcgcattttcttggcttcaaactgagtattagtaggtgcgttaacaaaattcaagttcacagtttatgttgtaataaactgtggttgggttttggaatcatgtaattttgattatatgcggcattagtgtatgtcttgttaacaatgattagaggctaagatttattgttgaattacattttattatatttgttggtatcccttttaatcatttggattgtggtttctgactgaaataagtctggttttacagtacgtgtataactt

SEQ ID NO: 88779 - DNA, 808 bp, Citrus clementina
  Intron number 1 from transcript clementine0.9_017806m (loc us clementine0.9_017806m.g) derived from phytozome v7.0 (c hr-ID scaffold_92; pos 487702 to 488509 reverse strand)
gcctcaatttcgcgattcccgccttcttttgttaggtaactcactcaatctcatgacaaatcctcttttttctttaaaaggttatcgcttttcttttcttttcattctttgttattcaaacactgaacctttttatttttataagagctaaagtgtgtatttttcacttaaatgatgctttttgtgttaatgtacttggataaggtgggatgtgtcagcgaggtttaattgtgaattttatcattattttaccaaataatttatcttattgggtttgtaaagtgaaaccaatgtcaaaagtcagcatatatggggcgtgtttgggattgaattggctactgtaaaatgtaatcactaattatcaaggattttgtttctgagaccccctcaaaaaaaaaaaaaaaaaaaatcaagtgagtggatgatttattaacggtagttgtgaagtaacaatgggtgtttactgatagaactacagctgttgtgctttcacaatttagcaggagaacaacaattacaggcatacatatagcttatgcaatatgcaactagctttttctagaactgaagatgcttttggttatatgattatttctctctctgtctctgtctctctctctctctctctctctctttttgactcaatgatgtgatggtaagagtgtcgttgaagtttcagttcataatgtttagtttgtgagtatgcaagtactttgtttttgctccttgggtccttcctcagccttgaattgaacacataactataacggctggtttttgaatttaacaggtttcctagagcagtttc

SEQ ID NO: 88780 - DNA, 1067 bp, Citrus clementina
  Intron number 2 from transcript clementine0.9_035157m (loc us clementine0.9_035157m.g) derived from phytozome v7.0 (c hr-ID scaffold_39; pos 1619472 to 1620538)
tgcagcttattataacgggaatctacagtcctcttgtaagcgctcctattttttaagctcaagtcttatgagccatttcacattttctctatcctatttatcctatttatgcttatatatcgtgcatttcaaatgtgttggactttgatgaactgagatctgagcttctctgcttgctggattttcattcattttgtttggttttaaatttatgatatgtatcttgttcttctcaaaattgggatgctttccctttctgggttatttatgtttgtcatttggcaaaattaaacatagatcctttcaagtgttccgtgaacctgtcactttagttgacaaggataacgtgggttgcttgtcttttagttattgcatcttttggatggcaatgtattccataacttctgaatttcaaatttgattcagttgaaatatcatacatgtttgtcacttgttcgggcataactactaaaccttattttttctttgattgggaattcttcttttatatatgactattaacgttaatttaaagcagtttctgttaattgaatccatcatctagaggtaaagataagcccattccacaaagattttgtggttacttccagtactaaattattgtgcttatcacagtcatattaagcacaagtgtgcagtcaaaccagtgacaaatactagttttttatcacacagaaataggtattattgaacttggacatctgtttaaaatacttcgcagattttgatctctatttcttggttgcttgcctgatgcaaataattagcatttgtttcaactatgtatgaagtttctctgtccttgaatgttgatatatgaattgcatttatagtggctataaaatatgtgtatatttcaatgcattagtgacaggtacaagttttcactagtcaaaacatatattatcatcacattatgtagtatatgtacatttggtttgtgtcctgactaattgcaatcgatgcatgagatggcctgaggaaattcattgacacctcttttctatttagattggctgtgtctttggactgtatatttggtgtgc

SEQ ID NO: 88781 - DNA, 756 bp, Citrus clementina
  Intron number 1 from transcript clementine0.9_013432m (loc us clementine0.9_013432m.g) derived from phytozome v7.0 (c hr-ID scaffold_39; pos 671880 to 672635 reverse strand)
cttctaagccaccgcctcctttgatttctatcaaggtacttaatttcatctctcggctttgagtagctctgtactattaattcgttcttctttgattttgagttgatcaatttgcttcgcttaatcagttaaatctcttgctaactggactagtttcagtcctttgagtagtggctagtgatgctcccttaattacctaagaaaacatcactactatcaaggtaaaatccttccattgcatgaaattagttagtggggttgcaatggctttgttctttctttccagtaatcctacggctttcgtgcctgaatgtacaaccgcagttgaaaaagtccaaaggttgtgtttatattgctgtcccaagtttgggctttgaactacaagtgggcctataatgggctttcgttttggttgagtgtctcaacagtcatttaccattttttttttcttttccaaacatttattccacgctattcctcttagcacaagcacaaattaaagaactttcctccctaaaattcatccttgtagaacttctttttagttttcaaaagactaaccaatcaaactattcccgagagatattattattataagattgatcttaggttcgaatacgggatctagtattttaatatttaatcacactttgtatatgaaacaaacaaattataatgccatcctctaaaacttcattcaattaagtaaaccccatttcagattgcaggaattcgccaatttggactaggagaagg

SEQ ID NO: 88782 - DNA, 295 bp, Citrus clementina; identical to SEQ ID NO: 83575
  Intron number 1 from transcript clementine0.9_021108m (loc us clementine0.9_016905m.g) derived from phytozome v7.0 (c hr-ID scaffold_123; pos 185643 to 185937 reverse strand)

SEQ ID NO: 88783 - DNA, 374 bp, Citrus clementina
  Intron number 2 from transcript clementine0.9_026305m (loc us clementine0.9_026305m.g) derived from phytozome v7.0 (c hr-ID scaffold_12; pos 2351900 to 2352273 reverse strand)
ggtaccacgtcgaactgggacctcgcgagaaagctgtaagacattcttcgattttatcttttgtggttttttttcctttcattgtttgtttgatttattttcacttagaaatttttttttttggctgtttgttttatatttattggaccagattagaatttagcatctgggttttgtcaattagtagatagatgattacttcttggaaagttactagctttggcttttgtgttatgtttggtgttcctgatgcaaaatccttaaaaaagggtatactttttcttttatctgctgtgcatccaatttgatcggtatgttaagttttgttgtgctctcatttgataatgagttgaattcactgcagcttttggcag

SEQ ID NO: 88784 - DNA, 695 bp, Citrus clementina
  Intron number 4 from transcript clementine0.9_014879m (loc us clementine0.9_008114m.g) derived from phytozome v7.0 (c hr-ID scaffold_16; pos 257947 to 258641)
aggtataagttgataaccattaacagattcgcttagtgaaatgcattagttttttatgagtagccagctgagctgcaaaaacaaaaataaacaacccaagctggtcagtggataagaacacttttatattagaccttcaattctgggttactgcatgctgcaatcttttgtaaaatattaaatattatattctcatatatggaaaatgttaaacccaagacaggcaaatagattagcaaaagccaccatgttcatatcgaaacccacatggaagaattaagcactgaaagaagccttcttattaagcagtgtcttgccaaaaaggcacgaccttacttgaacaggatctgttctataggctcgtacctctgtgtccttgagttctaaggagacaggatatcaagtctggtggatgaatcatgaccgtgtgatcagagcgtgagtaacggccgtcaccgacccttgggttgttgaggctgtagaggatcgttctcagctgggttaccggctggggtggtcactcggttgtctgacagacttctaaatcccattttgccggctctgaatttagtttttaatttgatctcaagactgctgtcagaatgaatttcatgcttgtttgtactcatttgcctattctttttctggtttatattttgtgctaaatttgatatcaaagttacgttcagggtgag

SEQ ID NO: 88785 - DNA, 428 bp, Citrus clementina
  Intron number 2 from transcript clementine0.9_035052m (loc us clementine0.9_035052m.g) derived from phytozome v7.0 (c hr-ID scaffold_28; pos 2247459 to 2247886)
cttcatcaaacggctgaattgcaacaactacatatgttttgacccgacccgttgatgatattgagcaagaaaaaaaaaattgtatatatgacagatgaaatatgtagtagctactgtaattgcattgaaaacttgaaatgcattatatctttataaggttttgtgattttcttggcatggcttattgttatgattccattttttacagtattttgattttcaagctcttaatcatcatagggtttattactattttagctcctgtaattggcctgcttggagttatgagcctccagtatctgttgcaacactgaggactaattctcgtttctttacagttttctttaccttaccggtgcttgcatagtttttctgattactctttgaagataacagagaagtaaaagcaaattcaaagactagatcta

SEQ ID NO: 88786 - DNA, 579 bp, Citrus clementina; identical to SEQ ID NO: 79507
  Intron number 2 from transcript clementine0.9_010903m (loc us clementine0.9_010903m.g) derived from phytozome v7.0 (c hr-ID scaffold_21; pos 668621 to 669199 reverse strand)

SEQ ID NO: 88787 - DNA, 593 bp, Citrus clementina
  Intron number 2 from transcript clementine0.9_005369m (loc us clementine0.9_005369m.g) derived from phytozome v7.0 (c hr-ID scaffold_57; pos 1403637 to 1404229 reverse strand)
gaatcacctggtgagttgtggtgaaacgttatcgtttcaattttcgcttaattctttattgcatatttttttctctaatatttcagtttaatttagaaaagaaagaggacccaaaaagagagagagagagagagagagagactctaccatactcaattccttgctcattctgatttggcctgaatgttggcattgactattatttgttttcatttcgatttaattctcatttagacagtcttttctaacggtcaataatagtttaaggaaaatgataatagggattttgcaataatctttctgcattgttcaagttagtagacaatgaataggatgtttatgtttacctcattttgaaccctgagggcttagttgagtagttgattgattcggtcttgcaatgtgttcccacaaggttttgagtttgattcctaattatgtggcccttagtttcgaatttgagtttgttaggtgggttgatggggcttttgggtatattgtacaaacctgttgattatttatttatttattttatttttgtactattttgttttacagttggtggttcaagacagacatctgttattgttgta

SEQ ID NO: 88788 - DNA, 574 bp, Citrus clementina
  Intron number 2 from transcript clementine0.9_017082m (loc us clementine0.9_014276m.g) derived from phytozome v7.0 (c hr-ID scaffold_12; pos 4986391 to 4986964 reverse strand)
tcaggagttttgtcaccatacagcttcaaccgcaggtgtgtttattctacttcctttcgaccaaacatgacagcacagaagtaatgagatcaagaaaatgcccatttcctttactttgttcctactttatccttcatttcaattttttgctgtcttttatgtgcgataattaatattttcttctttttaacccaaagaacacatagatatttcttttgtgtactattggattggtgttgaacttatcaataatttctttgctttatgtttatggttatgccattttccaatatggtgtctgttcttcatgcatttatgcacgttgtacactattcttcaaacatctgttatgtttgccatagattttttttgctttatagctatcttccaactagtaggttgaccactcatcatggacgttttaaagcaatggtgatttcaaaattacttgctaacatttactttactgcattatgatcttggaacttatgaaaacaattatttatgtccttcactgttatatgtataagtttaccaacaacattgggaaaatttttcagggctgttgggagtg

SEQ ID NO: 88789 - DNA, 627 bp, Citrus clementina
  Intron number 1 from transcript clementine0.9_022429m (loc us clementine0.9_018622m.g) derived from phytozome v7.0 (c hr-ID scaffold_13; pos 3435039 to 3435665)
ttccaactattttccgatttgaagaagtgttggaggctagttttattttttaaaattagttagttagttagcgtataatttaaacatgcccatctctgttttgttgtataatttgtttccttgtgacttgctatttgataagtagttaagaattatataacctcaaacaaattagaaggctagtagaagtcttttttcttatgcttgtggtgtatagcatttgtttgatgaaatgtctgtaagaagaattgtggtattttgtgatactttttagggcaacccttatgcagtcattctaaagcatccgtatgaacaatttcttggctaaataatagtccatgtatgtttgttacagctaactcagtttatgtgaagttgactgaataaaaaactttagcatattcaatcaaaatatttaccaataaaagcaattgataagaaagagaagcggtagagtttgtttcttagaaatgcattatctgttaattttggttatgctttattcattggtcagattatgataggcccattctactatgttgtttgcctttggtaactatctctacgtaattttctcttttgcctatttttgaaaattgttgttgggaagtctcaggtgaaaccaga

SEQ ID NO: 88790 - DNA, 808 bp, Citrus clementina
  Intron number 2 from transcript clementine0.9_025719m (loc us clementine0.9_025715m.g) derived from phytozome v7.0 (c hr-ID scaffold_57; pos 275221 to 276028)
ttttgtgattggggaggaagcagtaggggcatcaggtatgatctgaaactgttgtgctaatatacttttggagctgctgaacatttgctgagatacttaattattgttgaacaaaagtgaaatgaagattagcaactgatgcagtagtttctgcttggtcagcatgtaccttatacaacacatgcattgaacttgttatatgcctttagtaatattgccctgcaccattttatctctaggtattgtttccatttcccttttgcttctagaagaaagttaccactctcatcattcttgtagaatgagtaactgggtagtatagtcctgttgaattttattcttaatgtgttggcttcagtgttagtgtaaattggtcgagaataaaagatcaagttaattagcaaatgaagcgtgtgttgcatagctggatcatatgtttccaatattttgaattcacacatattcttcgttgtgatttatatgaaaaaatgactagagaagaaggtttaaaaactgtgagatgaatgtgatctctatatccagggtgttctattactttagtaggtcttgattaaacattttatacgatctgctaaacagcctgcaacatacaaatgattagtaatacaagctgattatcaacattcaatttcccatttcatgtgtcatcaaaacttattggacttgtattgcatggtagcaatgaatgtgcttgtagtgcatgagcttggcatagtcgatagtcatgtatggctactgaaatcttttaaatcttatggtttcacttctttaatggggcagggcattt

SEQ ID NO: 88791 - DNA, 665 bp, Citrus clementina
  Intron number 1 from transcript clementine0.9_008888m (loc us clementine0.9_008875m.g) derived from phytozome v7.0 (c hr-ID scaffold_16; pos 3516441 to 3517105)
ctcccacttcgggtaagtgcttagctaaagccaaaagcgttgcagctcctttgatttggaatctgtatttgttttgcatgcaaagtcgaagattttgtatttgatttaggtcatctgggtatttctgatgttggctttagtgttttgatgtgttttacctttttagggtttctgaatttatgtttaattatagatgtgctgttattagttttgtgggattgcttacaaatttggatttgggcatcataaaggtttgattatatctatagttattattatttttattttttcctttatttttacgattgtggtgctgcggcttttaatctatagctgctgtacagtagaatcagtagttgttaggtgtaattgtggttttgggcgatatgcattagctcctgagtaaaagtgagtatgtatagaacaccagttgttatgctttcaacagttgcaaacatgcccttgctcgagtggaattgatacttatagctgagtattcctctttgaaatgagaattcagtgtctaaggttgtggttggaagtccacttttatacactgtccaaaacagcaaaaattgagttctacttttgtccactgtttgcatttttattctaatgatcgaaagttaaaggtcattgcgatgctgttcaggtgctgttgttgg

SEQ ID NO: 88792 - DNA, 870 bp, Citrus clementina
  Intron number 2 from transcript clementine0.9_015066m (loc us clementine0.9_009297m.g) derived from phytozome v7.0 (c hr-ID scaffold_57; pos 1341304 to 1342173)
gcaacttgctctcaaggtttgatttttttctttttctttttatagtttttttagttttactgggttatggggttttcatgtgtctccatatttaacgtggagttgtgacaagtatgtttatgatttagttagctacttcattaattatacgtgcacaactgtacaggtagcacaattttaaaactcagtgtggataatgttgacgttggggattaaaccagacaaagttatgcaatagtgttgcagaatataatatgggcaacttgcacactagatcattgctcattgagtaatatccataaattattgtcatactagttgccacatcagtttgtatgcataactttacatgtcttgttgagttttatgtgtattgatacatagttgctactttggttgtacttcaactattttgttctttcttctgaaataaaaacctattccctatcatagatttttggacttctgcgtcagcagcagtggtatcaagcaagaggtcaaacatttacaaagcttatagtaatgcttggcaagtgcaagcaacctgatcaggcaagtttgctgtttgaggtcatgttgtctgatgggctgaaaccgagtgttgatgtttatacagctcttgtgagtgcttatggccatagtggccttcttgatgaggcgttttcaaccataaatgatatgaaatcagtctcagcctgcaaacctgatgtatatacatattctattcttatcaaatcttgcacgaagttccatcgatttgatctgattgaaaaaattcttgctgagatgtcttatctaggaattgaatgtagcgcagttacatataatacaattattgatggatatggcaaggctaaaaagtttgaagag

SEQ ID NO: 88793 - DNA, 995 bp, Citrus clementina
  Intron number 1 from transcript clementine0.9_033133m (loc us clementine0.9_033133m.g) derived from phytozome v7.0 (c hr-ID scaffold_61; pos 1029712 to 1030706)
gcggacagtatttttgacaagttgccaaaagcttggtatgaatgcttcttctaattttgccttcattttaaagccctttctgagtatattggatgttataatttcatcttgatttgtagtgtaatagaatatttttcagagactgtgataaacaatgtcttgcttttgagatttcaagcagcggccatttctcagtccatttacttcatggttattttaaattgctctaacaaatgtagagttcttgcacattttcctttctttcttacatgatttggaaattttgtggtaatcgataatatgtacaaggaacgtagcctttactatgattacagaattgaaatatctctcccaatggggagaaggggaggggaaaaaaaggcttttctatctttcacagagagggcaactgactaataataagttagagtggttgatgatatgaatttaattttttcatgaaatgttttctttgaggttcgcaagagttgcctcgcgataaaacagcttattacttgaatacaagtttacaataaacacttgataaccatatcatgattgttattggatttattttttttatctatttaccactagcaaaagacatagacattgagcctggacgaacacctaattagaatatagattatatactccttgctttcagtacatcaaggtcaagttaactgatgcatttgttggctgctaaaaagttagcagagcaaaaaatgacataatgttgtgctacatttgttattatgtctgcagttttaacctttctattgaataagtcaaggaaaagtgttatattgttaaaatttagagtttgaattctacatccagtctttcctgtccctatggtgattctgagacttatatgtattccgtattattaattaatgaattccgatgagtacttgatgcacaacttgatttcttttttgttcatatgtctttcaggttcatatacttatttattggtgtgggagttgttc

SEQ ID NO: 88794 - DNA, 263 bp, Citrus clementina; identical to SEQ ID NO: 81217
  Intron number 2 from transcript clementine0.9_011661m (loc us clementine0.9_010245m.g) derived from phytozome v7.0 (c hr-ID scaffold_16; pos 505502 to 505764)

SEQ ID NO: 88795 - DNA, 638 bp, Citrus clementina
  Intron number 1 from transcript clementine0.9_015043m (loc us clementine0.9_014427m.g) derived from phytozome v7.0 (c hr-ID scaffold_16; pos 3338601 to 3339238 reverse strand)
tgaagcctcccaaaaaatcgctagacttgccaaatgtaagccctttctctctctcttttttttttaattagttattttatttttcacaatggaatttttaaatttttaaaaagtttaatttttttattttgaatattaatgcatagatttaggcaatgcttggtatctgagaaggaaattgatttatcgaactaggagtaaattagagaagctcattttgagaaagcacccgttgaatcaaccagctgaagcatcttgtgctcatgctaatgaattggcttcttgtttagttgttacttaattgtattataaatattgattggtagaatgaatacaagattattcggcataaagaaaataaaaggtcgcgttcactctttaatagtgtgctgtttgttaacattctaatggcaaggacacaatggattattaaatgcttgtaagtgacccgaatggttaaaaaaagtttcttctagggagcatgtatcaaaattttaatttaaaagaagcttctttgatctcaaactttgcttctttttttttttaagtttcgatcaaacactggaaatgtaatttctttttagtgatgctatgttgaccttaggttttgatttaatgtagtggcaaaaaggtcatcg

SEQ ID NO: 88796 - DNA, 972 bp, Citrus clementina
  Intron number 1 from transcript clementine0.9_014081m (loc us clementine0.9_014081m.g) derived from phytozome v7.0 (c hr-ID scaffold_21; pos 3107642 to 3108613 reverse strand)
tcgacggctttcttgctcttgttgcgttctatcaggtttgatttaaatacccttttgcttatttttcataatggtgttgttttcatttaaaattatttgcctttttttttttattcttttgacgggaggttggtaatatcgtggaattgaatttgatttatgaggtgatccaattgatggtatatttcctgtggttaatcaattgatgggatataaccttttgtgatattgggttgtatttgaatgtgaaaagatggtgtgtgttgtttgcattggtcagtgggagctctgttatgtgtttggttgatgagaaaatgcggggagaagataaagtgaatttgggattttacagccatttggggttaaaaacttggaactctctgctttagattgttggaaattcatgccagaaaatggttaatgaatgattgaattgttgagggattaattaaatctgtcaatttgatattagtgttgactgtctggtagaagttttgagatatatgttttttttttctttttcatctcattgtgtcttcaaagactgtaattgtagttgatactatcatacgctaatttgtgtttaagaatatttattgcttatattcatttaactgagttaatctctttacccgagagcctcaaattataagtcaagttatcagttgttctctctgcacttcctcatagtgtgatttgtataaatcctgaaagaacgttatacttttgccaacggctcatggacattctttaggtgatattttgagacattaaatgtgtatgcttgttttgcacagaagtattctcgtgtgaagccttttccttgttaggtttagcttgagtcattgatgatcaactaatggttgcctggtatgttgatgactttatacattaaaaaggattttcttatttgattctttgtttggtacttacaagtgagccattttattgttgcagctcaccagaattcac

SEQ ID NO: 88797 - DNA, 840 bp, Citrus clementina
  Intron number 5 from transcript clementine0.9_031058m (loc us clementine0.9_031058m.g) derived from phytozome v7.0 (c hr-ID scaffold_71; pos 498413 to 499252 reverse strand)
ctgaagacaggtttatgttatcaaagcttccatttttttctgaaggcaataatattctggacttgttggcaatcttatatatggagaatatgtagattcttaataaagataagagtgcttgaatgattgttacttttataacttctgaattattatgtggttatctcctccgtttttaatttgaatactgagttagaatacctcagtcgtgtaatgtgatgctaactataacattattagtacactaattgtttttttcaatgccattaatatattagctcttagtttaataaaatttcaagtagcattattagcattgtactgttgggctcttttgtgtcagaaagtattattacgatgcgagtgctgaaaatctggagtattttccaatgttttgagttgtctggtgcaattagttctcctcccttcatatttatctttgcttttttctttttcccattttagcttgaatttgctacaacatgttaagcaatctgcagatccttgcaatatttgatttgaagttacggtgcatatttggattacttttgttctgtacttattgtatttcgtgcagggaagagacaaaagaaataaaatatatatctggacgaaaagctacattgcctgtttttgacgacattcctgatcacattaagaggtagttgttgaatgtttaatgcattgtgttggacaaaagtactctccacaacctgagcttattcttgtctgatgttgttcaacctgagctgtttcccaactcttcacagagacacagactgtgttgcatattttccgtttgcaggaagactgctgcttcctacagagaactagaaggga

SEQ ID NO: 88798 - DNA, 651 bp, Citrus clementina
  Intron number 1 from transcript clementine0.9_018537m (loc us clementine0.9_018537m.g) derived from phytozome v7.0 (c hr-ID scaffold_56; pos 1159568 to 1160218)
ttagcttgaagaaaatacgatacaattcccttcttgtaagtctccgctttcttcaccctgtttcttttgtatctcttttattcaaattccccttttcgttgctttttgccttttttaagcctttgttttttgttaaaggtctctctcttttaccatctgggtttcttccattaatctttttccctttctgggtattttctctttcttgcttttgttttgttttttttttttaatttttctttgttattaattgggttgtttccatttcctgctaattgttcagatacttttgtttcgtatgcagttcctgtgaaagtctcttttttcttttctttctcaattttttacgcttcttttgtagcttttgtttcattttaagagaactttacttaattcttccctttatttggcgcagcttttaattttattctgtaaaagtttatgtattttgtagagcaaattccttgcaagtttcaaaagtttctattaattgatttgcattgaggagtcaagtttctgaatttctccatttttggctctagagtgatggagggttttctcctgagtatgaattgtaatttgtgttgaatgtacatataatgatatttattttcaggagtcaaagtaaaagcaaagagcttgatcaaggag

SEQ ID NO: 88799 - DNA, 966 bp, Citrus clementina
  Intron number 2 from transcript clementine0.9_018537m (loc us clementine0.9_018537m.g) derived from phytozome v7.0 (c hr-ID scaffold_56; pos 1160518 to 1161483)
ttcctgttgtggcagcttgaaggttagtttctattttaactcgtaatcataaatgcttttgttcaggtatcttcttagattcttaagttgttatttaaagttttatactatcctaaaattcttccctataaagtctgtccatggaagaatttcatgctatagaacagtttattgccacatggtggactaaattacaggcttttggtatcattggagcatgtgagaaatgtctattgttaattaactccaatgctagctacaacatctatgatcctctaattcgaaatacagagtagtcattttttaatttgatggtgatatggaagttactttctgcatgttgggaaagtagggctttttgttaacatatcataatatgcaattatccagtcacattacatacctaacctcacaaccaccatgtacatgccaccaattcaactgcattttcaccgtcgttttccctcaagataattggagccttcatgtttgtttttgaataatacatttaattcaccaatagctgtctaattgtaaggccatgaagcatgcacttgataaagagggcactgcctgaatgcaagtatctagacagaaagatcttaagctttaattattgtattcaattttttttgtctaattcgaatttttgtacctgaagcatctaatcttggacataagtttctcaagtcagttttaaaggcctataaacaattgatcatatcacttttgtagtcataacagtatccctttaggttaatttgaattcatttaatttggtgcctgacaacatacattgatactgtctcgtttgcaataattaaaaaaaaaaaaaaagatatcacaattttccactggattttaaaatgaagaaaacaaccataatttgcataaactctgctacttatgcaaatggtaatagcaagaaatttgctgtgttcatatctgatgcttgatttttgcagt

SEQ ID NO: 88800 - DNA, 492 bp, Citrus clementina
  Intron number 1 from transcript clementine0.9_010607m (loc us clementine0.9_010607m.g) derived from phytozome v7.0 (c hr-ID scaffold_126; pos 30252 to 30743 reverse strand)
cgaagttagcgcaattgacgctcaccattgtcccggtaagtcccgattaagctgacagtaaagataacggcgttgataacggactgcattactttcgagaagtcgatacatacacacacaacacacacggtcgcacgcacacacgataataaacgcgtttaaatcatctaataaaattgtatagcgagaaataatttaattacaaaaaggttgctcgacatatattgaaaaataaacaagaaattgaacaaagtcataaatttattgacatccgaattctgaatatatggtgtgtgtcttcagtggggaatgttatcttttgcatacggttatttttattgatatttaatacctcaattttatgttcaattggaaggaattctaggcagttcagttttctacttacggtattatcacgatcgttgttattgagaaaattgtggcaatttttttgattgatcatgatgattttcgtacgtggcaggctcggtg

SEQ ID NO: 88801 - DNA, 655 bp, Citrus clementina
  Intron number 1 from transcript clementine0.9_007111m (loc us clementine0.9_007111m.g) derived from phytozome v7.0 (c hr-ID scaffold_64; pos 364462 to 365116)
atcatcttgttctctttgctttcaagcctttcaaggtaattttttttttcaataattcgccccattcttcataattttttatttaatttgttaaaagtggattcttgattagattgaatttttcgtatattgcgtttttttatttatttacgaggttaggtatttttttatccatagaaagtaatttgtttgttgacatattgtgaattacataaaaaattttattagcgttctgtggaattgtggctgttcttgagtcctatagcgcttttgtagtattagatttatcagtacagtctttgatttgttttcttttaaaacccagatatatatagtttttctttatgtgatttgaagacccaattgttatattatgtgattaacaatttgatatattatgtatatcaaatttaatgcatgtcaacacaaagtattaccatggaaggctctttatgattgtcttgtttcttttcccttgataatatattggttcttgggaattctttggtaattatgaaactaatcaaatatgaaaaacccttcattgagaattttgactcatatttttgaaattgatagtatgactcatgtttcagtgaggaggtaaatgatttttattagcaaatctgatgttatgttcttttggttctaacag

SEQ ID NO: 88802 - DNA, 868 bp, Citrus clementina
  Intron number 1 from transcript clementine0.9_006303m (loc us clementine0.9_006303m.g) derived from phytozome v7.0 (c hr-ID scaffold_52; pos 520145 to 521012 reverse strand)
tcttctccttcaacttcagctctctcttctcctccgtaagaaaaaattctcttcaattttgaatgttctttgtagtatatatgtgtgtatataatcaatggcttacaatcaatttaataattctatttctagttatgatgcttttattttatttattttttaattgaggtcccgaggagattctttttcttttaatttttaaataagttgattagatccaacatgctaatggatgttgagattttgtattgaaatttactttgttcgtaaaacaagacaagaaaagttgatttttttttccagctgctttaaggctttgttttagtttatgctattgtaagggatttaacaagtgataaagaagggattgcagctttataattgtgattagatatgtgtaacaaaacttttccttacggcattatgagatctgctataattattcatatagaagttgaatcaaggagcttctgtttctcatcttcattgtttaaaactgttggaaaatcccaattttcgtatggtctaagaaaggattatgtccaagaaggacctcaatagggattcactgaatagatgctttccccaacgatttctgtacacaaggaaaatgtttgtagtatattatcaattgaactctttaccagggaattttgaaaatttggtactttttatgctcagaaaaatggagttattttggtaatctgttgatattcattttaaaagttctccatatgcaaacctcaactaaaaatgcagtgatctgtactatgttggctagtgttctcaactttatttttctgttttctctgttggacagtgttaaatttaattttgttacattaaattctttgcagagcacgcagaa

SEQ ID NO: 88803 - DNA, 427 bp, Citrus clementina
  Intron number 1 from transcript clementine0.9_015181m (loc us clementine0.9_015181m.g) derived from phytozome v7.0 (c hr-ID scaffold_91; pos 872150 to 872576)
agcaaaactcgttgacgaaagaggtaaattactacttcccagaatttttttcttttaagattcagttttgccaaaaaaaaaacaaaaatgatgtttttgattcaggtttggttgaaattttgattattggatcgatacttgtttcagatttatttctaattcagaaacgaaataatgggaaatttttttttcttttacttgattttgacgtaaataaaacttgatcaattagatgagaattgtttgagattgaagaaaatctggttgatttttctatgttaatttggcattcccataatttaaacttatttgtgtttttttttcgtgattaataataatttagtaattaaggtgtaatacttgaaacaatttagctgattattggcaaatttgtttccctattttgatgatatcagaagctttttgt

SEQ ID NO: 88804 - DNA, 604 bp, Citrus clementina
  Intron number 2 from transcript clementine0.9_015181m (loc us clementine0.9_015181m.g) derived from phytozome v7.0 (c hr-ID scaffold_91; pos 872621 to 873224)
agaaatctctgtcgcctgaagagcagcaagccaaagtatgcatcaaaatattgattaagatgttgttactgacattttttttttttttggttagttatttggtggaggttcattcttttccaatgaatttttctctctatttttagttgtaatttcgtgttagttttgcgcatttgcatcttcattatggtttttccatctaaataatttgatatagcctgtttgcttggatgccagagagttctttgtttctaaaatctgaaaaaaggtaaatacgcagggaaatgtgtctggttaagagtttacagtaataatagttttcaagtgtgatcctgaactaagtaaatatcagagaaaaataaatagttggttttgttgttttctaatatattataaccagattatatgtttgaaaatatctgaactgtattctacgttttaaagaattgtattggcctcatgaatgaaacagtctggcgattatttggttgaggattcttgccctcattagagtttgaagggaaatttttattttagtctgtggagtcgaatgtaaaaaactctttaggagatcaactgattgaatttgatttcattcagataa

SEQ ID NO: 88805 - DNA, 489 bp, Citrus clementina
  Intron number 1 from transcript clementine0.9_006007m (loc us clementine0.9_006007m.g) derived from phytozome v7.0 (c hr-ID scaffold_12; pos 2450978 to 2451466)
cctttactctgccgccaagtactaaaaccctagacccccagttacttcattttcttattataataatttttttttatgctttaatttttgtttttaagtactaaaattggttttgtatcttcagtaattaacaattagcttcatctatttgattctccttttccgagcgtgactgtgatgtttaataaacgataaagctgcagccttggtgatccattggtcactgaggatgttgagcaagaatgggggtaaaatcaaattttgaccttattgttggcttaaattttgaagggaagaacattttagctaaatgattgattcatgatcatttaagaccagatagattttgtttgaataagcaaccaaaatgtaagattttgaatgaaaatttactagtttaattttattttttattttaataccaacgagttttcgtgtgccattatatgtacagggcagcagagcagttggtgggaatcgaacaagacc

SEQ ID NO: 88806 - DNA, 398 bp, Citrus clementina
  Intron number 1 from transcript clementine0.9_035522m (loc us clementine0.9_035522m.g) derived from phytozome v7.0 (c hr-ID scaffold_57; pos 617581 to 617978 reverse strand)
tttaactatcttagatccaagctcaatgttcttcccagaccttgagcttgaagggggctgttaagatagttcatattatggaattaaggagttaacgagctgattagtttagtttgttaatattgttgatgtgtaacttgctgagtcagcaggttagttaaagttgttagtaacagattttgtatttgatctttgtttttggtttacacacacaacgtgtgtacagcagtccaaaatatgtatatatacagctgttattaacaagattaataagatgacaattcattttcctctctgatattttctctctggttcgtttattttctctgtatccaaacactcaaactctgttcttaactcaaggaagctcaactaaacggcaaggggaatcttaaaga

SEQ ID NO: 88807 - DNA, 445 bp, Citrus clementina
  Intron number 1 from transcript clementine0.9_001141m (loc us clementine0.9_001141m.g) derived from phytozome v7.0 (c hr-ID scaffold_104; pos 52165 to 52609)
aaccaatcgccgtcctcttcctccaaaattttgaggtattattattattgtcatctttttttaattctttgttcagcttctgtcttcgaatccttttgtttttgcttttatcatctgtaacaacatgcttgctcttaaccattatgattgaaataatcatccgggtcgtattgaaattgctgaatctgtaatgggtaaatttaaattttcctttatgtttcttgcttctatgcctacaaatctgtcgattctctttatctttttctttctctttatatgttgatagttataaccatacatgatatgtgtaatgaaagcagatacggatattcataataaaagatgaataaagtagcgattttttttccttcattatttgtttcctttgcttttgcaaatcttggatatggtgttcagggttattttgaatttgttttagtgactg

SEQ ID NO: 88808 - DNA, 928 bp, Citrus clementina
  Intron number 1 from transcript clementine0.9_020172m (loc us clementine0.9_020172m.g) derived from phytozome v7.0 (c hr-ID scaffold_96; pos 103209 to 104136)
tgcccattcgcagctttgtattagtgatttgtcaagtaagcactcctctgaaatgctatatatgtttagctcattttttttgataattttgcagttactaacgactgaatttcaagatacacagttcaagatttgatctctttgtcatgaaatcaaatggggttgtgtaatttagtttatttatcttaaattttggatgtttcttgcatcagagattgaatttcaaatggtttttgggtttaatttagcccattttcacacaaattttgctaagactatatcttttattgcatgctgattttatgttggtgaactcaattggggaatggatactattatgatgcattcatatgtcctttgttatttttgtctaagcttaaacaaagttgtctttttttttgttttcctgggaatatttgtttgttgtttttcgaaatgcatcaagtttatcataatgtttctaattcattgaagtaggtctgtgtagcttatctttattcctatactaattttctgaagacgtgtttttgttacgtcttattttatttgatgttttagtttgatcacaatctttcaaaattgtactggcactaaagcttcagtttcaagaacccacttgaggggataaaagtttgagtttcttgttgtgatttgggatggacggtgttgaatttggcgtattattatctcaataagttgtataaaattcaagtcggtacaattcattatttaccaagtccatcacaattttgcagagaaggtagaatcttaataaatgcacacataaaaaaataaaattgtacaatcagaattgaaatgacaaattataattatcttcttttgatcctaattggaagatttgccttctgacattttaaattttgattagatttcttgtaactatctttgctgtggaatttaaacagat

SEQ ID NO: 88809 - DNA, 778 bp, Citrus clementina
  Intron number 2 from transcript clementine0.9_020172m (loc us clementine0.9_020172m.g) derived from phytozome v7.0 (c hr-ID scaffold_96; pos 104189 to 104966)
tttgctcagccacatcaagctgttcccattcattggtgagatatgagatgacacttcctatgttggttattttctttttgagttgcttccaggctcttgcattaataaaattaggcaatgagcgaacaaattatgatggtttcatactaacctaatttgtttgagatcactagatgattgtctttagttaaaagtttttgcttatctcaatgttagagaaaaaaaagagaattgcattaagtgaactctggtatctttcgtttcatgtgataagtattgataattcttcagttggactcataattatgacatggttctttctgcaaaatgtttcatgtatattcaagaaattgtaattttttcttatcggataaaaaattgttggttacttgctgagatattgctaatctggtatgcaccttattcctcagtcagcattgttctttattttgcaaaaatcaatccacatagatgttgtaggtcattgttgcatgattgatatatcatacaccatggactaggattttcttaaccaagagttctggtaaaatacacaagtggtttagaggagtcatagaacctgcaatttgtgcacttgaactaccctacattacaaagatgacattttcactcagtaaggactttgaatcgaaatgtacaaaaaatgatgggaatcttgcaatacatgccctgaaatctcttacttttttgttgccttgggaatcttgcgtttaaacattgattgcatttgcatttttcaattagcagacatcattcc

SEQ ID NO: 88810 - DNA, 433 bp, Citrus clementina
  Intron number 3 from transcript clementine0.9_020736m (loc us clementine0.9_020736m.g) derived from phytozome v7.0 (c hr-ID scaffold_12; pos 3917537 to 3917969 reverse strand)
catataagaagcttttgaagggtcttattgttcaggtcagtggaatcaagctcgtttttccccttttctgtgttttttcaatcagtcactcctaaaaaaagtgtcttaagagattttaccgacttcaacagtatctatgcaccctgtatttttgctatatgtttctaagtgaaagggatacctttccaaaatagttatgaggagaaaaagagccaaaacattcagtttgagtgttgtatgtatgcacatcatatcattccacgaaaagaaaatgcgttgatacttttcccacgactcctgagaacattttaatgaaggttctgaagatgtttcttctgatgatctgagttttcagcgttatttatatcaaagagtgaaatattacatctttttttcagagtttgctcaggctgaaagagccagctgtgttact

SEQ ID NO: 88811 - DNA, 1031 bp, Citrus clementina
  Intron number 3 from transcript clementine0.9_011782m (loc us clementine0.9_011759m.g) derived from phytozome v7.0 (c hr-ID scaffold_68; pos 471450 to 472480 reverse strand)
ttgcaaatttgaggccagcaactgttttaccacaggtagtatttggtttagctgcaatttacgaagttttcactctttcactgtacttgcttagttctggaatcttctgtatacaaatttgtatcagaatcatttgtataaagatataagcataattttgcaagttctcatacacttgcatgtaagattcagaagattcacattaagagtcactggcttaatttttccatcaaaatgaaattgtattaaataataggtcatagtaactgcattaaaagtgtcataacaagtgtattcgctttttatcaaagttaaataactctattgctgtgttaaaaaataataataataataataataacaaagaagaaatacttgttttgcctctcatatatgtaaaatgatgcctgtcatagcaaataatcttttgtaatgccaaattaaagtttaagatatcaaatagggaggattcaatagttaaatcattgtaagtcttgcatcattcactatgtttggcttgatattcatttaatttaaagtgatatatgttgagtcaagactcaagctaccaaatcctaaacttttatatgacttgaggaaagatttctttttctttctttcttgtagacatactttgtttttcgtctgcaagatgctttgtatttaaccaagtaatctttatataagaaaaaatttagaaattgcctcaaaacaatttattcaatcaagttagcaaattttatgccgattatgtatgaatgattgtattaattgtagcatgattggcatacaaaatgtagtatggctcatccaaattaaatggagacttctacttaaagaataattatgtgggagagaattggttaaaattgttatttatttgaaactttttgtgtgaacatgtgtgccttttgatttctttttaaacaaaacagaaattaaaaaattctggatttgcttctacttgagatgtctctttctgtgttactctttcagttagtggactcttccactttgaagaaggaggttgc

SEQ ID NO: 88812 - DNA, 519 bp, Citrus clementina
  Intron number 1 from transcript clementine0.9_014972m (loc us clementine0.9_014972m.g) derived from phytozome v7.0 (c hr-ID scaffold_124; pos 137592 to 138110 reverse strand)
tggtacgtaatatttacttacaagaaattgggatgttttcaatgcacgttagaagatagggataaacactgacttcatttttcatattatattacaggactggctatttcattagttcttcaattcaatttcattcaaataaattcaaacctccattgccaaccacctgcttcttgatgatctagtctttgaactgaaattacactcccaaaaggagaaacagaaggcatttttaaaaaagggcccaaatctagtcacccggtagagtttctaaagacaatagaagttattttaccatgaataatatgccttaaacaccctctgtgaccaacataatgcctgaatatcaatttcaatagaggttattcaatattatctaaatcaaatgaaagcagttatatgggaagactgtttgctgtttgaaattgaactaacagagaaatgtcaaaggtagtagtagatgacatcttaccttttgatgcaggaagttgttgggcgttctctgcagtggcagctgtg

SEQ ID NO: 88813 - DNA, 917 bp, Citrus clementina
  Intron number 2 from transcript clementine0.9_019066m (loc us clementine0.9_019064m.g) derived from phytozome v7.0 (c hr-ID scaffold_44; pos 1132625 to 1133541)
gcaccatacaggagagggtctcgtcggggttacaggttttctaattttgatcataaacttgttttttctttctctttattggcttgagggggtggggggtgaaggagactgttatgtctttggtggaggttgtttttgtagctgaccgttattctagttatggttgatgattctacatgattatgtcttcgaggatcttcagaattgtttttagcatttctgcttatgattgttctcatgctaattacttggttaactacttttaaactgtctcggagtttcatacaatagcatcagtttactcaattgtgttattcagttatttacctaacgccatcatggttgtggagatacttctttccctgccttctgtgtggtgttttatgataaaactatactggaaatttggttttgtgttttgagttgttctgtggcaagttatgtcttgaattccttgtcactgaattgcattcaagagttaatattttcttgaaagtaatatttattttcactgtgtgttatagctgtttttgtattatgtcctggattcttcttattaatgcttctgtcggtcatttattatattggctacttaactcttttgaggatacccttctcttttatttggaaagccccaaaaaaccaaagagtaagattcttcattattcattaggatgaaaagttcttaaggtttcatgtttttctaacaccaaacgaagaaaaaagggctcttttattttttctattttcaatttaccattgttcaaaatcaatttaaaaatggggtcctcactgttttagactaaaataattctagatttactttgtaccatgcatttctttttctgctcaggaattaatcttctttgcattttttgtcagccaaagtaatctttgcaagaattgcaaacggccag

SEQ ID NO: 88814 - DNA, 903 bp, Citrus clementina
  Intron number 4 from transcript clementine0.9_005202m (loc us clementine0.9_005193m.g) derived from phytozome v7.0 (c hr-ID scaffold_115; pos 206126 to 207028)
gcctttcagcgagaaatttgcaggtatgggataaagaaagtttaattagctctatggtttacgaaattggaactttatttttataaaaaatgtaataaagctggaggacaaatgcatacatgaattctgtatgtaatcatgttttgtccgtttattttcattgccaacagtcaaattgcatacataatttccgtatctataaaagctacatgatatgcattgtacgcttactatggtcttcaattatatagaaagaaagatagtgaaaataaatggtattatagtgcaaattatggtactcgaaaataattcaaagatctggatactgcctttgatagtctatgcaaaaattttcaaggaacacatttgcatcagctatgaaccataattccatattgctttcatcgcttctttaaagtcttctgtggtatccatcagcatgtgatttcttaagccccattaagcatgtagatactcaaaaaatttcttcctttttgcgggttttctgtaattttctactcttataaatataatgttaaagcctttcgcttggcttgctccattttttgctcattatctatgctatgcacaccaatgatagtgtatttggtctcttcacatgcatcttttgaaaaataatgtaccattttttcatatttattatgctcctatagaaattcgaagtaaataaattatttattttattttactcccttaacactccctctgtattaacctttttttttttctttttctttttccttttgctttgatgttgttgaaattatgtttttatcttgtatcttagttttgatgcatttctttttgagaaaattgtttattgcactttatttcttgcttaaagatttgtaattgttattgaatcctcttgttgctttttag

SEQ ID NO: 88815 - DNA, 892 bp, Citrus clementina
  Intron number 1 from transcript clementine0.9_015373m (loc us clementine0.9_015373m.g) derived from phytozome v7.0 (c hr-ID scaffold_91; pos 90838 to 91729 reverse strand)
gtctatttctcataggttctttcatcaccccaccagtaagcctgcttacttcctcaatcttttctcgctctctctctctctctctctttaaagtgggtgtgtttgattttattttaaagaatccccttttttttgtgttttgttgatatgcatagattagcatttcagattttttttcttcttctttatcttcttcatctttttgagttgttgataatgatggattttgaagagattattcttgtacaaaaataatttttttttgtaatatttcctttcattgttgacctgaaaagcagttggggtttgtggattatgcttagttgatgaggttaaatcacatgtcagtgtcaaaggttcaaaatatatttgtttaaatttgtgtaaggggaaggtttttcatgcccaaatttctatttatttttttctaatagtctaatcagaaacttttcttgctgacttcattgcctttctcttggattttatttattctttaattagattgtacaagtaatttaatagttaaggattttcctattatttccctctgtttgtgattgtttgcgtttaaaggcatatattgctgatgccaaatcttttctccagtctttctttgttcattcatgtgatgttgttaatgtcttgacgatgaagtgttagatcacttttaataaggtttgtttatttggattctgatgctattggctgtaaagttccttagcattcatagtataatacattagctttgtctccttgctgcagatgatgcattattttagttgaagaagcataatttaagctatatcttatgtcatgcttgttccattctgtaatgaagagtgtgatgcctgatattttgggtatgattttgcagtgggttattgttccttct

SEQ ID NO: 88816 - DNA, 655 bp, Citrus clementina
  Intron number 1 from transcript clementine0.9_017562m (loc us clementine0.9_017562m.g) derived from phytozome v7.0 (c hr-ID scaffold_87; pos 1076633 to 1077287)
tgtgtccaactttggaggctggtgggtaatccaattaataagctccgcttatttatttatttttataaaaattaagatttttttccctaaaaatatccgatgaattcattcaaagagtgtggtcattattaaatatacaagatgatagttggtagttattgtctagtaatatgtagatcccagattgaatttgatttaaaatccacgagcatcgctcccgcaaatgtttcatgtaaaattttctttgtttaatccaatggcaaataaatttgttttcagttcaagaaattttatcaattacgttaataattagtcctaacatgattatttgatttttttttatttcttcagttcgtattgtttgaactagtttacatgacgagtagtgcaatgggtccatatattatatatgaatgggaatttatcactaatatattatatatatgtccatatattatactattcgtggtcaatagctgtagccaggagtggctctccttgttgataaactgaaattagcgcaaaccttgaggacaggcatgaaaaaatgggaacacgagcatgatttgtgatgagatataatatagttgaacccatgccttgactgattcaatagaaaggagggaaaaaagaaggaaaacaggggcaagcaata

SEQ ID NO: 88817 - DNA, 739 bp, Citrus clementina
  Intron number 1 from transcript clementine0.9_015826m (loc us clementine0.9_015826m.g) derived from phytozome v7.0 (c hr-ID scaffold_88; pos 846779 to 847517)
acacggccgatcggacggcatacgttgctatctaggtacgtgtatatgctgatcgcttggtcgtgtcaagtttacggatgaaatgtgagtaacaactaaaaaatgataatacacattaattcatcgtgttaatggagacttcgatgaatttgaattgcatattttgatattacggtcgatcaatggaaaagaaacacagtatcgttgttgaattaattatgattttttttggttgatgaagaagaaagataggaagaaatttcactttattgccatctttggacaatcgaaaaactatttggatttgggtttgtaatggatagcgtaaaatgtaattttagagcggtaaatatttatataaactgatgtgatataataataattgattgagagaaaatataaataatttatataaaagatgtggatcatataaagtttttagttcaaccaattataaaatatcgcattaatttatgcaaattaaattttgtggttatatcattatttaaaataaaatgtttgtattcttgtatttcaatttacatcaaaataaaatatagattagattctatctaagcatacataggagcgaaggaaatttttagaagaagttttttagagttgatttttttttttgggggtaataataaagggaatttaaatatgaaaaaggaaaaaagaaatactcatcaaacaagtcccttaagctgtacgccgtatgatggaaatcgtaggtgac

SEQ ID NO: 88818 - DNA, 482 bp, Citrus clementina
  Intron number 1 from transcript clementine0.9_022020m (loc us clementine0.9_022020m.g) derived from phytozome v7.0 (c hr-ID scaffold_71; pos 362356 to 362837 reverse strand)
ctcctcaaagttataatcctcggagacagcgggttagttagttttctttttctgatatattttcacgcgaatatatttttgtttggatgccgagaaaatggaattgcgtgcgcttttggttccatttattacattacatcgcaattagattaatcagttcaattttttaattacatttattgtgatattcgagtattaaatctggattgtttgtttgatcggacgatttttgcatgtaatgtttcaattctccttttctttttctttttttgaattttagggttagtttagctgcattgtcctcgaaattgtgtttggttgaaaggaaaatggagaaagaaaagaatgaggaaagaaaataagaaatttgcaaagtgtttgatgttagttggttatgaaatatgattttgttttccttcttgggttcggtgcttaatttctgatttctatttactttgtacagggttgggaagacttctttg

SEQ ID NO: 88819 - DNA, 976 bp, Citrus clementina
  Intron number 1 from transcript clementine0.9_017433m (loc us clementine0.9_013023m.g) derived from phytozome v7.0 (c hr-ID scaffold_56; pos 1338080 to 1339055)
aaatactcccgtgacggtgaacggacacgtgtacgaatcgcattccacctttattttataaattagtgtagttatgttggtttatttttttatttagtgtaggagaagaaagtctagaacacttccgttgtagtataattgtttagtgatattatgctatgtgcttattcgattatcaaaactaattaccaatttgtatgacaatttcaaaataaatgcatacatgccatggctttgttggattgtttgtagggatgatgcggcattgctgtctttctaggttattgttttgtaggagaaagatgtattgttgtggcaagtcatccgtgcaacaatccaatcagctgtgagtgtagttggtaagaataataaatgaatatacacatgacataatatcactggatggttatactaccccaagttgttctaggttttcttctctttagagaagtgaaacagtgttttgtggctctatgtgggatggaaatgtgttaataattgtggcttttaattcacaattgttgtggaacactcgtcatgggtaatttataacccaaatgaaaataggtatttaccaaacactttaactgttgtgctttcagaactatgcatgagcagaactatgtataagcacaacagtaaccaacatacccttatgaactggggttttgcattaattttgttttaagaggaggattctgtttttgtgtaccatattaggctaaaagcaccggagggagaaatactttagatttgagtgagaattactagaggaaaattgttttgaatgccaatgagtgtctgctttttatattattctcttagaagaactgtgtgatgctgttttttactgctatggtacaagacatcaaattttgtatcagttatgcatttgggtttctctttatttttaatgtattattttcgatttcattttataggttcagaggcacaaagagtacagacagaggataat

SEQ ID NO: 88820 - DNA, 491 bp, Citrus clementina
  Intron number 3 from transcript clementine0.9_008852m (loc us clementine0.9_008852m.g) derived from phytozome v7.0 (c hr-ID scaffold_124; pos 69968 to 70458)
gcatttcaagaggtgagcttttctttcttcatattagcatattttacataagactgacttagtgctatggtatcatatcttttttaatatgaacctattaaacatatgaaatttaatagttttcaaaaataaaaattgatttcatattgtatgtttagcagtaattttggatgtgagaagttagaaaatttgggtttgaattcaatttcggttcagattgtatgagtaaaagtgcaacaatatgtaaaattatgtgatgaagatttaataatattttacattttggacttgtccgtcaggcctcctacctacttccccctcccaacctcaaattctttggagattgctcattgttatttaaacttcattatccaataggcttccagctcattgcagatttctttaaaatgtgaaatttatactacttttcattttcattcaaacaatagaaacttaattgtcagatttaaccctttgtttgtgccaggact

SEQ ID NO: 88821 - DNA, 687 bp, Citrus clementina
  Intron number 2 from transcript clementine0.9_000981m (loc us clementine0.9_000795m.g) derived from phytozome v7.0 (c hr-ID scaffold_8; pos 316008 to 316694 reverse strand)
cagggtcttggtgccgaaattggtaggattttttttctttctttttatcataataattgtattagatttttgtaattttcacatgtatttaggttctgacttatggaatgctgctgcggtgatattcccaatgtttttttttttttttttttttaaatctttgatatggtaaccttcatacaaaattgggctgaaaatgatgaggtctagtctttacatgatattttttagaatcttcacaacttttggagctggaattagaatttttcgggttgagtatgatttcctgtgggatttcttcagtccaaatattgtttttcaagtttgtaattgtttcttctggcctgtggaaaaactttagaatgcattggccatgttaaacttgtctttggtggtttcttcattggaaatttacttggagaaattgaggtctattcagtatctgtcatggattgtccgttgctttgcatgtgggattgaaaatttctttgggctagatttatttttatgcctttcttctagttgctgctgttgcttgagaattagaaggatgttataactggcatcattaatttgacttcaactgcctttgagctaatactaagcctttgattcttcattccttttcaatactactgttggcttcttgcagcaaagaatctgattcttgcgggtgtcaagtctgtg

SEQ ID NO: 88822 - DNA, 239 bp, Citrus clementina
  Intron number 2 from transcript clementine0.9_029991m (loc us clementine0.9_029991m.g) derived from phytozome v7.0 (c hr-ID scaffold_64; pos 295763 to 296001)
attggtacaagaagaaagtctatctagcgaataaggtgagattaataggaatgcaacatattaagagcggagagttgcttgattgtaacatggaaacgatggtgggaaatgaatgactttgtttgattagcattgaaatcactcaagagtaatcgggaacttcatttgattatcataataagtttgtcaattgcttcatttttcttttctgtattcatttatttgatttttttatgtag

SEQ ID NO: 88823 - DNA, 461 bp, Citrus clementina
  Intron number 3 from transcript clementine0.9_028616m (loc us clementine0.9_028616m.g) derived from phytozome v7.0 (c hr-ID scaffold_16; pos 1482460 to 1482920 reverse strand)
tccactggaggagcttgccgaaggttttgacgtacgtaaggacctaaacctatttccgttcttcacagattcttttgcaaaaattttttgttcgccttaattgcttgccagtgaagataagtaatttcttacacgctcaccggagggtgcacacattctgttgtgtgtgatgcatggcacgaatatagacatttggggcccaattgggtcctaacaagaaaatttctttagctgaaatatctgtttgcctagttcatatcggccgtttgagggattggaggtgtaattaaatgtctgcatatcatgtaccagatggtttagaatctgttgttgatggcgataggatatatgcatttatctatatatctatatatatctctgtgtgtgtgtattttttctttttctttttcactttgagtgtattttgaaattttgtttattgaactttgttttcctttcag

SEQ ID NO: 88824 - DNA, 507 bp, Citrus clementina
  Intron number 1 from transcript clementine0.9_011638m (loc us clementine0.9_011638m.g) derived from phytozome v7.0 (c hr-ID scaffold_35; pos 1378352 to 1378858 reverse strand)
aggtaccctttgatccctttcttctgtttcttttttctttaataattattatttgtttattattgtcattattattgatcttgctattgttcgtagttatagatcttcgtagttatagatctttgtagttatagatctgtgtacttgctacttgaaaaagattaattttgtgattatataactataaaaggtcaaattttgttagtattttaacgattttgcttctgggtatggttcaattttaggttatttaatctgatgttcttgttggggttcctttattgtttcaataatgatgttgttgattttgatctccaatttatgataatatatttaatttgtgtactaattggtggggtcctttttaggaggcttactgatttgcttgagaatgaaaattgatcttttacaattttgcttatttgttaattattcactgattaactttgattttttcccttgaatcctacagctcgaaggagaaacccactcttgggtaagtttttt

SEQ ID NO: 88825 - DNA, 1044 bp, Citrus clementina
  Intron number 1 from transcript clementine0.9_005277m (loc us clementine0.9_005277m.g) derived from phytozome v7.0 (c hr-ID scaffold_12; pos 4236299 to 4237342)
ggggtggccgtggtggacgtccgagagtgccctgggctagaggccgttttggcaactaatgccatgttacttcaaaggatttgattcatatttctgtactatgagttgaatggtggtacttatggcagttgattttttttttcttccatacccagtcagtggaggttggtttagcccagaatgcccaaatctaaaagctagtgtttcttcattcttccttctaaatgttttgcttcctttgtcttcaacattttggatatgagactacttgtattcttcttggtgttccatttgagcaatgtatagaagcagtctttcgatcactgtctggttcgcttgaattgcgcatgtgaaacatatgttgctgtagcattgggctgcccgtacttctgagttatctactgcaggcagtggaagttactgtaaactttcaccgttgtgcacgaatgtgattcgttacgatgctgcttgtggttggaaatgcccattgtgtgtctatcgaccgtccaacaactgctgcggggtaccagcctgcgtctcccgtgcgtaccaacattaatgctatttgtgggcgttggatcctcgtcgttagatttgtttgacgggataaatggttaaaaattttattaaaagagtaaagataaaaatttcaaagttaaaatgaatgttaccggaacaaatgtggatggcaatcgaagatggctacgtggattcatgacatacgcacaccttgtaccgtcctttaattttaacgaaaaacgacctcaagttactcatcgttatcttatcgcaactaacactggcggaccgtttacaaaggctcactttgagttttcgttctcagtcacctgaaaaaaggaaaaagaaaaataaaaaaaaatgactttaaacctaagcttgtgctctcctaattttatctccagttcttccacaccacgcttcgggaaaattcatgaaacatcttcaaatccaaacaataatactagtgctctcttgtcatttctactagccgccaagaaagcaacgagattaagaggttttaga

SEQ ID NO: 88826 - DNA, 877 bp, Citrus clementina
  Intron number 1 from transcript clementine0.9_022190m (loc us clementine0.9_022183m.g) derived from phytozome v7.0 (c hr-ID scaffold_12; pos 4221777 to 4222653)
attttctgaggttagttggttcagttcaaggttgtttgttctgagagttattttcccacttaagagtttattggagaatatttggtttgattgattaattttcactagatcttatgtagttgaaaactaaagctctttatatattgttgtatcctaagttttttaagtgatttggctgtttatggttgtatttctccatcaaggagtggaaataagtagagggaaataaggtcgtttgttaatgaattatgaaccgtgttattgattttttcttcttttgttcctggagtatctagatcatgctcaacttcgtttatttatctgaagattcttctatcaatgccacaatcttgctcggcaacactttcccacctcatctatgccaaatattggctatttcactatatttcttctcaaagctttcgtgttcattgaattattatcagctcaactagtcagaactgtgctgcggctagtctctagatattgggcaactgaaaagtatgggttgaattggtgctttagtattacattctgctagatatagaaccatgattcttctttcaagacatcactctctccactttggtgcctataattagacaagcagagggaaatttgtgtacaaatcaggggaaagtatcataaaactttatgtcaaaattctggaaatcgatcctcccttggcaatacagagttcttgaattccttttggcactagcacaaatgttcaaagtgaaatagacgacagtgattggaatatctagtgctttatgctatattttgactttgttgttgtatcaagttagattccctattaaataactcattatttttttcaggtcataggcctgctctttttccttccattgaaaat

SEQ ID NO: 88827 - DNA, 760 bp, Citrus clementina
  Intron number 1 from transcript clementine0.9_021151m (loc us clementine0.9_021151m.g) derived from phytozome v7.0 (c hr-ID scaffold_87; pos 1012526 to 1013285)
tgcaggtactttttttttgttgatattatttttttaaattttttattgcctttgattccattttgtgtattcctgctttcttttggttggtcttttgcagcatttttgactgcccatttgtgtttttaatgcttttgagctttcttgtatgttatacaattgatactcaattggaatgtgcaaaggcttacttttatttttctcttttaaaaaaaaaattaaatttgaaactgcaactaaaatctcaggtaccccaattatccaccttcccaccttttatttatttacttctttatttttattgttttattttcttggaaaaaaatgggagggaaatacattgacttacaggattctgactgatttattgagctcccaatcttcttttgttttgtgttgaaatctaaaagtgttatttgatgttactgtcctttaaatttttagggaattccaatcttgtagaagaaagttaacgggattctgcttgaaatctgattctttgagaattttccttgaaagttgctaactgaaattttgtatccataattttatattctttaatatcttttccaggtaaataggttcaaaagggctttccagaattaggtttctcagtgatcttaagaataagaggcatcttttgttttttgaatttggataatttctgtgctgcactgtttttctttgagtatttttccgttggtaaggttatcataatctttcattgccccaggaatttcactcaagactcaagaactgt

SEQ ID NO: 88828 - DNA, 816 bp, Citrus clementina
  Intron number 2 from transcript clementine0.9_035701m (loc us clementine0.9_035701m.g) derived from phytozome v7.0 (c hr-ID scaffold_103; pos 408203 to 409018 reverse strand)
agcttttggctgcacatcaagaaaattgcaaagaggtgatttttaatttttggatatgttgatatgaagagaacttcatctattaaatcgaatgtgtggtatttttcggttcactgctgttgggggaatgaaactaaatactcatttgctgcattgtatagtgccatttgattaaagatcaaaagaaagttaaataaaacatgagcttcaaatagttatttttttcattttagcttttcctctgtactgatttgcataatatagacatatgagaccgagatctgagtctaattttttgggaataggttgagctttctaatagattgcttaaatgtagtttgagctcatttcatcgctgctgcttatcaagctttagctgttttaagcacatcatctttcctgtaaaagaagtgctattgtcctagtgtgggctgtttattcatttttcctatttgattgtgattttgaagatcgtttcctcctcgatcaccttatgattcttagctatttgttagtaacatttgtagttttagttgttggcttcctgcctaacaaaaaaacattgatctatgtttcctacatatatgttgatcagtgacaaaagaatagatttagcagattcttctggtttcagtaatcttgcacgaaaaatataatgacatactctagtcattgttggaaaacttccaactggtagaggaaatccataacagagtcggcatctttggagctccaaaactgtttttcctttttaatgtaattcgccaaattactttggtcatccttttttttttttccttcctttctccattttag

SEQ ID NO: 88829 - DNA, 936 bp, Citrus clementina
  Intron number 3 from transcript clementine0.9_025233m (loc us clementine0.9_024084m.g) derived from phytozome v7.0 (c hr-ID scaffold_93; pos 722867 to 723802 reverse strand)
ggatccgtgagcccccgcaacgcttcaggcgcagggtatgtttgctaaatttcatctcatataatgacttagttgctttccgatggttttgaaaacataaaaggtgcgttttatactagttgcatgaaaattcgaaggaaataaagctcctaaaattttcgaataattttgtcaatgtatttttctaagactaattctccataactgattcctttagaatcagtagtgctgggtctcttcttgtaacagatttaatttgattatttagattatttattcattttatttctaaacttgggttgatttgtattttaatatgattcatgtgttttaggacaaacattgttacgggagtaagatgtaaaaagtggttcatttaggcttagcatcagtttactgtgaaattgtggtcacgaactcacctagaatggataatgaaaaagttgtgatatctttgctcgtatgaagatcagtttttctgagtaaaactcaaatcttatttgccttctattactctgtttattatcacatccttttcatcagacaatttaataaaatgagtattgaatgggttaataaactaaagattattttccatacaataatgttgccctaaaggaacagctcacattaccactactcttttttcctcctctgtattgtcaatgagatgttgatatgttactggcaaagatgtgaaaagaaaaaaaaaatagaacattcaataagtgatagtgtttttatgtttagcatttgtaaaatttaaagagttattgaattctttgatattattttatcaatttatctggaattgttgtattcatcattgtttcacgtttggagatttactaattgtagtactagtcttctctttctactttcctatgttgctcatccgcttgacttcctctgtcactcttttatgttgtcaatagg

SEQ ID NO: 88830 - DNA, 624 bp, Citrus clementina
  Intron number 1 from transcript clementine0.9_014102m (loc us clementine0.9_009059m.g) derived from phytozome v7.0 (c hr-ID scaffold_16; pos 3785585 to 3786208 reverse strand)
gccatttctggtgctctttttaatctttgactttctaaatttttttgacttttttttttttggttctaaaaaaaaaaaaaaaaactgtttgttttcgttactttggattaggaaaatttatttattttttaattgcatttttttttcggttgcttgttgctgaggaaatgtggaaaaattagctgctgttcttatcttctttcatgttgtgttggcttcaaaacaatcaatcttttatcaatttatgtttaattttggttattttcctgcgttttctaggtagccaaacagttggggttgcatttacatgttgttcattttttttttctttcttttgctgaaatttttttcaaagataaaacttcgaatttcagccgccttaagtaggtcatttaattactttcatactagctttcatttgattccaattcagtgttgaattattgttatgctcaaaagcttattttacatgtgttttggtcaagaaatatgaattctagcatgtttttgcccggttaatttttattttattaattgatttagaaatggtagttttttctttctttacttatgtctctctttcaatcagactccagaaagctcattacttggggttctacagat

SEQ ID NO: 88831 - DNA, 460 bp, Citrus clementina; identical to SEQ ID NO: 83354
  Intron number 2 from transcript clementine0.9_014181m (loc us clementine0.9_006462m.g) derived from phytozome v7.0 (c hr-ID scaffold_12; pos 2695797 to 2696256 reverse strand)

SEQ ID NO: 88832 - DNA, 705 bp, Citrus clementina
  Intron number 1 from transcript clementine0.9_019964m (loc us clementine0.9_019964m.g) derived from phytozome v7.0 (c hr-ID scaffold_16; pos 1319800 to 1320504 reverse strand)
cgaggtttggtcaagggaaaagtgaataagccgaggtatgcaaatgatgaataaattcccagttctcataaaaattttctctgtcatttctattttgcgagattttccctttcattttatttaatatttatgggtaggttttgttaaaaagaaacttcaggtccagttactgaacccatgtatgtacagcttgggtggtcaggtggcttgttgtatgtttaatgagaaagtgagtgagtaggtttcattttgcatatctttatgttgttgaatgttgattccttgtctgtgacacaagatgacatcgcccaaaaaaaaaatataattaattaattaaatgattgatgttttagggaatagaagattgttgatgcaagagttttcaaaatcactccaaaaatcaaactgggtagatggttttttgttactatttacatcttgttgatgttagagttcgtgaaaatatttcgatattatattagactagactgtgaatcctaaaacccatcaaatgtactacgataatgtattacatactttctctctctgtcatattttctaatattttctctgtagtcaacagtcttgtgggatctctgagtgcataattttacgggacaaaatacatttgactttgatttttgtattactctttttgagatccaaacagggactgtggtaggaaattccaaactatcagaaaag

SEQ ID NO: 88833 - DNA, 533 bp, Citrus clementina
  Intron number 1 from transcript clementine0.9_004567m (loc us clementine0.9_004567m.g) derived from phytozome v7.0 (c hr-ID scaffold_88; pos 785237 to 785769 reverse strand)
tctcgtttccattatcagatctcttattattacatgtatgatcatgttcgtcatcaatttttttttcaattttgtatggtttcatgttaggttacttggaaaggaagagaatatttttaattttccaaggaaaatgaaaaattttaaaatttttgacaaagtgttgtgtttcttaaaaattttcccattcttttggcttacattatgtttggtcgctaagaaagtgaaggaaaactgaagaaaatgaattttgtgttttgggctatttttcttcacttctctgagaaattgaaaagttcagaattgctagataaagctaagtttatgcctgttttttttttttttttcagaattattatttttttgggttaaatttattaatattatttgaactttctatcatattagaaaatcctctgaaactggaattcttttattgttaattggtgggaagctgatagttgattggttccagttcaattatgcgattatggatttttttttttttgtcacaggtgtatattcggtgtgtg

SEQ ID NO: 88834 - DNA, 857 bp, Citrus clementina
  Intron number 2 from transcript clementine0.9_004917m (loc us clementine0.9_004917m.g) derived from phytozome v7.0 (c hr-ID scaffold_8; pos 4479354 to 4480210)
ttattgtggagggaataaatttccatcttcataaggtaaaatatgttaccaggtttaagaatctgagaaatttgtcagtctttggcattaatattgtctatttcactcttgtttgctaaatgtattgacctgaatattgtgcaagctattttgaacctataaattgttaagagtttgaggcagcttttggattctattagcgtcagagaatctagtcagttgttgtgaaagcatttttcgttgtgaaatcttgatatcaattggagtgtcgggcttttcaagttggtttcagcgtgacataaattttgctcaggggagacacaattccatttatttccaccttgaaataaccatctttactcccttcccttctttgagacaatttctgctgaattccctttgctgttagctctgctcgagaatttgtttgatgaagtcttgaaaacctttgttttttaaatttggcatgcacaaatttttgctaaagtttaaaggcaatcaatatatcatgtcattttaatatttactatcctattgctagatcaaagtgccattctactgatttagaaatacgttttatggttactctcatttttttaaaaagaaattgatgaggtatttttcgtgtaaatgaaattagttcgtttttacttgtagtattataggctgattacattgtctgccaccagaataaaccctgtatcactgcaggtgctgcaattagtcttaagtttagtgctctctttagactctgaagaatagtgcccatatgagggaaaaaattgtacatagttgttgcattgtaatttaaagaagatttacatgtatttatgactgcagtttccattagtgtcgaa

SEQ ID NO: 88835 - DNA, 539 bp, Citrus clementina
  Intron number 2 from transcript clementine0.9_008731m (loc us clementine0.9_008731m.g) derived from phytozome v7.0 (c hr-ID scaffold_84; pos 118797 to 119335 reverse strand)
cccttccactgttcataatcaccaagaccaacggcgtgagtacatacctattcttctctctctctctctttctctcttaagatccttcaaaaattttctgttggggaagattctttttgagaaaaagggttgttgtttgggtcacaggaaaatcatgttcaaacagattgaaaatctttcatgacagtactttctttgaccggatcctctcttaatttgcagcacaaaacgaaagttgattttttgtttttttttttgtttttattgatttgatgcttttacaaacaaacccaaatgaactctacatgtgtactgaaaagagtacgaataggctttgcctttttcagctttttctttccccttttttttttctttgatatggcagcagagagagagctgcaaatgcatgacagttcctacaatttctcccttgctttaatttgtctcctctgctttttaatcattaatacttttcttgcaaaggaatattattcttattaatgattattgttaaaattttgccagcagagagttcagga

SEQ ID NO: 88836 - DNA, 766 bp, Citrus clementina
  Intron number 1 from transcript clementine0.9_019157m (loc us clementine0.9_016912m.g) derived from phytozome v7.0 (c hr-ID scaffold_12; pos 1068565 to 1069330)
taacaatccgatagatattgtctcttcaactcctggtaaatcgctcttttttgtgtgctttaatttattcttccttgaattgtctctcttttgtttggtcgatggtttacgggcctgtgtttggtcgctgagaaaacgcgggagaaaatatggaaagtttttaatttaataatgtagattagtctagatagtcgatagtgttgtttatgagggtcggttggttttcatttggttacgatatgtgaatttttgtttgtttacttcaataattttggacaatcttaggtgataatgatagaaacagatgcatttcccaatttgtttttaatcctagaaaataaaaataaaaatctttctttattttgctttgcaagatgaaattgggatcctggaccagttttagagttaattattatacttcacagaacttgatagaacttcgatggctcatggcttcatatagtttctttagcctatcgttttgaatgattaagctaactgcttcattccaacttattaatatgtttatagtagtacagcccaagtgaagtttcctaaaattgtccgaagagtcacgccattgtcttatgttgagttcgactgtattgcaaattctgaacaacaaatagagcaacttaattcattttatgcatccatatatatttgaattgtttagaaattatattaggtaattgataaagaagattaatgggttaatgttcaatgttgttgcagaggatcctggtcatttgtcaaagcatcggac

SEQ ID NO: 88837 - DNA, 777 bp, Citrus clementina
  Intron number 3 from transcript clementine0.9_016950m (loc us clementine0.9_016950m.g) derived from phytozome v7.0 (c hr-ID scaffold_61; pos 1061833 to 1062609 reverse strand)
cagctccttgtcaagtatgctcctgtttctttgttatcagcattcgaaatttttatgagtagtgtgaacagggaagcaaactaagcaattgttgattgtaattaaagcagtttgtaatgactaactgaatgtggttttgattatgagtagtgctagccatcctaaaatttgatcccaaatattgtgccatcttattatttcacttggaacttgtgaaaattgtcaatcacttgatgaatggcacagcacattgcacaacagttggatgaaatttgagataaaattttgggatgtctattattgttattctttgattatttcaaattccggcaatggttgggatagttgtggtggaagtcatttcttgcattttctgcaattagaaagccttatttttatattacgttgaaaatatttcagattatacagtttgaaataggagagatggaggacctttgaatatttcttctataaaattctcaaattttgtttcgtctatatatctcttttcccaattttagtagttgacaatgatcaagagtcaataaacttgattgactaagcagagggtgctttgccacctaaatttgaaagccagtacttttaagtgttaaaatacttatatggggacaattggcaatttgttgaaggctgctggactctcaccttcataattcaactattttttgaatctatatatagtagaataactaaaattatgccattacttacattttccttttcttcaatgccatgttaggtccgttgattcaccgg

SEQ ID NO: 88838 - DNA, 627 bp, Citrus clementina
  Intron number 1 from transcript clementine0.9_003488m (loc us clementine0.9_003488m.g) derived from phytozome v7.0 (c hr-ID scaffold_12; pos 2119778 to 2120404 reverse strand)
gctggtttgtgaggtaattacttttttttttctctctctctttctatagctttcttgttattctttttatcaatttcttcttcttttagttgaacccagtaatctttttattctgttggaagatttgtttgtgctattggattagcttgggaggtcagctgcatgtattttttaattcatttgttatgatattgagttattgtttgtgagtttctggtttgatttgtttgattattatgccatttgtttgttgatgagttaacaacatctgggtttgtttcatttttgaagatctaattgtgaaatgatgattcatgtttgcttctttcataagttgtcaatcattaaaaagtttcattagcatttcagttatcaagttaaaattgaacttttgatggtgtaactgcattattatgtttttttcttcttttttttgggttgacttttctaacatgttgaaattatgttaaatctttgtagtcggtagtaattggatgttaattgcaaattaaatacacttgcttcttttgtttggattggatgttgcagtagtttgatggattttatattgtaatttgaatgttcattgcaggtaagttattggttttagagttttcgttgatttgg

SEQ ID NO: 88839 - DNA, 647 bp, Citrus clementina
  Intron number 2 from transcript clementine0.9_023599m (loc us clementine0.9_023607m.g) derived from phytozome v7.0 (c hr-ID scaffold_16; pos 1951102 to 1951748 reverse strand)
aagtggtgtctcttagaggttctaatctaattgaggtattcattaatccagaagtttacatttttatttagttttgaaattttaattttgttttattcattgatctgtaatagtgtatgtgggttgttaatattaagttcactttagcttgtggtttaatttattaatgtatgcattttaccataatgctagccattttatgcttcttaattgcttaatatcgttaattttattcaaacattagctcttagcatttgagtcattaattttaggcagcctttcaaatagctggtgttcaatttttgtagggatcatctcagttcagtccattttgttcaaagattaattttgctaatagttcgatgtgttattaattgagaggatatcttcaatattcaattaattcatcaaattttgacctccccaactctctctggaatatagaaatgctcttagttgtcatatatggatacggcagtattgctacaaataaaatggatgactagattaatggcaatttttttcctcacacttgttgtgaattttctttaccctgcataacaatgaggttgtttctgtgtttgctgaatacgcttctaaggttccattgtatttcttctatatttggctctgtctttaggtattgg

SEQ ID NO: 88840 - DNA, 748 bp, Citrus clementina
  Intron number 1 from transcript clementine0.9_023599m (loc us clementine0.9_023607m.g) derived from phytozome v7.0 (c hr-ID scaffold_16; pos 1951828 to 1952575 reverse strand)
tgccagtgattttgtcttttgtttctatttttctggtattattaattacatggcatttttattctggttaatgatttggtatttggttgattgttttattgtatttaacaagttcaatctaacgtaaaatgtttaaattttaaaattttactggcatttagttttctttgctgaattcaatttaatttaattttgagtatttttatttattaatttatttaattactttaattaaatgcatcaatttttaatataatgtaaatacttaattttttttttcacatactgtaacccactttataaattactttaattagattttgagattcggttttaatttataaattgatgaatttttaaaattatattttaaattgttaaatttacttttcggatctacatattgcgggcgactctgtggatccgaatataaaaatgtcaatccgaatctgaatccagatgtaagtacatctggatctagatccgaattttgacatccttagtccgactgtcatctaattaagtgacagtaacaaattttatgagggcaatttcgtattttcattgtattatttggaatagaaacgtatagttctgtaaaaacgggcttagacttggaaatagcagttttgtaagcacatttggagtaaaattcctcttcgcgcaaaaccctaatttttgcaaatttagggattttaagtacctaactggtgattgtttgattgtactcgaaattagggagaaacct

SEQ ID NO: 88841 - DNA, 910 bp, Citrus clementina; identical to SEQ ID NO: 83345
  Intron number 1 from transcript clementine0.9_021444m (loc us clementine0.9_021444m.g) derived from phytozome v7.0 (c hr-ID scaffold_21; pos 1513322 to 1514231 reverse strand)

SEQ ID NO: 88842 - DNA, 932 bp, Citrus clementina
  Intron number 1 from transcript clementine0.9_009601m (loc us clementine0.9_009601m.g) derived from phytozome v7.0 (c hr-ID scaffold_64; pos 1197248 to 1198179)
ggagcgagtttggtggtggcacccttcatatcaaggtcctttttttaattattaaacatctttttcatataattgcttttatgcttatttgagaacttcttcgttgctgagtgccttttagtttccttttttcttttgtgttcttttgaagtttattgcttaacttgagctgttttgccattcatattttgttctaaggatgaaaatttgaattttgaggttcatttcttggaaatttggcatgtgggttttttattttacttttaaaaatttgttctttctgtagttatctgattattttgaggatatttgggagagtgggatttggtttagttcaatttttgggttaatgatcattttttatttaaaaactgtgtagttgtgggtggttttctgacgattctgtctggtctaacggaagtccggaacattgggtattgaaaagttaatttcatttttgaatttgagctgtttctttattgaggaagtttaggactgttgggtagctttgtagatggtgacttctggagctagtattgaaggatttttgaagggattgcgataggttagatgatgtttgaacagatattttgccctgttaaggaaaatgtggatacttcttttccttcctaaacaaaatcaaatacgtgaatttttgcttgtgactagcaatttttcttgagaattttgatttatgtcgtactgatggttcctgtcatgatcgattcataatatcaagacataggcatcatctttaaggggtgtatgtttaaagctactatcaaacttcttttctcatatttatgctatatggaagttcaataattttactactacagtttcctatgtgatgagctggacaattggttgttacaatttttggtactctgaagtttgtaaaagagttctttccgttcatatccaggttagtg

SEQ ID NO: 88843 - DNA, 898 bp, Citrus clementina
  Intron number 3 from transcript clementine0.9_019469m (loc us clementine0.9_019409m.g) derived from phytozome v7.0 (c hr-ID scaffold_12; pos 4589702 to 4590599 reverse strand)
gtgtactctcttgtatacttggttccttatctgaggtactataattgaattcaagtttgttgtatatcaatccactgcattgcgttttctttatattaatagcaaaattaatgagatatattggtgatgttcaaggaaaagcactgatgcagttggagtttaggtggtgttttaggtttgatggagtttcagtgatttaacacggcttgctattttaaagaatgataagcaaaatcacacaattttctgtcatgcaaggttgtgtgatgttagtgaagaaactttcatgctgcaaagacaaattattattagtattagtatttttttttttgagagatttttttttgtattagtattattattattattattattattattattttggttgggttttatactaaattaacacccttaccatttgaatcccaaaacaaattttattgtgttggttgtgaatttgagagaatgctaacttgtgagggaattacaaactggctgtcctatacctggtgtctccccttaatcattatgttttcttcttgttgatccttcaggtcctagtcatggtatgtttgtgattgtaaggatttcagtgaagttccctgttttgtaatttttccttttgtgcaaagtgtttactaagcatgccacatccctgcattcttctgatttcaacgtgaactaaaagatcattgttctttgtttgtgggcaactgggcatgagtcaaggatagaattcagtgttttgaaacttcagatatttcttgttaatagtagtacatatttgtgacaattgacataagcatgtaacttcatggactcatgaatttgattacataattttcctttgattttgataggtcgaatttatcgctatccccggaggagggctggc

SEQ ID NO: 88844 - DNA, 941 bp, Citrus clementina
  Intron number 3 from transcript clementine0.9_030328m (loc us clementine0.9_030328m.g) derived from phytozome v7.0 (c hr-ID scaffold_11; pos 5132585 to 5133525)
ttgtccgtggcgttgaagtgtttgtttcagtaagcttgaaacaaatggaaataggttgtatgtttgctcttgctctcgttataatatttgattttttttttattttcttgactagttcttgtgtacaatatttttgtattcaaatattgtagcgagaaagttggccgaagattgttgcaagtatggagtggagaatcaaagtgacaattcttgcgttgcaagagctgctcttcaatttggcacttcacatgatttgatggaaaatgagagggaaactttgcttgggattcttcgtgatcaggttagttcatccctaactagaaaataattcaaatatagaaaattatatgtaaattactactgaaactattatcttctcataaggaaacttagttctaagatactgaataaaagaatccattttaaagtttcaactctgaaatatgtaatgttttatattaaaatcattgctagtgacatccatgacttaataattttattggttcaaatgttgaagagaccttgtgacttcttacatcactagcaaagactagcgtgtgacaagtttttggccgtgagttctctcaattgactccaagcattttctttaaagacacttgcatctatagtaaaatcaaatccatgagactgaaggatgcatgtggaagtcttacagccctaatttagatattttcataggtttatttctattttaaccttaaatacagaagagaagaacactaacctaatatgaatcatcctcagacccaaaattgcataaattatccttatatatatccttgaagtaggcccaaattccatgattatgttggaggaactttttaattgaggtttcgctctttcttttcatttttctaactatgttacaggtttttggacatgtaggtacctgagccactacgggcgttaatcaacggaac

SEQ ID NO: 88845 - DNA, 594 bp, Citrus clementina
  Intron number 4 from transcript clementine0.9_006556m (loc us clementine0.9_006556m.g) derived from phytozome v7.0 (c hr-ID scaffold_134; pos 18002 to 18595 reverse strand)
tgtctagatacaagctcaagttcagtgctgacaaggtaatttttgtatgttaattcccttttcatctgcttatcataagttaaagaagttgttttcgttcttaattgaaattaattgactgacatttttataagtgaaaggtctatggtttgatctgtgggtagattattagggtattgaaagggattcatatctcgtgttttgcagcccagttactgactgtgtgtgtgagggcctggtttatgtgtaaacatatgtgtgtgcttttgtgtaaatacttacatatttctctgctatttcctttctgaaaccaattgcttgccttttgtccacaaagtgttaacaattaatatactattatctctttgtttttgtttgaggattcaattctcttttaaggacaagttggtcctagatgaactaaaattcaatcaccggtattgtttaaaatgttaaatattgtgtctgctttggccagcaaggggtaggagtattttgagtttttgattgttagataaacataatggtcttttagtctaatcttctgacttggggctgaaactctagttctggttcttgttttaggtggataca

SEQ ID NO: 88846 - DNA, 815 bp, Citrus clementina
  Intron number 2 from transcript clementine0.9_004432m (loc us clementine0.9_004432m.g) derived from phytozome v7.0 (c hr-ID scaffold_12; pos 3707245 to 3708059)
taactctctaggtaatactctttttctcattactgaaggtagcataaccttttgatgtaaacgaaatgttcatttgcttgaagtatttactctaattatacgttgagaaagcacatcctgtgatcatcatctttattattaattcttgtgtcaaaacctgaagggtgacatggaaaattttaaccaaaatcagcaaatatgtagacatcagatgttggcagtattacttaaatatgatgatctgttgaaatctgccattcactctcctgtttcagtgctgtttctctgttttaaagaccgttttgagcctgaattggaataaatttaaagttgctggatatggaactgtacttggaatcagtcaaccagactggcatattatctacccttctaataaagaagagaggcgcaacatttatgaaaaacttcatttttccttagtagtcaaatactgtagtatgcagtcaaatatttaaaatgtttcctctagaagaagatgagttggtatacaatgttattttgattgagcacagtgagtccaaacagggtttaaattttcattgccctccattttcaatacttatgaggtttttgagttttccagattaatctgaaaaatgtcattatttaatgggaaatgtttattgcttcgtttgtcaagctgttagttatattcttctttgaggatataattgggtgatttgtaagatttcacattctttaatgcaaaatatttgcaatatatacatatatatacgatcggggtgtttatattgatgttatacctgattttcatcatattcattacagaaaaa

SEQ ID NO: 88847 - DNA, 371 bp, Citrus clementina
  Intron number 3 from transcript clementine0.9_002628m (loc us clementine0.9_002628m.g) derived from phytozome v7.0 (c hr-ID scaffold_91; pos 369752 to 370122)
aaggtattagcaaattcaatttttgttgcataaatgttatattttgatgtgatatatgtatcttgtgaatgtagagcacttgcgttctgttccacaaatatcctaagattaaaaaatatataagtcttaaaatctatcttcatcaggtgcctttgcttcttaggagtgaattagcaatgttgtattcttttttcattatatattttttatgttgattgttatgaattttatttggttctcttgtcaaatcatacgctgacttccattcttctgctttgtttattccctttttaaaaatgttccatgtacaattttggtattgtataaggaaggcagggtaatggttttatttttgaatgtattgtttcaga

SEQ ID NO: 88848 - DNA, 749 bp, Citrus clementina
  Intron number 1 from transcript clementine0.9_004521m (loc us clementine0.9_004521m.g) derived from phytozome v7.0 (c hr-ID scaffold_16; pos 3050905 to 3051653 reverse strand)
aagaatcttatcaacttatcaagctctactcataggtatgttttttttttcttttgagcaatatatgaacaaaactcttggcttatgtttgtgttgtacttgttgggcattttggtttttttttttttttcagttaaagtctgattttttttccaatttagcatgtaattcttaaggattgattgctttgtatgtattgtacttggtgcgttaatgggtttcttttgatggtagattttactttttgggtttccggggttgcttgtgttgagtttattggcttgttctcttgtgtttttagtatttgtttctataaatttgtcttaggggacgaagtctttgctttggagcttactatcgtataatcattgcttgatttttgttctttttatattaaataaatctatttgttgatgtaattgaggaatattaaatgatctatgcgaaaattttaaattttatggtataaagtttcttcgtttctattttatttgtatctcaccactattaagggtcacaacttttcaggtcaagggtaaagtaattttattttgctttcttgtattttttacgtcaaccaagaagaacttttatatgtgcttcatccattctatgctataatctttctcttattttacttctttactatggtttgaactttaaattgggtgccatattaaattgttgttgtttatgaatatgcaggaattgggtattcaaatagtaaattctgcagctcaaatttcctc

SEQ ID NO: 88849 - DNA, 511 bp, Citrus clementina
  Intron number 1 from transcript clementine0.9_022226m (loc us clementine0.9_022226m.g) derived from phytozome v7.0 (c hr-ID scaffold_13; pos 3419506 to 3420016 reverse strand)
aaattacccacgagctctcttccaaccgctttcaggtatacataactggtgaatgtaatacaactctttttaaacccataactaggtgaaaatattaaccaggatttgcttttgatgctttattgatgatgcttaatgggttttttacttcttttaagcatacttttgtttcgtactaacgatttcggagggccattgggtgttttgtggaagttgagttacaccattttgttgtagatagcatttgacgctaaagaagcttttattcgtaataagaacatacaaggaaacttacccagaaaaaatattaggaagatttaaccatattctttttattaaatatgttgcctgcttattatctttcggccatctgatcaccgcatacacagggaaatctattccaatagtgtgtctagtactatgaattcaagaaattaggggtccttttcggctaatgtatgttgatgggtatgcaggataatcaaagtggtaccttgggggattttaaggt

SEQ ID NO: 88850 - DNA, 801 bp, Citrus clementina
  Intron number 1 from transcript clementine0.9_008820m (loc us clementine0.9_008804m.g) derived from phytozome v7.0 (c hr-ID scaffold_16; pos 512104 to 512904)
tttttggaactaacagagatctgactccaggtatttggaatttttcattttttgtttttattttggctatggattttgttgtacattttgtcaatttatgtcctcatttacatgggttttttgtttaatgctctctaaattaggaaacttgatccgggtgttttttgttttagctacgttctcgtgttttggcatctgtttttcacacatttggcatttttcttttaatgggtttgaactgatctgattttttgtgatgacaaatttgtccacatctgtctcatttatgtggctctccctccatttcttttgtttcctttctacgaaagtttctttacatttgaaaatttgattttttttttcccttatctttttgtcaagatttgcagttctggaatctgggtagtttatcattgttggccacttctaatgcaagtgcttgaaaatgttttggcggtttcctgtcaatttctactctttattttgacatttaaactcatttagtaatggtagtgtttatggttttgttcattgttgaattgtttcttaagctcttagttttgtcttaaaagtttatttttgaaagggatgggggtgggagttaattcccagtcattttaacataattcttctttgaattcgatgatagatcacatatgctaaattttcaatcccataaatttgtggcaatttttcattttcatttgatatcatttgagctttaaatttacgtgtttgtataaaaataaataaataaataaataacttgtttgtatttttcccaaggtaaattggtaggaa

SEQ ID NO: 88851 - DNA, 653 bp, Citrus clementina
  Intron number 2 from transcript clementine0.9_008639m (loc us clementine0.9_008639m.g) derived from phytozome v7.0 (c hr-ID scaffold_16; pos 1862570 to 1863222 reverse strand)
ttcttcctctccagcccccggtgcccactaccccggtttattttcttgtccctttattaattttttttttatattatccatttagttattgcttatcctctgcacacacaacacttgcgaaattgaggaccttgcttcgtttaaataattgttaaagattttttatttgccggtgctcacatgcatttttatcatgcatttaataattctcatgtatttagttgatggagccctttaataaattgaagataaagctaaaagatcaagaaaaattctaaatccaagaccagtttttttctttttcttttttggtatggtcttttaaagtgttcgagttgctgttatattaacattcctgcttcaaacaatagatttatgacaaaaactttgcctggcaaaatggatagcagtaattggtataatggtacttgactcggatcaacttactgttaattcttttttcctcttttgtagtattcgctttctgttgggtgctttggacattgagggaaaggaaatatatatatatatattttttttgtaaaaattgtgcgctagtgagtttttagacttattgtgttcttccttgcccttttccaatggctacttacaatactgcattgtttgatttgagttttcagagcaactgttgg

SEQ ID NO: 88852 - DNA, 537 bp, Citrus clementina
  Intron number 1 from transcript clementine0.9_002685m (loc us clementine0.9_002685m.g) derived from phytozome v7.0 (c hr-ID scaffold_88; pos 73916 to 74452 reverse strand)
tctttttttttggcttctctttcatcactccctctgtaagttgttcatcgtattcatattcttagcacattcacatcacacactaatcacagtcactacaaagttttaatccgatcccaaattcttccctttcccgaccaaattagattttcacatatccattttactccaagttagttttttattttttaaatttttaagcctgctgaatgactttcaatggtgtgattttgattacccatttggataaaatgaaaaagctgtgatctttgttttaaagtttgaatttttattttatgtcattattactgtgtttttttttgtggttttggggggggcgcgggggattgtaattgttagaggggtgtcaattgtgtgagtttgatttctacccatttggaaaaaagaaaaagaaaaagcagtgacccatttggaaaaatgaaaaaatgaaaaagcagtgatctttattattaagattgaattttgatcttgattttgattttttttttttttgggaatgactgttacaggtgaaaa

SEQ ID NO: 88853 - DNA, 965 bp, Citrus clementina
  Intron number 2 from transcript clementine0.9_020685m (loc us clementine0.9_020685m.g) derived from phytozome v7.0 (c hr-ID scaffold_60; pos 817575 to 818539 reverse strand)
ctctgtgtccttggacttagtttctggctttaaaagtgagtgagctatctctatctcttatctctatctctatatctctctttatgtctatctttatgcatgctttacttttacatttcacatgtcaaatgctcaattgcataagattgatttatccaccgctatacttgctgaactcagtttgttgattattctataaccaagttcatataactgtcttgaaattgtttaagtttagtgtaatgatagcgtcacgaccgctttgtacaaataagtgtgtgaaaattgatgtggcatgcggacattggttgtataaaactattatgggctcacataaggagaaaattaactgttattatttttcagtcaatttctttatgttacatgagattgtacacactagtttttacaaaattatttgtggctctattattattgttaggcttatactattattaggagcattagcatcatagctctggttttgggtgtaagtgatgaatcatggtgtaagtgataaatcatggtgagtgtgaagagctttggttttgtttgactgtaagagttggggaggggctgatgatgttgtagaagctgcttgtttcgtattcatatatctttaggatggctgttgtagagcttccagagtttagtaatagtgaagccataaccaatcatttgagtgcatggctttatcagcttgaacccactttttttctggtccatacagccttttgatcctctttaacttacctccccttgaattcccctttttggtggttaagaagagttccctttctatgtcaattttgatgtgtgatgctacagaatgctataggataggccttgttttacccttttatgtgtttcacatgagattgattgttcttctttggtggttgtatttctcctaattctgtttgcatgctctacagatcaatttctccggacgagccaatctggga

SEQ ID NO: 88854 - DNA, 1028 bp, Citrus clementina
  Intron number 2 from transcript clementine0.9_025691m (loc us clementine0.9_025691m.g) derived from phytozome v7.0 (c hr-ID scaffold_39; pos 1962465 to 1963492)
ctaagtgtcctgtgactggcaagagaattcaaggggtaattgtgccctttttttctttttaaatctgtctagagaagtcttaggatttgttttcagtgttgaagaatatgccttgtaagaaattgttacgaaagtatttgattttaataatttaaaacaataaatcaattggctacattaagaaataggctgacaataactgctaattagattaggttggaaaatgtgcgatctcttgttattattttttttcccctcttgcgatgacgttttggtggtcgatttccgttggaaatgtttgtatctggtttgtgtacctatttgggagaagctgtttggtagttgattagttgacattgttgttgaaattcttaacacttgtttggcaaacggatctgtctttcatatgccccaaaccactgggaattgattaattattatgctgtagctagtctaatttacattttgttaggtaggggtttctcaaactgatattcaacattttgtttaaagttgctaattttatgttgggcattgtggaggtactagagaactgttctacattgtattagtgatgcaatttgctactttttaatcgctatctttattaaggaatgtaaaccgtaggttgtcttgaatgtgcattcagttaactttcagacctatagagatattaattcagtgattgacttgggctattttgtaaatcaaagagacaaagactgcttatatggacaaatgcaaatataatgcctatctctgttggcggtggtggaccgagtattattccgtggaatacataaaagccaccaacattatcttcatagagtttctgttgcatttctttgatgattttgttcatgaaaactgggtgtcaaattgatatttacttgtattggttatcctaaatttattgtggattcattatgagtgtgttttaggacattaacaccttgcccacagaagtatgatagactgtttctatgcgcgcagattcctcatttgagacctgctgaatataagaggtc

SEQ ID NO: 88855 - DNA, 769 bp, Citrus clementina
  Intron number 1 from transcript clementine0.9_031743m (loc us clementine0.9_031743m.g) derived from phytozome v7.0 (c hr-ID scaffold_13; pos 4540486 to 4541254)
gtcaacttacgccctgtgcttcctggtacttctttttatttatactatctctttgttttaatttactctgcttcgctcccagtggcttggccgagtagttttcagtcagctttatttagttagtcactcgagttagaaatcctgagtaggaggcatgatgcccaaaaaaaaaaaaactctgcttcttttttttttttttggttttgattaatttctcttttcctttgcaggtcatatccttcttccgtttatgagatcaaaccatgtaaactatggtgtcatttgacatgtatcaatagttgacctgcataaactggatgcatatccgccctgtccgagtaattagacttgcttctttaacaaatccatcccctaaacatattcatccaattttatttgtttgccttgtataaaatttctagtagtaaacttttgtgtgaatctgctttttgcataatattgcgagtggaaaattcaggaccaagtgattaatagagttgttttatgtaataaattcattgttctgccttaatatccattaggtgtgtaggcttgcactctgtcagagattggtacaatattaggaatgcttcatgctgctgttataaactttaggcacatcccattgtgtataattttctcttgtctgcatatgctttcatgtgtgtgtgtgtgttcagagctttagttcagctgtacacttaacaatgtgtacatgtacttgtcgtcccaaagcgtgaagtgaagcgatttgctgatcttactgctg

SEQ ID NO: 88856 - DNA, 703 bp, Citrus clementina
  Intron number 1 from transcript clementine0.9_019879m (loc us clementine0.9_019879m.g) derived from phytozome v7.0 (c hr-ID scaffold_61; pos 452097 to 452799 reverse strand)
ttcaactggcgaaaattctgtggagaggtatttgtttatttattttaattgttgccatttttcttttttctgccctgatttgatcattattttcatgtatgaacaatataggagcttctgtgaattatttgtacgtctttttttatggttttatttatacgcatcaactgggtaaatttatatgtgcttcaatgttaaatgtggattgcttgttcttattggtgttgaggaagatcttgtgtttgtgttagttttgtcgttaatgtaattagtccctcactgacttgcctttccaatcagtcttttgtttgaattatgtttggatggatttcctttgatgccatctctaaacccaaaactattcatttgatttgcctttgctaatggttcttaagtagcttttctgggtgagccattggtcactcgagttggaatttgaggaggcaagagactaaatatttgatttaagattgtccaccccttttttttaattattatgaaaaggataacaatcgtttgattttcttttataattgtactgcaaaagttgttaccttcttgttttgctcatgccatggtggttgagggtttagaatcttttgcaaactttatcactcgatgtttgagcttatgcccttctgattgtgagaatatataccttgctttgaccttgtttttgcctttattttgtgctgcagcaaag

SEQ ID NO: 88857 - DNA, 979 bp, Citrus clementina
  Intron number 1 from transcript clementine0.9_003258m (loc us clementine0.9_003258m.g) derived from phytozome v7.0 (c hr-ID scaffold_83; pos 399638 to 400616)
aaaaagaacataaaaagccatgtgggtgtctttttttttttttttttctttggcttgatttgattgaccatagaaacgcttcttgttcttgttttgatctgttgatgtatcttaggcgagctagtttgtttgttttgttgttgatgatgatcaagagcttcgccggtggtgtgttttaattgattgtttattagatgaaacttgtgactcttgactctgattgcaccgactttgttagtttgagttgcaatctttgagagtgttggtgtgttttctcctgttgctatctgtttggttgctttgaaactgggagaaaggaaggaaataaattatgggttttaggttcttgttgttttggtattgtataaatgaagaatgacattgaacgaattcttgtattgtattatgcttagctcagctatgtgcagaatctatctttttgagcaattagtgcctttcccttcatttcttttagattctgattgaggaattggcttttggatcttatctactaatatggctgattaatgcattgttggtgattaggttattgtcgaagtttgtgtgagaatgccatctgagctatcaaaagataatcagtaattctttaaaggataaaaattttaagaaaatctgtggttgtatttttattatttaaaacaaatgaatttctgtaattctatcatttattttcagagagaatttgatccaagttaagtcatatctatatgtcatttactttttattgagctaaatgtggaagatgattaattgttgtttagtgacaagaggggtgcaaaaatggtttaacgaatcaaatttgttaattttatatcttatgcttatgaactgatagagcttgttttcttgtgaatgtgtttccagaatggttcattgttttagagaatcaagtttgttgactgtatatctaatgcttacaaactgatggagcttgttttgttgtgaatgtgtttccaga

SEQ ID NO: 88858 - DNA, 1018 bp, Citrus clementina
  Intron number 1 from transcript clementine0.9_006054m (loc us clementine0.9_006054m.g) derived from phytozome v7.0 (c hr-ID scaffold_79; pos 1125239 to 1126256)
gctgcatcttactcagtgccttcagtaagctctagagcatgcacctaccccttgattaatttcttctctttaccaaacacatgcattttcttctatctttagctctttaagcttctccattttgcttttactattattgttaaatactaagatgctcttgcaaaatgacatttccaacccttaattagtttagcaatatgctgtaatcataaattctcaattactagcagttctcaagaattctgtagcactagaaatatttgttctatgaaacaggcatgcatagctatgaatacagtttcactgctgtcaagtgagtaccttttttcttttttttttaatcaataaaaccactttacatattcaagtttcatcaattgagcaattcgtttctaatttcttctttggtttatgctggtggtatatgtcattgttcatatgggacaatgtctctttagtctttgcattcaattattttattaataaacggtaaaagattattatttaattaaaaaaagaaagaaagaaagaaaagaataaggaaaagagggtaaatgatttttcagatgaaggcatatagtatctcatatttgtcagtttatttatttatttgctatttcacatcaacaagtactatttcccttcacattttctccaattaaatatctgttttataatattgttcaatatgcgtatgttttatggaagactagctatctcctattgaatttgatgagtaacaacattctttttctcgattagatttaattttaaggtggatggaacataataatactacatgtagcaatgattaaagaaaataaatagattaagaatgaacttagtgctaaaattattgatcttagataaaacgttgatcgttttgttagtgtagagcaaagttttgatgctagtagaaattcaaaaattatgtcaaaaagtcacatagtttgagtaattgatgagagaatttcgttgagcagatattggaagaagaagggcggtttgaagcagaagt

SEQ ID NO: 88859 - DNA, 367 bp, Citrus clementina
  Intron number 1 from transcript clementine0.9_006277m (loc us clementine0.9_006277m.g) derived from phytozome v7.0 (c hr-ID scaffold_12; pos 1916024 to 1916390 reverse strand)
aggaggaggtattttgtttttatttttgcttgaaagtaaaatgtgaagttgaattgctaaacttataatatggatgctttgatatgatggatttgtgatctggaatagcttgtctttgagggtttttgaaattagatttagatacttttaagtaatataatcggccatttttcaaatcgcattgtcttaataattttattcaaggatttgaggctggatttgttatgtaaattgtttcatgaatagcatttgtagacattgcagttggcttagtaattaatggtttagaaagttatcttattcttcccatagcttgtgttgttcctaagtgttgtggtgttgcagcttggtgtttttggtgacagtg

SEQ ID NO: 88860 - DNA, 252 bp, Citrus clementina
  Intron number 1 from transcript clementine0.9_015811m (loc us clementine0.9_015286m.g) derived from phytozome v7.0 (c hr-ID scaffold_12; pos 4327725 to 4327976 reverse strand)
gctgagaatctcaaaagacagctctttggtatgtatatgttctcttttccctttccttttcttcttttttttttcaaaaaatgtttttgtgtaggagcaacttattttcttcctagatcagattattatttatttttatttttttgagatgatctagttggggttgatatttttatttttttaacttttgattttaattgttgcgtttatttttcaggattgcctccacgttacagggattcagtgagagct

SEQ ID NO: 88861 - DNA, 802 bp, Citrus clementina
  Intron number 1 from transcript clementine0.9_012214m (loc us clementine0.9_012214m.g) derived from phytozome v7.0 (c hr-ID scaffold_121; pos 155772 to 156573 reverse strand)
ccgcatagagttagggcaaaagacttaattctagtgtatgttttttaatttttctcttcacattcaattcttaatttatctccttgtctgtttttgagtttttgtttttttaattttctttgggttagtgtgaattattttgttatgtatgtaatttcattttgctgtttggttgcatagaaaatgccgggaaaaaagagtactggagtcaagaaagagaaatgtctttggtttcttcttaacaaataagtaaaaccctaaatttttcggcatttttttttttcatttttggctcttatgatactcgatttatatgttcgattagtgaagaactagggtttgtgaaaagggtaagtttgtgtcgttaagtagacatgatctgatgaattagttggatttattgactctatcattgttcgtgttcataggtttggaataaattgcttttctttaactcttaggttttttacatggttaacttttaatgcttgacttctccttctccacaatttaattcatgtaaaatgttagtcactgggtaatgtttttgtttttagttgtttgggttttatgtcttgggttgcagggattatacagttatgtttcattttcagaatatggaaagcggaatgtgagtagaattagctgtttgcttcactatctttctctatctgtaagcatttgtaggaagattcttgattaattaattaattttgttattaaggatttgaacccacttgccgcatgatgccactggtgtttgatttgaccgcatttttttgcagccagcatcccagttcaa

SEQ ID NO: 88862 - DNA, 187 bp, Citrus clementina
  Intron number 1 from transcript clementine0.9_023762m (loc us clementine0.9_022031m.g) derived from phytozome v7.0 (c hr-ID scaffold_25; pos 3159436 to 3159622)
caagattcttcgtatcataggaaaattctttcccggtaataaataatgataatgtctctgtattcttctccttcttcctcattaaactttttttattttttttcatttgatgtttgttgattttgtgtttggtgttatttattaattattagcgcggcttctgagcgttgaagtgctgaagaggtat

SEQ ID NO: 88863 - DNA, 760 bp, Citrus clementina
  Intron number 1 from transcript clementine0.9_024894m (loc us clementine0.9_024894m.g) derived from phytozome v7.0 (c hr-ID scaffold_8; pos 2607476 to 2608235 reverse strand)
gggtaacgttactcatttcctgtgatagtgtttgtttctctagaaagctcaaaactttttgagaaaattttgtttgtactcgtgtgttttttttattatagagatagctattgttaatgactaaatttgactgttattttaaaaaaaaaattaagtagtgaaagtttttcataaattgagagtgcgtttgctagcggtataaattaatttgatttgcagaatatggattggccggtgatgtgagaatttatatttgctactcttgatgggtttactttaaatccatctgatgattcttatccaccaagacctctgaggtctcttcataatttcttttttaagtttcatcttctttcaaattgtgcatgcatgtgtctgtcttaagatttttttttgtgaagtattatctgttccacgtctgaagtttccgtgctgttttggaatatgatcctccaatctgattggaattctgatatcatcttggtgactttatttccaagtttatgggaaaccttaattttggtttgctagctttttgtttgttattataaacatacatgagttaaagacattgcttttgtgttgtcctatctattgtcgctaatatacgaaatcttgttggagatatgctacttttacagttttttcccaagctgattactgaagtttttggatatgtgctgattagcattaggcatatgttcatacgttctgacagatttataatctgcgataaattgtttacaggaagacacgtgga

SEQ ID NO: 88864 - DNA, 928 bp, Citrus clementina
  Intron number 1 from transcript clementine0.9_015640m (loc us clementine0.9_011409m.g) derived from phytozome v7.0 (c hr-ID scaffold_195; pos 9680 to 10607)
ctctcgtttcaagactccaagggctcaaacgcaaggtcagtttcctaattagattcaaaaacaatataattcgataattgaattgtttaagcaattatatcagttaattgaaggtgatttggttacattgattagtgaattagcaaatgactagaaatttaagattgaaaaatcataattttatagtataataaaatctaatcgaaatcctttcactaaatagattattatttattgattttgaactatctttatccaattatcaactgatcaaatcgacgtaaattgatgaataaggcatacaagttcatacttgctcagtgattgaaatgtatttggatcctctcagctggaagagggaagtcgaacagagcatttgcaggcacagaaatgccgggctcgactcaatcacttagaatccgcggatgctgaaaatttagcagaatggaataacacacgagtgaaacggattcttgtagactacatgttgcggatgtcatattatgaaactgctgagaagttggctgaaagtagtaatatacaggttatattacatgcttgtcccttttgcaagctgcttgtgtgcagatatcttttttttttttttttgactggatttgtgatatttcgaacttatttttactcgaaactgaaaattcccatcatattataattaacaccaatcagaggttttggggtttgatctattttccagcataggtaggatagatctcttgtttgtctcatctgtaaatgagttttggtattttctatttgcatgggtcagaaatctgatcaaaggtactgcagtatgacttaattgattatgtttgtatatggtatcattggttatatcttgtgtgctggcatctaaattgatcttcgcatgccaggatcttgttgatattgaggtattccaagaagcaaa

SEQ ID NO: 88865 - DNA, 791 bp, Citrus clementina
  Intron number 3 from transcript clementine0.9_034607m (loc us clementine0.9_034607m.g) derived from phytozome v7.0 (c hr-ID scaffold_13; pos 1838983 to 1839773)
aaaaattagaagagttagggtgcgtttggtaatattttttatttagtgttttttactcttactttagagaaagagactgatgtttttgtcgtgttgttttttaaaataaaaatttgtttgataatgtgttttcaaaacaatatatgaaaataataacagtaaaaatatgtttggttgtttatctaaaaatatagaatttttatagaatattttataaaataattttcttcaatttatttatacattttatattttatattagaattttaatcaaaataaagtcaaatttcatacaagaatgataacttttagaaaactctcttatattttattaagtttaagaaattaaaataaaatgaaaaataaaataataaatgtagaattaattagcatataacaaaataaaaatttatactaaaattatatttattatagacatttaagtagttcatttgtgctaattatattttatagcacaaaatataatgaacaaaagagtacaaaatatttgtatccaaaacatgtctaaatatctatatctaatcctttcaacatgaaaggcgtcacctacaaataaaccaaaaaaaaaaaaagtagctatagaatattcaaaataaagccaccattattcattcttactaggtaaaaattaccaaaaaaaaagagggctcttcatcttatatttgatataaaagaaaatcatacaaaatttcaatacacaataaacaaaaccacaaaattcaaaaaaaaaaaaagcacctggatactgttacttgatatagtgaagaaga

SEQ ID NO: 88866 - DNA, 894 bp, Citrus clementina
  Intron number 1 from transcript clementine0.9_018069m (loc us clementine0.9_015989m.g) derived from phytozome v7.0 (c hr-ID scaffold_16; pos 3877614 to 3878507 reverse strand)
aaaatttgtggtacttttaataaataaataaattcattaattttattttgtgggtatattcagattgttaactgaatcaataaaaagaaaaaattgagttttatgatttattgtgctaaaatttatgtctttttgagggttttttttttgggggttgatatggcatagtagcaacatggatggttttttttttttttggggggggggggggtggtgttacttagaaagttgaaaagaatcattggctctacaagtatgcaaattttcacacaggtcttgtagcctacgtccttttataatgtacaacatgtttaggtttggaatgtgaacttaataatcagtctgttgatgggcattgatcctgaatcctcgtgtgtgcattgtttgattgctaagaagccataagaattggaacttaaaatttttcaagtgtaaaatctctagtacccatgttcatttcatttagaaaattattctgtacaaagttaaaaatttcaggtggggttgagatgtttgatggccaaataggttcagacaaagcttaaaggctgttgacatacagtcctaacgtgagctgtttgtagcaatattcctttggataaaatgcaaggtcttcaatgagtacagagtgcaatgcaatctctgcctcaagtccagaagtgatatggtatgagaaattagaatacagtctaaagcattgaacctctgtagatattccaagtaatcacagatcatattccaagtagagtcctgctttccagctcttttcacattagaagaagtggcttatttgctctcttctaattattcttttgaatttttttgttgttataatgaattatcctaagtttcttcttttcaacttcacaaaacctttatttgtgtttgcaggtg

SEQ ID NO: 88867 - DNA, 552 bp, Citrus clementina
  Intron number 1 from transcript clementine0.9_012304m (loc us clementine0.9_012304m.g) derived from phytozome v7.0 (c hr-ID scaffold_70; pos 1043837 to 1044388 reverse strand)
ccttacaagacgggtaatttcaatctttctcataggtacagtttttgccgaccttttatttcattgagttttttattttttatttttttggatttacattttctttttttgtatggattttgtatggcgttaactttattgacgaaagtgatatctgtcaaagtacatttgagcgacgagcattcacatcatgtgcactcagattcttaatgttttcactagctatcgagtaaaattgttggtgtttacggaacacttttaactgtcctcctttggtaattaagcagaagcacacccggttataaacttataataccaataactgattatgagtgtatgatcttatttagtttctgtatcttctttgtatttgtttgtttggtctatatgatctgactgagagtttcacacaggcagtttaagtgtagtgttgcaattttatggcttttttcttttgagttgagttattggtgatgaggctaattgaattgtgacttgcttgatttgtttatttcagagttgttttggcaccactgactagacagagatcat

SEQ ID NO: 88868 - DNA, 902 bp, Citrus clementina
  Intron number 2 from transcript clementine0.9_020816m (loc us clementine0.9_020816m.g) derived from phytozome v7.0 (c hr-ID scaffold_8; pos 3746242 to 3747143 reverse strand)
ctgccaagagaaacgacctgagctctgccaaggtattatcctttttttttcgaattttaatttgttatgctttgccattacattgtgttcttatggaaaattgattaataagcatcaaacaggaaatgctgaagtgttagaaaaagttcaagttaattgccaaagtaatgtgacctttggattgaagtggagttattattattattattattattattttatatatatatatatatatatgtatatgtataatagcttttttttttcctatgtaggaaacttaatatttaagagtttacaactttgcaaattaagtttcacagtataggctactgtgagcttggacattacatttcactttcactttcaagatgaactttgctgctgcattatggtgtaaatctttgattgcttacacacacacacacacacacgcgcgcgcgcacacatgtaatttttgttttttgtagaaaatacttcagctttgtgaaactaggtttgtttggtttcatggaagttgaaaatcattaactgccatacttattcaatcgagagtagctggaccaaatcatatactttacactataatttgtcacctataagatttgttatgataaatctcatgatctggaaagaaatgggtgtatttcttgtatatttgcaatcttgtaagtgttatgagcttaatgggttctgactgacggtcaactctagtgtaggttggacatatgatctttcttgttactgtttattagaaaaatgttcctatcaaaagtattatattgtcacttataattagaaaaaaattatgattaagatttcttgtttctaataatttcagtttcttcctcatattctctgtttcagtctctggctcaggaacttgtcagatctagaaagac

SEQ ID NO: 88869 - DNA, 884 bp, Citrus clementina
  Intron number 2 from transcript clementine0.9_029875m (loc us clementine0.9_029875m.g) derived from phytozome v7.0 (c hr-ID scaffold_11; pos 2622693 to 2623576 reverse strand)
ccactttgagaaactactcatctgcaactaaacaggtaattgtgccttttataacttattacttgtaatgcaatgattttggctgtatgatgattgtattcttctatatgtataggcttttattattattattagtgaatcagctgaatgcttaagatattctaatactaatagttatgttcttcattatacttacaatgtatggattttgatgcattttaagaagaatatgaaattaaatatttgactgtagggacaacaaatatgttcgagcttttattagtataatagtatgtgaattaaaaatattataatttgaacaaactccgaagctttgaaactatgcactttcatgttgctatttgtgacagtggattttgattgctctttgttagcgactcgcttttacttgtttgctaatgtttataattcgtccatctcattatacttgaaagttggtgattctatgtaatttataaatccaaccggtatcttcttatttaaatccgtaggccagaagcaaagcaatctttttatgcattggctgtattagtaaatcacatagataaaatcacagggtttatattgttacttatttcttttctgtttgcaggaaaattcctagggatttgacagaggcatcactatctggtgcaggattatccataatagcagccctttctatgttgtttttatttggaatggtaggttgccacttgcatagttgtgcctcttttgtcggatatcatgggtgcattttgcatattcagtgtatattatcgtccacctggattgtttgtgtaacatgatgctttcatggagttctatttggcttttcattgtttctagaacagattaaatttaacaaaaactattcgcaattt

SEQ ID NO: 88870 - DNA, 860 bp, Citrus clementina
  Intron number 1 from transcript clementine0.9_003451m (loc us clementine0.9_003451m.g) derived from phytozome v7.0 (c hr-ID scaffold_121; pos 473352 to 474211)
acttgcccgtacagattcttgttactgataaaccggtgcgttttgttttctgttctttttaatctctgctactgctagggtgaaatgaaatggctctgtgtgtgtgtgtgtagcttttttgtggcttcaagatcattctctgtacatttaccgactttgaattcgtcggattcttcttgttttattcttcttttgttgaagatttgcgtagaattcaagtgcgtatgtagagaatgtgctttcaattaaaaagggaagatcgtatttttcgctttttttgaacttcaagtcttttgccgctttttatcaattttcttaaatatgggcttcgatttaataagagtatttttttttccttgtttattacttgattgttagtgaagataaggatttgacaactcatttgcttgatctgctgagctttctaagcattgactcagattagcgccttttctacttgctaatgcttttgcaagctctcagaggctatagcaaagggttagtgatgatttttttttttttttttttatatgccagttgaagcaggcttgtcagtttctgggtttgtgagtgcctgaactttgatgatgttctacaattatcatttccttttctccctgattgatcatttctgatttgattgatgacgcttctgctttaagtgatacaacaagggaaattcatatgctgattttctgttgatgattgagaaggataatttcattgaatgatttctctaaatgactggtttataaggcttctagttagaataccattaagatctaaccagcaaaattaaagtagtcattaaactcttatctcttttccttctgcagggcttttgtctgattgatttttcc

SEQ ID NO: 88871 - DNA, 765 bp, Citrus clementina
  Intron number 1 from transcript clementine0.9_006394m (loc us clementine0.9_006394m.g) derived from phytozome v7.0 (c hr-ID scaffold_61; pos 954772 to 955536)
ggggtacacttagctcattgtggcaggtcccgggggttttaacatctcctaggcttttttttcaaagattctttttacggggtttgttttattttcggcccttgcggggtgggttcggtttttgtcaggggcaggcatgtattataaggcattttacagctctcccccccccccccccccctctcttccacttctttttctgatttattttcagttttgaaattttcttgtttgttttcctattttgagatctcccactcaaaacaagatatttttgagatttttctttatatttcttgattaattgatgtctttgagcaaaatatttggagtatttgatgaatgatctgacagttactacaggcatagcctcatcttacttgtcatgcatttgaatctaaagcaagtgtttggtatgtaatggaatcttaagcatcatttgatcttcacagatcagtcaaagtatcatgctttcatggactattattagttataaagtttccattaataatgggctgttccctttatgctgatcttgctttactaattatatttactctctttaaatttgtttattttggctcctctcaacaaaattcttatagttcagtaccttttttatctgtcttatcattatccttgctttaatttggcttaacagcccatttttaatttgacttaacagcccatttttaatttgatgtagttactctaattttttaatgtaatgcttttttttttttttgtcatgcagaattgatttgg

SEQ ID NO: 88872 - DNA, 773 bp, Citrus clementina
  Intron number 2 from transcript clementine0.9_012690m (loc us clementine0.9_012690m.g) derived from phytozome v7.0 (c hr-ID scaffold_87; pos 364670 to 365442 reverse strand)
caggcagcacaaaaggtcagcaaagttcactgtgaattgctatatccaagatgctggtggttgttgattctttaatggcatattcttttaaaattgattgtaaatgttctgtagtttgagcatgcttcacggtgtgttagagcagcaatataggaacagggttggaaattacggagctttgaaagtaattcttgatactagtcttgcacatatgctatacacgtgaaaatggagagacttgattttaattaattgaaaagtaaatgtgattcacaagttccgcaagataatttagttggaaaagggagagaacattacaagaacaagagtactgatgaatgactatttaccctaagctattttctcatccatgtgttcatttaaggggcaataatctgatttagtttatcctgatgcggacatagcactagaaagaatgcagtgttgattaatttttttggttacactcagttactatgggggatttccaagtcatttatggatttgaatgtgaggctaattactgcaatatcatattaatatacatttgagttcaagtttatatatcgacaacttgtttgaatgactatctttatgaatgcattgagatctacccattacagctttccatattggtgaaaacttcttcaaatatctatcaaacttgtttgatgagctttgtgtttcacatgataatgctagtttcttagtagcttgttatcaatataattatacttttgcaggcaaaggaggccggaagtacacgattttgt

SEQ ID NO: 88873 - DNA, 327 bp, Citrus clementina
  Intron number 1 from transcript clementine0.9_025224m (loc us clementine0.9_025224m.g) derived from phytozome v7.0 (c hr-ID scaffold_8; pos 1535068 to 1535394)
ccaagttgttagatccagacgcgtcctgggacaaggtaactggttgtcgaatcgcgatccttgataaaccttctctttttattggttttatttgttaataattttgaaattagtaactgcttttgtgagtattaatccccgttattgcagttatttacctaattctactaattaagtaatattatggccgtgttcttttggtttttctttttcttctgggtaaatgaagtggattaatgaatttgtatttgcagtggcaaacttgggcatgaatttgatttactactgtttgttgtgcttaatttttggggcaggatcaattgggag

SEQ ID NO: 88874 - DNA, 601 bp, Citrus clementina
  Intron number 2 from transcript clementine0.9_025224m (loc us clementine0.9_025224m.g) derived from phytozome v7.0 (c hr-ID scaffold_8; pos 1535477 to 1536077)
gattgtcatgtaagtttatgcttacgcgtattagttttgcatattgattgttaatcaatctcttagttgggtggaataatgtgggttggttttagttcttataggatcatagtgttgtgtttttgtgaattatgtaatatggttgtagttgaggatcctttgaaggtaggaagaggtggacacagggtttgatggattggtcggcttcttggtaggaggatttttgttggttataagaatagtagaagacgtttagagctcagaatgcctaacgggttatggttttgagagtattgtcatcatcagagacctttcaagtatttggagggcaacagtgtctaatttaattggataatcttatctcttggaactgaaaaccaaatggaaattatagctatcggtatattaacatttcacctcagcaaataatagagttgtcggtatattaatatgacgtctacatctgctgctattcgatttagaaaccagatatagttgacatctccacaaagtaatatattgatgctgtatgtgccatcttttctatgttgattttgattttgcagttttttgctgatatcatctgcaattatatacggtt

SEQ ID NO: 88875 - DNA, 500 bp, Citrus clementina
  Intron number 2 from transcript clementine0.9_017778m (loc us clementine0.9_017778m.g) derived from phytozome v7.0 (c hr-ID scaffold_87; pos 830526 to 831025 reverse strand)
gttagcatttatacgaaagctcgaagactcgtacggtaattgattgatcttttgtattcgataaactctaaaataagtgagctaaacgaatcagtggagtccaatcaattctttctgttctgccgttaaagattacattttgctaatattatttgtttttcttggaatatttctatcaggcatctgtaaatccagaattgtagattttgtcctcgaataaagtcatcaatatagtgttattgtattgctgctttgtcgatattaatttgaattgttagcttttttgcttctctaaaatgtggacggtactaaaagaccaaaaacattcatacttcaatacattttttttttttcagtgcattgaagtttgtggtttttagtcttttagctctgtttggatgttgaaaagatgcagacatttgctcatatatgctcttctttcatattagatggattacttaagaaacatgtccattacaggcaccgattttccatcattt

SEQ ID NO: 88876 - DNA, 811 bp, Citrus clementina
  Intron number 2 from transcript clementine0.9_019014m (loc us clementine0.9_019014m.g) derived from phytozome v7.0 (c hr-ID scaffold_21; pos 2126732 to 2127542)
gccagcaacaaattgcaggttttgaaaaggcatatgtaagtgtctacctcggttgatatctataattcctttatttattattattattggttaaaatttaaggcattttgtgttaactttggaaattggatgttagtgtttgtggcatgcgtggatggataaatttgatgagtgaaattaatttagccatttgaggaatttgcatgtcataaatatccgagtgagttttgagctttatgtttgcatgtcatcatttgctttatagtttactaatttgcatgttaattatccaagtgaaatgcacgtcattgcatgcgctaaatgcaatcacgaacctgcaaaagtggtgtaattaggaatttattttgtttttagtttagttttgctcgaagactaacaaagtctagttttgagggtattccctctaatcctatatttgttgcatactttgtttatattttcagtcaattgaattacttatcaattgaagcttacggagtacacatgcacaaatggatgaatttaggaagataaacaaaaactaattcaattggggatcacagcttggggctacatgtgaaaggaaaaagcttcaattggtttcccataaattaattaactgaaaatatgaatacaagtaaccaacaatgtaagattggacgacaaataaataattaaaattcccctatcagtggacatgcaatgtggtttatttcgatttatgttgaagaggaacatagaatttatttgtaactctttgatatttttcttggcagagggagcagaggcaaaggcttgacaaggcaaagaa

SEQ ID NO: 88877 - DNA, 717 bp, Citrus clementina; identical to SEQ ID NO: 82176
  Intron number 2 from transcript clementine0.9_018804m (loc us clementine0.9_018804m.g) derived from phytozome v7.0 (c hr-ID scaffold_121; pos 387908 to 388624 reverse strand)

SEQ ID NO: 88878 - DNA, 835 bp, Citrus clementina; identical to SEQ ID NO: 81729
  Intron number 1 from transcript clementine0.9_005832m (loc us clementine0.9_005832m.g) derived from phytozome v7.0 (c hr-ID scaffold_12; pos 990663 to 991497 reverse strand)

SEQ ID NO: 88879 - DNA, 570 bp, Citrus clementina
  Intron number 1 from transcript clementine0.9_035121m (loc us clementine0.9_035121m.g) derived from phytozome v7.0 (c hr-ID scaffold_61; pos 1136364 to 1136933 reverse strand)
accacgacttaccttcaagttcgatacacgaatatgtttagcctttatagcacaatattcaacctatcgagacatgaagaaatgatcaaattatttgtttacagtgcaaatgggacatgcagaaacattgaaatattatattcgaatgtttagattagcatctgccaaggttgaaaactgtgatgaccagctggcaatagtggcttttaagtgcggacttccatcaaatcacccgtttttttgaatctttggtaaaaaataaaccaaattgtatgtgggatctgttaattcgggcacaaaagtatgtaaccctagaagaagaaaagaagagtcttgcatcaaaattcaacaaaaccaataattgggggcaaaggctctctaaaaaccgacggacggatttcttaagtcaaatgaagaaagaagaaaaagctcaatcaaagaagcacacaccactgaaaatttcgattggacaaattttgcatcaaataaaagatgaaccatggttaaagagaccagcaccaatgcccaagaaccaaaactgggatgttgcaaaatagtgtgccttccata

SEQ ID NO: 88880 - DNA, 467 bp, Citrus clementina
  Intron number 2 from transcript clementine0.9_031415m (loc us clementine0.9_031415m.g) derived from phytozome v7.0 (c hr-ID scaffold_12; pos 1419456 to 1419922)
accaccctaatagaaaagacttggtgcatgtgtactcaaatttcaaagggatggcatgcttgggatagagctcactcaagacaatcttaaagcaataatcttggtctctctcttctctcacaattatagttaatcaagtttttgacatttatcgtgcatgattttgtttttagtgcttgcctaatgttatattaatttttttcagaaaaattgtgatttacggttagtttggtaaaagtatatctgtaattaattaaatctcatatttatacttttgcaaacaaatatgtgacacaagatttcagttagtcatatatgtgtttttattttgatttgtgtttcttttaactataaatgtatagttctatttttgcagtggatgctcatatcggattcctcttctacatgtactaatatgtatataatatagatgactaattaagtttccttatttcatcttttaggac

SEQ ID NO: 88881 - DNA, 562 bp, Citrus clementina
  Intron number 1 from transcript clementine0.9_017406m (loc us clementine0.9_017406m.g) derived from phytozome v7.0 (c hr-ID scaffold_69; pos 692827 to 693388)
gaaggtaatttactcaattctttatgatttaagctgacccatcgcaattagaaataaatgaaacagctctaatatgaagtgtatttttatttaaaaattgattatatgaagatttgtcaatttatttccgattttaattttttttttggggggatagtttacttctaatttatggacttcccatataaataagtaattttacctttttttgttgggtaatttcgtaagcataaatgataaacctgccatcattgaagccttgaagggactgacgtatcaaaacttgggagatttggctatcaatttgtgatgggtattttttttttcccagaagaatcagaattattctgaacttttgcttttgaagctttgtcatttctctactttattagttatctgaaatatctaggaattaatattcaagcatagacaaaatgggaatcctttgcttcttttggtttgattctggacgtagtaaacaaaggtgattgaataatttcatgaaagattactaacaagtgaaatgaattttccttctttgtgcacacaggtgtgcaagagt

SEQ ID NO: 88882 - DNA, 835 bp, Citrus clementina
  Intron number 1 from transcript clementine0.9_024949m (loc us clementine0.9_024949m.g) derived from phytozome v7.0 (c hr-ID scaffold_69; pos 1033708 to 1034542)
tggcttgaacacaccatacccacgcgatctttgaggtagaaatcatccccattttcgattttttcatttcttgtagaaaaaaaaaattgtattaaatttgaatctatatatacatacatgttaatgtgaatatgtgattataaagttacaatattggttaatttgattgtatacctattaatttctgtattaattttgcaataaatattaatgtgattatagtttataaagttgcagtttggttaatttgattatataaatattaatttctgtattaattttgcaataatcaatcttcacaataaagttactatttgattaggaagcatcaatgtcgatttttaaattgcattacatgtttatgcatttagattttcaacaaatttgaaattgtaatatttataatttaacagaataaagaaactttgctggtatattgggttagtttgttttttgtattagtatttatagtttattatgttgtgttgctagtgttttgtgcgatggataaccatctataagttaagtcttttttttttaatgtttatagctttattaaaaatttataataaaatataataaaagcccaggccctctcaagattacgggctttcagagggattgggcttgtttctgcatacatgggcttggggctgggcctgtaaaagccgggtccaagcccgcaaattgcccaccctatttgactcctcgttcttgtataagtttttttaacttttctttaatgggtagcttactatttggatgttgatttttgttcttttttttaattcttaaaaagtcttgaaaagtacttgtttgttcctgtgtgtaggcg

SEQ ID NO: 88883 - DNA, 426 bp, Citrus clementina
  Intron number 2 from transcript clementine0.9_024949m (loc us clementine0.9_024949m.g) derived from phytozome v7.0 (c hr-ID scaffold_69; pos 1034674 to 1035099)
tggtaatttttttttttcaaacacttattgtgcgctcatagattaataatttttgctctttctttgagtttgttacattacgtttggcctataaagggtttatcttttgaaattaggtattatgctaaacagattgaaacagtttgcatgcatgcatttgacttgtagtttcattgcttgaggtgttattttggtgatgatcctattcaattactagcttttagtatttttgctacatgtatgctttcctacacatttgcactgtttactttaatgtagatgataacggcttcttaattcttctatgggtgcaatattctgtatgctttatatacttttcctatgattattctgctgcctgtcatatattaatttttctcctgcattgcagggtctagacactttgaatcccgtattggttatcga

SEQ ID NO: 88884 - DNA, 552 bp, Citrus clementina
  Intron number 3 from transcript clementine0.9_024949m (loc us clementine0.9_024949m.g) derived from phytozome v7.0 (c hr-ID scaffold_69; pos 1035081 to 1035632)
atcccgtattggttatcgacaacaaaataaagctggtgagttgaatgtttgtaaagtcctgtattttacctgttattgactacatctatgcttaaaccaaatatgaggtcacaaaacatgtatcagtgaaaattttaaatattatgtacaatattttatataattatggaaaatgagagaactctttatttaagtatggtgatactagtttatccatgcaatagagtcaattttctcgggatgactgtttggtctacagagttgttcctggtggctaagggattttctggctccattttccttctttctctccttaaattcgttgttgtttaaactctaccactacctattgaacatatgtcttcttgtattttgaattaggaccagagaacttgataagaatgagtgaagttgaacgttttgattttaattagagtcagtttgttctgcttttgctattggatgaccgcaccaagcattggggattgtttaaatttttttttttaatgaaattaagtttgtctgattcacactcttttcagattggcgaat

SEQ ID NO: 88885 - DNA, 982 bp, Citrus clementina
  Intron number 1 from transcript clementine0.9_020865m (loc us clementine0.9_020865m.g) derived from phytozome v7.0 (c hr-ID scaffold_8; pos 2578258 to 2579239)
tcgttcagctttttgccatcttttatcatttttctgtaagtctctcgttttactcatatctttcataagttggttattccatttcactaaaattacgtgcatttttgcttcgttcttgttggatatcttaattatttaaactttcttagctttgttgaattcaattcatggtctcaaaatcgcattagacaggacctttgaaccggaaaggatcataataattttcatccttctgaaagtttgatgacagttttattctatttcactaatgcgaatttcttctggactaatttaattatgagtttgagtgaactgaacagctaggtttagtgagacaggtacactgattcatctaatatatttatatatgtcaagaaatatatcttctttctcattacgaatttgtatcccaagtaacttacaatttatacaaggttaggaatactctcctactacaaaaaatcatcactggggagatttggtttccttgttaattgcagtttagtttgtttgcgagtttctagtgtgatagaaacagcagatctattaaggaattggatattattggcatttttgcgtgtgcagaaaatactaaagtaacaatttttcacatactggatttttttttctcatcatcctttgaagccctggtttttcttcagtataggagttttccatgtaaattaattggttttattccctatctatattttttgcttattattgtttgatatttttggatttttgcttgtgagatcttggataggattaaaaattgccgacaatatacttgtaatctatcatagatggatatatattttgctaggtttattgtttttatacaaaatccttatgtcatttctatctaaaaatttttttttctgtacttagtccagaatcacaagaaattttaatgtttaaatgggtgatgatttaatctgatgtttatttgattaggaatcagttcattgatatctgcata

SEQ ID NO: 88886 - DNA, 491 bp, Citrus clementina
  Intron number 1 from transcript clementine0.9_010468m (loc us clementine0.9_010468m.g) derived from phytozome v7.0 (c hr-ID scaffold_13; pos 2752358 to 2752848 reverse strand)
cttaacgaccgttaccaggtttccttttgcctttttttgcgatttatttgtctaaatttcgttttttttttaaatttctaaaataaagttactattgtggacagttttaaagaccaaggacattggtaattttttagatttgttacaaataagggagaataagaattttgttgcttataggcctgggctgggtaaggcattagagttcaatgcttattattagagtttgtatacaatttttttttctagagtgagtgtatcagctactgtatcttataattctgaatacatttgactgtctttcaaggttctgccatcaatttttgtattcactaaaaagaaaagggaaaatcatggatttgctttgttgttgagtggagtattttatctttttgttctcattcttccaatttacctttgtttttttaaagttttgaaattttttattttaatcagattggcccggatcagatcgaggcgctttatcagta

SEQ ID NO: 88887 - DNA, 292 bp, Citrus clementina; identical to SEQ ID NO: 82232
  Intron number 4 from transcript clementine0.9_005552m (loc us clementine0.9_005552m.g) derived from phytozome v7.0 (c hr-ID scaffold_138; pos 254953 to 255244 reverse strand)

SEQ ID NO: 88888 - DNA, 813 bp, Citrus clementina
  Intron number 4 from transcript clementine0.9_022352m (loc us clementine0.9_022373m.g) derived from phytozome v7.0 (c hr-ID scaffold_84; pos 201219 to 202031 reverse strand)
gcacatcctgccaacaaggttagactctgttgtttttgggtgtgcttctaaagtcattttgtttgttggttaaattaccttttgtaagcagtcatgatcctcatagaaatcaaatatgtcttcagttggtgtttagattttttccttgacaattttttttttttttgggaaaaatattcttagaattttcattgcattggcatttaggaccatgagcacatacaacggatatactatttgacaaaggattttgtttatagattttaactatcacagccgacgtatattctctttcctttgctagatgatatttgtgtcaggtgttctgtgtgtgtatatacaggtgtagcatttaccttagggttttctgcttcatcctgctattactgtatatgatgatattataacattttgtggattatgatccatctgtgttgaccttttggagagtgatctcatggaaagagattgatcttaaccatcatatatatctttcatggacttttttttctgggaagttaattataaaatgcttcttaaggtgtgctagtggcgccttcaataatatcccagtgcaacaatattttttggtggtattctctgctgtccttataatatcactatcaaaaaagtgattggctggctgagataaaaatgaagtcactttattttcttttggagaaattcagatccgataatctaatattaagacaaaacctgatttaatgtttatttttaaagtgttcatattctctttttgtatcctgtaaattttcaggagttggcacataggcagcaattctttttctggaa

SEQ ID NO: 88889 - DNA, 730 bp, Citrus clementina; identical to SEQ ID NO: 78335
  Intron number 3 from transcript clementine0.9_034854m (loc us clementine0.9_034854m.g) derived from phytozome v7.0 (c hr-ID scaffold_60; pos 1069719 to 1070448 reverse strand)

SEQ ID NO: 88890 - DNA, 769 bp, Citrus clementina
  Intron number 2 from transcript clementine0.9_008649m (loc us clementine0.9_008649m.g) derived from phytozome v7.0 (c hr-ID scaffold_16; pos 481904 to 482672 reverse strand)
tagctgagcactttgacatcgttgctcgctgtcaggtacaccctctatcttctattaaattcaaatattaatccagtttcactaattattttactaattaatgtattaaatattaagtctaagaagtacttttcaatggtacatgaagatgatgcacggtttagtgctctggtggaatttgatattacttgacaatggatgtctaaaaagcactaccaaacactaaattaatctttgttcacttattgaatgtttatattgtttcaaaacattgcatggttcctacttttgtatcactagaatcaaatagaatttcaccatttggatagcttagtttgtattgcaactgatgtatcaccaacagaatttcacaatttggattagaaataataagggttaataaataactatcacttgagccaatcaaatagtggcacatcacttgctacatcagttgggatacaaagtaagcatagcattattgatttattgaatttttctgcttctgttttgcatatagtggcccaagcatcattgaattgtttgatctgattactacttttaagtccagttattaattttcagcagccattggggagcaatttgctgaactttgtttaatttattatgattattattctctttagatgttaatttaggttgtaatctgttatttatcaagaataaaaagaaaaagcttgtaatcagttagttattctgattattgacaattgtaagtttaactattgctgataacagggtggagcta

SEQ ID NO: 88891 - DNA, 642 bp, Citrus clementina
  Intron number 1 from transcript clementine0.9_008649m (loc us clementine0.9_008649m.g) derived from phytozome v7.0 (c hr-ID scaffold_16; pos 482936 to 483577 reverse strand)
ccgtgcggctaagagttttagcagaactccttcaggtccgattcttctcgtttaattgttctttttaattttaattaattaatttattattaagtaagtttgtttggttgtatttatttggaattttgtttgaatttgattactctatagtttcagtttttcctacgattttcagttcttttgtattaaaattgttgtctgatctgattcttactgattttatcaattggtttttgtaaatttgtggctcgaatcatcatatgtatacattctgagtgggttggatgtattccttctaccattaatttgtgtcatatatactgaatctgatgtggcatgtgtcgatattgctgaaaattctttcacctgattttgtagatacgtgtcttgacactggtgtgattataaatgtataagttgcgttaacgttaatacaattgctttcgttgttctcgaaggtttagtttatatgataaagttaaaatgttgaaattcagtgtccttataagtttgagctgcatcatttagacattgttgagtttgtgaattatacttaatacctatctctctcaaaagccctccccttctttttctctcttggctctcacttacttttcgttattcacttgaacaagacattta

SEQ ID NO: 88892 - DNA, 998 bp, Citrus clementina
  Intron number 1 from transcript clementine0.9_007807m (loc us clementine0.9_007807m.g) derived from phytozome v7.0 (c hr-ID scaffold_44; pos 421426 to 422423 reverse strand)
cttcccacattgctgctgagcctcagcttcaaagggtactattttttttttttacaaaatttttaattgttctatatttgctctttgtttaaagtagtctttgctttgttgtttcgactcctttacttgaattggttatgtttttgtttgaagctttttaaaaagtttatattgacaattattagcttttcaattttttgcattcagtaattaagaaggctacttaaagacatctgtttatactttattgaatctcagaattaaagcttgagcttttaaatataatttttaatgtatgctacatctaaaaaactgtttgatctcatgaaaataagaagaataaactctagctaaccgaaacaaatcatagccatagggctcccaaatctgccaacgctattcctttgacttattttttatttattttatttgtttgggtgggacggtgggttagggaattataattttctgttttaaatccaggaaattttgtgactttactcactcataaatgccatcagtaaatttatctctagatctgttgccccattgtacaggatctacctgattaagctatccccttggaacatattcactcgtgcgatgtggatgcccatatgactcttgccaagcttgacggctacaagttacacagccgttgtatttaagagcctttgttcaatttatttaagatttctgctttctcattttatttgttcggtaaaatatttgtagacctgtccatccttttacctaagtattaacctgaccctagtgcttgcagtaattttactctgactcatgaatgcaaattagacgtagccgatgatgctaattttctagtatttatttgtcggtatctcataaattattggatgctgtgagcttgtgtgatggttatgtggctgtgctttaacttggggattatttttttacattacagaagtttaatctttgtattcctgctaatgtaggttaaacttctttgtaggttgaaa

SEQ ID NO: 88893 - DNA, 990 bp, Citrus clementina
  Intron number 1 from transcript clementine0.9_023371m (loc us clementine0.9_023371m.g) derived from phytozome v7.0 (c hr-ID scaffold_56; pos 94188 to 95177)
tggacgaccgggacttcgaagttcttgttttcaaggtcagtctaatttttaataagtctaattttattctattttttcattgaggtgctttagttcttaaattataattacagtagaaaaaaattatatgtaaaaaataaaagttgttatttcatggtaaaataatttatataaaaaataaaaaaatattatagattttcatcatattaaataattaaagaagacttgttaaatgagacatgtattaaaattttgattaaggtagcgtttatttttttgtctaaaatttaaatgggtctaaattttttttaaagtttgaatgagtctaaatacaaaaatttaaataatatgttttttttaatgtctaaatataagtggtatcgtgtttgcttttacaataaaaaaatatcttaaacttgggtattagacatttatatccttgtaaattaaaacaaaaaagaggattaaattttatagtttaggaaataagttattttacagagatatttttgaaatataatatttatttgttattcagataaaaatcataaaaatttactttttctattcagatgtaaatgtctaaaaatcatatataagttccaaaaaacaaacaaacaaatttttaaaaaagtttgaaattaataaaatttcaattttaagacatttaacaaacaacatctaagtcttgccaatgctttattaaataacagataggtattaaggctagtttttttcaaaacactaaagaattgatcaatttttttcttgactctatttgatattgtagtgttgtctgctgcggcttaaaaataataggcagagcgactgtgaaattgaagctgaatttaatttgaacaactctacaagacatacaaggaagcttaagccagggaattagagttgtgcaattttaactattcaatactatgttttcatcattcgatacgtgtatataataatttcagggattttcttcaagcttgagcc

SEQ ID NO: 88894 - DNA, 622 bp, Citrus clementina
  Intron number 1 from transcript clementine0.9_016153m (loc us clementine0.9_016153m.g) derived from phytozome v7.0 (c hr-ID scaffold_39; pos 1918559 to 1919180 reverse strand)
ttgtatcaggtctttatcccatactctatcttgggtaacaaatatataatccaattaggccaattaaataaacttcatgtctaagcttttagtagaatcttttcgaaagctatctatctgtgtcttctcctacaagcatttgggttgaactttctgttgttgcagtttcctctcattcatacatcaactcaccgttaaggattttaaaatagtgatgcctctgttttttttttttttaataaatttgtttccatggtcacggtaattcttttgctggattatcgagtatcttccagttccataagtcagaaatttctacctcaagcaaaaacttttttgattcgtcaactgtgtttttggactcatatttgtcttggtaaaagtacactgcttttgttgcacgtaggacatagttttccttctatgctatagaatctaaacaactgaaattattcttggttgatgcttactttcaagtccaacaccaagttgaacaactaacaccaaagtgttgctttaagttaatctgctcaaatattatctacggagttgaatgaaattcatattatttcgtgttattggtttccacatttatcaggtgttgggatactatcaattcctt

SEQ ID NO: 88895 - DNA, 620 bp, Citrus clementina
  Intron number 1 from transcript clementine0.9_029155m (loc us clementine0.9_029155m.g) derived from phytozome v7.0 (c hr-ID scaffold_11; pos 778789 to 779408)
gctttggtgcctccattcctcactggcgcaggttagcgagataagattgctctttcttgttgtgaattgtgtagcgggttaattattgggtgcacaaaacgtagctcctttattgtgagttcaattcaaattacgttctgggcattttcgactttatttgttttttggtatggagcatgtcatgcccctatgtatgtaatacctctgactctgttatgtattatgaagttcagggatgcatttatatgtgttatacttctaataattaattaagatgaatgaagcaaaagaataatgaaggtaaatctattcgttatttcctggtgcattggcattaacacctagttctattccttgcacctagatgatgacaaaccggtgatctgagtttcagggttccatttcgtattacccttttatggatataggcttcttccattttccgattcttaatctagtgaaaaagtattcattttactgctccgttgaaaaggggaatgaaaatttgcttgtgcaccattcctttatcctattaaataatgtgaggaattgatatttttcttgtcatctctgaggtaatttcaggaatattggcaccctggcaaagagctacacggttt

SEQ ID NO: 88896 - DNA, 995 bp, Citrus clementina
  Intron number 1 from transcript clementine0.9_034478m (loc us clementine0.9_034478m.g) derived from phytozome v7.0 (c hr-ID scaffold_21; pos 3756139 to 3757133 reverse strand)
aaagaactcgttttgcttttgcaggtaattgtgcttccctgctatttgtattgcttaaatttatgcttcttggtatagttttaacatttcggtatagttttaacatttatggaattgaaatcaatttcaattgtgcgaaagcaagtaaatgtgaagcaacttcagtgattcgcaatattagtcatcgcaggagatccaaaatttgtagatactgtagaattgtagagcccaaaacttcatcttatcttgcaagagtttgttgttttattttcaaatagacaaaaaaaaaatgatgatgggcagcgaactctagggatcaatgcttgctgaccctgacacccaatgcttgatgtctagcttgcttatttttccaacaatgacactacctttctagtaaatgaaatattattctacatctatgtattggaactttgacaaacttcggttttcctttgttgattcactggtctcacttttattcaattgcccgattatgaaatggtctattggagactagaaatggaaggtttcttgtggaaaaagttttacttgaccaccgattttcattttggtgggtgtcagcgcatgctctggcttgactattctgttatttaggctgttttatctgatcttctcactcacttgatagttagttctctcatgcttccaagctcaaagattaatgcaagagattctctttttcccctctagactataacctatcaaatcattaatgctatagaataacatcttgtgtaggcgggcttatgtctctgaacatttgtccatcggcatttgcaataagcatggccctgatttttcgtctcattattattttcctacccagattgtcccctttaagtagcatattgaaggagagcaacattcttatatatgttttatgatgtttaccaataaaacatgtattattctgactcaaaactctatctgtcggtgtagcttcagcttctgaactttgttgagaaggctgttgt

SEQ ID NO: 88897 - DNA, 1050 bp, Citrus clementina
  Intron number 1 from transcript clementine0.9_002638m (loc us clementine0.9_001626m.g) derived from phytozome v7.0 (c hr-ID scaffold_8; pos 4069009 to 4070058)
gcacagttcatattcttgattttttggggaatcaggtaagtcgaaggaatttgtctcgtttgctggatcggaattttgattggatttatttattttttgtattttagtgttttgtttaaacttaactattgaggagaatgcgttgatttgagctgagtgatgtgatgctgttcgcaatgagcttaaattcgacttgtgtgttaaattgaaggtgcttttggtagagcttttgtataaagctgtttcaagtgaaactgatttttgcgtaatcaatagaaagagttgtttgtagaagcacctatggaatgcttttctggaaagcaaatcaagtgccttttttgactcacaatatgatttctgctggaagagcacttaactagtgtttctccaaaaggtttcatcctaaggatgaacatatcatctgtttattcaacaaatttaagatggtcctggtagctctttagaagctcttttaatggcatcaaaactctgtagcacaagctatacagtagacattttactcagaaagggtctgtttctagtgtaattttagaatcactaataattttgtattctcaatgggtgaagctcagtctgtttggtcttccattttctagttcatgtgccagtcatgagccatattggttgttcttactggcattaatgtattgctggaatttttaggcatttgagtggtcctcatggacagaggtgaattttggttgagtcatgcaaaggagtggatgaaattacttggaagtgaatgctggttgctgatttatggtcactctcatttttagttttaaacttactgaatcacgagaaatgttgttttagctcctgttactcttgttataagcagatgttaatttcttcccttgtgctccttttttcccaaatgctatttgtttttagctacatcaatgttgatggttggctttggtgactgattgatatgggcagagtcaccttgcttttgttttgattatacggaattaaatctttttctatacaggttaaggagtttcctgctcatactgctgctgtcaa

SEQ ID NO: 88898 - DNA, 953 bp, Citrus clementina
  Intron number 1 from transcript clementine0.9_005930m (loc us clementine0.9_005930m.g) derived from phytozome v7.0 (c hr-ID scaffold_99; pos 628474 to 629426 reverse strand)
agaagctactgtttcttccttagaaatattcacaggtaagttataatttcattaaacaagaacattttattcattttttttattatttatttttgttcttttgtatttcattgaaatagtttgggcgctgtacactgaagcttgatgatttttttttttaattgtggaaattgattagtcattttgactagaaatgttttgaataattttttttcctgaaatgagagctatgattcttaattgttttgcctggaaattactgttgatggttttgtttagagcttgctttattggaattatttctgctaatgttgatttcgccaacgaaaagattattaattagttttaatgtgggagctgttaattatttgccaagaaattgttaatttatttttttgttgccggaaatgatgggaatatattctgttgttcaatctacctgtaactgtttgttttgaattctcctccaagaaatggtagtcaggtaactgtctagatgtgaacgcagtaattagtaagttgataggagtaattttgatctatgctatatggtttgataattgattattggtttttttttttaaatcaagcttcttgtgtgaccctaagcttatacctcaatattattttctattcatctgttttgctctgcgtctatgtcgtgttcttttatgctttagctcttgcatttttaagtgctgaatgtgctgtacatattatctgagcagctagtgaactttatgacaaattatactttgggaaaatggatatggggagcttacatgtccatttgaatgtgttaccaggttaatttttgaagtccatagtttgagttatttgtggtggaattgtaaagttgattgcagttgttgaccaaagaaggtctagttgatttgtatctgaggcagagatattatttccggatagacaagagctgatgctaaaaccataat

SEQ ID NO: 88899 - DNA, 902 bp, Citrus clementina
  Intron number 1 from transcript clementine0.9_017960m (loc us clementine0.9_017772m.g) derived from phytozome v7.0 (c hr-ID scaffold_8; pos 6383693 to 6384594 reverse strand)
cctccggcttcgttcgccattgtcagcggcacaaggtaaagttatacatgcgattccaaacagagaatgaatggctgtttgtaattcaatcttgtgttgggcatgggtaagaggtgttactgacactgaaactgttcgattttcttttgtataatggctgttagtattgttgttgatttcgtttcttaacattgtaatctttgttattttgagtgttgatcgtgatggtttattaatctactatatatgtttgttacttggagatgcttttatggagatgggttattaatcatttttgtgattttgaggatgtttggtagctggtattcacttttgttttcattcttgcatcattgagcggggctggtatttgactcattttgaaactgaattgaattttggaataggttgtaaattgaattgcaacccaaaccgaaatttagacccaatttttcaattgaaccaatccagaacttctatccaaaccggttctgggttgcgtttcgaaccaattgagttgaattttccaattcaagcgggttgtaaaccaaacaacccgaagcaaaacctgatatgcccgcccctaaaatgcgttctcttacttctgtactttggcttcttccattttaatctttatttattcttatttacaatcattccatcaagattaggatactttccatttagatccataatagcgtagatttatcatcactcttgcttttttgcttatttttcacagctagtaaaataccaaaatctttttatcggatacataaatagcactctaaggctctttgcgagccccattcaatctactaaggccatcttcgacacttacaccctaaagtcaccctatcattgcagtgaaattggtggatcagtagaagatttaaaaaaca

SEQ ID NO: 88900 - DNA, 961 bp, Citrus clementina
  Intron number 1 from transcript clementine0.9_035131m (loc us clementine0.9_035131m.g) derived from phytozome v7.0 (c hr-ID scaffold_16; pos 3009329 to 3010289 reverse strand)
gattcttttcttcatcgtgttacgatcaaagaacggtaatttgactgcttatcagtccaaatcaacaggagctgatgattgtttgtaagatgcccgccgtttccgttatgtcaagaaaaagaaaggaacttgaccccgcaccaaacgattaaaaccaaatcgaacgaacgtttataaagtttttggtgaaataaacagggcaagacttgtaattattaatataaatctgcaactttagtcaacttgcttaactaatgcttatggctcaaatacagagttgcttcaactgccacatgttttacaaagaatattcaaataaatatgtattaggtcaacaaaacacacaacaattgcgaatttataatttttttttaattttatttgcagagaattaagccacacccaattaaatgggagcataaaacttcttacaactctaatttacttttgaaatcatacaagattgaagtttcaactctataagtaatcactatcagattgtgaccctgcaatttattactactactcattacgtgaatggaaatattagatctccatgttcttgcattctaaagggtaatgagtattattaaatctctattttctgcaacatctgaaagtggtatgtgaatataatacaataaatccaaaaaaaaaaaaaagtatcaaaacaagcatcgatataataaagaatcactgactttggatcttattttgttcatcagcattatgcattttgctgctttcagcaactaacactattcacaaagacgtacggctatcgaaacttaagcttgatatagcttcaatccctcaaagatggtcacaacgaaggatgccggtgacagccagagattcaattacttccccatagtactagtagtatcaatttcttctatatcattctttgtattttatctgtacagtgcaaacatcaaactcttttcgtttccagaaccta

SEQ ID NO: 88901 - DNA, 641 bp, Citrus clementina
  Intron number 1 from transcript clementine0.9_000841m (loc us clementine0.9_000841m.g) derived from phytozome v7.0 (c hr-ID scaffold_83; pos 734074 to 734714)
acagagaggagccaaaaattcaaacctggtaactgaacccagaaagcttcaaatgagcaaattgaggaagagaataagcatcccttgtgtctgtttgtgcgtttaaaaattattaaaaacatacaagcactcactttgagttagggctagccatctgctctcatcaaacccctcatcactattaaataatagtttaaacaaatctatatttttttcattttattatttacatgtacaggaaaatatatatgaatcttgaaaagtcatgtcatatggtgtctctcttctttcttgcgcgtgagcccatctagcagaaaccccattttataatacttattaagtattgtggtggtggtggtggtggtgttggagatctctaggcgttggctttgtttttgttttcatttctttataatcttttatattattattattttttgtgcttttgcattaacgttactatcaaaacttgttgagagtttttgagttgaaagcaagcaagcaagcacaaagaaagagagaaaaaacatcaagaaacccaatgatacaaacccgagaagaaagttttggaaattgaggcaaattgtcttcaatatcaatgcccagctcgaggcaacaatccttctttttcttcttcctct

SEQ ID NO: 88902 - DNA, 496 bp, Citrus clementina
  Intron number 1 from transcript clementine0.9_011768m (loc us clementine0.9_011768m.g) derived from phytozome v7.0 (c hr-ID scaffold_12; pos 4641277 to 4641772)
tcttgcctcccgattctcccgtcctcattttggttaggcctctcctctttgaactcttttgtttttgttcttatttttctggtgactcttcgcttcgatagatagaggcggtggcgtactcgtattactggtgccagtatttttaattcttcattagctaatttgaaagattatgtatctcatgctatttattatttaatgagatgtgctgagcttttgatggacctgtttacattctcatctcattcaataaccaccgatcacagtcttgtatatgtatgtgtgcgtgtgtttatatatatatgggattgaggtgttgcgaaaaattattggcattcaaatataagcagggtgacttgagtgattagtaaaactcggtaatgtttttaaagctaaatagaagcacaacagttacggaaggttattttgctggagatattgattttgattggtgattgcagccaggtttaacaggagggagtgaggattcatacgt

SEQ ID NO: 88903 - DNA, 671 bp, Citrus clementina; identical to SEQ ID NO: 80585
  Intron number 1 from transcript clementine0.9_003150m (loc us clementine0.9_003150m.g) derived from phytozome v7.0 (c hr-ID scaffold_12; pos 820929 to 821599)

SEQ ID NO: 88904 - DNA, 743 bp, Citrus clementina
  Intron number 1 from transcript clementine0.9_027468m (loc us clementine0.9_027468m.g) derived from phytozome v7.0 (c hr-ID scaffold_39; pos 1717008 to 1717750)
ttggattagccgacgccagaatcttggaagcaagagtgggactaaatatcaccacttgaagattacgtcaggtaacagcagggcttctccaacaagtgagcagaccaaaacagcacgagctccaccaaatgttgcttcaaaaacacgtaagcaaaactttcttctttattcagccttctgaacttttttttccttaaatatatttattttatttattctatgagcatgccaatagcaatactggaaactaaatccccaccctcccaaaattttgttggcgggatttgcgaacattttttacaacctgagagattttacccattgaatcaattgatactcacaacctactgatttattcataatgcatagagctaatcatttctgtgatctcatctgtgaattgttcatttcttaggtagatatataccaattaatgcttcttgcatctgcttctcttggtttcatgatttacaactagctgtggtaatttttaagttgaatgaattcctggccccttgcagaataatttctacctatggagtctgttatttaactctaatttgatttgctaacttgttcatttcttcatatataggctgagtccttaataaccctaaagctactgagctgccttcttaaggcaaacttctcgcaggacttattgctgctggaggatttgaagaaggttcttgtttaagtaggtattagtcctttttatatctcctttacaaactcataaatta

SEQ ID NO: 88905 - DNA, 716 bp, Citrus clementina
  Intron number 2 from transcript clementine0.9_013344m (loc us clementine0.9_013126m.g) derived from phytozome v7.0 (c hr-ID scaffold_12; pos 3580085 to 3580800 reverse strand)
aaaatgtaagcttagcctctggtgactgtagagataccctgaaccaagggtttcacactaaaattttgtttattggtttactatcttttgggatgctaatctttattttatgtttacattttgtttttctacgatttattttgtaatcattagcactgtctggctcatgacatgaaaaatgttaattcccagttttttgaatttatatggtgcatcacatctaccgaactatcttaatacagcaaagaattattgtagcttaactggagtgtatttatggcatcaaatgtgggtaaaagcttaaaagggagcttataagactcccatattatatatgatgttcacagcctcgaaattagtagtttctctgcatcaagttttcaaaaaaaggacgtgtagtcactgtgccacaaagctatttgacatgcattatcaatgtcagaatctaatgtggcacctcagtgattattaatgattcatgtctgtaattttttattcttataacatgcaacatgttaactatggtgcagactccttttatgaaaatcagattttcaaatatctttaaccaatacaaacattatctggatttacattctgttaccatggatgtggttttgtatctgtcactctttctgtgttgacccttgttattacagctcagtttttgtattccgacaggtcatcgccattaaggatatcattcggcctcccaa

SEQ ID NO: 88906 - DNA, 735 bp, Citrus clementina
  Intron number 2 from transcript clementine0.9_016392m (loc us clementine0.9_016392m.g) derived from phytozome v7.0 (c hr-ID scaffold_195; pos 15496 to 16230 reverse strand)
ggaggtaatttgatagttctttaatttggtttttattcatgtaattttggattggagtgagtccataacgtggcagcttgtattcactgtctgtaccaaactaccaagtttaattttcttttattttttttatttttttttggtgttcttccatagagtgccttacagttcaaatttttctttgttttatgttttgttggcgctttgggctcctgtatgatagttagtgatgtgtattttcttcataatttttgttgcactattctttacaatgtatggccaaaaaagtatatataaattggtcttctaatagggtcttttctggtcttatgtgcgtaaatttaatggtccttgacttaggttctggggtttagtggcaataagttgtgcctggaagccaataaagcctttgccaagctctttaagtgcttgacattcaatatcatttcaatatatgtgtgagaaagctgcagccctccacgtgtcttgtgtggtttaacttgaatgatcttgttgaaggtttctgggcttttgcctaacctggaggtctatggtgagaggttgaccttggtggatttggcgagtctttctatagtgttaatgcctgtttttatcgaaatggcaacaatctcaaagtggtgtttagttcatctgtgaggggcgaagtatcaacccatcgatacttgtgtcatgatggccttactgtttctggcacctgtttacgcagaattcgcg

SEQ ID NO: 88907 - DNA, 691 bp, Citrus clementina; identical to SEQ ID NO: 82019
  Intron number 2 from transcript clementine0.9_027731m (loc us clementine0.9_027731m.g) derived from phytozome v7.0 (c hr-ID scaffold_52; pos 95621 to 96311 reverse strand)

SEQ ID NO: 88908 - DNA, 921 bp, Citrus clementina
  Intron number 2 from transcript clementine0.9_023831m (loc us clementine0.9_023831m.g) derived from phytozome v7.0 (c hr-ID scaffold_88; pos 237819 to 238739)
tgatcaatcctaaggacaatcacctctctttccaggtaatttaatttaattaagtaattaattaacttgaattaatttaatttgtttctcatgatttgtatgtatgtagtgtaacgatatatgattaggtgcgtgtgagaatcaaacatctcttaacaaacaagtgtatagtgacaaaattaaaacggtgtattttcttacttgaaatactaatagcaataatcgtttgctgtgactgaaaacgacaatggtggggtcgttttcattggatacgaagtatccagcaggtgttattattgtcacaagattcgcgagagccgacgcaagttgtttcggtttcattaggaacaataattgatcaatcttaagtcatgagctggggtcttagggcctttgcctttttaaaacaattataataattattattaagaatgatgaaattgaaaaagaaaaaagaaaaaagaaaaaaaaatccttttatgcaataataaaattgatcacgtctctttgaagaaaaaaatgcctagtgttataaattttctttttaatgacattattatctataaatatcattcttacaagtctatagcagccgtctataaatatcattcttacaagtctacacgagccacgtgaattgtgggctatctgtaacatgccaataaatctgctagtgttcatccaaaaacaatttaattttttcatatataataatctttttttagtggcaactcaagagcttttgtatgttgtcatatgacgaaacataacatgataaagaaaacatgtgtatcgaagttttgtaaagtttaaattgcaggcatctgagaattatgttgcgttgtattttgtaatgtgtggatgtttgcatgtgagaatacttattttattatttgtgacgctagtgcgagagcgtgggaa

SEQ ID NO: 88909 - DNA, 565 bp, Citrus clementina
  Intron number 2 from transcript clementine0.9_031571m (loc us clementine0.9_031571m.g) derived from phytozome v7.0 (c hr-ID scaffold_56; pos 1196345 to 1196909 reverse strand)
gagacaaataaggactgggtaagacactttgccttgctatggagaagtgatgagttgggtaaattttaagaacgttttaaacaagcaagtcttgttctctattttcaaatagtcaataaacagacttatcttttaatttgggaccatgattcccttatgatccatggtttttctttttcgcgaacaaaatataagtatattattagtggttccgtggtacaagatctttaaaggatgataaccgttttaactgacccacaaaaagaaataagagaagacagggcaaatcatcacttaacattaaatacacctctggttaaagtaaaattacagcaaattcatgcatttgtgagcatgtatctatcatgagaattgtgtgtacacttcatcataaaactagtaaaaagcttgctagaagagaaaaacaaattgttagcaccatcaaagatatgcatctgttacttttaattagttagtctatcagttagggcactaatatgtatctatactttcatttcaatttgtcacagggagtgataccaatccaggaccagcttcagcaatt

SEQ ID NO: 88910 - DNA, 436 bp, Citrus clementina
  Intron number 2 from transcript clementine0.9_003853m (loc us clementine0.9_003853m.g) derived from phytozome v7.0 (c hr-ID scaffold_112; pos 65209 to 65644)
gctgcccaacccattccacaggtatgcaactcactgttacgactgcttttgtgcagcgctgtccgtataatatctgtctttaggtttgagtgtggactagaagttccgtaactagtacattagttccaaatgcttattctgtgtctaggtcattaatttttatgtttctttgcaaccaaatggagcattaggcctcactgatgaaagggaaatgaaatgcttcatgaggacttgatgttgtccgtagacaatgccattttttgtttacttttgttttggtttgctcacacgatactgtatttgcagtcgatttttcgttcagttataatacagcatttagaggcatctttaagattttctttgaactaactgaatttgttttgacatatttcagctgttgctttgggctgtaatcccttatttaaagggttcatcg

SEQ ID NO: 88911 - DNA, 885 bp, Citrus clementina
  Intron number 4 from transcript clementine0.9_003635m (loc us clementine0.9_002149m.g) derived from phytozome v7.0 (c hr-ID scaffold_16; pos 846799 to 847683 reverse strand)
ctcgtcataatccctctgttgggtactgtcaggtattttgttttctagtggtattgtgtttccttatgtcatgcttatggtttttcaatgtcattggccagacgggaaaggaatcattctataattttgtgatacttgcaagatattgcttcttcttattgtgtacctcatgcatgatgctgacaactttaattcaatttttttttttgagggtgaaattgaaattaaaattgaagtaatttgaattttacctaattttcatgacatgagaaatgaataaaatgaagtatatatgtgcttttttatggctttttaatagaaataaagttattaccgtttcttataaaaaaaaagtttacatacggttcatgcactagctggtaaagagggttttttcaattgatgtggttcactagcaagtaataggcttattatatcacttggtaaagttgaatacatatcacaagggatttattgcacgacttaatggaatttaagtatatttgtatctggttttttctgaaacgtggaagcttgtttgagattgtctgacccagttgtgtgcactagcaaatcccaatcaaggcttgtattggttctttatcattgatgttagtaaatagcagccacatgtttttaaattataatcattagtgatgtgcagctccttttatgaaaatttgaaaatttgaattatgaattgaagatttcaatgtgacatgaagcttctatattctgctaaaggaaatttcttcatttacaataatttaaaattactttagttggtgcagtaacaaaacttttttacttcagaagcgttctgtgtaatcattataataaactgttggtaactatctagctaattattctctttgtgtgcaggcc

SEQ ID NO: 88912 - DNA, 422 bp, Citrus clementina
  Intron number 1 from transcript clementine0.9_003635m (loc us clementine0.9_002149m.g) derived from phytozome v7.0 (c hr-ID scaffold_16; pos 848755 to 849176 reverse strand)
ctaatatttacaaggttttcttcattccaactctaacgtagttgttttcaagttcatgatcttattgtctctgttgattgtcgagacgttcttgatgaagagaccggaaaagaaatttccaagtgatatgtttattttggtctttgaaataatgggtgaatgatttgtttgatgaacgaaaaaatgaaaaacatcagagggttgcagaccaattacatgtttgcacacgggagtgaaccatttggttttaatgagtcatatttgatgggagtttctgattgcaaagtataattttctcctgttgttcagaaaccaaattgaattttcagaaaattgtatttttgagaagaaaataactgattttttgcttttaatgcatgatattaggaggaagaggaagaaagatcagataggtggaatag

SEQ ID NO: 88913 - DNA, 706 bp, Citrus clementina
  Intron number 2 from transcript clementine0.9_031060m (loc us clementine0.9_031060m.g) derived from phytozome v7.0 (c hr-ID scaffold_8; pos 4450105 to 4450810)
gtgctaaggttcaagttatgtacaatttcacttatatgcatggtgaattactgctcgattgggaagatttggtttggttttgatgatgtcgaggccattagagtgaaggttgcataggccaaggagaagaagctatgcggttactatgtgtgggaagtttcctttaatcattattggatgctttttcaagttgcaagtaagcaaatggagttccggactcactgcaatccatttgatcacttctttgcataatgactttaattaagttctttatttaagcatcaatggttaactaacacaaagtgatttgacttttctgctgaagaggataataagaatcggcaaaataagtagctattatgggcaatttttttgcctataactacaggttgtattcttctaataggttttttgttgtattactactactggatgaaaaacctcaaattaaaaggtaacttcttctacacgggattaggaatatttttacttttattccatttaacacatatgaagaagtgggcaatttacttaaattagccttttaggtagctcattcacttagactgatgggcatacttggcaatgtctggatagggtggtctgcaactcgtagtggtctagtctttttatagtcttcagggttactcatctgaattgtactgcatcagaccactctcttcttcctctatctcttgatcgacag

SEQ ID NO: 88914 - DNA, 752 bp, Citrus clementina
  Intron number 1 from transcript clementine0.9_022983m (loc us clementine0.9_018663m.g) derived from phytozome v7.0 (c hr-ID scaffold_8; pos 1222957 to 1223708)
gcttcgatcattgaatctggttggagggtattggttttgtcgctctttcattcaatcttttccctcaagatttgatttttcctttttcactgcccattggtgtttgtggatctgtttgtgcgtttaattgcttatttgttataaaatgatagtaataataataataataataatttttttcattggtttctgtgattttcttttgtttcaagctcttgcttattgaaagacagtgactttagaatgtgtgtttcagtacttgtttgattcttgatgttgatggcggggttaagtggttagattacaatgactcgcgtattgggtattgagctgattagactagtgacttgtgaaatcgaatcaccattagttagatctttgtttattgcaaatagttgtttgggcaattcatgacaactgagcaatcacaagaagatcaagaatttctagttaatccttttgttattgccggtgtgcatggctgcatgtgtagaatttattgctagttgaaattataatttactcttcttagatgagaaaaagggttatgtgtgatttagcagcttggtacttttggtattgattgattttcgtcgaatttctttagtgtgattatgttcttctccatttctcagtactgtttatcgtcttgagttatattataattcttgcaactctgtctttgtctatgacgcagtatctcatcacacatttcagcgattttcaactggcgtgtctaggaagtttctttc

SEQ ID NO: 88915 - DNA, 845 bp, Citrus clementina
  Intron number 2 from transcript clementine0.9_001677m (loc us clementine0.9_001675m.g) derived from phytozome v7.0 (c hr-ID scaffold_11; pos 3772910 to 3773754 reverse strand)
cccaaggtatgctgatgagcaaaatttgaacatttttaattcttctatgtctcagagttttatttgttggttttgccttctgtatgaatagttcagtgtctgcttctctctgtatccattgatttatctagtgcacatgatcttggcattctatattacttatttgttcaaatgtcgcgtaaaaatatagatacctttgctttcagtacttccaaattcagacggtcgtatgcctagtcaattatgttattgataaaaaattaatccctaatgattaatatgaagattggctccattttgaagagaccatgaaatgcatttgcgttaacgttatcagtatagtttacaggaagagatttgctggggcagaagtttaagctattgattgggattttttaaaagaatgtaacagaactactgaatgtatgtgtctctcagtatgatccctgtctcactacaactacttctgtggcacttagaagttgcttgcttacaatcggttgtgtcacccacagagttataaatcaatgattatgttgaaatagacatgtgtggatgctttagcacataaagcttcattaatcatctggaaacgtgttttagcttcattaatcatctggaaacgtgttttacaaccacaatatatgcttttgcatcacttcaccaaagtacaaaagaaattttgtttttagaataattgtgtggtaatcaatgaataaggtcttatgagtgttctgactaattttatgcctttttaaaccttaaatttcttccatcatttatgctttttgttttttttttttctttttgcattaggttgacccggggcaacccccccagttgac

SEQ ID NO: 88916 - DNA, 673 bp, Citrus clementina
  Intron number 1 from transcript clementine0.9_006006m (loc us clementine0.9_005992m.g) derived from phytozome v7.0 (c hr-ID scaffold_92; pos 380944 to 381616 reverse strand)
attcggtaatcttatttaccattagtgctttatttccattttttgataattcattgggggttgcattttatttttctattttcattcagtcattttaagctctggcagaaatgtttatgcatgcagaatcgatagcctttgaattcctatggttattcaaaatggggttcttgaattttgatgttttggtgacaaattatgttaattcattcaggttaaatatgaattggataaggttgtgtttttattttcttgagcagggaatttaaatttgttgcgttttgggagtggatatgtagtttgaatatgttacaaattgatcattataatttatctgagtgattttacttgttcatatatgatttttcctttaataattgactgcaatttgttttctttcataggtattttgatcatcctggttcttgtagctgtgtatcatgatgttgtttcattacgacctattactgaaatatccggggtttgattttggcagtttgaactttcgcaggtgtaccgcttgttgtcaatcaaaaaagtagagaaggctgaagagctattgcataatattttgggtgttacaaggaaatgaaaacataaacactagtcctttttatttccaaggaaaattatagctgtgattgtgagatcagattgaaaggcaagtccggag

SEQ ID NO: 88917 - DNA, 749 bp, Citrus clementina
  Intron number 1 from transcript clementine0.9_013798m (loc us clementine0.9_013798m.g) derived from phytozome v7.0 (c hr-ID scaffold_16; pos 755543 to 756291 reverse strand)
agcccagacccgacccgactaaagtcgccgtcaaggtctcattcttttttttaaaaaaaaattgataatttagctcaatttgataatttgtagttttgataaaattattgtaatgtagagaaaaaaattaaatatttgttatgtgatgtcagtttctatgaactgagtttgtgtagtttagattatagttgtagttttactcaaatgtttactaggaaattgttagaggttttgttaattggtagcatttggtttgttctttgctgttgaggcaagaataattgtaaatttattaacaaaatatttaaagggtatgcttaggattaaggtgttgggttcttgaatccacagtttctgtggaatgaaattattagttgcctggcaaaagtggttgtttaccaaatgatttacttgtgctttcagaattaagcagaagcacacaatggttacaaatgtatcctatttgagaattgagattgatataataaagcattccaagagagttacgttgggaagggggggctgcaatattgcggcaatctttagtttgggcggtgggggggggcattcctgcagaattaagggggactatagttctccttcgggaatggggttgtagagagggactcatgaattttaatgttaaaataactaaaatttttaatttggtaatcgcacatcaggtaatccctttgtcccttgtttcataaacagaaaaagaaaggggaagagaaaccaagagagaggga

SEQ ID NO: 88918 - DNA, 996 bp, Citrus clementina
  Intron number 2 from transcript clementine0.9_025408m (loc us clementine0.9_025408m.g) derived from phytozome v7.0 (c hr-ID scaffold_99; pos 735348 to 736343)
aagttaaggtaattgttaattatctgttcaaaagtttttaaattatgccgacaactttattttataataatttttttttgttgtttattaaatatttctcaaaagacttgaaatattgtcttatcaaagcatttttaatattagactgaataatggatacttccaaataacattttatcatatgctgtaatgggctgtgacgagctctctttcttcttcattaatttatcctttttttttttttatagaagcaaaaaacaaaagcaaatgcaaatgcatctctaatcattaatgtagattatagggaacaagtccatgtttaacaaaaaattgtaattcgggatttgttagttgtttattaaacatttctcaaaagacttgaaatattttatcttatcaaagcattttttacattagactgaataataaatacttctaaataacatgttatcatttgctgtaatgggcgtgacaagctctctttattcttgattaatttatcaattttttatagaaacaaaaaacaaaagcaaatgcaaatgcatctctaatcattgatgtatattggagggaacaagtccccgtgaaatagaatttactattataaaccacatactatttttttttaatccataaacgtgtctgacaatgattggaactggtgtcgtgtgagatgtgacttgtttttttttttttttaatttttgcagcaattatattatttaggtaaagtaaagcttatccatgcacacaatttggaataaactatgaattgaacagaaccaataattatttgagagttgtgatgaccacacacccactccttgttgactgacttgtataattatatatcattctttaggcaatgtgaaaaaggtggctaatgagaggcaatatcgcatgattcttattttgatcgtgttaaatacatcatgcatgtcgtttattctaacaatgattttttttttaaataattaattaggtggtagcatcaaag

SEQ ID NO: 88919 - DNA, 428 bp, Citrus clementina
  Intron number 1 from transcript clementine0.9_018422m (loc us clementine0.9_018363m.g) derived from phytozome v7.0 (c hr-ID scaffold_16; pos 3624294 to 3624721 reverse strand)
attacagatccgtcgtcgttttggtctaattctgtgtaagtcaattgtcttcttctctttatttttgtccatttgtacaatcttataaaaattttacgaatttgaatgcatgagttaattctataaggaatcgagtattaatcgctcgcaatttatcgtcacgagatgaactattattaatttctgtttatttgttagaagtttaattacgaaaccctaattgcatagaaagtacgaaccctatttataataaaacttaacgttgttctttttttcccccccctaagaattgcacacttgagatagaattcgtaataagcatttcatttcattatctaagtttcaacctttaagttttctgagagaatacgtatgctttttgaacttttgcagattatcagaggctttgtgaaactaggtgactaact

SEQ ID NO: 88920 - DNA, 832 bp, Citrus clementina
  Intron number 1 from transcript clementine0.9_013565m (loc us clementine0.9_013022m.g) derived from phytozome v7.0 (c hr-ID scaffold_8; pos 3245821 to 3246652 reverse strand)
gtcgtttcgctctctcaagatcgacgcgaaagctcgtgagtattaattacgaaaccaaagctctctcatttcttttttcgtcgaatttttttctgaaattttactgattactgtaattgataagttcgataacgagaattatgtaatgtgatttgttcttgcttttgattgttaattacgcattgtttcggaaccgtctgtgttgatgtatgatactgagatcgcaccagtagcagttatttttgcgttttttttaaaaattgaaatcgaatgaaattttactgtttaaacagatcaactttgaaatgctgtaatttagtgtttcaattgcctaattttgttcactgttagtagtttagtgtgtgtttggctttgagtggtttcatagttacttggactgcatcttaaatactgtatttatagctacatcatcgacaatagttttgttgtgtagttcatttttatgaacggtgtttgtttttgaggatattatgaagattcctttgggaaaaaaaaaaactgttgttaaatgtatttatcgtcactcttgctgttttctggtgtcctgagattgttatatagcaagactaataatacttgtataagtttttattctctttgttaggctaggcgacagtttgaaactgctttttacaaattattgtctaattgatcttttatacacatgcgcatgcataaaacacaggttatatgtattgtgattttggagaaactacgtgttgtatattgaggaaacttatgatttttgttcaaatgtgcttagtgcttacatgttacccttattatgaatgtatcttttttatcagggttc

SEQ ID NO: 88921 - DNA, 1041 bp, Citrus clementina
  Intron number 1 from transcript clementine0.9_016278m (loc us clementine0.9_016253m.g) derived from phytozome v7.0 (c hr-ID scaffold_16; pos 313415 to 314455)
tccatcaagagtctctgcggagaacacaataggaggtaatttataaatttatctgcaaaattaaaaaaaaaaaatctcttttcacctgtcttttcttcatcttcatctgatcattttatgtaacatttctggttctttcatagaaagctacatatatagaatcattagttgtgttatgtttttagtgcccttatctagagattagagtcttaccctcgaatgaatttatgcattttttaaaaaaaaattggagaaccagttcttcctataacaaattgtaaaaaaaataaaagtttgttcaactcgtggcataattaaattatgaaattaatgatttttatgttttaataactctatttacacaaaattttatctagtaatttaccttgtgatagttcattttccccatattcaatattagagtcgcaattgtcaacaaatccagccatccacggcggctgaaggcttaggctagttgccaagtgcccaaactttttttttttaattttcctatttttactttttgagaattataacttttctactttaataattcttcttttatcacttatcccctacaatttttataatactcccgttgccctaaacgtcaaaatttttaatgaacaattcatcctaaaatttttgtggagaaaagtgacaatcgctctctttctctattttttgaggtagcaagtgaaatggacatagaattaatttcataaaatctaaaaaaaataattgtacgtcactttcatgtgataattccatgtgataattcatgcatcttactttccacaagctgcttttttttttttcaaattaatttgagtcatttgactatcacttaagttggtattacatgtcaatccagcatcgctgtcacatcattctctaaatgtaaattaattatttgtcttcagcaaattaacatcatatgcattatttctcaaaaataaaaaattatatgtattaacatatagctaattttttttaaaaaaaaattcatgaaataaggtgaacaaattctgaaaaatatta

SEQ ID NO: 88922 - DNA, 450 bp, Citrus clementina
  Intron number 2 from transcript clementine0.9_016278m (loc us clementine0.9_016253m.g) derived from phytozome v7.0 (c hr-ID scaffold_16; pos 314513 to 314962)
agattggagaaggtggatttggctccgtttataaggtatgttcattctataatcttacattaattacggtatatatgattgttccatttttcttctttttttttccaaatacttttttaatgttttttattattattttattgttaaaaaccgtctctaaaaatatgctgttgaaggcattctcaaattctcaaattacaataaattattttacaaatgggcttagacttatattttgaaaaaataggccgaaagccttctcatcacagatttcgaaccatgtttattagtacatgttgtcctaattattgaagcatgtcaatactgggaatatatatatatatataagtatgaattgagtttatggttccaattcaaatgactgtggtaacactagcgttttggtttttgaaaaatgttaatatttgatcttaaagggaaggcttcaag

SEQ ID NO: 88923 - DNA, 419 bp, Citrus clementina
  Intron number 2 from transcript clementine0.9_011409m (loc us clementine0.9_011409m.g) derived from phytozome v7.0 (c hr-ID scaffold_195; pos 10189 to 10607)
ctgctgagaagttggctgaaagtagtaatatacaggttatattacatgcttgtcccttttgcaagctgcttgtgtgcagatatcttttttttttttttttgactggatttgtgatatttcgaacttatttttactcgaaactgaaaattcccatcatattataattaacaccaatcagaggttttggggtttgatctattttccagcataggtaggatagatctcttgtttgtctcatctgtaaatgagttttggtattttctatttgcatgggtcagaaatctgatcaaaggtactgcagtatgacttaattgattatgtttgtatatggtatcattggttatatcttgtgtgctggcatctaaattgatcttcgcatgccaggatcttgttgatattgaggtattccaagaagcaaa

SEQ ID NO: 88924 - DNA, 439 bp, Citrus clementina
  Intron number 2 from transcript clementine0.9_025003m (loc us clementine0.9_024949m.g) derived from phytozome v7.0 (c hr-ID scaffold_69; pos 1034661 to 1035099)
ttctttctgtatgtggtaatttttttttttcaaacacttattgtgcgctcatagattaataatttttgctctttctttgagtttgttacattacgtttggcctataaagggtttatcttttgaaattaggtattatgctaaacagattgaaacagtttgcatgcatgcatttgacttgtagtttcattgcttgaggtgttattttggtgatgatcctattcaattactagcttttagtatttttgctacatgtatgctttcctacacatttgcactgtttactttaatgtagatgataacggcttcttaattcttctatgggtgcaatattctgtatgctttatatacttttcctatgattattctgctgcctgtcatatattaatttttctcctgcattgcagggtctagacactttgaatcccgtattggttatcga

SEQ ID NO: 88925 - DNA, 960 bp, Citrus clementina
  Intron number 1 from transcript clementine0.9_013522m (loc us clementine0.9_013522m.g) derived from phytozome v7.0 (c hr-ID scaffold_12; pos 673360 to 674319 reverse strand)
aagtgtattcagtgtggcaacgtcgctcgctcccggtaactatttcattctttcttgtttcttttttctttttataatattttctaggtttgttcataagagcataatttatctcaaattgatttcaagaacaagaagcagttgatttcttggcgtaacgctaattgattgatgaatttaaatattttatttttaatttttttaattttttgcaaacggtgaaattgcatttcgacgtttaaaatttcctctaaatagaaggaaggtctcaaaagtcaaaacttaattgaatgtgatgaaatctccagaaagctcggatagttggattgatcagattataagcttattgttagatattaacacgacgcagtagcacatgttgtggattcatactttttaaaattggtttgtgtcaatcttcattaactgttccaagttattgatttggagttgagttgtttcctaatgatctcaacttctaaagttttaggggaactgacctagttggtgtttgtgcgatgactttaacccagtacttggtcaaccaccgaatgcatgttgtctatgacattataattactattatgggatatttacaatgtttacttatcctgtattcgttatctgtgttctaggggaagtacatattagtgctcagcttaacttgactgatacaattcagcattgattggacaatacattttgatttagcttgttttcccggtactctagcagttgttactgatggtgcttaagactgctgaaaatgttttaagggactgcccactgcgtagtttttgaattgatttctgagatttctgaaaatatagatgaatctatgaaatcttattacatcacaagcatcacatgcattcttctgttgcccagagctgtttgaggaattcatatattctcttatggtaatgaattggattacttgttcaggtgcccataccagtc

SEQ ID NO: 88926 - DNA, 411 bp, Citrus clementina
  Intron number 1 from transcript clementine0.9_009662m (loc us clementine0.9_009662m.g) derived from phytozome v7.0 (c hr-ID scaffold_145; pos 747 to 1157)
agcttgaaagagaccaggttaaggctttaatccaggtatatgtatatttaactatttgattagatgtacttgaactcagttgatcagttaaataaatctactacttaaaaccctagagcaatttaactgttttatattacttactaagtttagtaatttatttggtttctaatgatttattcaaatacttcatatattctttgcatataaccaacaaagaatcatgagatacgtacggtttgtacgtgtatcgtaattctacccgctagtcgtacatacctcaaatgtataaaaactttaatcatgcatacaaccatcaaagttgtttattgttttgaaaatcttaaccacattcgattttgctttgagtttttaggaccttttagctggtggaactgagagctcaacggt

SEQ ID NO: 88927 - DNA, 939 bp, Citrus clementina
  Intron number 1 from transcript clementine0.9_015760m (loc us clementine0.9_015760m.g) derived from phytozome v7.0 (c hr-ID scaffold_12; pos 2577393 to 2578331)
acctcctgttccggcaacggcttgcactgcatcaagtgctcgatctgacggtccagatcggcctgcgacggcatcgtttgagatttcgttcgacgcctttagatatgattctgtgatcggacagtgaagcgtgagcacgggcaatgagggctggatgaaggttcaggtcatcgtagatttgcgattagggttagggtttgaagagagatacaaggtagtggatttgccttggccctcgaactcagttgtaatgctattgttggtttgcagctgagcattattattttgttatcaggaattcagaagcaagattttaaagtatggtccctgcaatgttatctatttattatttttttcatacttttataaattcataaatttggccaaatggaatatggactttttcccatcttttatctttaaatattacgtatcttggggttttattatgaatatttttattgctacatatttttacattatagtgtaacaataacataaagaaaggaaatatgttcacacacatgcaggagatgctcgaacagtattctagacctcaagaataaggtgaaaaaaaatctctcctcaaatattaatgaaataaaaaaatattatgtaattaaaataaaggatatttaaattataaataattatttatttataaatcatatatacagtgatgccatcaatgatatcattttctttttaaggaaaaataatacaatctttaatatgcttcaataaacccttttttaggaaataaacacaacccttcattttattttattttttttctttgcttgggtggcgaacacaaaaccaaagtcttcagggatgcaaatgcattaatgaaaaaataattaaaagaaaagaggaaaaaaaaagaatgggctaagacagccagaggagagaggttggcttttgctgacgacccaaagg

SEQ ID NO: 88928 - DNA, 712 bp, Citrus clementina
  Intron number 2 from transcript clementine0.9_011255m (loc us clementine0.9_011255m.g) derived from phytozome v7.0 (c hr-ID scaffold_16; pos 2653846 to 2654557 reverse strand)
ggattacttgaagagccaagcagattctcttcaaggtagatagtaatagcttaatatatgattccataattggcatattaggcactgttttcttgtttcacattgttcgtttaattctaaattttgattatttttattcaatgtttcacatcattggtttaattctaacttttgattttttattcagaagaataagctaatctacaagtaaaaaggcttaacaaataaaaattctttggcattaagaaaagaatgagagaaatagtagttacaaaagctaaagttcgacacttctaggttgtcttaactgtagtagcaattgtgatgatgttgctagtatgagcatggaagcaactatttaaatccaaagaaaaggatagaccagcttgttattgcttgaaaaaaaggccgagaggggtaattagaaccattattaggtgcatggaagagcagataagatgaaggttatggtaggatcctttaaatcaatgatgaattgaagagtatgacagaatttaattcagaagtaggattatgctttgtgttagtcagtcctgcaaatttaatacgagctcttattgagaatcttagctatcaactttgcttttgacttcatcatggtttgtttttgcaattatgttttgaatgatgagctcaccaacatatttgttggttataagttttgctgtgtcggattatcatattccacaat

SEQ ID NO: 88929 - DNA, 490 bp, Citrus clementina
  Intron number 1 from transcript clementine0.9_017694m (loc us clementine0.9_017694m.g) derived from phytozome v7.0 (c hr-ID scaffold_12; pos 3349290 to 3349779)
ctttgcccttgtttactgcactgctggtatctcaggtcagttctagctttgtaagttcacttttttctacatttttgagagggggaaaaaatcaaatctttaatgagtattaatgcaaacattatgcagtttttttttttattgttttaagcattttttttttcaaatctttttctggtgtttctatgcttctgcacaagtaaaacgtagaatagcctttgcccattggtttgtctactaatcgttagatctggctagtgatttctttgtatgcttcttttatggactaagttttgcgactttcctagttaaattttatacttatcaacgtctctacgtgaaaaagttttaatttttactttttaaattttttttatttgggttctttattgtgttcgtttcttatggtggtgatgatgatcagatctgtttgttctttgctgtttaaacaacaggaggacacatcaacccagcagtgaccttcggtctg

SEQ ID NO: 88930 - DNA, 948 bp, Citrus clementina
  Intron number 1 from transcript clementine0.9_022068m (loc us clementine0.9_022067m.g) derived from phytozome v7.0 (c hr-ID scaffold_25; pos 29842 to 30789)
ccgttcgtacgccgcttgcccgagttcaagttctggtaggtttggttagtttttgtgtttttttaccccctctgtttttgtttttgatcatatcaagtaatggaatgataaaattcggcagttttacttgatcatcaagcgaagttatgcattgggattgattgatttgtgactctagataacatttaactaatggggccattttgtctgtgatcttaaagttaactttacaaactgggctataaagtttctcttcctaaggaatgaattatatctgaaatgcaaatcaaacaggccccaacgttgttatcctcaatttttttggttcgtggttaatatgttctcacaattgtttgctatctgatagggaaaataagttaacatttatttgttacgtaagagaaaaggtttacagctgaccaattcatgaggccagtaactgaagagactgtggcatctgttgtaaaattatctaaacttcaagaaatgtagaatcttgatgcgcttttcatatttcgtgtggtcctgattccctagtatatatgtcagtctgtttcacagtcaatgtatgcatgaactcttaatgattgattggaaatatgtgtttttatatggtctcttccttttctatatacaattttgtctgtctgttttttaacagcctgaccagaacaatacgtatgatgagaaatagtttggtgagttgaggtggctgagtagacagcatatggcctgatgaagaagcagaacaatttagtgtctctttccttctgtttgcatggtgcaaggcaattggaatcaatcgattcaattgtgtctctttgtcgtataatgtcattgaccaattgttttatgccaatgttattggttggtcaaacacattattgaagttgttttggttttctcatggaaggtactgtgtcacaaggtccttctgcattggttttg

SEQ ID NO: 88931 - DNA, 1014 bp, Citrus clementina
  Intron number 1 from transcript clementine0.9_027631m (loc us clementine0.9_027631m.g) derived from phytozome v7.0 (c hr-ID scaffold_70; pos 218006 to 219019)
gggaaaagggcgaggggtgaggctagggtttgcatggggatttcccagaacgtttttttttagggttagggggggggccaggatggatttcattttttggaaaaggtttttttattggggggccctggggtggttttggaaaaaaaacaccattttttttctttgggtttgggggggggccctttttggagagtttggttttaagggtttttttgttgggttaaattttacgggggggggctgaaaatggcaagggtgtttgggcaaaaaaaaaggttttgaaggtttttggtcaaaaattttcctcggggtttggccaagggcttgaaaccccggagccttttttccccgattcgggggcaccccccataaaggccaaaggggtccctccccccccccccccccccccccccccggattttaaaatattttgagatttttaaataaaatatgaataatttatgtgaaatgtccacactggcccctgtacaattaatatataaggttgatagattagataatattgtaattttataacccaaaagcaaaataattaaaacaattaaatcaatcccaaaagcccacttttatttttgaaaagaaaacaaactttcgttaaagtctttaactttctgcagcccgaaagcccacttaagtcacttacaatggcatcaaaataattaaaacaaaaaagaaaaaagaaatcagccacaaaacccagaaaatcagccaacaaattgcgatcacgaataacatatcccaaaaatcacctgcaactcaaccaaaatccctaaatttcccagcagcaaacatgagaaagccataaaaaattaatcaatacttcaaaaggaaaaatgcagaagccaataccaaatctccaaatattgaaaattcacaagtctcacttaccaattcaccaaattttagaaatccacctttaaaatctccaagaattgagacaaatccagttaatactcaacttttggagcgtgatccagggttgcgtccacaaat

SEQ ID NO: 88932 - DNA, 978 bp, Citrus clementina
  Intron number 1 from transcript clementine0.9_021457m (loc us clementine0.9_021457m.g) derived from phytozome v7.0 (c hr-ID scaffold_60; pos 576661 to 577638)
gccggtgagtttgtggtggtgttggtcgatagtgaacgctagcttggatttgataatttgagattttttattttttattttcttgaaataaactaaaagaaactaaatggaaaaaaattcaaaaataaaaaagagcaggtttggtggtaatggggggtagatttgtaataccatgttttagctctaatactaaactgatacaacggaagtgtaatgttctaatattccattgattctagagaacacccaaatgaaagaataaagtaaattcacgttgattcaaaagaatattgtgaagaggtttgagactcgttgattatgcaaaatgtcaagaattaattaaaacacaaaaactcacacagagttttgaaattgaatatatcattgagctcaaatatataatttattgtaagaaataatcaaagcctgcttgtaaagttacaaaagacacttatttataataactacgacttatcttaatttgactaaaaaacttattttaacaagacttatacagaaattaagattataacttaaagagtaatgctacacatcccaatttttttatctcaaaaaattatcccaaatgatgtgtcatttatcaattaattggtgagataatataattaattcacttgaattttgtaaagaattatcaaccactcaattaataatatgtcatttgggataactttttgggataaaaaatttaaaatatgtagcactactgtaacttaaataagtaatgcctaaaaaataaaagtctaaataagaaaccaaattaaactataatataaattaatttaaatatttttaaatattataaattttaatttagtttggatttttttactttcttactttgcatcagtatctaaaatagaaattgataaatatgcttttgcatctaagataaaatagtcatttcaaaagtcatttcgaggttgctgtgcttggagcggcgggttaaacttacga

SEQ ID NO: 88933 - DNA, 845 bp, Citrus clementina
  Intron number 2 from transcript clementine0.9_021631m (loc us clementine0.9_020248m.g) derived from phytozome v7.0 (c hr-ID scaffold_71; pos 557532 to 558376 reverse strand)
accaaactattgtccggcaagattgttaccctgaggtgagaaaagtgcatttctcttatgtagctgaacaggattttgatttaaatagaaatttgctgtgcaacaaaattccattttaagtgccgtagataatgctgttcttgattataatgttgggagaatgtctggttgtatacctaggagtgttacatgctaatcatccccaagttacacatgtaactatgaatgctttgcttgttttagttttatctggtgtggatcaatcatttgttgtctgggcatccactatctgttaaactgactaacatagtgatttagaacacattgtccaatgaatcagatgaagaaatgggagaaatcgaggcatgaaaaaggagagacaattcagaagaacgtgggaaggagtataataaactacattccaataatcattgatagcttcaagactactcaaaaatgagaaagaaatctctatttatagtggccaaaccctagatagactgggaaattgatctgtgcttaagaaaagaaatatacttgtagaaagtaatataacactcactcaaataagaaaattattataggtaggctaaatattaccaaaacatttaactgatcttgacttaaataagcaagaatctattaatcttcctaagatcctaaatagagatttcttggtctgtatcacttgaacagttgacctaaattaatttgtgctgtgctttggttaagttagttcaatttacattgttgtctcttgttgatcttgcctgcataacaagtaactgccccgaagcatcaattttataaagctgactcatgacctgaaatttgattttgcagtg

SEQ ID NO: 88934 - DNA, 969 bp, Citrus clementina
  Intron number 1 from transcript clementine0.9_024852m (loc us clementine0.9_024852m.g) derived from phytozome v7.0 (c hr-ID scaffold_57; pos 307625 to 308593)
ctgactctatactcttggtgagttctaaattttgcttgtttcttcttcttactttttaaacaactctgcttcacttagtttcctcaatttacggaaattttgttcaatttgctgcttgatttcctctttattattgtttgagtatgcctttgctatgtgtgttaactgcatggtagttatcataatttcttggttactatttatttaattgtgtttatgttggttaattatattccttgattgatgttagattaagatgatattccttgatattaaataatagttaattggaagatcaaacacgcaaattaatttatgattcattcatgcatcctaaatattgattttcactagggacccacaaaaatcatttcttttatctgggtttgttcccccatcaaacacacaaaaagacaacattatagtcctaagttcatttatatatttggtgtttgtgctttagtcgattaataaagtaatgaatagttagccatttttaaattcattggagggtctagattgtatagacatacgaacccaatacatcacttgtttttaatattaagtaggtgaacgtgactttcactgaaagatggaaaatcttgtctatttgtgcgctcagaattagttcagtatagtgatattgtttcttaattatgcaaatgtgtattttgtattgtgttttgcgtttcatttctgaccaaaacagtggatgtttgttttatttatgcaaatattagcaatattatgatatttatttgaaagatgtcttgtatggctataaaatgtttgattattttaatctataatgataatggtgttttgtttcaccttagatgattgtttaatcaaattaacctcattggatagtcaactgtgattttacattattttgggtatcatcacacgggctcgtactgctgctgatctctaggcagaagcttcatccccgtgatcagcggtattggt

SEQ ID NO: 88935 - DNA, 829 bp, Citrus clementina
  Intron number 2 from transcript clementine0.9_024852m (loc us clementine0.9_024852m.g) derived from phytozome v7.0 (c hr-ID scaffold_57; pos 308594 to 309422)
atctgaagtcttgactgggacctacctccttggaggtaaggggtgaatcaaccactcaaagggatacacatctttcatggacttccattgagtagttgtattattatttcccttttaatgaaaagcttcatagatggactcttaatcagttaatcatgcttcttcattttgtcttgcttaatattgattagcctaagtttcttccccatacaaattctatagtaaaagtttattttggttttagctgtaataagatgttgatgactcttttcagtttttgttataacacgtttttgtgctttcttgttttttgactggaaaaaaggaataagatgttgatgactcttttcagtttttgttataacacgtttttgtgctttcttgttttttgactggaaaaaaggggcaactattctttcaaatacaagttcatagtaagaatacatcatctttgagtatgttgtatcattttagtttagagttgtatttagtatgaaaaatcctttattattcagctagcaacaataatatatctattagtttggagttgatcagctttgaataaggaactagtgctgaacatattatgatgagtttattaactgaacagtctggttgatattcttgtcttgtaacttacttgatgactatctggtagaaatgattgctaaatttgatttggttgtttggatacttcgtgctgttttggtgggacttctataagtggcatgtaactcttgattgcctgttgtgttttcgtcttttactacgcattgtaagtcatttgcaatttttttattagggagtataaggtataaaggtgtcgaag

SEQ ID NO: 88936 - DNA, 707 bp, Citrus clementina
  Intron number 2 from transcript clementine0.9_002337m (loc us clementine0.9_002337m.g) derived from phytozome v7.0 (c hr-ID scaffold_8; pos 886936 to 887642)
ccacggcggagagtgtccgcgatcgtcttattcaagtaaaatttctaagctatcatgtttgtgaagtttcatcctttattcttcttatatatatatatatatatatatatatatatatatatatatatatatatataatattgataatgacttgaaatttagttacagtttgcttcctttacttccttctctctgagtgtatataagtagatatttatttatttttttatgtggttagatctgtttggttatgtcatgattcttttttgatatgttatttttatttgaaataatgggagagaatagaaaatgctttttcattgttttagtgaaatcatgtcatgtcgctttgtatggatgagtttgtgtagttaatttgtacgtgtagtagtactcattttctttataaccttaatgacacgacttagagtttgcgttatcgtagaaatagaaactcatgaaatatacagcagctccgttattacttttgctttttagctggatagactataaggaaatgatccatgaatcattgcatggttgactttaatgcatgcatgatattgcgatttgtgatctgagatacacaaagctgtaattacttcatgatatgattagtttggtgatattttctaaaattttaaatcatgatttacaaataggttaaatgtttttgttttgtttatcatttgattgttttgacagca

SEQ ID NO: 88937 - DNA, 898 bp, Citrus clementina
  Intron number 1 from transcript clementine0.9_007641m (loc us clementine0.9_007641m.g) derived from phytozome v7.0 (c hr-ID scaffold_103; pos 312871 to 313768)
aatttatatttccagaaccagaggcacacaagtaagaaaatagcgttaattaattaattggttcctttctttattaatttttttctttgcagttgcatgcatgcttttccacatgcatagttgtatatatataaatgaatttcataataattttaaatttttatcttgtaggaatcttcccaacaacaattctcggataaatctgtaagaaaattatactacaccgtattatataatatcctcctacgtttttactcattttcgcgcttcaaatttcaattccaacagtttctgtctatctcgttttctgattttgattttaactttcaatggacatgtgatatctgcacgcatactattaacaatattgctgctgtaaccagtgaacctaagaatcggtatgttcatattcatttatctaataattatattataggtgatttatcgatcgatcagcaagcaattattacgtgaattaacgcccttacaaaattaattgatcttattattgtaattatttatgaaggacatttccggcagagattgtgaggaagtattgccccgatggccagaagaaatctcagtgtatgtatacatatccatctgtacagaaatgttcctattaaggatttgttaagttccggaaaaactgttgtttaaattatatatatatatatatatatattttattattaactcatgcatacactgaaacttgaactcaagacttgagctccaggaaggctgtcctttgccaccagagctggaccttggtttcatatacattttaaaattaatctaccggagctacatcttggtttcacatacatgtttaaattaatcaatgtgtatatatgttgcagacaattataatttgcatataaatactggtggcgat

SEQ ID NO: 88938 - DNA, 598 bp, Citrus clementina
  Intron number 4 from transcript clementine0.9_034718m (loc us clementine0.9_034718m.g) derived from phytozome v7.0 (c hr-ID scaffold_68; pos 962674 to 963271 reverse strand)
agatcttcgtggttgtggaataactacaattcaaggtacacggcaacaagtcactacccaaattccttgtgatattattatgcccttaatttttacacatgtataatgtcaaattaaaacccattttttactggaaaacttgacaaacttcactacaattggtacacgacaaaaatttactttctaatttcttagtaaaatttaaaaaaaaaaaaaaagtcatttttgagtatatgatcaatttaattagatctgaatcataagctttattactacaattatttaatctaaatttatttcttaatcttaattcttttttttccaaagatgattaataaaatttttcttctttcttggtgcaggattagctaaattaaaaaacttggaagcattggatttgagttctaattatattagacacggttctttagaaggtcatttttttaattaaacaatttgcacagttaattttcattcaatatttaccatattattttaattaaacaatttagacaagagtgacataactgttattaacaaaatttatgttttttttttaacaggattagcaaatttgacaaacctacaagtgttggat

SEQ ID NO: 88939 - DNA, 667 bp, Citrus clementina
  Intron number 1 from transcript clementine0.9_016989m (loc us clementine0.9_016989m.g) derived from phytozome v7.0 (c hr-ID scaffold_8; pos 4602760 to 4603426 reverse strand)
gagttttggggtaagcttcactcactcgccttctcttcttttttgtttctttatcttttgttttgttgtctctgtttctattttcgtgatttttgtcttcttgtttatattaagtgtgtgttttgtatatgtgtgttgttatgtttggatccttaaaatatctcaaaaagatttttcttttttcttttcttttttttttgttacaagttttactagacacagtaacgacgcataacctcttctcatttgttagtttgattattagttgctcataaggggtttatgtttcattattttcattaaatacgaacactaagcctgtgctatgtaataagttctggttaaagttattgaacttatggtttcgatattggtggatttctttgtctgtttattgtctttgttttctttaatgtttttgttttgctgcattttgcttttgactagattcaaattttgtcttaggttctcgatagagattgtcttcaaagttgttcttgtagcattgtgctgctatttattcaagtttgccaatccacttagcaatagcattatttagtcatttagcgtaagcttctgtgatgataatgcatacactgacaatgggttgtcttttctttttgttgttctaggtgttgaagttaaggctgggcagcctcttaaagtg

SEQ ID NO: 88940 - DNA, 691 bp, Citrus clementina
  Intron number 2 from transcript clementine0.9_017802m (loc us clementine0.9_014757m.g) derived from phytozome v7.0 (c hr-ID scaffold_16; pos 3902532 to 3903222 reverse strand)
cggctcctcttgcaaggcttaccattctctttcaggtttgtttttagaagaattatcaatttggtattttgtgggtaccagttgtttcgtgggttaccttttgtttgttgagtttcgataatgttcactgatgttaatgtggcataacattgtagtacgtgggtttaggggggataatgctgggggcaagagcaagaatgagaatgggattgtttggtattgtagtgtggggcaataggatgtgaaaatattataatttgttaagagtggcaagtacttgtagtgaggggaaataaaaaatatgtttatgtttgcagttatggaggctatgagttgaattaatgtgagaaataaagctgctacattggagggaataaggggttttcaggtgttttgaattgattcttaagactagcatttggatagcaaattacctaactaggcttcggtcagctggtatagcagtagtggagttagcgagattgattgcaaatggctttgagtaatgatttgtttcacatgtcataatccttataatgttttcagttttttaaaaacaaaatgcaaatatatgggggtgaatgcgtattcatgctttcttatatgttatgtgtttaagattttcttgctggcttacaccatcaagcctgcctttttgatgtcgttatattttcttctacaggtgcaaggc

SEQ ID NO: 88941 - DNA, 471 bp, Citrus clementina
  Intron number 1 from transcript clementine0.9_020565m (loc us clementine0.9_019313m.g) derived from phytozome v7.0 (c hr-ID scaffold_28; pos 861034 to 861504)
cgctctcctccttctagcctctcctcttcttcaaggtccgccctttctcatctccggatctagatccgtacatgcacgcccacatttcttcgattcgttccatgatttcgttgatacgatcgttttgattttttatattaattaagatctgatttgacttttttgttcgtctgttagacttcgaattttgttatttatggttaagttttgatcgaattgtttattaattgctttcgatagcgaaatcacaattagaaagttctttctgaaaattctagttaaaaatttctataaaagtgcgtgctttttacgtatccatttgtatgctgttgcgttggttatttagattgttagaattcaacacgtgttttgttataccaaatacatgtgaatagttctttttctttttttcctttatctttgtttcatttgatagttgctaggtgtcaatcggattcggaaacgggagtt

SEQ ID NO: 88942 - DNA, 952 bp, Citrus clementina
  Intron number 2 from transcript clementine0.9_013709m (loc us clementine0.9_013709m.g) derived from phytozome v7.0 (c hr-ID scaffold_145; pos 117146 to 118097 reverse strand)
gctctcagcttcctgatttcaaggctgcctttcaagtgagttgtttattatttttattttttttctgatatcttggctttatggggtttatttgaacgatgtttggctgctgagggatataaaaaaaatgagtctattgggttgtatgtttggctgtggaagagaatccatgttgaaagtgcttgagatcatggtcttgtgttgcatttgctatgaaaatgagtttttttttcccattggattttcaaatgattctttttattacagtgtctgtgtgctgtttggttgaaaggaagtttgactatttcaggagcaaaaactcctatttatgatggaaactcgtagctacaaaaatccatctcacatttgttgttgtgaaaatttgttagttcgtttataaaaatcccatttggagctgtgtttattattcttatattgaaagttgaattgggtttacttaagtggatatatttctaaatttctcaagaaaaacacatttctcattttttgccttcttattttgcatcactagtttttcttgattgacttttgtaatgatcattttcttttgctttgatttgtggatcatttatctgtcatgtcctgttttgttctttgacattaccttcgcattttgtttagttggtaggaaaagtaaagtcaggccgtttcttcttttagctattgagaagagattggagtttttctttcttctagattgttatgtatcaagttctttggttgtggaaaatgaaaagtgcaagcaagtaagccatatatggttggtagccttgtttaagtcttgacaatacttgcatttaattagcagaaagccttagtgtttgttgttcgtgcttcagtaatatatttagtcattgtcaatgagtgagagtgtgagacatgttttgttgttggtaacagaaaaacatgctttgctgtaattcaggatttc

SEQ ID NO: 88943 - DNA, 960 bp, Citrus clementina
  Intron number 1 from transcript clementine0.9_002104m (loc us clementine0.9_002104m.g) derived from phytozome v7.0 (c hr-ID scaffold_12; pos 4433415 to 4434374 reverse strand)
ttgtattcctgagtcaactcatcaactcagcctgagtaagtatctcttgatctggatgttttatttgttcaccacgttgattatctacatgtatatatatttttcagatcacaattcattttttttgttaatttttttcttaaatatttatttgtatttattactgctgtttggttactgggattaactttcggaaattagttacttgtttagttagttatgttttcgagatcatagtgagtttgaccagagttttgattatatagtttcgtttagttttaataaattagtttcaagtggaatcgaaataaagcgaatgaataactgcaatcaaaggaaattagaatgtgtgatatgtgattgttttgtactaagactgtagaatctattcacagccaagtttggtagagttattgtgtggctcaattaaattaacttttcattactatctgaagagaggagacaatatgaactcatttttgctgtttgtttgctgaggagaagtgggaaaattaaagaaagtcgaatctattgtattgcattaattgtaagccagctatctttaaaagcagttttcttttacaaaaaagggatttccagttttcttctaccttttttttacacctatgaatttggagttttagctctctgtttataaaattattcgttttatacttctgttctaaatccaaacttaaattaattgcttgatgttctgacctctactgtaatgccatttgctatggcccatgtaaaatgccatggctttcttgattttagttttgtaggctataattacttttagttattttagctgtattttaccagctttattatgtctggtgctacttggcaagagttgtaaaactgggttcactgtttgtttcattttgtaaccaaagttttaatgcatgatattttacatatatttgatttacaatctgtcaacttcagattcaa

SEQ ID NO: 88944 - DNA, 714 bp, Citrus clementina; identical to SEQ ID NO: 80983
  Intron number 1 from transcript clementine0.9_027636m (loc us clementine0.9_027636m.g) derived from phytozome v7.0 (c hr-ID scaffold_88; pos 149009 to 149722)

SEQ ID NO: 88945 - DNA, 742 bp, Citrus clementina
  Intron number 1 from transcript clementine0.9_021608m (loc us clementine0.9_019964m.g) derived from phytozome v7.0 (c hr-ID scaffold_16; pos 1319763 to 1320504 reverse strand)
cgaggtttggtcaagggaaaagtgaataagccgaggtatgcaaatgatgaataaattcccagttctcataaaaattttctctgtcatttctattttgcgagattttccctttcattttatttaatatttatgggtaggttttgttaaaaagaaacttcaggtccagttactgaacccatgtatgtacagcttgggtggtcaggtggcttgttgtatgtttaatgagaaagtgagtgagtaggtttcattttgcatatctttatgttgttgaatgttgattccttgtctgtgacacaagatgacatcgcccaaaaaaaaaatataattaattaattaaatgattgatgttttagggaatagaagattgttgatgcaagagttttcaaaatcactccaaaaatcaaactgggtagatggttttttgttactatttacatcttgttgatgttagagttcgtgaaaatatttcgatattatattagactagactgtgaatcctaaaacccatcaaatgtactacgataatgtattacatactttctctctctgtcatattttctaatattttctctgtagtcaacagtcttgtgggatctctgagtgcataattttacgggacaaaatacatttgactttgatttttgtattactctttttgagatccaaacagggactgtggtaggaaattccaaactatcagaaaagagaatcctttaactcagggttgtacatttccttagcc

SEQ ID NO: 88946 - DNA, 413 bp, Citrus clementina; identical to SEQ ID NO: 79087
  Intron number 1 from transcript clementine0.9_007262m (loc us clementine0.9_004563m.g) derived from phytozome v7.0 (c hr-ID scaffold_92; pos 53940 to 54352 reverse strand)

SEQ ID NO: 88947 - DNA, 477 bp, Citrus clementina
  Intron number 1 from transcript clementine0.9_028202m (loc us clementine0.9_028202m.g) derived from phytozome v7.0 (c hr-ID scaffold_56; pos 475816 to 476292 reverse strand)
gcctggctgtatcatctgctggagatactttcgtgagaattaatgttcacatcatgtcacatattcaatcactagctatatatgaccttctaaccatctaatatgattacgtaaaaatgaagaatcatgcagtaatgaaaatcaaaataatatataaatcaaaataattaatatgtgttgtttccaaactaggcaatcaatgtaaattggattgattgtcaatcaacatactcagtctcttacaaatatatcaatcattaggattaatttatgctaactatttatcttgtttttcatgtttaatcactgtaccattaagcccttttggctttttgtaatgatctataatttaacaattagaatattcttgtcaacttatatagttccaaccaaggttgctcaatacgtacaatgatgtgataacgaagctcaatataattgcaaaatgatttattgttctcgtggaatgaaacacag

SEQ ID NO: 88948 - DNA, 605 bp, Citrus clementina; identical to SEQ ID NO: 83638
  Intron number 1 from transcript clementine0.9_016503m (loc us clementine0.9_016503m.g) derived from phytozome v7.0 (c hr-ID scaffold_12; pos 2010200 to 2010804)

SEQ ID NO: 88949 - DNA, 480 bp, Citrus clementina
  Intron number 1 from transcript clementine0.9_005735m (loc us clementine0.9_005735m.g) derived from phytozome v7.0 (c hr-ID scaffold_8; pos 533962 to 534441)
gccaaaagggtccgagttcttgagctctctcgcaggcaatttcctcctcctcttttacatttaatatcatttgaattatgtttatataggcgtgtatgtgtattactcatacactgtaattaatgtttttttttttcctttttcatttcttgtatattaaatgtgaaagaggattaagcatcatcacttgattaatcaacttttggttctgaccataccgagagatgtatggatatgggacccaagatttgtcacttctttggagaaaatgttatattctggcatagtactcttctgtaaatgtatgggtcgccccatatagaattatgtgggggggacctccaagtatgtgtcatgtttattcattggatgcttaagatgttattatacttgtagaagctgacgttgatgtgatagaattcttaattttgtaaaacacttgcagattgaagcatcgcggtccggactggagtggactgt

SEQ ID NO: 88950 - DNA, 1050 bp, Citrus clementina
  Intron number 2 from transcript clementine0.9_017497m (loc us clementine0.9_016371m.g) derived from phytozome v7.0 (c hr-ID scaffold_8; pos 3733748 to 3734797 reverse strand)
ttgaagttctgggccatcaacttcagttctctcaggtttaatgctttttcttcttctttgaatgttaataaaactcttgaaagctaagtactttttttaataaagtgcttttagattgtaatcaatgctatgaagggatgttgttgcataactttctcagataggaactgagagagtttcgtaatctgcctacttttcatttttttttttccaccaagcctcagcctcgtgatgccgtacttttaaaatttttttattggtttatattaatgatcttgcatatctcttaaattcttcgctgacagtggccattttgtcgtcaatgtgttaggatcccaattcaaagcatttaggaactactgtttgggatgcatcagtggtgtttgtcaaatatctggtaataattgtattttctctttttttttataccgtatgttgtttattaatggtgtttgcatggttttcctttcacatcttgacaatcctaactcataaatagggcattgtcaagttgagtgttatgtgggtaattttatttacctaggatgtggtaagtggagttttcccaaggaatgctaaatagtgagagtggaaaggcatgatcgcatccaccagtccttcttaagattcctaatagttgcgtaaggcataaaaatggtggctttttattttattttattttatttcttcatttattaataataataagattattattattgtgtgtgcttgcgtcttgtctagagcattgagcttttggaatttttttcctatactatgatctgtatatttcctttttgttatttttatcccttcttttggttccttcagaacttagactatttttctatggaatctttgagaacttctgtgtttttccctttttctcatttaagagaataaaacttctttcttcttttaagtgttaaataattagtcatgcattccaaaaaaaaagaaaattgcatatctgtttgttccaagtttgtgaggctctctttatttggccattcaggaaaaaaattgccgaaaaggaaggttttgcccatc

SEQ ID NO: 88951 - DNA, 563 bp, Citrus clementina
  Intron number 1 from transcript clementine0.9_025156m (loc us clementine0.9_025156m.g) derived from phytozome v7.0 (c hr-ID scaffold_57; pos 960143 to 960705 reverse strand)
gcgtcgccaccgatttcaactgcaactcgtcaatcgtaagtttgcattttaatgtatttgttcttccgtttgcactttgcatatcagatcttcactcgcacacttaatcttacctccttagttataaagatccgaaaagaaaattatttttttaaaaaaaaattagaaaaaaaaaagtttattttaatgcattgaacatatcacaataattatctcactttcaattggaacacatcacttaatttgtaaagtgattggtcaaaattaactatatatgctagagaggcttaatagagatattttcattttcatattcaatccaaattatataataaacttgtgcaatcttcactgtaacaaacatcaaaaggaaaaaggggatgagttgaaactgatttgatactttattggttgggtttgataagttgattgctgtggttttggatgaaaagcaagccaacccatcgtgatgttttacttttcagtggtgcatttgaattgactttcccttatatttggagttcaaatcctattatttttattaggtattgcgacggaggagg

SEQ ID NO: 88952 - DNA, 236 bp, Citrus clementina; identical to SEQ ID NO: 82070
  Intron number 3 from transcript clementine0.9_004489m (loc us clementine0.9_001903m.g) derived from phytozome v7.0 (c hr-ID scaffold_93; pos 353648 to 353883)

SEQ ID NO: 88953 - DNA, 416 bp, Citrus clementina
  Intron number 1 from transcript clementine0.9_030137m (loc us clementine0.9_030137m.g) derived from phytozome v7.0 (c hr-ID scaffold_11; pos 4914439 to 4914854 reverse strand)
tttaaagtaaatttttaggttgaaatataataaaaaggtataatcgttctcttattaaacacccatacttttaatttctatccatttgtcatctcaatctctctcaattattctttattgctagctcaaaacgcgttgctgttgcaaattatagcaaaaagacaaatatggaaaagaaaaaagggaagaaaattaatgcatgaaagatttggagaaaacaacgaagtaagtcaactataatctagttgggtgtgtaaattgtttgatgctttataagcaaataacatatagagacagacaatgtgtgttcgttttttcatagttaaagatatagttagaatgggtggttcaaaatcaaaaatggtgataatgtttgttatgttattaataatatttaaaagtgggtggagtgaggg

SEQ ID NO: 88954 - DNA, 802 bp, Citrus clementina
  Intron number 1 from transcript clementine0.9_020287m (loc us clementine0.9_018251m.g) derived from phytozome v7.0 (c hr-ID scaffold_12; pos 2613943 to 2614744 reverse strand)
acttggtacgtataattttattttccattaactttttagtaaatttatggggtgtttgaatttgtctggtggttaattgaaaaaataaaagtaagacaaaacattaaaaaaaaaaaaaaaggagcgagatttttgagggatgtgttttgttttgattagattaaagttgagagagctgggacaagtattttggattgttatgtttaagctccattgcggttttcttggaacatttgaagattgatattgacttgaatcatacctaattagagagcctgctttttaagcaaatgattgagagaaaggaattctttttgtgataattgtttggtgtggattcagttttgggtctgtacaaatctgaattagtttttttttttttgggtttttttgacgctcaattgacgggaggatttcctttctttcaaagttaccagatatttagatttttaagatttgagattctggttattgttcctttcttcctatttgatttattagtaaatgattgaaattaaaataaaagaaagaaaaatttgatttaatattgtttagcctttttttgtgtgtgtgtgggtggtgggggtagaataagatgaatcagaaatggaaagaaacagttattaggttgactctcagaatgtgggtttttatgttggtggagctcaggtacattggccatgataatgatggttgatctgtgttctgactttagtatggagtgattcaagttgggtctttgttcatattatcatttgattccattttgattttcaagcttttattttctgtttattgcaga

SEQ ID NO: 88955 - DNA, 1016 bp, Citrus clementina
  Intron number 1 from transcript clementine0.9_020755m (loc us clementine0.9_020755m.g) derived from phytozome v7.0 (c hr-ID scaffold_11; pos 4508993 to 4510008 reverse strand)
ctgttcagcagaatctggcattactggcaaaccaggtactcttacagaaatgatatctggtcattgcatgttattgcctgacaactgattttgtttgtaaaagtctgcttcttcatacatatgaatgcatatgttagtgttttcttctccttttcatacatataaatgcatatgttagtgttgtcttttccttttcatacatattaatacatatgttggtgttctctcctgagatggatgcaataaaggcttttgctcctaaatttagctgaagaaatggcaagggatgtgagattctgtctctttaaattaaaaaaaacccaaaacaatgaaaatccataataatgtggtgtggataaattggctccatttggttcgtttccttaatgtgaatgcgcgagcaatagagactaacaaaatgaagtgacaacaagaagtcagtgtcctttgatggatgcatttttaggcagaaatatgtttgtaattgaccaaatttgtctggcatgccaatttcaaaaaaattaaattatgtggttattagcggtaatgaagggggatagtaggtgcaatcaggtggatccaggaaagttcaacaaagttttggtatggcgtagtgaaattggtttgtgcaactcaggagtctttcaggtgaacgatgataggttttgatttatgaatattataaatatactgtgcatagtattctagtagaatcatctataagttctagttattgaaattgtatactttgcccggtttgagttaagggcacatgtaatatgaaagatagttgtcgcatcttttaggttacctaacatttgatcaatcctattatgggggcttcaagatgtctaacaatatgtagaatgcccatgctcctacccattgtttatcttctacaataatttgttttagatgctaatatctttgtcgataccggtaacaatattacaatatcagcgtttattgggttttacataggttcgactggttgacagtacacactatctgaaggc

SEQ ID NO: 88956 - DNA, 872 bp, Citrus clementina
  Intron number 3 from transcript clementine0.9_011380m (loc us clementine0.9_009603m.g) derived from phytozome v7.0 (c hr-ID scaffold_13; pos 199072 to 199943 reverse strand)
gcactccgctttatcagactgcgacatttaagcaagtaagcctgtgggactagtctgtgttggaaagttttattcatttttacctccgcaatataaacttactgattgtacaatgtgatagcatattcttttggccatattttacattctgaattggcaacttcgaatatgggatatgactgtcttgattaatagttacttccaagggggtaattacgtgagaagtgaaatctgttttattaagtgtcaagctaaatatgcattgtaaattttcttataaaacattaatttttgttgaagataacaaactatctaacttaaatgagtgccatccttgcatgcatagcgtgttagtttacttatttagaaaattatttgaacgtgagaaatttgctaaatggataaaatagaaagggaaaactttggtgtaagtatactttgacattttaaagaatgcaaagactttaaaaaattttgaaatgggaagataagtgatgattttaaaggtcaagggatctgattctgaaaccttacctaatttaatgctatgagggggagggaatttgatgatcactgatggttcatgactttcaatacagtcctatattggtttgcatatatcatgaatggttattgacttattgtttccccacttgtgcattcctcagtgcaatgttgatgtaatgtaaggcttatttgatctgagatgaaagttttctgtttatgtatgtaataaggattatgctaatagaaaatcgcaatgaacagacacacgaatgcatatgaaatttcagctctattatacaaatacacaaatgcacattatttttgagtttccatataatctgtttcctagccttctgcgacagaga

SEQ ID NO: 88957 - DNA, 473 bp, Citrus clementina; identical to SEQ ID NO: 80837
  Intron number 1 from transcript clementine0.9_018897m (loc us clementine0.9_018897m.g) derived from phytozome v7.0 (c hr-ID scaffold_71; pos 322623 to 323095)

SEQ ID NO: 88958 - DNA, 475 bp, Citrus clementina
  Intron number 3 from transcript clementine0.9_024544m (loc us clementine0.9_024529m.g) derived from phytozome v7.0 (c hr-ID scaffold_39; pos 1631346 to 1631820)
tgcagagacaaggtctttgaacaacaaaagattttgtatccttggattcgtgtttgttgagagatatatttgattttcttttacttaataagaagtagttctccatgaatgacatcggccggatcaatttatttgtaaatggtaattatcattttttgggttttgattgaatcttgataaagagatttttttttttcaatcactagcgaaattcttgaagctggctcactgtattggagcttttttattttgactgtatatgaagtaatattttagaatcaaagagatgttcttctaaaatagatgttcaattcaaagcacagaaacatcctgaaagaggcactgaaactgaatcctttacaatcattatgtccttccttattatccaacttggtgattgtttcttttatctggttttacttgacactaaacgctggtagctcagatttgcgaaagaacatagagaatttggaga

SEQ ID NO: 88959 - DNA, 698 bp, Citrus clementina
  Intron number 2 from transcript clementine0.9_035241m (loc us clementine0.9_035241m.g) derived from phytozome v7.0 (c hr-ID scaffold_39; pos 1706054 to 1706751 reverse strand)
aaagttatcgtcactttagtaagtggacgatgatttatgacttgaaaatcatttattatttggtcatacaataactgagtatggcttttggattgtgttactatgataaatgcttaagctgtttaccactgctttacctgcctttgacttccccttataattatatggtttaatccttttggttattgctataaggtgcttctgttatactttgtggtggtgaactagtgatgttcttatgctaggataattgtggtttgtgttttttataggattcatttagcattatacttttctttaatggtttcgctagtctggaatgtcatctcagattgctctgttcttgtgtcctctcctataattaaccagcattcctgccattttctaatctgttgaggacccatttctattgataagaaattttaggtgggaacctctattggaaatgagtgtacctgcctgatggtgtttaaggcatcttagtgattgatcattgcgggaatatatgtttgctttcctctattacaagacctagaatgagtgggagttaagagatttggccctgggatggaaattcaaggggattgtagtgatgagcaggaaacaaggttaagatcgttgaagctatatattgtctttcctttattctccttatgaatctagaattgtaaaggaccttttgtatctggtgtattggt

SEQ ID NO: 88960 - DNA, 583 bp, Citrus clementina
  Intron number 2 from transcript clementine0.9_002156m (loc us clementine0.9_001487m.g) derived from phytozome v7.0 (c hr-ID scaffold_39; pos 576670 to 577252)
ttgccgtacggttcttgattttgcttttgatgttctcttctatttcgataatttaaaaaattggtggttaggttcttgaattttcagcttaatttattatttttcttattattctagatttttttgtttgttttttaattcaagtaataatgtgctttagtatatttttactgcaaatgagactcttgtaggaatctgttattaatgtatatatctcttggccattgtaacctatataacgtacatttcggttcagatggctttagcatttttgttgagtatccttacaggtggtagatgtcactcattactgctgcaagctaatgcatttttcacagacttgttttgttgttctagaatttggttgtctgatatggactgttttgacctttgttccctttaattgaaagagagaagataggaaacaaattactgtcaaaaacctttggtaggacttttaaggagggattccgagagaaagttctcaacctccttgtgagatcatttgagtttatctcgttgttgaatcattttctttacttgtgcagactgcctcaaaagatattgctggagaagagcaggg

SEQ ID NO: 88961 - DNA, 389 bp, Citrus clementina
  Intron number 1 from transcript clementine0.9_032858m (loc us clementine0.9_032858m.g) derived from phytozome v7.0 (c hr-ID scaffold_84; pos 182096 to 182484 reverse strand)
gctgcacctggccactcggaagaaacaacgcaaaggtaagtccaatctgttatttaatccaacacttgatagtttccattttcaatgaggtttgttcttgtttctatattttccagatcattgtaagggagtatttgacttgagagccgtagaaatatcatgtcttctggcttctatggcctggacttctattattagagccatgtttctgcaataatgtggttaaatttatattgaatgcgggagtacaaaatcttattcaaaacaagttgtaaaagaaaatggattctcccctgatataagcttttatttgtgttcaaacttgatcatcatcacctgccaataacatctgtcatatgatctttaagatttgtgcatttgtttggaaa

SEQ ID NO: 88962 - DNA, 647 bp, Citrus clementina
  Intron number 1 from transcript clementine0.9_025232m (loc us clementine0.9_025232m.g) derived from phytozome v7.0 (c hr-ID scaffold_39; pos 474246 to 474892)
caaagatccctctacttctctcagctggtgccctggtacttcctttctgaatttttcttttcaatttttttccttattttttcttcatgtttagggcgtttcatttttgccttttttaaaataatccgactgctgtaagtgtgagtatgtaattatactctttatatatatatatatataatttctatttccctgtgttttcaatcaaatatgattaattatacattccttgtattgattagtagtaagtaaggtgttgttaggagattcatgaactatggatacggtgtggttaatgctcgcagaagcgaaagtacttctgtaaattcattcgtagtgaacacaataataccagaagggagggaaaaaaaaaaaccctaattttttctattggaactttaagtaatttggatttatagttcgattggaatcaacttttagagtgtaccttcttcaacacttacccaccgttggtctgtctctagtgaagcgaaggagtttttaaaaataatcgtctcttctacttttgatatttgatattgcaaaaagccacttggtggtggaaaaaaaaaaccaaccataatttgtttttgtccctgtgcactgttttagattgcgtgagagctgaacctgtaatctacaaaacc

SEQ ID NO: 88963 - DNA, 926 bp, Citrus clementina
  Intron number 1 from transcript clementine0.9_012524m (loc us clementine0.9_012524m.g) derived from phytozome v7.0 (c hr-ID scaffold_56; pos 1264102 to 1265027)
ttctaggtcagtaagggcaaaggtgtataggcccctgcatagctaaacatatgtctccctcaaacattataagttggccgcatagaaccattaagttcttttgtctgaggccgccagggtttagttcctattttctctcgccatttgaaaagagtctggctgtgcacttacatatatgctctaagaattaattggtcatgcctcataatgattatatgggttctcctgacaaacaataaaaccgagccgtattgcttgtacatacccccaaattgaatgtttattgtataatgaatgaataaaacatattattttaaaacataatataataatgaaaaattacacccaaaattttcttcagtcgcattcttgatccgtcgcctgagacactttttgagattttaacttttagctaatttagtcacttgggttttagcccagtggtgaaccattactttttaaattaaacatgactttgagggcaatgattcgagtcttcatggactcaaaaaatctccctcaattaagcttaattgtgtggagatatttgtaaagcctttcttccttgcagaatgcgagtggagtagaggtatctctcctcagtgagggttatttgtctaggtatgtacttaatataattaaatgtaataatataagtttcggttatatatttgattataaatatcagtgtattaatctgctgttataacagttgtaaatatctatgtaatacagtaatatgatgcttaattagttaaaaaaaaaaacctttagctaactcactaactgagggcattcatgtcttttctccttaatatttttataactcttcccccttgtttaaaatatccaaatttgcacttcattctcctattttctcaaattacgcagcaagccgccgattggttcacacgggggacgaaaga

SEQ ID NO: 88964 - DNA, 937 bp, Citrus clementina
  Intron number 1 from transcript clementine0.9_009793m (loc us clementine0.9_009793m.g) derived from phytozome v7.0 (c hr-ID scaffold_96; pos 827126 to 828062)
tgcttgtcaatacttactacaagttggaaagtcaggttagttaattttacggctaatggtaaattttgactttgcgttattacttttctatatagatggccgactgccgtgcaggtcacggggcacggtatatgtctttacggcggcatgacacttttttgtaggatatacggcacgacatgtcacacatgcaggcttgactgagcttagaaaattgattttgaattttgaagttagcaattaagtcaacttttttctctctctctttttttttttttttttacttttatctacaattatgtcaattattttcactagatgggaaaaaataggagaacttaggggagagaagaattaagagaggtcccaatcctaattttaaatctaatgataaatatttactttagttgtcatttttataaaacgtatttttaactgtattttgcatccaaagatccatttttcaaaaagtacttttctatattactgtttgtaagatgacttttaattggaagaacgcatgacactttcgttcatctaataatttgattttatcacttgcctctcgagaaactttttaatacctctttcgttgttaaaactgacatttaaattaaagcaacatttgaaagggtcgaaagtgcgctattctcccttaaattatttcaaagtgtcaataatactctcaaacacataaaaatttgttgaaattgtgaaatccactagtcgatattctgaattataaatcttataataaaatattgaatgataagttctacgctttaattttaccttgccttgttttatttatttatgcaactttgtaatgtttctattttttttcctcttgtatataaattttagccacaattaatgttgagatcatcactccagaaagtattggacaattttttatctattacaggtggcagattca

SEQ ID NO: 88965 - DNA, 516 bp, Citrus clementina
  Intron number 1 from transcript clementine0.9_016068m (loc us clementine0.9_010943m.g) derived from phytozome v7.0 (c hr-ID scaffold_13; pos 2239382 to 2239897)
agaagggcacgcctcaaggcaccgttaaagtgtgagtttttattttttatttttttttcagttcatttgggttttggtttttgagtgattttgtgaagtggatatgcataagttttgcgatttggtgaagttaatgaagtgggtcaggtttataatttccaaattccgtaggggttctgtggcagattttgttctcgatcaaattgctaaaatggatgttctttaattcctagatgtgatcttgattgattcaatttgagttcatagactgaatattaatttgttcaatgtgagtgcttgctttcattttagttatgagcttaagtgagctcttcaattttccatgttattgttgaagcaaatgtgtgtgcaagcttgtttcttttttcagttgccgttcttttgggatacattgatctgtgaattggttttctcatttcactatcttattttgttcataatcttattttacggactgcaggccagagtcgttgggtattgttgttggggctgtct

SEQ ID NO: 88966 - DNA, 124 bp, Citrus clementina
  Intron number 1 from transcript clementine0.9_009505m (loc us clementine0.9_009505m.g) derived from phytozome v7.0 (c hr-ID scaffold_21; pos 2232935 to 2233058 reverse strand)
ttcttctctattggaagtaagtttgttttttaaatctcaaaacaaaatgcaataatcatcatatggcgtttatattcatcttcttcttcttttttctggaaatgtgtgtgtttcaggtgcagag

SEQ ID NO: 88967 - DNA, 594 bp, Citrus clementina
  Intron number 1 from transcript clementine0.9_001229m (loc us clementine0.9_001229m.g) derived from phytozome v7.0 (c hr-ID scaffold_12; pos 1555181 to 1555774 reverse strand)
tcccaagactggcaagtttaccaataaagattgcggttagtgtgtgtttctctctctgtgctcatatttctatggttgtgtttttccggttttaggaatggaatatttgtaatgtttctgttgtaaagcattgaacaactgaataattagaaagtccaaatgaaacttgaataaatttttaggaactacattctttggtgtccttagttttctcctatggtagaatgacatagttcatgtgataacaacaaaagaattgcaatggacgctacttgaaaatccatggttcactctgcggaaactgcatgcaatatgtgaactctgttgttagcaggaatagcagaaattgcgataggtgaaatctgttcccacttggattcaatttctcaattgttatctagtttcagctgcttactctggaatattctggcattgatcttctatcagagctgcttgtatattaatcaaatctgcagaagcagcgttttgaaatggcgcttgcaattttaactatcaatttagaggttatcttattgagtttacaagatcttcagccattgtgtgcaggcaaaattctcctcacaatatccctga

SEQ ID NO: 88968 - DNA, 832 bp, Citrus clementina
  Intron number 1 from transcript clementine0.9_030532m (loc us clementine0.9_030532m.g) derived from phytozome v7.0 (c hr-ID scaffold_13; pos 3589248 to 3590079)
tgacgtacattgaggtaatgaaggtctgctcctataatgtgggatgatcaaagccatcacaaactgttttttgctgaaaattatcctccctaatgttttcttggtccgtaagaattgtgcctttatttcctaaaagtcatttttgttcacttttccattatctgtattagtcttttactataaaaaaggtgatcctcaaggtatttcaccatctaataaagagaaacgtggtactatagaccacgaggtttgtagaaatcacccttataaaattgtcccattttatccattggagattgtagattggactgtgctaggaatccagcaccgcagagtcgtgcgaagccattgtaaggcttcaggcgggtctgttatatgtgatcatgaccgtagagaaaatgcatgaaactcaacaaaactcatcaaattggagattgtttgtaattcatcttaactttctctgtcatcaatcaagtttagaaattttagaaaattattatcaattatgtttaatgaatgaaaattcaaagaatatgtttctttcaatttctgaatatttcttttttatgtattgattagtgttaatttcgaagagtagacctctctaacttcaataaagagattgtaaaatttaccatgaagagaaccctcaagaattttgtgtgaagggttgtgtttcgaattggtatttgtgaacaatgtaaattttagctgtgtggtagtcctgagcactctttttgttttgtaattatttttatatccttggttattcctgaccttccaccacctgttcacttccaggatcttgtgacaggagtccaacgtgcactac

SEQ ID NO: 88969 - DNA, 866 bp, Citrus clementina
  Intron number 1 from transcript clementine0.9_024461m (loc us clementine0.9_024007m.g) derived from phytozome v7.0 (c hr-ID scaffold_8; pos 2078989 to 2079854 reverse strand)
gctcctccaaaaggtagttaatatgtccatttctcttctttttttttcctgctttaatagcttaaagaatacttttgcttctattattacagctcctgggattgttcattctggttctgatgtggccctccacttgtttgccgctgaaaacagaccaaaagtgaacaattagctaccttagttctgtgccgattaggctctttaggaccataaacaaattacttggtcgtgaattgtttcttttttactgccctttttagtgttctgcccttgtacaatttatatatgttttaaattagagatggtatcctccattgaggatacagctgtctgtggaacgtggtctgtgtcgtaggtagaggtgaatgtagtttgtaagtggaacaatagatgagtttctcctccttttgtcagttctagggatgagtaatgtgggacataccttgacactatctgcctcctgatggcctcttggatctcttctcattgtggcaaggcatcttggtagtggtttggtgtaatgtgtgttaaagagctcttgtttgattctggctcatgacatgcaagtctctttctactttagatgaattatagttgcaaattggagacttagttcattggatatggacttaggtgatgacttttgttttatcggtatcactggttatttttatttgtactttacatgatgagtttttattatatggtggatggtttgatgaaacatttggtgcatttattttgaaattttttcctagaaatgaaattattgtattatttcaatggaacccagctattctttataccgatatgaggttggcgtgtatgcaggtgagacaaaaaaggctgatccaaaggttcaggcc

SEQ ID NO: 88970 - DNA, 807 bp, Citrus clementina
  Intron number 1 from transcript clementine0.9_024915m (loc us clementine0.9_024915m.g) derived from phytozome v7.0 (c hr-ID scaffold_28; pos 1606777 to 1607583 reverse strand)
cctcgccgtagctccggaggtttgtttcccctgtcggatttatcattagtttgtattgttttatttccaggcgtttagattcatttcttgcctttttgatttgggcaactttttggttagatgagaaatagctgaaggaaaaaaaaaaaattgggtttgtttcgaaaatgaatatagtcgacgaagtcaaagtttttgtagctgatttgtttctagatgattgaaagtttaggttttttttttgtacaatgtaaaaggctctatatttctagggtatagtatggaagtttcggatcttagcttgtaggcttttgaaatatcttttctttaggaaaaaaaaattgcactgatttatatattatatctgtaacactgtagcgtttgttgtatgcatttaggcatttcgctcttttcaaacctggctgttaattacttctttctatttgcttttgcaaattaattgggcatttggtgctgtgttcttgttagacaccagaagattgttatgactgctttggtatgatgaaagatttgttatgtgtaatatgattttgtattcttatatgcctaaaagagaagcacggagtacataaatgactgcggcctatgtttgaagctggattttgtcttcacttttattagctgaattgggcttctctgttttgtgctattttttttcttgagtcgttatttatctttataaactgtctaatacagccactttattgttgttgaagcaatgactctactaatgtgaacacttcttttgcaggaagatctgcccctcgtcctgctgcacgcagccca

SEQ ID NO: 88971 - DNA, 590 bp, Citrus clementina; identical to SEQ ID NO: 79777
  Intron number 1 from transcript clementine0.9_024808m (loc us clementine0.9_024798m.g) derived from phytozome v7.0 (c hr-ID scaffold_21; pos 560160 to 560749 reverse strand)

SEQ ID NO: 88972 - DNA, 546 bp, Citrus clementina
  Intron number 1 from transcript clementine0.9_023932m (loc us clementine0.9_023932m.g) derived from phytozome v7.0 (c hr-ID scaffold_88; pos 568055 to 568600 reverse strand)
tcttttcgcgtctcgccacttcagcgctgattcaggtccccactctctttctctgtcacatcaaaccctatttttttttttttttacccttagatcttcacctttgtaatcattcatgtgatgtattttgtagtgtttttagttgatatttaaatacatggttttttttaatattgatttaggcgttgttgcggataatgctgtaccaaattgaactggattgtttattacatctgtaaattttgatagaacaagagaagtgttgaaatgtctgaaaataggaatgtatatgggggaagaaaagacaatagttatagggatgcaaaactagtgtactaactgatgtgtcaattctttattgatttgatgatttccatatatgaccactgtgttaatcacattaaattttttatttgtatccaaccagtagtgtattgacacaagagtttgtgtctctatctctacttaagaaatgaaggtgtatggttgatgtgggtaagtttgttttgtttgtagcaggcacttctgtgaagaaaagagtcgagg

SEQ ID NO: 88973 - DNA, 416 bp, Citrus clementina
  Intron number 2 from transcript clementine0.9_027769m (loc us clementine0.9_027769m.g) derived from phytozome v7.0 (c hr-ID scaffold_81; pos 523930 to 524345)
gtccagaagttaggatcagatacaaacttgagaaggttggcaagttattcagatttatgttctgctcaaaacattagaattacaactttggcctcaacattacccaatgtatattaacatgatttagctactgctgctccagtatatctttgaattatcattttcatttttttggttgttgtttgggggtagatttttgtgtctgacctcttgaataaatcatgaaagtttgtttcttgtgaaggatagcttgtaatttacttagtggggttttgagctttctcattgacctctctaattaatttattcatttagatttctttagtttgatttatttttgtgttagtacaccatataattattagttttacctttttcgttcttctataaacttttcaggcaaaacgtaaggaagc

SEQ ID NO: 88974 - DNA, 827 bp, Citrus clementina
  Intron number 1 from transcript clementine0.9_013413m (loc us clementine0.9_013413m.g) derived from phytozome v7.0 (c hr-ID scaffold_84; pos 266894 to 267720)
ctcaccggtaatatatcattttctttctctatttatttatttatttgctgattaactgtgattagtaattttgattttgtttattaattgttatgtggcgaattagcgataatagtttatcattatggtatggtgtatttaatgatttgaaagtaagagggctgtttggtggcacaaatgaatcagattctgttttaaaatgactggtgtttgaggcattgtttaaattaataacgcagtctgaaaatgggaatagcaaaaggtgagcaaaaagagtggtatgggagtaattaagaaagatgctgattgacaaaaacgaacaccaataatgcgcgctactgattaaagaaggaaatatgaacatctttattgttttttggcctatgcttgaatctatctcatgtcacatgtggagttcattaacacaaacttttcttttagtggtcaataacgggaattattattaatatttcgtttgattagctgttttcctgtggataccgcagagtgcaattcattgttccatgctaaattttagggcctgaaactttgccgtctcaccttgccttgaggaatcttcctaatgccactcaattatttacgatgtaatgctggaatgattgtatctatctgtttttttgttagtaacagcaggttttaattgagttttcatatgcatctgctatgatgattctggcaattacaaaaaataaaagattagttgtaatatcaggtttgtttatgaagatgacctcatctcagctcaatttctttctgaaaaccaatttgcagaagaagatcccgatcccttaaagcggcctaccaaa

SEQ ID NO: 88975 - DNA, 700 bp, Citrus clementina
  Intron number 1 from transcript clementine0.9_006276m (loc us clementine0.9_006276m.g) derived from phytozome v7.0 (c hr-ID scaffold_64; pos 1343793 to 1344492)
aatcttctatactgcttctgttgaaaaggattgttagtttttctatttgtttatttattttgaagttggagctttagctgccatctttggcgttagtttgtgaatttattgaaatgtttctgggatttttttgtaacgggaaataatatctgggtttggatgtttatgaggaattatatctgggttttggatttagtgcttagtagtgttgatctttctttgtaagctttagctcacatatttgacactagtttaagaatttcttcattttttttggaaattgaattgggtttggaaatttgtgaggtttctataggtagcgtttatcttactatgacttgttaggatcaagtttgattctgatctaataaaatggtgattgttttgatgctgtgtatttttctttttcaaaatggttggtttggttgcatagaaagggtaggactagaaaggaaacaaagaatttcgtggttgtacattaggttatttttcttatcatgactatcacaattgagaagttttcacttttctttttctggaatttaaaatgataaaaatgtaggatttacttttggtgacaggcctgtgtgttgagagtaatacttctcactaactattcatttcaattctctatagaagagagtgatttttattcatttggctgatttttggtttaggtattgttttgaagaaagcaaaa

SEQ ID NO: 88976 - DNA, 498 bp, Citrus clementina
  Intron number 2 from transcript clementine0.9_012030m (loc us clementine0.9_012030m.g) derived from phytozome v7.0 (c hr-ID scaffold_16; pos 2068588 to 2069085)
gactcgctaagggcaattttgtctgatcctgtcacgtaagaccttgttgatttttattttaaatttatacaattcgtgtgtatttgttttagttttgattactggttgagatacgttggggttggagaattctaatcatttgatcaatttggttaatgatcttcacaaccacttgtaatttgtttattttgcgaaactaaagatgctgtcttgacttagtggttttagatgttagttttttgttactgagatgactttccaatgtggcatggcaatgttgatcaacattgcttttcagctcgcattaggagcttatcatggaggatataatctgaaaatgttggctcttgtgtgactgggaattagctttctattgctgaaacaattttattttgtggttttttctttcttaatagatttttttatttaataagtatttcctgacattattagtattttttcatctatcttgctttttcaaaattcaggggaaatctc

SEQ ID NO: 88977 - DNA, 520 bp, Citrus clementina
  Intron number 1 from transcript clementine0.9_022648m (loc us clementine0.9_022648m.g) derived from phytozome v7.0 (c hr-ID scaffold_39; pos 1338699 to 1339218 reverse strand)
tctcgatttaaaggttagcccttttttttttttctttcttttcttgagttacaaaatacagttcctttcgttttacagaagcaataaatgaggagccatagcagatcttgtgctttctttgttgcttcctgaaagtggaatatggtcttattgattctttattgccttttgtatattcgctctgccgcgtaattattatagttaaggtatttgccggtctctctttctccaacacatacactcaatattattagatcaatattagggttaatcaccaaaaccctaaaaagagcagaccttttttttttaccccttttgaaggaaaatttattgatgtaggccaatttgattttgattaggagcttttttttttatttaaatttatttttaaattgatattgtggtgtttgtttgtttgttttttccgctttcgttctgccgacgctgactgcgtgtgttaatttttgatgtgtgggtgtgtgttggcagacgggagagatttattacataaactggagga

SEQ ID NO: 88978 - DNA, 1016 bp, Citrus clementina
  Intron number 1 from transcript clementine0.9_032052m (loc us clementine0.9_032052m.g) derived from phytozome v7.0 (c hr-ID scaffold_57; pos 1275585 to 1276600 reverse strand)
ccgtcgtctgtgccggctattcgtgtgaccattgggtgattgctatttatgggcgtgattgctatttgtgtttgagtttgtggtttgtcaaaaggaaagtaagagagtgagtgagtgtggtttctgattacagattaaattgaaaacggtgtgttttcaatttaataaaaacgacgtcgtttttttaattcggggcccgatttcgagattaaagtcggaggaaatagcttttttctccaccaaacgatttggccttttgttttaaggacccatgcaattactactttaatttctattgaatccaccacaatttctgcgttctgttgtcctagttagctttatgcatgtgcttgactagacttttggcttaccgtggacaagtttttctatgtgatatgactatgatatctcaatttttttttaaaaaaagaataataattttgaaattttaaattttaattcgattataatatctccaatataaaggtctcataattttcaaaacttaagaatttacggggagacggtgaggtaatgacagtgaaagttcctcgctggagaaattgtacaaaattccaatttcctttagctttttataattctctgaatctactttcaaattttctttctttgtttttccttcatttattggttggattaaattttcttttcttcctggtctgccccattatcatgattatgtttcttgacttgacaaatcatgtatacgaaagctccaggaaatttccaggacactaagaaagctccagccattcaattatttactatgtgcttgcaagaatattcacacatgttcattcttacatctcctctctcaagattaattctctgtttctgtcaccaaatttctaaaatttccttcatggcttcttcttcttcttcttcttgcatttatgaagtcttcctcaattttagaggggaggacactcgtgcgatctttacttgccatctctatgatgctttgtttaaaagaaagaaaatcagaacatttattg

SEQ ID NO: 88979 - DNA, 476 bp, Citrus clementina
  Intron number 3 from transcript clementine0.9_024197m (loc us clementine0.9_024197m.g) derived from phytozome v7.0 (c hr-ID scaffold_8; pos 876394 to 876869)
tgtccatctcctttgtatcaactgctaaagttaatgtaagcgtgcaaagctgattctgtacagtatgaacttttacttaaatggatgtctatagtttaaatgggtgttgccaacattattttggaacaaaaagtctttacaagatcccatacaaacctgttatctaattgctaggaacttgctaggttcgagtatcagcaactgacttgatactgatgattttgacatgtgagatcatgatatgttagtgggaaatcagtcattacatgttcacaaccttggtgtgagttgtaaatttgctagctcttgctcaaatttttttttttcttttgctttgcattgttcaactcctgaaaaatggctcgttttctttgtatgcaccatggaacatgaccttgtcttagtgtatttgaagaaataaacgaaacttgtatcttgtttggtaccattttgatatgaagtttgcatgttacagg

SEQ ID NO: 88980 - DNA, 328 bp, Citrus clementina
  Intron number 1 from transcript clementine0.9_015250m (loc us clementine0.9_015259m.g) derived from phytozome v7.0 (c hr-ID scaffold_8; pos 1647674 to 1648001)
cttcgattagggatttcgaatcaatcacggcacaggtaagatccatctccagatgaattatcttgaaacccaatattgagttttttttttaatctttattttgttatttcatgttctttgttttgtcggttctgtatgattgagcgtaaggtattttctcctcttttgttcttagtttgttggattggggattgagttgatgttgtaattgaaattactttacaacagaatgatagaaatttcttgaatttgatttactgaattcaaaatcctaaccgctgctaacttttatttcttcatccagatttggtaagtacgatacttcaat

SEQ ID NO: 88981 - DNA, 617 bp, Citrus clementina
  Intron number 3 from transcript clementine0.9_028097m (loc us clementine0.9_028097m.g) derived from phytozome v7.0 (c hr-ID scaffold_104; pos 633799 to 634415)
tcgtgcctggtcattgctgcatattgccagtgcaggtaatgttgtttctttactataatctattactttttttttacagataatgggttttgttttcagttgaatggtttccatggttgaacttaaaacacatcatttggggaatttcaatattttgttggaatggagtcattctatttatgattcatggcacctggaagcaaatatttatacttaatgatggctgtgggacacagtgaatgtatgggcattgtggaaagtttgattaatcccaaagcgattataattgtgaaatttccgtcacttttttgaataatttaagttcttacatactgctatccacaatggaaattgtttaatctgaatgggtggtccagtggtaagggtgaatgtagggtaagatgtaaactcatgtctgggtttgactcacacatgatgcaaaactgtcgaacgccaatattatatcttgctggaggttgcatatacttgagggtttatgtctgtcaaccgaaaagaaaaggaatccctttgttctcatacagttgaccttttattatcataaggttgacttgattttaagttgttctattctgattaagagtttctgcttttgcagc

SEQ ID NO: 88982 - DNA, 554 bp, Citrus clementina
  Intron number 2 from transcript clementine0.9_005347m (loc us clementine0.9_005347m.g) derived from phytozome v7.0 (c hr-ID scaffold_61; pos 929877 to 930430)
tggagtatgttactgaacttgaataacctctgcatatgtcatatgttaattattcagagaaaatttatttatttatttttttaattgaccgctagtaacatgactgtgtgctttcagttgaatattagcaatcttgataggtctggatcactttgagttaccagggtcattcgtgtaatatgtagaatagtgccatatggtggatgcattatcatcctctagataatttctttctatacatggaaatacctgggaagtacactgctcaactggtctatgctgagaactattgtagctttatgtgtttgtccctaacagtttggattgttatgtatcattttcttcttgcatctttctctttatttgtttatatttctaaacatgtaatggtattattgtttgttcttcctaattaggctcagacagtatattatcaaatcgcattcaagcattgcttcttgtctaattaatttaagtttgtaatattctcctaaactgataatgtcgattattttgtaggttgcaagctggggtgcataccttttaaaaagaaa

SEQ ID NO: 88983 - DNA, 815 bp, Citrus clementina
  Intron number 1 from transcript clementine0.9_006415m (loc us clementine0.9_006189m.g) derived from phytozome v7.0 (c hr-ID scaffold_123; pos 338685 to 339499)
gtcctcctctgcttcttcgtcttcttcttcttcaggtaacttttctacttcctgtgtttctttcttttgtttttatctcttttcatgtttcttttgctacccggttggtggtgtgaggaattatttatcgctttcacattctatgaaatttctgtagatgatgggtagctgctatgaattttcattttaagttgatacacactgtatgttcatgtaccaataaagggaaatggggaatctgaactatgtgttattgggtttgcattgtatttgtttcactatgtgtagtttgctgcatatgtagatgcgtacgataaggtatataattgcaaacttcaagagagtgtggatttttaatccacagtactgtagtaccaaacatacccttagttacagtctcagttatattttatcttattgttctatttatgatgatgagtctattttaagcatgatgatgggtcgatatatttagaaatgggattttcacaggcgatcttagtgtcggatgttttgcttgctaattaattgctatagttgtcttgagtgtgtgcatgtgttatgtactttgattgtttggggatatagagatttcctctatttttgatgaagcaaatgataggatttgtttgaccattttaatttgtacatcgataaatgtcttgatcttctgtgagatacttagagatttgtagtgattctactttttagataacatcttgcatgtttatgtgcataacatagcagttttgatgcataatgagcaatcagcccctgcagttgcttctgttccaacttcttctgtagctcgacat

SEQ ID NO: 88984 - DNA, 434 bp, Citrus clementina
  Intron number 4 from transcript clementine0.9_025313m (loc us clementine0.9_025313m.g) derived from phytozome v7.0 (c hr-ID scaffold_16; pos 911685 to 912118 reverse strand)
cataacacagtaattttcttttcttataaatttatgaatgtttctttcctttaatattgataagccacaaacattttgactattgaagcaccaataaatataagacaatgaattttgataattattcctcttatatgtataatattattgaaaatgttaagttttaaagagtatggtagttaatgctgcttaatttctgatttacacatacaaaactgtttgtcttttaaaggctacttgactcaacaatttgttctaaccatcatctttcttcttttctgtcagaaaaccaaacttttatgcattgtacaaaaagatctttgcaaaattaccctttcatgtatctgatatatggttttaagtactgaagaaagtagttcacaagataagctaaacgcttgctaccaaatctttgcagatattttggagcaaag

SEQ ID NO: 88985 - DNA, 733 bp, Citrus clementina
  Intron number 1 from transcript clementine0.9_029978m (loc us clementine0.9_029978m.g) derived from phytozome v7.0 (c hr-ID scaffold_8; pos 952970 to 953702 reverse strand)
ttcctgttgttactggcgttatcattgccagtggggtaataagacttataaccttcttaattattgcatatattatgatttttagtgattgttatttttattgtttatttggggagtaaatatggattgagattttattgttgtggaatggaatcactactcataaaagttagagctgtttttgtcaaatcttaaatatcagccgccacgtgttgcgtagggggtcaacgtgtggtgtgacactggtgctcgacagcccagccacatcacgtatggatgtagtgctgcgctttgatgctacgaggaaatatggttggcccctcagcaactggctatagcttttagctcgatggtaacgcctaatcggctaatcccaacaccaaatttcacaattaaccgaagcacagtacttcacaaattgtttttgacatttctcaggcttttaatccttattagttttctcttctacattagctttgaatgttcacgagttaatttcatatgctgataactgaagaacggtgaacaaattacataccggtgaaacttgtaagcgtaaacattgaactggctcttttgtgaatggactctgttcgctcggtggcattacatcgaaaaagaaatattcctttatgttttttgttattcaaatgatggtgttatctagtgaccttgttgtttcctcttaccgggtgaagggagaaccaagttttcatctatttggattcataat

SEQ ID NO: 88986 - DNA, 471 bp, Citrus clementina
  Intron number 3 from transcript clementine0.9_034821m (loc us clementine0.9_034821m.g) derived from phytozome v7.0 (c hr-ID scaffold_70; pos 1074548 to 1075018)
tctgaagcctctgtagtttctgaaaccggtcgagggtaatatacttactggcaatgtttatatatatttgtttcttgaaagtaagaaaatgttaaaacaaaattacatgcaccaaaaaaggagtttcgatgttttgtcttcctggtaatattcaggtaattttacctaggggtggtattatgagttggtggattgaattcgtgtcgaatgctaaacttaggttaaattatgatagatttgagttcagtccatttattaaatgaatcccgaacccccagatacaggacattttggtatcttgtcttcacgagtagaatttaagtaattttgcctagctcaaaacaacatttttttgttagaacatagtaattggaccttcataactgaaactgactttttaccttcaaattacatttcatgagtgttttttttttctttgttataaataagatataaggatacacccggtat

SEQ ID NO: 88987 - DNA, 978 bp, Citrus clementina
  Intron number 1 from transcript clementine0.9_009805m (loc us clementine0.9_009805m.g) derived from phytozome v7.0 (c hr-ID scaffold_91; pos 36262 to 37239)
gaaatcgacggccgtgattgatttgagattttgaggtactgtctgtcttttgttgtcattgtctgaaaatcacgccatgattttaggtcttattattaggtttgatttgttcgttgaataaaaaattatattaataattcattggttgacaaaagtttcgttttttcagctgaagaattaatttgttttcttcttcttctgtttttttcttttgttgtgggtggtttgggggggggggggtgtggggggttaatttggagctgccaatgctttacaaattttcgtatgagagtgtaatgaacaaacagaaatagctttactaattttgaagtgtgaaactgagaactgaaaggtccatgatttggcttgttgcaatgaacaattacttgaatttttaattgtcttcggtgaatgtcttgaaattcaagtaaaggcgtaaaatgcttacattacatgttactttttactgcttattttttgaattttaggggaaatttagtcagctttcagaatttcagctggggtttctgattaattaagctgtatctctgtcaaaacatcatgagtggtaaattgaatctactgttaaaaattattttgttgtgtttcaatattgtttcaaagacttgaagtcaaaagtaggatacagatgtaactgtcgtgaggcttaattttgaaagcacagctaaagtttttggtaaacactcgctttcacagttccacttgccagctaattcttactaaccgcccaatcacttgtatgtgattgtaataatttcatcccacagcagttctcgattaaaagccacagcacctctatcgcaagtgtaccgttacattgttcaaattattgtatcattttaaattgcttgtcagcactgtttgttctacagtctctaaatcacttattgacagattttgtttcttttatccgctgtctatcatcaaatagtgtctggactgcacttctcattcaaa

SEQ ID NO: 88988 - DNA, 854 bp, Citrus clementina
  Intron number 1 from transcript clementine0.9_022935m (loc us clementine0.9_017548m.g) derived from phytozome v7.0 (c hr-ID scaffold_8; pos 426135 to 426988)
ccgccagacgcgacctcttcgatcaggtgtaattagtaagcaaaattaatatttaagaatgaattttattattttattttttgcagttaaaactattaaaattgagaatttgggactctagtctagcggcttgcaagttataagtaaaagctgacttgtcatttgcgatatgaagaacgtgcttagctggcttttcttttctttgtattttttcttcacccaaaaaaaaaaaattgcgataattatcaaacaatttcagtacttagttagttctattctgtgttgatcaaaatttaaagttttttgtttctaaaagttttgcatgtgagagtggttttgcttaaaatgatagctgaactgatttttaaaagccatattttgcatttcgattatgttcttattgcaccgttgttgagattaatccgaaatcggctgtttttcttatttatatttttatgtttcaagatatcttacgctgatttttggatgggtaggagattgattttgcatttcttatacttatgaatcaaagttccatgtagtgatgcattctcataagcaagtgttttatctgagtatatggctagcataatttctttgttaaggtcttccgtgtaataactgccagatgttttatagatttatttgtctctcaaagcaaagtttcagtatcatagattaaattagaatgtgctgaaatgggatggaaattttgctcgttaactatgcttaataaatgaaagaaaccaattaatcgaacatctcatatattttgttcactgacaggaagttcttatcctttacattttctttgtttagaaactgaataggaagcttgtgcatattagtatcgg

SEQ ID NO: 88989 - DNA, 533 bp, Citrus clementina
  Intron number 1 from transcript clementine0.9_021270m (loc us clementine0.9_021270m.g) derived from phytozome v7.0 (c hr-ID scaffold_16; pos 771085 to 771617 reverse strand)
atttgagtgatcgtaagtttgccttttgatttaaggctcctttgttttatttatatttttcatttgaatatgttgttgtagtaatacgattaggcaaattctaagataggggatcccatacgattatgcttacatgggctcttttgggggttgttttggaaatctagagaatataagcaagttgtttaattgccaattgtgtagaatttaaagcagtttggaaatgcattgcaagttaattgttaatgattccttcgttttggttgatctggtttttgatctcaaaagcatagagttaatcggttcttgtctcaggctcattaacaaatttcacgtaaagttggttaggtatttcttaattgtcttgtttgagttgtttgtttgttatttttgtaaccttggaagtttgttttcatagtttattttgaaattgttaaagttgcatgttgcgaccttagtgttgttgggtttttcaagctttttgtaaggctgctgcaagtataactggaaaccccttttgttaatctaggttg

SEQ ID NO: 88990 - DNA, 883 bp, Citrus clementina
  Intron number 1 from transcript clementine0.9_015474m (loc us clementine0.9_015474m.g) derived from phytozome v7.0 (c hr-ID scaffold_12; pos 1740953 to 1741835)
ctcagttgcttctcatctcactgccataatcaccggttagtagattagtcaagattataactaataactaagcaaccaacttcagtcaggtgaagggaaacatatttcatcttgtcacctttttctttttatttgttgctgatgcatcgtgcatggaagtttatgaaacaaagggattgatcgagtgtcatatatctaagagtaaattaagctcgtatatctaatagttatggtttcactatttttttaattttttccccctctctctctctctctctctctctctctctctctcctggatccttcaaagattcatgaaaattgcatggttcttactttttcttatatatatttgctcttcttgttcctgaaaaatattttcacccttcccaattaattccgtgctacagttacattgctttctccattcatatatatttcgttctggaatgagaaaattttgacggatctatcttaaactaattgctttcttgtttaccaaacggaaactgctcatgcaatttttttttttttgcagtatactaattctctttcgaagaataatatcatttgaagatatataatctcagtaaagctcaagaattttggattattattctccataattcctacaatcagcatacagtcacatatatattaagataaagttgggaatattttcgttttttggttgtggcaatagcaagatatggtttttgtctcatgttgtattttaatattaacaaaagtttcacttgggtattttttatactctgaaaatcaaaacaattaaaaaaaaaaactgatcgtgatcctcacgcgttatcatttctttttgatgtgtgaaggggcgacgtcgggcatcggggccgaaacggcgaga

SEQ ID NO: 88991 - DNA, 551 bp, Citrus clementina
  Intron number 2 from transcript clementine0.9_009035m (loc us clementine0.9_009035m.g) derived from phytozome v7.0 (c hr-ID scaffold_8; pos 2546540 to 2547090 reverse strand)
atcggaaaataataacatcgtccgccgacggccaggtgagtgtcacttcagatgctttgacacttcctaattatgtctttcttttttttgttgacatgttagacataatggatttgctgattctctgttgtcattttggcctttggtttatgattagttctaatgttttcttaaccatttttgggttcctcagtgtgatttattgtaataggtaattgtattcaacgtgcttcaattgcttttgactcttgtaaaattctatcactcttcagccatttcttgaaaaaaaagaaaaagaaaccttcaataaaataaagcttacaacggaaggttgtttacatgaaaacataaaactgagacttatgtaactactttattgataccatctcacttgtaaatttttcatacagtgattataattgatgtaacatctggtgatttagatctaatcccaacctgttttatgatgattatccatagtgtactccattttttgaccaatgtgagctgttctccttccttttaggtgaggcttggccaaatctttgagg

SEQ ID NO: 88992 - DNA, 622 bp, Citrus clementina
  Intron number 1 from transcript clementine0.9_009035m (loc us clementine0.9_009035m.g) derived from phytozome v7.0 (c hr-ID scaffold_8; pos 2547302 to 2547923 reverse strand)
ccagaagcgtagctcgcagattctctgcttcagaggtttcaatacttttttctcttttcgtaattttgtgaatttcgcagttatcataattttactgagctcttactccgagaaataatagatttggttgaatttagatagaatcaaattaaattgacagtatataaatttgttgagctcaatcaactttagttctttttccaatctttagtatcatgggttggatcaaattatatggtttggattaacaaagcggagcaaccgatggtgttatcaatatgtggtctaggatcaatttgtaactcaagtattagaccgtagattggtttcatactattcgctttgtgtatctaatgatttcatcggttaatattgagtagatatttctgtgatgttttctttctcgaagagaattcttttcagtgaatacgagtttaaagacaacatagatgtgatgttgtagagaaatgagctttgctttggccacgaagttgccgtgggccgtgtggatgtattttggacatttttgtatttctgatttagttaattgcagctttatggatgaacaaggttggaaatggttggggccttattttatattttcttgttggtgcaggttctt

SEQ ID NO: 88993 - DNA, 511 bp, Citrus clementina
  Intron number 2 from transcript clementine0.9_028347m (loc us clementine0.9_028347m.g) derived from phytozome v7.0 (c hr-ID scaffold_16; pos 2215427 to 2215937)
agacgcagggtatctttttcatgtttctattgagattttttaatcagggttttggctaatggtctctgttcatattgatttttagagtgatttacgggttatagacgtaggcagatagaccttttacctagtgtgctttatcataaggatttccttgctagtggtaatattttgattcagcctgttaaaaatgcataattctgagttaacctgagagagagagggtgggggtggccgggtgggggggtggcgtgcgggaggaaagaggaaaagaaggagacagtgttgtgtctctgtgtggtagctttttcctttgttttacgagaactaaaagcccaaattgaggatgtgtttttggtcttgggataattgctgtgtgatatctgtagcatttgaaaaatggttaagcttgtcagttttatatggtcttcgtttgtgctcgcgtacttgaaaattttcttcattggctcttatattttttttttctttttttgccctttttcttttcagg

SEQ ID NO: 88994 - DNA, 811 bp, Citrus clementina
  Intron number 1 from transcript clementine0.9_022893m (loc us clementine0.9_020292m.g) derived from phytozome v7.0 (c hr-ID scaffold_56; pos 979547 to 980357)
aaaaaaaattctcaacttcccgattaaattctctggtgaggcaaattattcacctctactcttctttgctattgtttgtatctaaaatgatgacccttttgtgctttaaccatttcgttttatcttatgcatttgagcataattttttcggcagcagaatttctcctatacataattagttctactcgtttaaagaataaatttttgaggcttcttttgctttctcgcgaataagatgttctcgggggggcaaagtcagattgctagattaatttacttgtggattctgttgtcagtgtactgagttctgcttttagtagctatgtgttattaaacttttatgctgctgatagaatgtataattatgagcgtttaactgcggtctggtttcaaagactggacacctagaagtatactactggatagaatgtataattatgtactatccatatgtaatatgttttggaataattaaaatgatgtagaatttagctgtttatgatgtaatgtacactgaggctagctactacttgttgatgccaagtttaaaactctattcctctatgtttcattttggacagtcgctactatttggttgttgatctaatttcatggaatgtaaacatttgctgtatatttgtccaatatatatgtattaaattctatctgtcaaggcatgaatgattttacttttattgctttggttaaaggtaacattttttttccctttatttcctggtttattgatttggcagagcagtcattcctgtggacaggttataattgaagctctgttgtctgcacacttgat

SEQ ID NO: 88995 - DNA, 503 bp, Citrus clementina
  Intron number 3 from transcript clementine0.9_033742m (loc us clementine0.9_033742m.g) derived from phytozome v7.0 (c hr-ID scaffold_11; pos 340082 to 340584)
agttcaggacttctaaggtatgctaattcaaagccgatagtgtgtattacgataagattcaacctgttggttaatttaaaattgttatcttctttcttcttcgtgcaacaaatataatacttgagtaagagtattttcctttttacttttgtgttgttaagtgcctataagtccattttttgttgttgagtgtctgcgtcaatgcctgatggcatatttttaagtagctttaaagcatatttggctctttgtttatgaataacattcaatagtgatgggtgtcgaagccaacaaaaataaattcctactctaaataaattgtgtatagtgattgagcagggtcgtgtccacaaagatcggtaattatttaaatccttttgaaacgtaaaacgtaaaatgggggaattgttgacaataataaaaatcaaattaaaaataacaagaatgcaaattaaagttgtaattcaaattggagaaagctctggttgaaggaattaacttag

SEQ ID NO: 88996 - DNA, 489 bp, Citrus clementina
  Intron number 1 from transcript clementine0.9_009548m (loc us clementine0.9_004553m.g) derived from phytozome v7.0 (c hr-ID scaffold_84; pos 419178 to 419666)
ctctaagtgatactagtagcccctgcaataaagtgcgtctgtctctctttacatacatttttgtcatttatgcataaattttgcccataccctttagcccattttgtaattacagaatgacattggttgaattttcgcaatcgccatgagaacttagaaacatttagcattaggagtaaaattttgtaacacgtagttagtaatagaaacatattaagcgtggcttcccttttgcttgcaactaaaacttgtttgaagaaaatcaaattttgtactctaatacttgcacggcaggtgagagcttttagaaaattctgggaaatgttgtctcaaaaagttttgattcattccagtaatatgaagtccaggtaacacttatcaaaagctaatgtgcagcagggggaattcatttgattttttgtccttgaattccatgtttcatacttactttgtcacgttctttgatcaggacattaaaaatagtagtga

SEQ ID NO: 88997 - DNA, 760 bp, Citrus clementina
  Intron number 1 from transcript clementine0.9_013744m (loc us clementine0.9_012740m.g) derived from phytozome v7.0 (c hr-ID scaffold_103; pos 134899 to 135658)
aatcgaaattgtaagcccaaaaacaactttttgtaaatcttaatatgcccctcagctcgtagttttttttatcttgttttcatataattttagtgttatatgaatgatcgtctcggccctacgattgaactaaataaataaccaaacttttgtttcgatgccttcagtagaggattcaaggggaatagttgaatttttatcgataatattcttaatctcttgatagttattcggaaagtactttgaattctttgctttccttttgcccactttctgcaagaagcccaagcatacctgcaaaatgggggactattttcttatttggctaaatagtctgtgtaagtattttcttaacttcaggaagtgtcacaatttctagtgagtgtctcgggcctgtttgtcactagttgtagcaaatgtttatcatttagaattcaggacaagatgattgcagaaaatatagatattttgggtttctaatgagagaattgtattaattctgcaacaggccatcctcactgtaaagtagcctgctttatcccatttgtctcttttttgtccccccaccccttagtggagaacctctgcataaattaaaggcaaaaggaaatatataattttaatttttttataggattaatttatttattatctttaaccaatgtctccatcctagagcatttgaacaattctatatatgagtgtcttcgctctttgctttcaattcatagagacaatgacctccagtctgcagcaaatt

SEQ ID NO: 88998 - DNA, 791 bp, Citrus clementina
  Intron number 1 from transcript clementine0.9_013219m (loc us clementine0.9_013219m.g) derived from phytozome v7.0 (c hr-ID scaffold_16; pos 3114140 to 3114930)
acgtggtctccgaggagcgtctccaaaaacttacggtatgttattttttcctccgaaagaaaatattggattttgttttacgttgacttagactattattattattatattatcgttaaaatttctttctgtaagtttctttgaaattataatatttttctttaacatgaaataagttaattggcactgaattgagcttcgtagcagcttaaattagcttggatggaaatgtactcgaaaatgaagactaaaaatttcatcttttagttccatgtttcgctttgtttacgtgcttgtgttcttcgattaaaggtgtttttctttgtgttattattactatttttttttctttttcttttcttctttgaaaagatgtgtttctaggacagaaggaagctacctagtggtaaacaactgcatagaattctttattgttttagtgaaatacatagaattaaaatcggaaacaggatttagttggtatgggaaatggaagcaattgttggaaatccaagttcaattgaaaaaaaaaaaatgaatgaataaaaaaattgtgggtatgagctttaaactgtctctcgtagcccatttttgtgtttagagcttttgtaagaaggttgaacatcatgacatcttgccggttgaagttagataagctgttttgattatttgaagctataaaaccggtcttggtgaaacatcttttatcccctagtagtcttcttgtttcgtattttgttttatattatataacctgaatggttgcattatacaggtagtacttgatttgg

SEQ ID NO: 88999 - DNA, 616 bp, Citrus clementina
  Intron number 3 from transcript clementine0.9_026112m (loc us clementine0.9_026112m.g) derived from phytozome v7.0 (c hr-ID scaffold_8; pos 994202 to 994817 reverse strand)
ctcgagtcaatatcagagtccagacaacaggtattatgtacccatcacacacactgcgtataggaacatctatacctgttgtgtagaaggttcttctttaaattcggccatgaagtcaccctaattttttgagattgtaccatctaaatgtcaagtttatgctgctgtttaatgttatcacaatcttctcagcatgttagtccattttgtaatgcagttgggtgtataataaatttgtatgcacttttgtttgagggtctttatccatgaattggaagcatattgctatgcagtgccaattgcttaccaggaactttgatttaatgcttctagcaagaactatctaactattttttcattttctgctttaatgttattttatagtttgtcttattgtatgtaaattttaatcaatgtactcattttctttctaagactcttgatagttagttttagaccttggtgggttcatttttaagacaatttatctccagcttatcatagtttcacaatttatctatttatgaattttgaggatcttcaacttgataaacttctgtttcttgcctggaattttgcaggtgatccagcgagagaggtgttgaaagattcgtgc

SEQ ID NO: 89000 - DNA, 403 bp, Citrus clementina; identical to SEQ ID NO: 78922
  Intron number 1 from transcript clementine0.9_002243m (loc us clementine0.9_002243m.g) derived from phytozome v7.0 (c hr-ID scaffold_28; pos 1255318 to 1255720)

SEQ ID NO: 89001 - DNA, 868 bp, Citrus clementina
  Intron number 2 from transcript clementine0.9_002243m (loc us clementine0.9_002243m.g) derived from phytozome v7.0 (c hr-ID scaffold_28; pos 1255795 to 1256662)
cagtttggtttaacaagctttacttacatattcaggtaagtgatataatttatttatttttttcttgttgtgcatgataaatgatcttctttttttatgtatgtaattggctgtcctagagtatgatgattgaaaatcacttgataattaacatttcattggaccaaatttccttctttgatttgtgctgacctaatttagtgaaagaaataaactttcagcaaaattgctttgcttttttaggatatatccttgataagtatattctattgactttacttcttatttatggaggaaaaagataattgttccttttacttttaatagttgaaattctctttatttattcgcatttaaattttaagaatattgtaaatgtatgaagtgacaacatttgatgagatactatagttctagtctcaaaactgtataaaccattaacatcgttgactatggcactaacttctaagatggtttatgaaatattaaacatagggtagttctcatcttctgcctttattatgtatcattatggtatgtgaacctcttattttatccttctacaagtcaaatgccactagtgaagtttttgatttctagatatgagaacctgtaactggtgaagtttttgatttctggatattagaacctgtaaatgtttgaataatgctagatgtaagaaattggaccttatttatgagaccaatttattaatgaaaatttgcttgcattaaagaatttgatgtgtctttgtttgtttcgaagaaatattgttatgtcgattctaatctttaactcatgactggcattatgatgtcatttgtctcaatcagcaatcatcagaatctcaatttgtgaaggtggcttc

SEQ ID NO: 89002 - DNA, 414 bp, Citrus clementina
  Intron number 1 from transcript clementine0.9_018836m (loc us clementine0.9_018836m.g) derived from phytozome v7.0 (c hr-ID scaffold_8; pos 304447 to 304860 reverse strand)
gcgaatccaagctcaggctcacgaacacaaaagttcatttaaaaccccttcttctatcactagatcatattttgtttgatgcctttttgttggggtgtggggggtggggaattagtgccagaactgatctttttggtttcatcagtaggatacggtcgacaaagtcgtttctttttattttattttattttttggtttttcactaaacagttaaatattttgtttttttgggttattaagatctgggtttatgacagtagcagtgatatgatattaaagttggaattttttgttgattatgggtctgcctcagacagtgttggcggaaagtggaaaagaaaatattttgagctaaattagttattgttatgtaatacaggcgagaggtttgaagaaacatttgaagaggcttaa

SEQ ID NO: 89003 - DNA, 408 bp, Citrus clementina
  Intron number 1 from transcript clementine0.9_006177m (loc us clementine0.9_006177m.g) derived from phytozome v7.0 (c hr-ID scaffold_21; pos 1199600 to 1200007)
cccagctcaaggtaccattttcttctttcattatctattttcgttcttgtattaagttgttgatttgattacatgtttttttatgggcgtttgtgatttatgttgcaaataattgtgtttctttttttttttgtgggggggagcatgtgttatatgtttattgagggtgacaccaatgtgtatatctaagtaaatttgatgatggggaaatttttttttatttatttgttaaatgatgcagttgaccttaccagatatgattatgttggcatgaatgttaattagaagttctttaggcattgctgatattatttccataattatgttgtagttttaaatgttgccttggattgagtcggctttattgacaagggtttttgaatttttttttggcaggctgatcaagag

SEQ ID NO: 89004 - DNA, 534 bp, Citrus clementina
  Intron number 1 from transcript clementine0.9_014533m (loc us clementine0.9_014533m.g) derived from phytozome v7.0 (c hr-ID scaffold_13; pos 2534622 to 2535155 reverse strand)
ctaatcgctaccctggacacaacaagtatgtatctttctcgagaaaacgatcaaaatctccatgttcttcatcaaaagttaattatttcctccatgctgtaaaattcatcagaaccatccttgaccgaatgatttttttaagttgtttttttttttactaactactccagttcgaaacctaaaagaaatatattagtttgacttctgtccacgccttacatttaaaaaagaagaaagagaggcatcaaaatcaattttgagttttagtgttttaccacgtcatgagtagttagtaaaataaacaaaacaagctaaaaattaatagaaatttttaaaagacagattttgaacatgaggtgctaaatgattaatttactgaaatcaacaccgtcctttgatcattttcgctttatatatatgaattaatattattcattactatatgtttttaattttttttaataaaagtttttaatttgttgattctatatgtatattacatatatattgcaggtgctcaaataggtgtttgtt

SEQ ID NO: 89005 - DNA, 590 bp, Citrus clementina
  Intron number 1 from transcript clementine0.9_010600m (loc us clementine0.9_010600m.g) derived from phytozome v7.0 (c hr-ID scaffold_121; pos 269568 to 270157 reverse strand)
ttgctatcaaaaagcttaacagggacggcttgcaggtatgaaattaaattaattattatctcaatattcttcttcttttttaattttttgatttgtttggcgatccattttctaataaaaatattatatttgaatgcttgaagtatgtatgtatgtatttggtcagaactccgatgtgattgtagtttctgttcaaatttttgcttatgaatgccttttttcttgcttctgatttcttacttcacacgaacctagtcttgcatttcaatcattatcttcggcattcatttgtactcagattgctaacctttggctttagctatacattttgaaccaaacatatgctcataggccatatgcaaatgcaaatcaaagatgcccaagccatatatatatatatatatatattctggttagcgtattaaatccctatgtattagctcattcagggcttttctttaaccccgaaagatcaccaattgggttctttgttgttagatttatattttccagtacatgatatttacttgccctaatactttgcaactcaaatagggtcacaaacagtgggtagcagaggtccaatttct

SEQ ID NO: 89006 - DNA, 836 bp, Citrus clementina
  Intron number 1 from transcript clementine0.9_019881m (loc us clementine0.9_019881m.g) derived from phytozome v7.0 (c hr-ID scaffold_21; pos 2792682 to 2793517 reverse strand)
atcactcctactattttgtctcttcctttgttcaggtaactttctttgtcttctttgcttcttaagcatttgtatatttctaattttctgttcgtttctttttcttgttcacgagccagcaatctcaatgaaactgcagtttcattcgttgaaatatgaacaggggaagctaaaaaattggcgtgaatttggtcatttcatgttcaaacatagtttaccttctttgattcaaagtttgcttactttacatgttggacatagaatttgattgctttcccatgtgggtattggtctccttttctgaattgaccgtcctttatctgaatggaatttcttttcatattgccaaatagttaattggtgttagtgtgttattactctaggaagctactgttttttcaaaatttcaatgatgcatggttcttgtttcaattttaacttttctctttatttgctctttttgtcctcaattattacatatgacctgttatacataagccatattcttattaaatttttgctttactgtcttcttgttgaagatgtttcttctagcttcctttctaccaacataattgagtacaaccatagccaaaggtgcccacagagctgctctataagaaaaagaatgtagttagtaacatgaatgtgtggttgatattgaattttgaactaactatttgaaaagatcttgattcctttttccacaacaataattttgctctagttcttgtttgaaattcaattctcacaaacccaattcacattaggcatcttacttttgcctgtctcaaaattcaggtgcaagtgtcacaagtgcacaacttggcattgaa

SEQ ID NO: 89007 - DNA, 873 bp, Citrus clementina
  Intron number 2 from transcript clementine0.9_007902m (loc us clementine0.9_006407m.g) derived from phytozome v7.0 (c hr-ID scaffold_61; pos 594803 to 595675 reverse strand)
cgcccgatccccaatctctcgtttcggtcagtagtagttagtacatcactcacattttcagcaattgttttgataatttatacgtgttttgcgtttcatcttcatagccattgcctttattgcagcatttgaattagcttatatgagttactatgactaaagtaataatgttcatcaatcacctgactgatttaatatttcacaacaactagtgattcatttccaatgtaggtgtgggattaaaagggattattattattattttttcctcttttgggtttttggtaaaccgagatagcaaaatcaggtttatgttgcattgttgtatttaaaagcatgctgaatgattcttgtcttatgagactaaaggagtcgttgtcaaaacacgatgttctcctactgatttaattataagcaaactgggatttgggccaataagatggtgatgatgaaattttttttttttttggcataaatgtgcttggacatgagatgatatgtgagtttcatatattgtggagaagccaagtatgggcatttctaatttttagccaataggatgattttagggaaaatttttcttctggcataaatgtgcttggacatgactagaaagttccatgttttgtggggatgggcattgtgtttgcttttaattttgagccaacaggatgattttgatgaaaatttttcttttggcataaatgtgcttggacatggcgacagagtttcatgttttggggaagccaagtatgggcatgtgtgtgttttaggtttttcttctattgcatgatttgaaagttcatggaagttacttaatatgtgtcctttttagtagttgattgaagaatttgtgaagaaggagaagatccc

SEQ ID NO: 89008 - DNA, 763 bp, Citrus clementina
  Intron number 2 from transcript clementine0.9_001260m (loc us clementine0.9_001260m.g) derived from phytozome v7.0 (c hr-ID scaffold_16; pos 942707 to 943469)
acatagcatcttcagtggaccccaattcggtcgaggtaattttttatggatttaaatttaattaaatgggttgttgatatttagcattggctgtaatgaattggatttttaggcatctgatatttagtaggatcaaagtttgtttgattgaattatgaatttattagaattggattataatgcatttttgtggatgtgatgaattgggtttgaggtttttgtctttgtcttgcaagtttgaggctctgttgctgtatgtttggaaggaaaagtggtttagtttggtgaagtgaattgatttggatttatagtcagcatttgtggttgggttgagttaggaagttttgattgtatggaaagttttttcgtaccctagcgatcttatattatagtactgattaagtgattgtaaacacatggtttttatcttagacaagttttcgtttcagttgggatcagagaatctaatgttaacataagggtgatggttgcatatgctgtaatctgtgtggatttatgtttaggcagaagccttgtcgtatagtggtctcaattgattgttcagaaaccattttccgttttatgttggctacttggattactaagcttgttattttgttgtttcttttcattatgtgtcaggtacttttaaaactcttatgaaatctgctattggctgaatttcttccatttgaaattgtattttggttgaaatttgcacttttatttgtttaacattttcttttttgttttcagaatcgat

SEQ ID NO: 89009 - DNA, 708 bp, Citrus clementina
  Intron number 2 from transcript clementine0.9_024048m (loc us clementine0.9_024051m.g) derived from phytozome v7.0 (c hr-ID scaffold_71; pos 120157 to 120864)
aaattctctgcataagcggtacattgcttacttttattattctaataaattatgttgcgttttctttgacatatcttctgtcgtggatctttaataactcgtgttaaagatgatcttaaatcaaaaagaagaaaaattgagaattgacatgtttaatcaacttaaatggctccttcttgaaattttatgctcaagacttggaattgtggtctttaattcagagacttattttgggtttttttaatcaaattagatttataaattgaggatctatcaatattgaaaatgagaatttgaagattgtgtttcattgatgaacttattgagtgtataggtttatttcattcaagtcagctctgttgtggcacaaaattatagcacgaaatagaggtggtggcttgtaatttcagtcatcaactgcagttcggatgaccattgaatctcatgactttgtttaaatgcctgtgaaactgattttgcataattactgcctacatttctttcattctgatgcaagctctaattttttttccccctcccaatcgctttgcagttaatgaccccacttgtgttgaacatgacttgtctaaactcccgcaaaaactaactttgcatattttgtggatcaatttcttacagtctaacctaagcattccttcttttttcttttttttgcccccgggggctcttgtaatcaatttgcagtta

SEQ ID NO: 89010 - DNA, 620 bp, Citrus clementina
  Intron number 2 from transcript clementine0.9_020068m (loc us clementine0.9_020068m.g) derived from phytozome v7.0 (c hr-ID scaffold_56; pos 273160 to 273779 reverse strand)
gagcacttgttattaatattggggctatacttcaggtaaattattagttttttttttcctttttcagttctatatgatggattcctctgacctgtttgatgattttctttgagatagacctagaaaggatggaatagtggcttgtcaccaccaaatgggtgaagtaaagggggtgaaatcatgagggctattagtagtgtttgtatctgttttgttgtttggttaggttcaaaattttgaaatatctgtgaatgaaacaagaacttatctttagcagagaacctttcttattggtcttctaggattatatagagttattggtctgcagtttcaactcgaattccacatatctgaaccgaagccttggcatgggcgtctattctgtcttttatgaacttctaactttttgatactttaaattccccccaaaagagatgaactatttgctaactgcataagctctgctttatcctggttttatctgctgatactgaatggctaatgaggctactggattcttgtaatcaactttaatggattcgtgacaatggagatcatttaaacaactgcttgtgcaatttttataccagaaattttactttatcattgtttttcagatt

SEQ ID NO: 89011 - DNA, 434 bp, Citrus clementina
  Intron number 1 from transcript clementine0.9_012682m (loc us clementine0.9_012682m.g) derived from phytozome v7.0 (c hr-ID scaffold_81; pos 398677 to 399110)
cccccgtttcaaaggccacacctatatcgggtgagctttcaattctctctctgtctcttcaatttcaaatttttatcatctgggttactttgttgatcactaattagagctctgatcatatatttttctatcacttttttatctcaagattaatggtttcttttctttttttttcggtacgtattttaataatatatttgcatctctgatttgattcttgaaatttctgctatggtgcaagattttatccgatcttaattaataagggttcgtgaaagactagagcaaattaactgcttttattgattgtgtctgatacatatgctgttgataattcatagctaaagctaattttaggaattgggatgcttatctaatgctagtattggatcactgcagattcactgtgaacccgcgtcgtagaattaggcagc

SEQ ID NO: 89012 - DNA, 825 bp, Citrus clementina
  Intron number 2 from transcript clementine0.9_026426m (loc us clementine0.9_026426m.g) derived from phytozome v7.0 (c hr-ID scaffold_124; pos 172136 to 172960)
ttctcaggtcgtggcagctgcaaattcccctcaaggtaatggcttcgaaagcacataaaagattgtttctttgctgctttatttgcttaatttgtagctattattatttgagctctgtgtggggttggagaaacctagatcctagaaatggtcttgaaaaacttgcatgagctttgtgtcaattgcaaatttttttttttttttgaatgttttgaattattcgtgtcaaaatagaacaaaaaaatggcttaacttgccattgaactgccctggattttgcttcttattgctgaaggaaggagctttgttaatagttttagattattgttcattttatctttcgttttatgaccatttgaaagctttgaaaaaatgcttatctgaaacacattgctttacaaaatagaagtatgttgttcatgcaatccctgctctctaatcagtcttggcttttgtaatgaatggttgcccagcttggttttagccttgggagaggtcttatattagaaattagtgaaacttgcattctgttatttgtattaacagagtgtaaaatgggtctttgtttagaaacatatgaaaagtgtattaactaaatctaacctcgcattcaatataacttaaaacttctgtgattgataatgactcgctgagttatgtggacaataggaaatgaaagaaaatgcacagaatctgcagaattaatagtgtattaaggttgctatgtcattaaaaccattttcttgcaaatgacatatttcctgtgagggttcaaaattacactgtgataaatgtgaaatgaatggtgcagctcatcagggaaga

SEQ ID NO: 89013 - DNA, 361 bp, Citrus clementina
  Intron number 1 from transcript clementine0.9_023659m (loc us clementine0.9_023659m.g) derived from phytozome v7.0 (c hr-ID scaffold_8; pos 307127 to 307487)
ggtgagaaagatcaatagatattaatcacgttcagtagatttgtaatgatttgtttctttgattttggtttcagttgctgtttgatattagttcatcttaattttgttttcaacttatatcctgagggtattcacaatttatgctggaaaagattacaactttaaataagttattttctatgtatttacacgtaatggtttctttgaagcttcaaattttctatttttatttcttcgggagtctatgctgcattgctgctgcagggttttggcttttaagcgtttggagtgcaatcaattgatgagtttatttcattgttggttgtgttgtcgtttgtttgtaggtggggggctcgggctt

SEQ ID NO: 89014 - DNA, 962 bp, Citrus clementina
  Intron number 1 from transcript clementine0.9_002101m (loc us clementine0.9_002101m.g) derived from phytozome v7.0 (c hr-ID scaffold_21; pos 2768012 to 2768973)
tctttaattcatttattttctctctctccaaacaggtactgtcttttctctctctttctttctttctttctttctttcttccttttacgcttcttcgtaattttcgtatgtgatcagttgttttgtttattaggaattcaagtaactgttactgaaatagtgaaattttgagtttagagtttgtgtttgtgcttgacttgatggctaaatgaggcattttttttttgtccttcatgtgtgtgttgactttgtgcggactgttgctaattctgtttgattttttgatgtgtcgcggagttttggatgtattattaggttgttgaagtttgtgatttcgtacctgatcttgagaatttgctttgctcaattgtgtatagaggaatgagtatttaataggctcaagtgaatgttgtttcataattgctaattacttttgattgtaatgttcatggagctgaattttctcacttaacaaattgtaattgtgtttgtacttagttgattactaatgaatttcacaagagcttttactaatgaaaaacagtagaaatgtgggcaactgattaacgaaatagttttccagcgtgatagtaagggaagaaatcatggaagctcgattgtaattgtcctgtgcttgaggtatttggttcagcctgacatttttgtggtagataattgagctcttggaccatgtttgcagtcactttgatcatttctgaagaatttagtgaatgcacttaaattaagtaaattcctatagattaattaaatagttatatcgtctttcttttctttgcttaatgtactgttttcgatttaatcttcaattcttatagatttatatctgtgcatctctttatgaatggctatttgatgatgttaaggcagctccataacaataaacaaattgaaaatttgttaatagcttagctcccaggtacttttgctgctgtgagcaattt

SEQ ID NO: 89015 - DNA, 655 bp, Citrus clementina
  Intron number 2 from transcript clementine0.9_016521m (loc us clementine0.9_016521m.g) derived from phytozome v7.0 (c hr-ID scaffold_16; pos 1765917 to 1766571)
agtggctgatctgcaggaggcaattcataagcgaagtaagtcctatatttctatttttttgacttgttttaattatgccattggttgtattggaggtttgatttcattcagaaagattgcattttgcttcttctcactaattattgcagcatcctgagtgtttgataagtagttgaagactctgttatgcattttctttagttgtggatagacatttgtgtgaaccatgtctttaaatttttactatgaattagttggtgctagaaatgttagaaaaagtaaacgaaaagagtaataagaagtgaaaaggacagaaacttacaacaattcttgaagaggctgatttttattgattcttcgtgctcacagttgtatcatttctatcgtttgctggtcagtggtccctggctttcaagttttaatgtaaattagttatttgcaacatcgcatgatccactgttcactgtctaaactttttccctaaaataccataccctgttaaaaatttgattttgataattccatttgattgagctatttcacacaatatatttgtatattggcaatcccagatgtaatttcaattctataagctaattttttgtgccttttctcaacagccaaaaaaatttacccttcaaggcagaggctaacc

SEQ ID NO: 89016 - DNA, 543 bp, Citrus clementina
  Intron number 1 from transcript clementine0.9_003126m (loc us clementine0.9_003126m.g) derived from phytozome v7.0 (c hr-ID scaffold_21; pos 660764 to 661306)
tgttgaggaaggagtggcttgtttgcttcgaggaggtaatgcgcttttttggtttttttttttttaattctgtctcttattatggtatttctttggtttctgaggaaattgaatgcttcttgtttttacaactgtggtggatccattttctttctttctttttttgaaataaaaatatgtttttaagtttttcgtgtgatagatagttgtttgtaagttcttaaacgaaaaaatgaaagtaggtttctgaaggactaagtttggttgccaagaaaattgaggaaaatgagagaaattttgaattggaatgtactagtgaaaatttagattaattaatttgcgcatatatggagtttgacaacggagaaagtttacttgtattggagaaatgatttcgtaagtcttattgttactgtgatatttattttagtgtgatgactattttactttgtgatttttatattgagtttgtcattggattttagaggaactagatttgggtttgtagattcaagagttgcttgtgaagttcgtggaaagtgc

SEQ ID NO: 89017 - DNA, 893 bp, Citrus clementina
  Intron number 3 from transcript clementine0.9_011784m (loc us clementine0.9_011772m.g) derived from phytozome v7.0 (c hr-ID scaffold_96; pos 427812 to 428704 reverse strand)
cattttttcgttttctctattcctcctggtatgttgaaagaattcttgccatattctcattatgcttgaatatctaagtgggctgtcaaaatcatttctgtgataattttcctatctgtatcttttgtcatattctgaacattattttgtttcgtaaaatgatgaatataattttcagaggatttgcacgttactaatttattgggtcctaagattccttgaaaatgaattattatggtgttgatgattcaaaaatgggtcccagattttcactgcagtaactctgacatttgattttgttcctgtttgatattatgttcttataatgtttatcaataatagttgatgcaacattagagtccctgtgaagcacatttacgcttacattagtcattgtattttaaaaatactcagtgcatctagtttgtttattctgtttaattcttataaagactatttcctgagaaatagctttcaggcatttgactcaagctatggtgagtttgattttccagctgacctatcttctggtctgtggttctacctatagttcttccaatgtcataattgtccacattgatggtaactgaggcttgaaacacaaaagaaatgactcggtatctaaactctggttttgtaaaagaacccttggacagaggaaagagagtcttacatggtttatatgcttgttctgaaagagagaaccttgtttcttgatttgcatgataaatggtagttgatccaatttttgctttggtagaacaagatggtccaagttacctttcagttattttctgcattttcaaccgtcctggcttaccttgtttgacttattgattcttccatatcctaatgcagctttgaagaggaagatttgaagaagtttgttctcc

SEQ ID NO: 89018 - DNA, 1060 bp, Citrus clementina
  Intron number 1 from transcript clementine0.9_011784m (loc us clementine0.9_011772m.g) derived from phytozome v7.0 (c hr-ID scaffold_96; pos 429467 to 430526 reverse strand)
aataataattttattgaaataaatcaatcaaaaaggtaaccccaaatatctcctccagctttttgctgcttcttaattttgatcgactatgacgatgtactaaagcttcaatttttttcagttttttcagtcaacgcttttgcttcaagatttcgttttaccttccttgaaaattaaagctcacctaattgatacgattaaaattctttttttagctgaagattgatacaattttcacttcatttttttcttaactttgtatccggatttgctactttgtttaaagttttttttaattttttttatatttttctgtggagctaagcacgtctttggttacagctttatattattttaacatataattagactaatttatttatttgtggatttattattttttaaatatggtttgagacttctgatgtttcaatatttatcgcacacgtgtagtgcagtggctttaataaatgtggtactgtaaagtttaaagctttttgcatgtgaatgagttggtgtgtactctttcattgatgtttagattcatgtatgtggtgatctctgatctgggtacatgttagattttaattttatggcatggttcatttgaccaaattttattgttacttgaactgatgaacacgaattttgaagtgaatacgtgtgtttgattgactggattttgtaagattcctttgtagaagtattttaatcccacgaacagtatgattcagcaaatagctttgggaatggtattgattctattcttgtttgtttattcatataagaactttgatgcaaccttcagattccttttgaactatgtagttatatatttggattagtttatagcatatcaactgttgattgttgcatttagatgttttttgttacttccgctcttgattgcttattatatgttagttaaagagcaaacattatacaagttcttgattgattagtgctctttcgtataacgggttcgtgactgatgttcactttcttatttgactttgtttatgcagttcttgtagagagattgtgtaatttgaatattcag

SEQ ID NO: 89019 - DNA, 823 bp, Citrus clementina
  Intron number 3 from transcript clementine0.9_035209m (loc us clementine0.9_035209m.g) derived from phytozome v7.0 (c hr-ID scaffold_87; pos 1071300 to 1072122 reverse strand)
ggagcttgaaattggcacaggagctaatcaaatttgttctttacaacgacctggagcaactcattggagctcttattttactttggtcagtaggttaatcagtatgtttggttctgttcatgagtatcttgaaaagatgatttgcaatggattgaataatgacatacgaggggaagctaaaggtatttatgatgcaatgtcaacctttaaatttgtttttatcttgcacttgatgaggttgtggggataagtgatttactttgtcaagcattgcaaatgaaatctcaagacattttgaatgctatacgtttaataccggctacaaaattacttttattaagagcgtgatatcactttgtgaaagtcatcatattgatgtgcctggaacgaatgatcgctatatgaaaggtacgatgcgttcttgtcaatagaaagattacgtcacagggggagcattattatcgaattgatttgtttaatgttgtaataaattttcagttgatggagttaaataatagatttacagatcagacgatgaaacttcttactctgagctctgttttgaatcttgttgattctttcaaatcatttaatgttaatgatatttgtaatcttgcagagagattttatcctcgggattttactcaatttaagatacttaccctgagaagacagttagaatgttttcagattgatgtgctttgtctttttgagtttcaatgtatttcttcactttctgaataatgtcgaaaattagttgagacatgaaagtctaaaatttacttcttgataaacatattgattcatttagtgttgactcttt

SEQ ID NO: 89020 - DNA, 564 bp, Citrus clementina
  Intron number 1 from transcript clementine0.9_001766m (loc us clementine0.9_001766m.g) derived from phytozome v7.0 (c hr-ID scaffold_11; pos 3983202 to 3983765)
ctcttgatcgcgctcttcaggttgtattcgttgaatttatttttttaatgaataatgttcgacatttgttatgtagaggtgagtgatgtaagcattctaaaatgttttgactttttctcggataaagtccacgtcatgctttcagctgaagtcctttttcttttttgcataagcacttgtcaagtgctttttcagaaagtagtgagttcaattgcttttatggatggtgtttctatagaaagtgctttcgagtttcgagtgcatatatggaaaagtgttttcagttactgctgttgaaagtaatcttgctcaaagacgtttgtatttttacttttatgtttcacagaagcacttttcatgaactcatactctgtgcttataataaaaagcaaagagaaatttctaaaaatagtttgaaccagatgtagctggtgaaggtgtctttctttcttttcttttgcattgtgaattgattgtatatcaagtttcataatgagtgattttttcatctgcaatcattttgttgctgtcatggttaacacttaacatgcttttcaccacagt

SEQ ID NO: 89021 - DNA, 437 bp, Citrus clementina
  Intron number 1 from transcript clementine0.9_034900m (loc us clementine0.9_034900m.g) derived from phytozome v7.0 (c hr-ID scaffold_21; pos 3118276 to 3118712 reverse strand)
ctgggattgcaattacttggatatctgcattggtaagcaactgccaacgaataaagctccctataaataatttctgtttaatttatacgataaaaaatactattttctaattaattgtcttgatttttcactttttaattctttttttttttaatttaaaaaaatagagggataggcagagtacaaattagtttttgatactctaccttttaaaaattcgaatttgagtctctagccaaataaactattaattaataatccgttgaggtttcatttcttaattaactcaaacttagtatgtgaaaatgttgcaagctaggaaaaggttctctttaattatcgttattgatctctgtatttatcttctaattaaagatgtataggctttatttatttgattcactgatctgcatgttcagggtctggcttccgcaatt

SEQ ID NO: 89022 - DNA, 1019 bp, Citrus clementina
  Intron number 1 from transcript clementine0.9_001598m (loc us clementine0.9_001598m.g) derived from phytozome v7.0 (c hr-ID scaffold_115; pos 372052 to 373070 reverse strand)
ctgaagaatacgtcggccgagccactttgcaactggtaagttcttgctagcttttcacttgcaattcttttttgtttttgtactttgttttttttttattattagaattttccggtacctttttttttttgtttttttcctattttgaaattgctgattctatcataatcacttgcgattatttcgttttgtgttaagactttgacttttgaggttcaaagtttttgaatatttgatcctgttctgtgtataaagcttagaataaaatgaataagtctgttttccagattcccttccggtttaggctagaacgaaatttgtggctaaactggatagtgatgatgttttagatgagacagaatgatgaatttttccggtatacaaatccaaaattcgttacaaaatattatgactggtagttgatgggacatctgttttgtttataagtgatatttgttttgtgatcattcaaggtaattaagttttcgtttagtcggacatggagatttacttgtgggctagtaggaaaagagaagagggagtgatcttgttgaaaaaagcaagtgaagctggatagagaagcatgtaggggggaggggaccattttccttgattggttttaagattatgagaggaaatgaaatgggaaggataagtaattttgtaaatcccctccctcccaaaaaaaaaaaaaaaaaacccagtcattaaatgaatgggtgttagggatcaagagataagtctggttaaaggtactaaattaagttagtttctattcattacctccttaggggacaccaaatactatcaggtagcaagcttcttctttggctattatcaattgaactaatagaaggaagtatgtggccttgtctcttctcttcttcccttatccttcatttcgcattgcttccctccttgcaagctttgtattggtttccagttttgtttgaactaatgttttgacttgcactttttctgcagcttgattttgatagtgctgccccacctgagcaagc

SEQ ID NO: 89023 - DNA, 676 bp, Citrus clementina
  Intron number 1 from transcript clementine0.9_006504m (loc us clementine0.9_006504m.g) derived from phytozome v7.0 (c hr-ID scaffold_11; pos 3967231 to 3967906)
ccatctctctctctcgatactgtcgtgaaacaaaggttcatttgctcttttccacggacctttctttttttctcgtttcccgaaccccgcagctttttgtcatattattgttgtattcaactatgtgtttgttttccgattggctgatcagaaagctttaggaaaatgaaatgaaagaaaaatatgaaattcagttatttcctgtttctgtttctgcttcttggaatcttttcgttagcagaaagaaaccaaattctgtcactcataagtttgtttgtttttttgtttgtttgccaagaaaatgaagaaaaaagagattttcccattaccgtgtcacatgttttctgtggcatgcatggtatgggaagacagtttttcagcatttattagtggttacattagtctgcctttcagttcaataactgtccataaataacttaatatttttagtcattttagctggcctaatataatgttgccatttgctacgccagttctcttattattatattttttttttcaattttctgttcatttaagtatgcaaattattgttttctactttgtttcaattgggtacctttgtgtgatttttttcttctttttctggggttaattttggatatttttgttgtgtttagggaattgttgtagagaaggaaggattaagagaaga

SEQ ID NO: 89024 - DNA, 884 bp, Citrus clementina
  Intron number 2 from transcript clementine0.9_006504m (loc us clementine0.9_006504m.g) derived from phytozome v7.0 (c hr-ID scaffold_11; pos 3968065 to 3968948)
ggttcttacaacacttcttggcctcaaagttacaggtacagggaaaaaaaaaacaaaagattatcttggaagattccttttgtgtcaattggatgtagattttggattctctgatgcaattttctgtttacaatccttggccttcgggttaaaatctgagtatatattcttagaacttgccttacttgaatgtcctggggatttctcattctgatgggacaagtggagatttaaaaaaaggtgtaatgtcccaacttagtctccggtagtgagatgaacgtaaaagtgtcaatcacccgtaattgcaggctattcaatgttttatttttattttgtttggtgttggagattaaatttggaatactatataaaggaatccaagaagaatgtatggtggctttgactggttttccatagagggaaaaggagtattgagagtggtggtcaagctactttacttggaaattgatatttatttgtgattttgcaagccaaagttgtaaaagttgtagcagtagtcaaaaaggctacagttctgtccaccccaattttaatggagagcaaaagatgatgttctatttgtgttctctaatgacttgatgattcaactttctgcaataggccattagtttactagcaaaatttcaatgattagagtatctaccacccagttttgtttcacaaattttgcgtcttttgaagatcttgattaacctgccaaatgataatgcatgatggatgaggattatgagaaactttattgattttgtaacagtgttatttgtcttatggtgtactgttttttgaaaccagctcttcatacttaacacatttgatttgatgattcaggcagtctattgatctttatagtagtgtcccatctc

SEQ ID NO: 89025 - DNA, 832 bp, Citrus clementina
  Intron number 1 from transcript clementine0.9_006445m (loc us clementine0.9_006445m.g) derived from phytozome v7.0 (c hr-ID scaffold_61; pos 1095459 to 1096290)
taaagcaagaagataaaaccagctggattttcaaggtttgtaacaaagttgattttggcacatttatgcatacacccattattatattaaatcatgaatatctgttatttttctttcatattatattctattctgacaccatttgtattttttctataatatttgcatgcataattgtataaaacatttgaagttactgtgaaatatgagcacatatcagccatttatcaaactcattcatgtttgctattgttcattttacaaatagtagttttgatatgagcaggttgcgtttactttgtttgcactagccacgttgttatgcccaataagtggttatatatcacatttgttcttgcatccgtgcaacgatgttctcaatgttaaatcacttaattaggcttcgttttgttataaatggctggcaaaatccattggcaaatataagaattgtgaaactacatatgttgggggatctcttcttttcctacaggtaagatgattttcataattgaattttagcatttttctggtcatggacggctgtttatacagattttcttaactataatatgtttatacagattttttacctccataatgttgcatacaactgcattcagcctgatgggaccaaaactcctgtgacattctggaaagaatcaatggtgaagaggttcatgaagtgattgagatctcggggagggattggaagtaataaggtaaattttattgtagagtgcttatcattataattaccataataatgtgtgagaaatggcattatccttattttttgatatcatttatctgctcaattaaacagattcag

SEQ ID NO: 89026 - DNA, 563 bp, Citrus clementina
  Intron number 5 from transcript clementine0.9_023015m (loc us clementine0.9_023015m.g) derived from phytozome v7.0 (c hr-ID scaffold_12; pos 4673556 to 4674118)
aagcatatagagagatacgtgcaaattctgctgctgtaagtaatgctatactctctgaggctcatcatgttgaatggatgttatcaatttgttgtcaattttttatgtttctgattctctacatcctactttctgtgctatatgatattagagtagagcaaattgttaagggaaatcaagcctaagggaaggatctatatagtgtaaacaatcaattttaatatcttagttgctgataggccattttcttcaaacttttattagttacttttttctgttagttttttctttatcacacttcgtgctaaacaagtaaatatgtacatgcactgctgcttagattgatattcaaaatcttatgctgaaaccaaagtttaaatgctaattaataattattggagtattcctttagaattcagaaaccatgtaatttaaagtctctattgcaaggttaggaatatattgtgttcacgttcttgttctattggtttttgccactggttattaatcaaaccaatttgtttcaaatgcaggaagcaaagcgtcttgctcaatcacaaagt

SEQ ID NO: 89027 - DNA, 823 bp, Citrus clementina
  Intron number 1 from transcript clementine0.9_021612m (loc us clementine0.9_019209m.g) derived from phytozome v7.0 (c hr-ID scaffold_52; pos 151594 to 152416 reverse strand)
cttcttggagcttccctctccttctggatcggcaggttttataataaaatccctattactcctacaaattaattatttgtttgtttttgtcttacaccccactgaatcgatgcctttaaataagagatccgaaatctaattagtcttaagtctagcatttaggtggattgatccatccaccccatgatgtgtggtgaaatatagttcaattatgcattgcattcactagttgctaatcagctgagatttgactggttatgttaattggatttggagagccactttttctaaggaaccctaggaattgttgggcctatagttacttaaggttttgttggtctgcgccatatagacctgttaaaacattgaataccctaaaatagttgatgatagaacatcacttggatacatgacatgatggaagcttttctcaaataaaataattgtctgtttgaattgggttattttcatctgggcatgattgtttttgtttctcttcaaaataatattttgaagtcttgaagagaatgaaaattacagagtaattcaagtactcaatggttttcaaagacatgccagtttgaaccaggaaacaaaagcagattgactgtaacattactgaacttgtctgcatttgatgacgcctacatacttgctctcaggattttccattcgttgttccattccccaaatttccctagttttttgttgttatttttattttttatttatttgtttttctttatgtttattttataattacttttaagaatgattttgactctgtggattcaggttagttttcaagagttcgaattcagca

SEQ ID NO: 89028 - DNA, 831 bp, Citrus clementina
  Intron number 2 from transcript clementine0.9_025220m (loc us clementine0.9_025220m.g) derived from phytozome v7.0 (c hr-ID scaffold_39; pos 1714336 to 1715166 reverse strand)
gctttgaaacctgttccagtcattgttcgctgcaagtaagaatatttccagtaatgttagcctgttatgttttgtgcttgatgttttggatataagttatttcattatggatctttttaaagataagaaatgattaggataattattatgtcctggcagttttgttggtaaaataagggaaaaaaaaataatatggacttgttattttatacaaggaactgagggactctgtggcttgaccaagccattgttaagttggatattttaacaattcagtagtgatatgagactcaaactttgatttttggtaatgcgggaaaattaatggttttttctaccctagactttagcattatttgtttgattggttgcaaacatgataaccttttcccccgtttttttcaaagtctaaacttgcatttgttttttggggtgggtgacggagcattgaattagtatcaatttgtgagccatattgtcgttcatcttttttcttcttttctctttctgagataaagagggggtcctttccaaaatcgacatcttagaatggtgtgttaaatgcaatttcttggaggcttgaacgaagatattgtttttcttctgttcattttcaccctttttgctgcataatgttatattacctcgcctaagccattgtcttaatcaaattctactacttttcagcttaaggtttgacacatgcttcatttagtgccacctctgttaatatttgagatcaagtgcataagatattcattatggtcttttgtgtaatcaatttattgtgttacaggagctgcggtcgtgttaagctaccacacttcttct

SEQ ID NO: 89029 - DNA, 644 bp, Citrus clementina
  Intron number 2 from transcript clementine0.9_032562m (loc us clementine0.9_032562m.g) derived from phytozome v7.0 (c hr-ID scaffold_8; pos 884415 to 885058)
ctctcacctatctccatacatattctggtatgtacatcataaaacaaatatcagttcaatctagaatttaagattagatagtttcttagtcatggttaatgtatacgtttcaaattttgaatcgagagctgtcatctctaggccataagatatacacaccgtttaggaattgtaaaagcaaatctgaattttgtttgctaaaaatcaacagatcctcctataatacacagagatgtaaaagcatcaaacatactcattacagagaagctccgagccaaagtgacagactttggatttgctcgaatgtcagaagaagattctgctgtaagtcacatctctactcaagtgaaaggaacagctggttacttggatcctgattatctcaggacttatcaacttactgaaaagagtgatgtgtactccttcggcgtattgcttgttgaaatgatgacaggaagatacccaattgaatcaaagaaaccaataaaggagagagtaacaataagatgggtaagtactctcatgacctctcattttgttatcataccttcagcatatgatgctttgctttatgtagtacatgagcactacaatttaattaccaatgtatgcaatgcaggcaatgcagtgcttaaaagcaggag

SEQ ID NO: 89030 - DNA, 544 bp, Citrus clementina
  Intron number 1 from transcript clementine0.9_004347m (loc us clementine0.9_004347m.g) derived from phytozome v7.0 (c hr-ID scaffold_124; pos 500859 to 501402)
ttgaatccctgaaaaattttcacaagataaaaaaggtacgtaaaaatctttaccttactcactactgcaatctggaattgtaaatttaatatttcgattagtttaatataatagccaaaaaacttagggttgtattcgagtttgtaaaatttgcagaattaattgttgaaagaatctggcaagcttcgaaagttagctttttttcttttcggcttgttcaaatgttagcttagttactgagacaatggtgttgcgcccccccccccccccccccccccccaactcttttaacatattgctgttcgaatagttgaatttgattgtcaagtgttgcaagctgccatcgagtagataataattaaaaaaaaaaaaattagcatttgagtgttttttaagaagatccattgcggagttatgatatagtgaaagcatcaattagattgtggtggtctggtgcttgtgatatttgctataaatatgaatggactttcctttttcttgttttctagggtcttgaaaggttttctgaggttttgttgtatta

SEQ ID NO: 89031 - DNA, 886 bp, Citrus clementina
  Intron number 2 from transcript clementine0.9_004347m (loc us clementine0.9_004347m.g) derived from phytozome v7.0 (c hr-ID scaffold_124; pos 502411 to 503296)
acattctcttcgacaggtatttttctggtgcttctctaatatactgttgtttataatagattcttttatctcctaaaacataatattggctagtgttggatgttcattgatgctttgtatctgcattgaatttctttttctttattttttcggcccccaatcacttgatcatttggtagcatggatctctttgtacggtttgcttctgagttcatggatgtctgggccaatgaattttcacaactctaaataccatgcttttggtttgatcatgggaagttactttttaagatatttagttatttattttttaataatgaaatgtggtcagaagctttcctatctgtttgtttcatgttgcttcatggcctttttttccataaggaactgaatatttttagtttatgtgaataaaaaggcaggttatcctcagtagaagaaggataacggaagcttgtcccttagagcaagaaacaaagtaactgaaccttatattctcaaatgattattcctctggcttagatgttcccttcgttatttagaaacttgattatctgcaaaaagttggctgatttgatctgaattaatacagaaatgactaggaatgagacattttatatatgttggcaccaatccttgtgatcctttttaaaccttaatggcaggatctggtttttttaatgtccaatgagttttaagtgctgtgcatcatgcagaacatcgcctgtctttcttagcaatttacagcttatctagagcttaaatatatttattttccccttcttgaaaaggcttcagtttttgctttttgctagcattgattttatttgtgtctttatctaacgttgtttcttgatttgcagtttgcaaaggaggactaacccac

SEQ ID NO: 89032 - DNA, 505 bp, Citrus clementina
  Intron number 3 from transcript clementine0.9_017358m (loc us clementine0.9_010583m.g) derived from phytozome v7.0 (c hr-ID scaffold_39; pos 586416 to 586920)
cagctgagacaattatttatcaacagggaaatttggtaagttaataaaatgatttatctgttttgggaactaaaagaataaccgttcttttatttccttgttaatcgctagatgtttgtgatttattaggaaagggaattttgggcctatggacatgaatgttaggaactaggaaaccattgagattgagtattgaggaaccttggatatatataatttctaattcttttttagtaggctcatgtcacaaggggacttgttgatgtaatggctaataaacttaatattctttgagcaagcagtaggaggattttacttgattttatttaatgtcttgtccttatcaagatgtgtttgttcccttatttaatgagattttggaacacttactttgtagctagtgcacagtataatattatatatttgattacgctgctcaggacagattcttggcattttctccagaacagcatcccattgtccttcaaattggtggtagtaactt

SEQ ID NO: 89033 - DNA, 1034 bp, Citrus clementina
  Intron number 3 from transcript clementine0.9_034799m (loc us clementine0.9_034799m.g) derived from phytozome v7.0 (c hr-ID scaffold_88; pos 197780 to 198813 reverse strand)
caaacaccatcctggaaaggtattttctgaccatccttgtaaatgagaattatcaaccgaatgattttgataataattaaaactgtttaaaaattctttgtcaaaacttaagctaatgaaagagaagaatttgtgttattttttgatacttagattattatactcattaatcttgtctttcatgactccatgaaaaaaatttttgatacttattttacagaagtactgttgcagacatctgcaaggtatattatttcttggtttagagaatgacacttgagcccctaatatttttacttttattacagtccttaatttttttaactaacttttttaactacccattatattacaatagttcaaaatggtaataaaaattgacacatccttttggtgttcttttaccattgcacattatatttacatatacatttgtgtcccagccgaagggttttgcataataacaagtcacttttgtcgttcaaacagtaaaatataaaagccaggacatgcaacgagtgatgactaattaaaacaaattaaggacctaagtgataaaaatgaaaaatattagttatctaagtatcattctctatttttcctttcataataatcaactaatattccttttcaattgtatatttgacaggactgcagcgaacgggcacctacagtaagtccatgcaatatatagttatataaaaaattctcaaagtgcaggcatccaaattttaactaacaaatttaagcagagagagtagttgcgaatagacaaaatttttctcaattcggcgttgcatgatttttagtttttagcatctctttatttttttaaaagagttgttagtctggattttttttcccaaaaaaaaaaaaaaaaacaaattcctgcggtagaggagtactactagttagttatatttgaactagtttcatatatctcttcagaatttattgcacttggagattttattattgattctctcacaagagaaggtattggttgcaggcagtgagttttatacagtgcaata

SEQ ID NO: 89034 - DNA, 432 bp, Citrus clementina
  Intron number 2 from transcript clementine0.9_034799m (loc us clementine0.9_034799m.g) derived from phytozome v7.0 (c hr-ID scaffold_88; pos 198938 to 199369 reverse strand)
ctggaccttgcaagtcaagtaacatctccattcaggtaaaatactgaagagaccaaaatatatttaattaaagttcgactaatttatgagtgtgtaattaataatcttaatttaatcatcactcaatccatgggttcaatttggttttcttgaaaaattgaaccaaactacgagaatggattggttcaaaaatttttgactaataaattctctctctctcttttttttttttaatttagtcttttaaagaagaacgaaaccgaatcaaaccgcaaatcaattttagagccattaggctctaggaaacttttgcctagccctaactaatgttgcatgcattagtatatatgttagcagctgccatggaagttaaacttaaaactcttttattttattttttcatgaagctatcggggacaatcaaggcgcctg

SEQ ID NO: 89035 - DNA, 921 bp, Citrus clementina
  Intron number 1 from transcript clementine0.9_025724m (loc us clementine0.9_025724m.g) derived from phytozome v7.0 (c hr-ID scaffold_64; pos 1206054 to 1206974 reverse strand)
gaaaaactcttactttgctatagttattgagactggtaactttcgttttttttttttttggtcttcttttttgactttttttatttagcttctttttgcgttgagctttctttctgcagatccagggtggtaactttgttagagagtctttcagttttgatctttattgaagttctttactaatgtgtgtgtgtgagagttaaaaaatttttcctgtggaaaattgttgcttgatttggcaatccaatagttggatgagaaacaagcaaatgaatgcttggcaacttagcatcaagactatgttttcaaccatataaactgaaaagagatcctttataatctatggtgatatttttgcttctcttgggaggttttagtttatgtccccgctttatgtttttcattgattgatttatattacaggtggtcgtccggcttaaccccaccatcttggtgttttgaaaaaagaaaaagagaaatctatgggtttgagaaaaattatgattaaggtcaagtatgcacataaaaatagatttaagtgattcatcagtaaatgagtgaaattgtgaacattagaggtcagaaattttgatatattgactaattttttgtttcttttctttttttttgggttgtctttctttcttttgatgcaataatgtaagaattttgatttagtgctgagttttatgctgttgttacagtttgcgcgtaaaagtagatttcagtgattcataagtaaatgagtgaaattttgaacattagaggtcagaaaatttgatattttggctaatttttttgtttcacaatttttttctttttggctgtctttcttcttttggtgcaataatgcaagaatttcgatttcgtgctgagttttatgctgttgatacagtttgcgcagctgtactgactgtggtc

SEQ ID NO: 89036 - DNA, 942 bp, Citrus clementina
  Intron number 1 from transcript clementine0.9_024947m (loc us clementine0.9_024947m.g) derived from phytozome v7.0 (c hr-ID scaffold_70; pos 294102 to 295043)
cccagctccgttacagcttccagcgcaattatcaggtctccttttagatacccaattcatgtttttagcagaattttttttgacgggttttagaatgattaaaatttggtgacgtgagagtatttgaagtcaatgattgaaaatttatgcttattttgataagaatgtagctctagttttaatcgtaatgtgttttatagtgactggttcaaattttgttgttatattttgataatttacgataccaatttcaatttccaatgcgttagtgaatacggtttgtttgataactgtatgtttatttatctaattagcagtgatgaacccaccagcatcgaggctaacaatgggtgattagtgtttgcttgtgcacagactaaagttgatttgttattcaagcacgagtcatgtagtataggatgaaaaagaactttgtatttattgtatataatgaacatttttatgtggctcttgactgtatgtttgcttttactgcagtttgaagcatcttattgtgacatatatatggaaattttgactactctcttgttagatttgtggttgtataatctttgacaaatatcttaagacatcttctaaatatcttaagacacctgaattctagctttgttttcggtgagttgaagttacaatgattgtgatgcaaatctaggttgcgcttgatgaggaaaggcatttattttatgcacttctgcactattgttaactggtagttaagcaccgtgctctgttctccatgtaattgacactttaaggctatttgattgctctgtgcttaaatgttgtttttttaaggtcttgatatattctgtttcattgtacttctatttaagaaatttacgtgtacttcattgagctggagtttcattctttcatttttgtacagtttcttcaacgagtattcagcatagacactgttgt

SEQ ID NO: 89037 - DNA, 584 bp, Citrus clementina
  Intron number 1 from transcript clementine0.9_007341m (loc us clementine0.9_005402m.g) derived from phytozome v7.0 (c hr-ID scaffold_91; pos 776372 to 776955)
acccctgtgagtctctctctgtttttggcgccgtggtaattcttttatttgattatgtgcattatgaatgccgctcgaatgggtttgtttctattgggatttctaaggattgtgttgtgtttttattttgtggattttgagtgacattcagttacatatgacttcatttgaatcagaactgaaatgggtgtgtttgtttttgtgcaaatagaagagcatttactcagtagtgccctgtcttcaattagaattcaattgggtttgtttgttctgtgattttttttttccacatgcccgcaagctgtgttgttctctcaatgtctacatctctgttattgcataacggaattcattacctgaaattcaatttgtttttcaaattttaaatataatgctttttcttaggaaatgtcccaaaattagtggcaaagggatcaaatttgttgaagggaaaataaaccaagatttattttcactgatgctttgtatggagtcacgagttttatataaattaatttctttttctggatcttttatcgaattttgtagcaaaaagtaaagagcctatctgtttccgtacacat

SEQ ID NO: 89038 - DNA, 547 bp, Citrus clementina
  Intron number 3 from transcript clementine0.9_021287m (loc us clementine0.9_021287m.g) derived from phytozome v7.0 (c hr-ID scaffold_112; pos 126862 to 127408)
cctcgagaggtatgtttgttctatatcttcaaaaagtcttcaaactttttcctgttatattaaaaacaaaagcaaaagaaaacaaatacaatccctacagagattttctttttattttccctctctctctccttccaccattgatggcttttacattttcatagcatgatccactatgctagttgcacaccggctattttttttttttaatgaatcaacggtcaggatttaagtgtgaggacgacgtatcttgaacactcaaatttgaaccattaattcaatgttcagcgcaaacttaattagtactgaattcttatccatttgatttatgttattatcctttcttttttatctctcatttagctttaaaaaaaaaaaaaaacttttgaagtctttgatcagtcaatgcctgcaaaactcatcatttctttattgcacaacacaacactccaaacttctcagtattccaattttcaatctcttcattgactacttttctgtgtcctttgtagttaactggtgaaacagtaggggaagttaaagcagt

SEQ ID NO: 89039 - DNA, 594 bp, Citrus clementina
  Intron number 1 from transcript clementine0.9_020846m (loc us clementine0.9_020846m.g) derived from phytozome v7.0 (c hr-ID scaffold_79; pos 353628 to 354221)
agcagattgtggaattgtttaggacttcgaggtttgttgatgctgctaatgttaccgttaacgggtctaatatgacaaggattttaatgagaagaactagattgcctgtttgatgggttcgatttcattttttgtttgttgtaaatttgattgattaatttgggtgcggggaaagtgaattcttagacatgtatttgaggaatgaattgcctgtgaattatggattttgagattgagttccttgttccttgtgaatccagcattgacggccttgtattggtttctaggttctgtccagtagtataatttgcttttcttgctgttttctgtgttactttctagttatagaagtgaaaccttaattttctgcattatatgtcagcagatgtttatatcatattcataatactgtaattgaatcagttaaattcacatacatggagtattttattctaaccattttagtgatttggtaatttagttctgcgtttaccaaagactttttaggctgtgatatgttacatgggctgtcatcaactgcctttttatgctgtttgctgaattttgtcagtaaagttttacagaggcagtgag

SEQ ID NO: 89040 - DNA, 545 bp, Citrus clementina
  Intron number 2 from transcript clementine0.9_033433m (loc us clementine0.9_033433m.g) derived from phytozome v7.0 (c hr-ID scaffold_12; pos 4287733 to 4288277 reverse strand)
ggaatagcagtaagcagaatctttttgcagacagggtatgcattatattatcaaattactttctgttttatgtttttttttttaatctaaagtatttgacttaattgaaggccagtcctgaactaaaaccttacttcctccattttctcatcacttttttattgctttctcattacattgtggaaaattttaccgtcatcatctggtcacttcttgtcacaatctcatcaatttttcgtcactttctcttactttctggtcatttctcataactttcacataactttcttgtcacttctcctcaattcttgtaacttcttctcgtattctcaccgctctcttcatttttcattgcctttcagtcatttactgtcaattctcctcacatccttgtaacttcttctcgtattctcatcacattcttatcactctaatgtccattgtcaatcatattgtctaatttctgatcttgttcaatctgactccatgccacaagttattccatcttaagcaagggtttttatagcagatatttgatttatttg

SEQ ID NO: 89041 - DNA, 671 bp, Citrus clementina
  Intron number 1 from transcript clementine0.9_012956m (loc us clementine0.9_012956m.g) derived from phytozome v7.0 (c hr-ID scaffold_21; pos 1784816 to 1785486)
cattcttcagcttatttcattactatttttcctctgtaagtaatcataattttatctcaatatgtcaacttctgtatcatgtatgttaagtaattcattttatatttactacaagttttcacctgtttgaagaagaaaaattaattaaaaaaaaaatactcagtccgttcaacatgaaattttatgaaatctccgggttttgtttggtgcattgctacattgtaagtattgcgtgtcaaattttggagctgggtagttctacactgttatattaataacaacatgtgctgtacgttgcctgtgtaaactgggtttgattgtttgaatatttcgaagaaacaacgctttagattttttgattggcaattagttaggattttcttgaacttgaaggcattaaacagaaatgtattcctgcagttatagttcaagaattcatgttgagtgaaattagctatgaaaaatttgctgtatccatcatgtagcttcagacagtacaaattagggaaaccctagtgcaaaggcgaattgtcattcttaggcgttcaccttctttcttgattgatgagggaaagcctgtaattttaattatacttgaacaactgtaacaagatataaagttgtgtctgcttatttctcaatgcattacattgttctgtatgcaggtcctt

SEQ ID NO: 89042 - DNA, 802 bp, Citrus clementina
  Intron number 2 from transcript clementine0.9_017670m (loc us clementine0.9_017666m.g) derived from phytozome v7.0 (c hr-ID scaffold_8; pos 4135839 to 4136640 reverse strand)
ttcaaccgcatagttggtgtcaaagataaggttattactttcatttttatttattttataaacagttcatacatataaaatgttgtcggcaaattttgtttatacttttgagttttttgagaaagtgttagatatgcaagaccatctttagatttgtattgcccttgattgtttgtcctggtggccttctgattgtactacctatactttttgttatttcaaagcactggtgcatcatggtttgtgtatgtatttttgaaaatgtgcttgaactctgatagagacaattaaaatgttttgcttagtattagcaccttcttctctggagaaagtgattggtatggatcatcatcatgatcattatgctttaagtgtgtattgccatttcttatgcgctgcactttcttttaatttaggagcctttagaatttgttcatatttttctttgtttcgaagagaactctcattttattttatctttcatttttgggaatatttgttttcctgttaacagctccttgagatggattggccgtgtttattctggaaccattttctttctgtgataataaaatagagtttcttatctgagtatcaattgtaccgttgacctgataatgttgtctttgagcttaacatagtttgttctttatatatattaggattcaataactttgtatcttggcatcaccgatttctgatatattccttactttcttctgtattttctgcattgtgtaatatataccattatattgaattctcgttgaatgtgcaggtttatcccgaggggacgcatctt

SEQ ID NO: 89043 - DNA, 364 bp, Citrus clementina
  Intron number 1 from transcript clementine0.9_017670m (loc us clementine0.9_017666m.g) derived from phytozome v7.0 (c hr-ID scaffold_8; pos 4136788 to 4137151 reverse strand)
gacttgggtgtagggttttagcagagctgtttcaggtccgctttttcttctctttaattacttagtttgtgttggcacaagttgattcttgatttccgttttgaattcttgttttttacatattcgattggtcgtttcctctgtaatggtcttattaattttctttagttactatgcttacactctgttttgctcgtaacatattgtcactctctctctctctctctctctctctctctctatatatatatatatatatatgagttgagttctttgatattgagtttgttgctattcttgaattgggagttttgtatttgttgtggtttttttctactgactacataccaccgcttaggaaaaa

SEQ ID NO: 89044 - DNA, 571 bp, Citrus clementina
  Intron number 2 from transcript clementine0.9_004842m (loc us clementine0.9_004842m.g) derived from phytozome v7.0 (c hr-ID scaffold_16; pos 3220940 to 3221510 reverse strand)
actaccaaggtttgtcagtataattggtttaaaatgaaagtcttttttttttcttttttttttttagatcatttgcttggccaaaagttgttggttgtgttacttgcaagcattgttcaatagataatggttgtaatatgtatatgtattacaatctacttattcttttttttttttttttgaaagtatgtatacgtgttacaatctacttattcaataggctttttttttttttaataatttgttgataaaagtgaataacctccttctataggtgatttatcattaaactgatattgtgataatatcttagaatgattccccttacatgcatttaatttaatatgagagatttagcttgctacaaaaaagatacaagagggaagagtgctggtatttgattattattgtataaaagtgaaattattttatatcacttctataactgtgatagaggttctatcttattttagtttgtatccttacaatagcattatcacctttcttggtataatttcatttcagtgccattcttatttgaagctcttttgacagatcttcttgaccgggg

SEQ ID NO: 89045 - DNA, 750 bp, Citrus clementina
  Intron number 2 from transcript clementine0.9_002599m (loc us clementine0.9_002599m.g) derived from phytozome v7.0 (c hr-ID scaffold_8; pos 1471845 to 1472594)
atttttctccagtgaatcacccaagaataagaaaagtaaggattttattttatttatttatttatttttccggtcaaaatggattgttttaatggctaggcaatgtataactagcgtagtggaagttatttgatagattttggtaatgaaatgttagtatatttgtgttttataagtgggaaaagtgcattagttgatattggtattgtggtgttaaaatttttttgggttagtgatttggttgtcttttaattttgttggttagtgatttggtagtcgttttactttgaaccagatctttttgtttttggaggcaaggaagttgcattttaagcaaagtgtgaggagttttgattgggatcgagtgaaagtgattatttaaggtaaacaaataggtcattatgggatgctggggtaacctgtaagtttaaataaattttgaagcaagagctatgtagttactgaattcgttctagaggagttaactgacagtttaaattaaaagctaaatctattggctttagtgtttgagaaagaaaagtacttttcataccctttgcaagaggtttttagatctgtagtgaagcaactattacgttcagaagcaaaatcataacctgtaaacgtgaaagaagattggtcagtttctgtacattttgttcatgtggtatggtttctaaactttctgtcttgtgggttttctctttatttacagattttgagaatttctaccccaaagagaagaaggaa

SEQ ID NO: 89046 - DNA, 692 bp, Citrus clementina
  Intron number 1 from transcript clementine0.9_016015m (loc us clementine0.9_016015m.g) derived from phytozome v7.0 (c hr-ID scaffold_103; pos 164743 to 165434 reverse strand)
ttcacagccgccactcctctggcaagttcttcaaggtttgcttatccttctgtttctattacagtttcttcattattttatttgttcattaatttggtgccatggggttgatgtgatattatgatttctgcatatcttgaagaataaattagtgaagacaattaactatgtattaatttttaatataaatagatgaacttgcgatcacttgtcttcagatattatatcataatttttagtttagataaaaattatttaacccacattttcataattctagagccgcaaaactcattgtacaaactaatgtgacataatggtaatggggagcttgaaacaccacattacctgcataaattatttttattattttatgtttttcattccaccagttctgttatgccacgtcgttagtacaaaatagtttgtacaaagagtttgtggttctagcattactctttcatatttgtggaagtgactactttcatatttgaatctgtaaatgacattgatttgtatctttcttagaaatttcttggatttgagttttggtctactctgacattgataagtttctcatgcagcttccatgcttgattcaggatctatgtcattctttattccctactttattggagtgtctatctgtggatgtaggagagacggtatttactgaaggaattcccagaact

SEQ ID NO: 89047 - DNA, 397 bp, Citrus clementina
  Intron number 3 from transcript clementine0.9_007199m (loc us clementine0.9_007199m.g) derived from phytozome v7.0 (c hr-ID scaffold_16; pos 3305673 to 3306069 reverse strand)
ttgctgatacaaaaggtggcgtccaggtatttattttaagtaattaaagtaatgcaaatgtgaactgcggtcactagatagcttgtttatcagattatcatcatatgattgaggttagtcagtgtgatctgatgaattcactttctactcttgaccacttgattagattttcctttcttgttgtgtccatattgttcgtaagaaaattaaatttgaaagtagagatctaatagcatatgaacgcctgagcagaatgactttgtctatttaaagttttggctctcattttgagtttcataactcttggatatcaagaaaacagttcgctttcatttgtagagaatggacttttcttttcctctcatagttattgcattaagcttgtgtttaaagcagg

SEQ ID NO: 89048 - DNA, 172 bp, Citrus clementina
  Intron number 1 from transcript clementine0.9_031306m (loc us clementine0.9_031306m.g) derived from phytozome v7.0 (c hr-ID scaffold_11; pos 4592775 to 4592946)
tcaagctccgagaacaagtcgccaagcagcagcaagtccgtttcttttctttttttgtttttgaattatttagacttttaattagtgaaatttctcgattttatttatttttcattagttttttatggtttgtacaggcagtattgaagcatctgctccatcttggcattga

SEQ ID NO: 89049 - DNA, 675 bp, Citrus clementina
  Intron number 4 from transcript clementine0.9_031306m (loc us clementine0.9_031306m.g) derived from phytozome v7.0 (c hr-ID scaffold_11; pos 4593572 to 4594246)
agagggaaactttgcttgggattcttcgtgatcaggttagttcatccctaactagaaaataattcaaatatagaaaattatatgtaaattactactgaaactattatcttctcataaggaaacttagttctaagatattgaataaaagaatccattttaaagttacaactctgaaatatttaatgttttatattaaaatcattgctagtgacatccatgacttaataattttattggttcaaatgttgaagagaccttgtgacttcttacatcactagcaaagactagcgtgtgacaagtttttggccgtgagttctctcaattgactccaagcattttcgataacgacacttgcatctatagtaaaatcaaatccatgagactgaaggatgcatgtggaagtcttacagccctaatttatatatttgcataggtttatttctattttaaccttaaatacagaagagaagaacactaacctaatatgaatcatcctaagacccaaaattgcataaattatccttatatatatccttgaagtaggcccaaattccatgattatgttggaggaactttttaattgaggtttcgctctttcttttcatttttctaactatgttacaggtttttggacatgtaggtatctgagccactacgggcgttaatcaacggagc

SEQ ID NO: 89050 - DNA, 872 bp, Citrus clementina; identical to SEQ ID NO: 80082
  Intron number 2 from transcript clementine0.9_029182m (loc us clementine0.9_029182m.g) derived from phytozome v7.0 (c hr-ID scaffold_126; pos 159924 to 160795)

SEQ ID NO: 89051 - DNA, 796 bp, Citrus clementina
  Intron number 1 from transcript clementine0.9_008285m (loc us clementine0.9_008285m.g) derived from phytozome v7.0 (c hr-ID scaffold_16; pos 4078963 to 4079758)
tgaaattcctgaaactgcccatcaaattagcagcggtttgtctcttttcccatctctctgattctctttgcttcaaatctagtagcatgtttttcattaaatcattctgtttcattatgtctcaaatttttattttattttattttattttatttctttttggctgaatctcagatttttattgcctttttggcgagtcttccgcaaatgtatggttttttgacgtgggattcttgggttactggttttaccattctctttgtttcatttggtgtgtatgaggttccaagtgtagcagcatgttcttgatgaaatgactgtttcgttatgttaaagttttaatttttttggcaaaaaaattcaaattttttattgctttctgtgagagtgattctttaaatggatggttatttggtgtgggaatcctgggttaaattggagaaggggatcaatttgatgaattttgttgaaaaattatattttgatcctcaataagctttttatttgcttgttctgtgtaatgaatatgactgatctgtttaatttggtttatttaatatctgactcttaatttttattttttcttttcatctgtgttctatcaaatgaaccaactttttgctttttggttgtgaaaaataagagtatcatgaagcaataatttaacctgttgaggaaagtgaatttcttattgttcttacgtataaataggaaatgtaaatttctgcagtttggtaatgtattattgttgttatgtgagttcgtcatacttttttcatttggaaatgctagattc

SEQ ID NO: 89052 - DNA, 800 bp, Citrus clementina
  Intron number 3 from transcript clementine0.9_020920m (loc us clementine0.9_020920m.g) derived from phytozome v7.0 (c hr-ID scaffold_52; pos 809717 to 810516 reverse strand)
gttgaggtattttctttttcagattatttacgtatttgatttaatattcattacataatacaaccttggccaacgtagtgttgctctaaactgacggttctgaatttagttgggttctttttcggtccaatctaatccattgtaccaaatgtagtttcgaaaatgctatactgcgttttctttcacctagtattcttacaagccgtagttaatgtatttcatttgttttagaaggacaaatatcattgatgaaaataaactttttatgaaaatatgggtcctgtaaggctctcgcctcaaccacctcagctgagagagagtggcctcggctccttggtttgccccaccacccgaggcaaagtgccaaggatgcctgtcttatatttggttagagtgtgtaaatgatttgcttttgagaaagtagaacttcagccatggctgcataatgagattaaagctttagtttccaggatacattgaaattgtctcggtgcaaacttatctgaagacgtaaatatcattgatgaaaataaactttttatgtaaatgtgagtccagttacgcattcatgtcaaccgcctcacctgagagagacttgccctgccttctgggtttgagtgtgtcaaaattttacttttcagaaggtagaacgtaagccatggctgcataatgagattaaagcatagtttccacgcaacattgaaattgttgttgtgcaaacttatctaaagttctgtttttgtatgtatttttgttcctgttaaataatgatgcatgactttgattgttggaaccaggca

SEQ ID NO: 89053 - DNA, 392 bp, Citrus clementina; identical to SEQ ID NO: 78779
  Intron number 3 from transcript clementine0.9_035528m (loc us clementine0.9_035528m.g) derived from phytozome v7.0 (c hr-ID scaffold_99; pos 452169 to 452560 reverse strand)

SEQ ID NO: 89054 - DNA, 561 bp, Citrus clementina
  Intron number 4 from transcript clementine0.9_031383m (loc us clementine0.9_031383m.g) derived from phytozome v7.0 (c hr-ID scaffold_71; pos 669583 to 670143)
ggtacatcgttagagaatatatctccaattcccaggtgtggcttctgatattcttttcagtggtttctctgcatcaaaatttctgcgcgtccctgtctttgattcactggtatattctctctttgtaaaaactgaactgagtgaagtattcaaagggcaaaataacggattgacttatctttaaatctcattacgttacccaattgttcattttagaactttgatttttatattatgcacatgtttatgcgattaaaaagttcatatttagatgtatgtatatctttttacttttagaatattaatgccttctttgatttttattctatttctcaatagatttgtataattacttctaacacaaagtagaactaaaagattttcttctttggtatttcattggactatttaatagagataaaagttcaccggcgatctaattatatgtggggtagcacgactctatgcttgcttatggtctacaataccaataatatatcatatagcttttctcattttcttgcaggaacgaggcataaatcaagcagatcttatttcttt

SEQ ID NO: 89055 - DNA, 390 bp, Citrus clementina
  Intron number 1 from transcript clementine0.9_007013m (loc us clementine0.9_007013m.g) derived from phytozome v7.0 (c hr-ID scaffold_25; pos 1094628 to 1095017 reverse strand)
aagtctccatacactcagtccttggtgagttctatttcgtccaagtttttatggagttctatgattctgttttttggttttttttttttttaaagaggaagaaaagaccaaattttctttctcgtttgtgaaaatttatttaagctttgcgtttattttcctggtttcagtatatgatttgatctatgtttagatatggaggaggtaggaggaaaagttactttctttttctttttttcttctttcttttagtgcagttggaaaaatctaaatcttttgtttaggaaactttgtgctattatttttctgccactttggtgtgtaattaatttatttggagtgttttacatttcaggtgaccggctatcaattacggtttgagctccgcgc

SEQ ID NO: 89056 - DNA, 692 bp, Citrus clementina
  Intron number 1 from transcript clementine0.9_008897m (loc us clementine0.9_008897m.g) derived from phytozome v7.0 (c hr-ID scaffold_96; pos 162989 to 163680)
tggtgtcagggttgttccggaaattgacactcctggtgagtttgatgttattttccagacactgttttctcaatttttttttttaaatgagacattgaaaattgttgttttgagtttgatgtttttcggattcgaaaatgcttctggtaatgtctttcaaaaatagtaatttaaaaatgaaaaacgtttctgtttgacaattttattttatttttttaaaattaaaagctgaagttaaaaaataatgtaatgctatcttcaaactgtttgaatatgagtttttaattttgatattacccgaaattttaagccacaagatagaaaaaattttctcttgttttgtaacttgaaacggaacaaattttgtctcatcagtcatcaacatggtaaaagagaaaatatccacaattaaagtaaagtagtatttatttttatttttgtttttgttttttgtctttttaactctaaatatgaataaatctaactaatgttaatattcaagaccaacatttatcagtaggaaaaaatcttttgtcactttatctacccatttgacaaaatcatagccttttttcttttttttttctctccttataattcatatgatatgttcccatcagacagccgtgcgcaaagactgttccttaaaaactttcaattttttgtaatgtaatttcaggccactcaggatc

SEQ ID NO: 89057 - DNA, 884 bp, Citrus clementina
  Intron number 2 from transcript clementine0.9_005895m (loc us clementine0.9_005895m.g) derived from phytozome v7.0 (c hr-ID scaffold_21; pos 1223630 to 1224513)
ttccacttggatcaaataggtaagctgaagcatctgattttaaggtctgttgtatttttatcttttctcacaccatcagtgtttatcttttcttcctgatgtttacacattgagtaacaaatttttacaacttttgacataagtgctagcttatttacaaacatgagattcattctcttattattaaatggttctcttttagctttcactggagttaagaatcatgaagttaggttctgttttcaaatttttatgcaaatcaagatgacagtcaaaaagatatggctgacgtcgccactattgaatgattttcttttagcttccaccggagttaaccattttgaagtagatattttcagagttttattcaagccaacgtgacagttagaaaatgtggttgattctgtctgtggattgacaaatttcgctacacattttcagaatgtcttcattccaaagattttgtagcaatcttggctcctgggcctttttaagattttttttttttcagaggtagggcttttacatcttttggttttatgtatatttcagtatatctgcattatgttttataggcattacaaacttagtgtaaaggcaaaggcactacaggcgctgaatggtcagatgtatgaccgttgggggatttcattttataattcaattatagaggcttagccttaatgattttattattttcatatgggatcatatgtatagcactttgaagatagttgtggtgagtcgtattttggaatttctgttttcagaatcattattctccagtgcaaatatttccatcaatataatatttaaatgttggcaaagtaaatttattcttaccttgtgcatactttggtcgtagattttggatccatctggga

SEQ ID NO: 89058 - DNA, 923 bp, Citrus clementina
  Intron number 1 from transcript clementine0.9_016183m (loc us clementine0.9_016183m.g) derived from phytozome v7.0 (c hr-ID scaffold_70; pos 930554 to 931476 reverse strand)
aaattggtaactctctttatctatgcatttgatttatatttttataatttttttttccttttcaaaatcttgaaggtacatgaaaatttatatacaccatgattgcatgcaatgcagggtattttaattgctgatctgacgaattattatgattacttctttgctagctaaaaaaaaaagcataaaacagatgtcatttttagaattttcttctttttaaatttgtgtcacggactcttgagcatagttagaaatatctgtgaaatgcgtttcatagtcatggcttcaatgacacatccaaattcattacaattaattaattgatttcctacttctatcccttttttaaaaaaaattaacaaaataaaagtacttgtttagttatctattgtgggggggaaaaaaactattgccatttattgctctgcccctacctctatatgtctctttgggagggctcgcactgtcccataatatttatttctaaacaatcgcagtcattatcttaaatcaataaaaataacagaattttttcttttattttttacatttattatatctacaccgacttatacttaacttgtattaatctgcaagtacgatctgtttggtgataaattcaccatatctggtaggcatgtcttattaatggctaaaagcttccttatgcataacctctttaaattgtgtcccctttcaaagaaaattttcttttttgtttttattgataaacattatatagatgtccttgatttgagaaatttgttaattttttaaaaattattaatcgtatcaaataatatatcattttgcccattagcttttatttactcttcacaaatatttttaatgtcatattaaccaaattttgtaaatgcatccattcagctgaactactgggacttcctctgattcctgcatac

SEQ ID NO: 89059 - DNA, 694 bp, Citrus clementina
  Intron number 2 from transcript clementine0.9_010336m (loc us clementine0.9_009565m.g) derived from phytozome v7.0 (c hr-ID scaffold_8; pos 2005855 to 2006548 reverse strand)
ttgaaattcagtgtactagttgaagacgaaatgtaattactttttcttttctttttttttcacatttaatatacttgttctttgttagttacttgtacaattttgatccttttagcatggtaaagcttgtattcttcatatttgtttttcaaactttgaccaacaagcaaacagagataaatgaatttgctgcattttggtttgaggcataaagtgagagctatgctagaacccccagtgaatgattttttttagatgcgaacttctagtcttttaaggtaataaaaccttttggagggtcatgataacgtgatgtaggagtaggcttagtcattattgaaagtataacatgcaagtgctcaggacttgagagagtgtaagttaagttattcttctgaaactaaatagtaacccctatgagttttggaaatatagtctacttaagagactaatccttgtgaaagagtaaccctttcagtttcgttgaatgaggggaacagtaaggagaagaatataagttgtgaaaaatgttgattctggagtcataatgcttcatttttattggtatatggattaaggtgttcaatctttccttctgttcttgtatatatgaatcatgtgggcattgagccaagcaaattagcaattttaaagtacttgtttctggcattcttttcagaacaaggggttttgg

SEQ ID NO: 89060 - DNA, 674 bp, Citrus clementina
  Intron number 3 from transcript clementine0.9_005712m (loc us clementine0.9_005712m.g) derived from phytozome v7.0 (c hr-ID scaffold_92; pos 46656 to 47329)
caatcagtaagtaattaagcttccttctaattttcttcaacatattatgtacaatttcggttcatgatcatcagcttgtattttattttgattagttccaaaaattttccttgaactttgaagttgaattattagttttaagtgtttcatgaatgatctcttggtccagtcaacattaggccggggtttgtatatggggagggcaatgatgggaatgatttaagagtgtgtttaaagcaactaaagttaaaagttacttgttaattgcacttaattttctacttctttagtttggtttgaccagattcactaaatcatgctttattgtatgtaatcgaatccacttgcttttcttttcttgatttacttggagttgaagccaattcattgacgtcttgcattagtgaatgataagagatttctgatttttttaatacatggatcattgaaaatttatgtttatgctattgaatgtgtcattattctttacaattgctttccaagatacgcccgggatttctagtgattatggatctatcatttgatgaacactgagaaattctgcacttagtattttattttattttattttttggtttataagcacttagtgataatattggtagttctttaattggatgcttgaaagaattttcttttactgaaccgtagac

SEQ ID NO: 89061 - DNA, 695 bp, Citrus clementina
  Intron number 2 from transcript clementine0.9_021099m (loc us clementine0.9_021099m.g) derived from phytozome v7.0 (c hr-ID scaffold_21; pos 2578863 to 2579557)
agtttcacagcccaagaaacctccttttggctctcgtacgtgtcattcaaaattcttgatttatttcttttcttgtcaagttatttaaaagttacccttcagtccacttatttatttattttttctgttctctgttggtatctttgatgatgacacataaaagactcaatgaagatgatgatcatactcgtatttcttcttttatttttctatgtggggttttgaagacttgaccaaaaatattacagccaaaaccagttgtattgtatttagagaagttcgtaattgatttgttgctcacaggtttttttttttttccttttctaaattaatgtcatgtctttgttaatattatttactgatcttcgaatcagaaagtctacatatattactgaaatctgccggggtaacttagattgattatattatattacatatgttaatcttctgtttgaagttagggtttaattattaagcaaacaaatcttcctttctgctttttctattttgtctccctttaattacatcatagaaatcttgaaaatcccacttgttttttttttgacctttttctattttgtctctcccaccataatatcaaaaagaccctcaaaaaagtataattaagaagatttaacacgatgattatttgagtcacaggtgggtgaagtaggagagctcagtgagatattcca

SEQ ID NO: 89062 - DNA, 753 bp, Citrus clementina
  Intron number 1 from transcript clementine0.9_015060m (loc us clementine0.9_015060m.g) derived from phytozome v7.0 (c hr-ID scaffold_70; pos 249827 to 250579)
tgtctgttctctgtcccttgctgaagctcttctctgtaagtatgaatgaattctctgtcgaatataaacggtgaaaattggaacttttatcactggtcttctgaattcttctatttattcttgtttactcgtttaagtattgaaaattgaactgattctagttgttgacatgcttgaacatttgactgaaagttagcaaggttcttaattttacgtctatcttatctaagagttcaggtagtagggttgattgaagtgaatacgttagaacttgtatgtgtgcaagtgctgatgattctgcttaattttgaaagcacaacagcgttgggtaagtgcgtaaatttacttggtagctaatgcttaccaactatccgcccacttgtattcggtagcttatgatatcaggggcttcattgtgcatacacttaatatgcctcttaatacgaataaactgtatgacaataactagtcatgaatgaacaatactaaagctgtttctattttcatatgatttttttctcatttgatattctcaagaaggatactcttattcgtccaaagttggtcgatcaattgtgttaataagttttatgcttatattttccaattaaacattttcaagaatattagtaaacattagtagttttggatgacatattagggtatgatattagtagtttgatgatttttttccttcacttcactagtgtgttcgtgttacattgcagggaggagatccttctcgtgagcgaa

SEQ ID NO: 89063 - DNA, 592 bp, Citrus clementina
  Intron number 1 from transcript clementine0.9_018744m (loc us clementine0.9_018781m.g) derived from phytozome v7.0 (c hr-ID scaffold_39; pos 942441 to 943032 reverse strand)
gtggtgcctgagccagaatctttacccaaatttaggtaattttactaatcaaatctacaaactaatgagcattccagatttttctgcttgttcttttttgtttttgtttttgttttctctctctctctctctctctgtacatttgaagcccatggtcggtcatctttcccccactcgaagcttggattctcttcggtggttgttgagtggtttcaacatcgaaggtcctgcctcattagcttttatatttcttgtgaagaatctccatctgggtgttctttggattgctcaaagagttgcatttttgttatgttgtactcaaaccattaaacttttgtcctttgaaatttgactgagtctagggttttgttctgcttattagtcttgaatatcaagtgttcttagctaagcatatattcttgaattatcatatcatttgcaatcacagaatcctacttttggtattgaaatgagaattctttgattcggttccatgtaagtatcattagttattcttggtccaataagtgagattttggtgttgcagataaactgctgcttgtgtagctgcatatagtttttgtttgtagtt

SEQ ID NO: 89064 - DNA, 885 bp, Citrus clementina
  Intron number 1 from transcript clementine0.9_015103m (loc us clementine0.9_015071m.g) derived from phytozome v7.0 (c hr-ID scaffold_91; pos 767364 to 768248)
gaaccagccccccaatcaccgttcaaaagattagggtaaactggtctcgttgatgaaattcttaagtcttttggacggtaaatggggttaggtcgacgtttcaataaaatttgagggtgcattcaaggttttcattttatcaggagtaatttaaaattgaacttaattgaaaacataacataaaaatttcatcataatttttttttaaaagaaatttcatcataattaagtgaactcaatagactagaatgcatacagtgaaagacgaacttagaggattgacatgctgcctgattctcgcatgacccagctcctgcaacaacaacaattaaaacccaataaaggaaagcagggtaaaatttggaaagtaatgaaaaaaataaaataataccccagtaattttgttagagacagggaggttaagctcagcaaattccaaagcaacgaggtcggtgcttctgatttctttgctggtattacaagaagcagaagcagctgatgctgtgtttctgtataagcaacggtgatgacgacgacgacgacaaaggaatgtagaagacggttttgatataagagcttttgcagttctgtgaaaaccagcgaaaccagcggctgactggtagtagcagtagtgtaagcaaaggtgagaagcacccattttcgctgattttgcaccgcggtgcaaccgtgcagagacactactggaacctacttgcaggttaaaatggaaactgacccgtatggatgacattgggctgctacgagcccactggtttggcccggcgtcttaaacaaaaatgtaaaattattattatttctttttaaataaaaattaaactgaaaaaaactgatggtccatatgaagttagttactatgtcaaagat

SEQ ID NO: 89065 - DNA, 647 bp, Citrus clementina
  Intron number 1 from transcript clementine0.9_028976m (loc us clementine0.9_028976m.g) derived from phytozome v7.0 (c hr-ID scaffold_56; pos 846435 to 847081)
actttgggactcccacgcaccctccatacgccttggtaagtgttttttttttctttctctgtttgatttttttcaagttaaattttgatttttttctgattctggatagccaattttgcttttgattttttgtagcatgcaactagatcagttatttctaattcgaaaaaattgtgtctttaacatgttaaggatgtttgatttctgtctttcattttggtttcattttagaaagtaatgcactttcaaaatgcttagtttacattttttttttcatctgaatatagctcgttcgcagacactaaaaaaaaggaattattttcggagtgcaaaaagtgtaggttgattgtgctgttactatgtgcctttggtggctactgtggctagaagatttttcatttggatttttctgctgcaacagaagaattatttctaaatgatattcatgtataagctaaatgagggtcattctttatcaacatttgacaaaagatataatttaatacgataagtaacgtttggtttcaataacttctacactgtgaatgtattgctttaaaatttggaataaaaccagaaaacataaaatgaaactcaaattatggttgttaaatttctaatttgcccatatttggtgggtttggtag

SEQ ID NO: 89066 - DNA, 780 bp, Citrus clementina
  Intron number 2 from transcript clementine0.9_017026m (loc us clementine0.9_015369m.g) derived from phytozome v7.0 (c hr-ID scaffold_52; pos 1178081 to 1178860 reverse strand)
aagctcatagtgctggagtcaaagttgtcccccaagtgagtcttgtcttctctaccataccatagtgactttattaattattacaaatgttttaattcaggcacaatgacatagttagctacaccaatacacaaatataaatggaaaatctagctattagacaacaccatatggcagtgcccactagatcattgctcattataaatacggacttgaaactacatatgattgtcaccttgatattcttttgaattacaaatatttttccattggaggttgggagttttgacgaagcaagaaaagcagttaacgcaggtgtagatgcaattatagtccaaggacgtgaagctgggggccatgtaattggacaggtatgatttgtttgttgtttgaaaaggatgattgcacttgcaaattgaaatttttgtttggattttatagcttcttaattccattaagaaattatattccatatattttgtttgagattaaagaaacaaatggccatttgtctgtgactaataaaagcaactatagatgagtaatgatgaagcaactaggaatcaacaataaaactcagttattctctcattagcaggaatggtcattcttctttccctgtgacggaaactattattatccatagatctaacctattacttggtttgtaatttcatgcactagtctgttgatgatgtgagtagctattacctgtttcaagtagcagatgaacagtgttgacctctgtatctttgttgtttgcatttgatcatgcatagg

SEQ ID NO: 89067 - DNA, 732 bp, Citrus clementina
  Intron number 1 from transcript clementine0.9_035990m (loc us clementine0.9_035990m.g) derived from phytozome v7.0 (c hr-ID scaffold_11; pos 3249881 to 3250612 reverse strand)
gtggccaataaatctggttgggaattgaaggataggtaatcatttttactctcaattattattttttttttgttgttgttcggcatgataagtaagcacaaaaaaaattttagtattcatgattcaacattgttttcaattaaacagcttctgtttaatacgtgtatatcatatgatgtgtcgttattaaaatagtagtgcaataaatgaactaatatttgcaaatgaatagctatagacgttgatacgttaaattattgtattttgaacttttgaagacggtacatttgtatcttgtgatgctttgtgctctgttaatcagttggttcttgagataaaataattattgaatcttctaaagaattattaactacctaatgaatgccacataatttaggatgtctatcatcatcaactaattgatttcatgtgtgtaataaatgttcttatcaaaaattgatataaattctcttttaatctaatttacctaattatagaaagaaataatatgtacatgagaagaaaacagcagaagaaattgaattttctcattctagttttttctgacccacgtaataataacatgttacttgattatgtgacttctatttgatgaaacgaatattgtgtggtttggattttataaataatatggaattgatcttttacttcgttcacacaaactttaatttaacaatagcaatttcttcttgttgttttcaatctacagca

SEQ ID NO: 89068 - DNA, 554 bp, Citrus clementina
  Intron number 1 from transcript clementine0.9_029892m (loc us clementine0.9_029892m.g) derived from phytozome v7.0 (c hr-ID scaffold_57; pos 163313 to 163866)
tcaccaggtaatacttaatcttttaactctttcagcacgtgacaataattaggttttaattgatttgcagaaaactcttggacgtttattgttttagtccatttttggttatgccgtagtggagttaaaacattgaggttggttttgatgaagaaggttgttggttcgtccctaaattggtctgggatgaactagataggattaaactttaaaagaaagaaggaatttagagatgatgctggaaattgccggcgataacactccgacggtcaagttatataagtggatagcgtgtgttaatccttgattagcccttttttaatagatcaatggacagtggtggatctagacacttaaattagggagacttaattcaaaaaattttaatttaatttaggtttttttactgctcatttgaatagatttaaagtttcaaaaactcaaattatattattttcttttaaattaaaaaaacaataaattatttatttaaatgctataacttatcatgaccacatttgtgaactttatatgactattgagatttgaattat

SEQ ID NO: 89069 - DNA, 869 bp, Citrus clementina; identical to SEQ ID NO: 88359
  Intron number 1 from transcript clementine0.9_005012m (loc us clementine0.9_005012m.g) derived from phytozome v7.0 (c hr-ID scaffold_11; pos 3869916 to 3870784 reverse strand)

SEQ ID NO: 89070 - DNA, 443 bp, Citrus clementina
  Intron number 1 from transcript clementine0.9_017758m (loc us clementine0.9_017739m.g) derived from phytozome v7.0 (c hr-ID scaffold_69; pos 1085374 to 1085816)
ttccaacttgtttggttggtgagaaaatgtaggaaaacaaatgaaaatcactgaaatttgacctgttacacttcatttttgatgttttgagaattcgtcatcctgtttggttgttgaaaaattaaagaaagtgaaagacaatctttgagctggtcaactaataatgtttgtcttgactcaaaattaatgtatataataaaacaattttgaaaactttgtctgtttttgttttttaatttgattagaaataatgaaaccctaagacttcttactatttttttgtaaaaaagagaaataagatttaaagccaaaagttagaaaagaaagttaaaacttaagaatgctgtcattctttggctctttttgttgtatttgcttttagaaattggtaagaagttcaatggaccaatgtatgtttatgattaatttttcgtgcagcatac

SEQ ID NO: 89071 - DNA, 512 bp, Citrus clementina
  Intron number 4 from transcript clementine0.9_021191m (loc us clementine0.9_021191m.g) derived from phytozome v7.0 (c hr-ID scaffold_35; pos 1120406 to 1120917 reverse strand)
gaggtattttactttcttcaacttttttatgttatttgattcttttaattggcaaataccacataagtaaaattctgtttctgctatgatctttactgtgtttatattgtaaagtgagctagtgcactttatgcagcgtgttattgttgttatcgtctaataatttggattggcagtagaagttgatattaaactcttttaacgatttgcctgtccaatttgattgagcggtaatacatttttgtaacctgaaaataattcatgtaaagaatcctgactactaagtggatttcgagctattgctcattgtacgagggtgattaaacgattagtagtgttttctgcttcactgaaaaacccttatatcatctgaaaaaggggaggaaaaaagataaaaaacacaagttccagcaattttatggattcttgaactgacgatactgattcatctaattgatgctctttgtttctttgtaggtggagtaccttcccatctcgtcaattgagaaatc

SEQ ID NO: 89072 - DNA, 561 bp, Citrus clementina
  Intron number 2 from transcript clementine0.9_017270m (loc us clementine0.9_011657m.g) derived from phytozome v7.0 (c hr-ID scaffold_8; pos 2934137 to 2934697)
ctgatttgggcataaaagccctctcttttgatcaggtttgatttcattttccttttgatcttttctaagtatgtgggtcattttgattatgaggtatgtaatctatttgttcgttcttaatacgaagaaagttgaagcacccaaacacccagtttgaggattggtcaatcgaataacaatcttcatattcttttatgtttttagtttttttatttttgggtgggatttgggattggtttcaataatatagtgtgtcttatgtgtattgtgtatcatcacacttgagaaattgagtgttagctggactggttccgacccttttttgttttcttgcttatgtgtcctaaagggtgaaaataatataaattccatgacactcacatgagtattgtttgacattgattgagtgatatcagttctgtgaagcaggtaaattgtttcttaattgagtttaagtggctatttctgtttatggcaggttattaacttgatttgttgttgagataagggtttttccactttgcaggttttgggatcatttttcttttttcactcgctgag

SEQ ID NO: 89073 - DNA, 511 bp, Citrus clementina; identical to SEQ ID NO: 80717
  Intron number 1 from transcript clementine0.9_018400m (loc us clementine0.9_017608m.g) derived from phytozome v7.0 (c hr-ID scaffold_16; pos 2507014 to 2507524)

SEQ ID NO: 89074 - DNA, 941 bp, Citrus clementina
  Intron number 2 from transcript clementine0.9_030773m (loc us clementine0.9_030773m.g) derived from phytozome v7.0 (c hr-ID scaffold_60; pos 441651 to 442591 reverse strand)
ctggctaatatctctaatactgaaacaaatattaggtattcattttcttttaatgaattaatgtcactggattttccatttttgcttctatgatgtgatcctaaaactctagttgctcaggtgcaacctgtctcgtcatgattttgttttcctggcagaaagcttttatttttaactttggagccattgtgacatttgctatttttggaaccgttttagcttcaatggtcacgagtataccagttagtgtcctctttctattgtgctcttcattttctttttgggctcgctttaattgttaaaagtttgttttacatgctgactaagaagctaactgtatgattgcccacctcagattaggaagggtatgtagacgatctttttaagatgggtggtatttccatgttgattgggcttaccaataacctgcattttctatttagtttagataaagatttgagagttttatgtcttatatactggaaacaaatatatatacttttatttttcttttcatttgttttctttatatttttattgtactgaaaacatttgaagtggttgatatgtgaaattcaaaattatcaatggtttacaatttcaagaatttgtaactttgaattctatttattattatgtaattcaaaactcttcctcagtgttgtttctagatttatctgggataagataaaaggagaagggagaactggttactaaattacatagtagttgccttctattaatttgattgtgcatatccacttcctattttgtttgatcttgttctaaataatatgatatcttattctaagaaattttgctagaaaaagcaaataggatatttgccttatttggtgacgctatccaacttgattgtgtgacttaaatacatatttaattttgtaggtttcaagagctggatccttctgtaactggacttg

SEQ ID NO: 89075 - DNA, 673 bp, Citrus clementina
  Intron number 3 from transcript clementine0.9_030420m (loc us clementine0.9_030420m.g) derived from phytozome v7.0 (c hr-ID scaffold_61; pos 785490 to 786162)
tcgcctagaaagaaaaacttgtgataaaaagcttggtgtttcaactactgataaacatcaatcaagtcaagattttgcttctagttctagcatcaatgttgtggaagatatgtctctagaatctgctcaaccaccagatcgacatttggtttctaaaacaactcaaattgtagaaaatataaatttgaagaatcatctacaaccaagtgagaatttgttttcttgtaatgaagactcagcagctaccactagtttggattcgggattatcaccgagtgactgtttgattcattattctggaaatcatgttgcagaaaatacttctacaggattgcagctagtaccacatgacgttttggagtcactgagactaccagatgagcaatgggctctggaacaagaatcgtcatattctaatggtcctagttttggtggtgatttattgaattctcaatttgacagtgggcaggcaattgctttctctgagtcgcagcaactaccaaaccacttgatctcttgttctagaaatcatgttgcagaaaatacttctacaggattgcagctagtactgcatcccgttttggagtcatggagatcaccagatgagcaacgggctacttattctattgatgttgtagagaattctttcgaggtagaacctcgaattcctgca

SEQ ID NO: 89076 - DNA, 678 bp, Citrus clementina
  Intron number 2 from transcript clementine0.9_004515m (loc us clementine0.9_004515m.g) derived from phytozome v7.0 (c hr-ID scaffold_21; pos 1235150 to 1235827)
tggagaccaatttccaaaaggtatgctagcccctttttatttgtatatttttttagaaaaaatcatgaactgattaatgtggagaagattattttttcttaatctttatttttgtttttttgctatataggcttagagtcaaattttgaaaatattatgaaataaaaacaccttttcttattgttttatcgatatttggccatattagcgtgccttctcactacttcagcaataattgatcatacaattggataagtgctcttccagtagtgttgaggcatatcaggggaaacgattgttgtgtcactatgtgtttgacatatcaatagttgactggcattgtatttctaacaagtttgagactctcatcttctcaaacatgattgttcaatgcacggacacatcacttaatcatgcctatggttcagtagtcaccttcgctactcttttgcttttgctgagacgtgtttccttttacatgtcttgttggcatgtttgcatccttgaaacatttgagtatgtctgagaagatgagttttaaacctgtttaaaatataataatacaaatgctatcaaaaactagtcctgcactctttatgtgttacatgcttgaaattttgtactacatttcctttttttataggcaagttgcactcttgaagctggagttaagattta

SEQ ID NO: 89077 - DNA, 487 bp, Citrus clementina
  Intron number 4 from transcript clementine0.9_011902m (loc us clementine0.9_011895m.g) derived from phytozome v7.0 (c hr-ID scaffold_87; pos 525425 to 525911)
cttttcttccaggtatatatctttctctttactcttatagtacaataatgtgattgtttccctttatttttttcataattttctcttgacacgtcattggagctatagtggcaaaatcaaaggaatttttcaaggaacctgatttcgttctagcttgtggttgtgattggatttttgtattcttaaatctgggtttcagttactggaggaatttattatgaacttcgagtgtaggaataggagagagatcatagaagggcataggtgtcagagagggagagatgagggattttgtcttcgatagcttattcaaattcttcattgacttgtgttaatggaaattcttaaattgacttgttttaatgggaactctttctcagtttatgtctttatcttattttattctgcatcagcatcctgatttcttattaaggttttggctaatgtttcaggctaggcaccagaaggttggagaaaaacctcttct

SEQ ID NO: 89078 - DNA, 403 bp, Citrus clementina
  Intron number 1 from transcript clementine0.9_030080m (loc us clementine0.9_030080m.g) derived from phytozome v7.0 (c hr-ID scaffold_35; pos 207507 to 207909 reverse strand)
tattgaaacagagattgtcctctctgttcttgattgtttttattactgttttttgcgtttttatgttgagtttacaaattaaggaaaaaaagacaccaacacacctatggcttggcaagatatagtcacagtgatctttttattttgaaaaatcgtcacatagactcatagatctcttttacgacaattattgttatttgattataataaccagactaaattttatccgaaaaaaaattatctatgtgacagtttctaaacataagggtatgtctatgactataactatttcgtcaaatcatgagagtgttgccattttcttcagtgttgttaagtgtttttgctttctaggtattttgttttgtaaggaagttcaagttttggtctgcaggaaaacgcagcg

SEQ ID NO: 89079 - DNA, 808 bp, Citrus clementina
  Intron number 1 from transcript clementine0.9_001010m (loc us clementine0.9_001010m.g) derived from phytozome v7.0 (c hr-ID scaffold_64; pos 1285958 to 1286765)
catcaagtattggtcctggccatttagtaggtacttttgctaattctgcttcaatgtttggctgcctttccaaattgctatattcagtaagaggttctctagtttgccatgacatattttccatgtttgcaattttttttttttttcgtttttggacttcttctgtaaagttttctggaaataaactctgcctatttactttattcctctggagctgggattactaagaatagagttttgtaagttttgataaggttcggtaaactttggcattataataaacctgtttcagaagtttataacttacagttttgctggtcgggaggtttattaaaaaaaaaaaaaaaaattctttgctgttggtttattttctcaacatcttgtaaacacaatgctctttcaagttttagcatatggagccaagaaaattattgtgagttattttcaaagtggacattaaaagactaatttggtagaattaaaaattatcatgaaaggaggggaagcaagctaaggaaacaaggaggaagcattttgctgatgctaaatgaaaacaaagaacacctgcaataataatacaagaaaaacaagaagatatcaaaatatccttttttttttccccctatagattttcaaattttctgagttgtaaacatatgtaacaatattttttttttacctctttgagattacaaaaagagcattatcatgcatggaatctttgaagctgtccagtaaaaataagcaagttcttactgctctttccaaattcttgaacttgcagactagaaaatatatcattttgcta

SEQ ID NO: 89080 - DNA, 809 bp, Citrus clementina
  Intron number 2 from transcript clementine0.9_032941m (loc us clementine0.9_032941m.g) derived from phytozome v7.0 (c hr-ID scaffold_12; pos 4385039 to 4385847 reverse strand)
cgatttgaactttcgaatcagagataagaagattagtgagcaaaacttgagaaataattctatatcttctggtatcattttcaaaatccgtcctctgaatttatttaatatcttgaatacttaatcatgtttccgttttgttgccttacatcgttccttttccaattttaggagacagaaagattgatgtaaagaagaaaaaagcacagctaagtccatcacaaaaatttattagaggttagtttaaatatatatatgcctaatttgattgatgcaaggcagcatttgtttgtgaatacagattgatgtatttctgcatattgaattgatgagtgataataattaatttaggttggattataattaatatgttgacaagtcattcataaaaggtaacctcatatgtgacatgcagagacctctacgcctaatgctggttattgagcattcagtatagtagtcttataaatgttgtttgtatttcagatttcaagaagagggaactgcataagtatggaacaccaaggagtagtccggagactacaaaatctgaaacaacaggtcagttattgccttactgcttgtgcctcttaataaatgtaggacattttttccaacttgttaaattatatgctcgttgtttattttccgtggatctgatgatatagagaattgctttaatgagtcagtgctgaattattgcatctcacatgttatattatctctcacgggtgttttacaacttccacttatgtccagttaccttcgttttctacagtttggttaacatgtcatttcactagtgcaga

SEQ ID NO: 89081 - DNA, 464 bp, Citrus clementina
  Intron number 1 from transcript clementine0.9_006828m (loc us clementine0.9_006828m.g) derived from phytozome v7.0 (c hr-ID scaffold_8; pos 3970113 to 3970576 reverse strand)
ccctcatagactcgccccattatcggtaatctattctattgttccttttgatctctgtaattttgtgatcgagctgaaacatagaagataaaattgtaatttgctcattttttatttaattttcgatattatagtggtaatggaagaagtaatatctgttgttgtatcttattttctttttaagaaatgaaatttgaatggaggtttttctaggatctagagtgaaggatatgaaatctaatttacaaattcatatcttgttctgttcttgatcagtttatccaaggaaagcctcacattagtcacatgaatgaccaattttttgtcgttttcgatatagaatccgaaattgggagctgtttgtttgaccattgatgtttaatcttggtagctaagttgggaattatgtttcttagatcatgtgattgatgggttccttaaaattttataggaagggcggatcg

SEQ ID NO: 89082 - DNA, 596 bp, Citrus clementina
  Intron number 1 from transcript clementine0.9_023424m (loc us clementine0.9_023424m.g) derived from phytozome v7.0 (c hr-ID scaffold_112; pos 296187 to 296782)
tccaccagtgattttcacgaagccaccgctttttggtaaccatattagcttctgggttcttctatcttttacggaaagccattttattttattttttattttttgggtttaaagtaattttagaaaaaggggtttcttttaccagaatcagattaggtgaaaatttctatttaagtgaaaattaaagggttttggaaacaattgggaagtgacagagaaattcaatttgattattacatttagtgcacttttcagtagacggctgaattacgctaacagcaagaaaagatcagcagctgagattgaataaggagattgcctaaattttatagcttcttctctaatatagtttcactattgtggcaaaagcacctcagcattgaagttgagcttatcttacaaatacacatcttatttttttaaatgttctgttgcctaaaatgcttggcctgtaaagttagtttgaatataagccagttatttcttgcattaaaatttatcctctctatttgaagccatagcatgaatatgacaatgtttttattcatttctctgtttcagctacctagttcttgctctaggcttgcaaagtttgt

SEQ ID NO: 89083 - DNA, 507 bp, Citrus clementina; identical to SEQ ID NO: 81909
  Intron number 3 from transcript clementine0.9_028095m (loc us clementine0.9_028095m.g) derived from phytozome v7.0 (c hr-ID scaffold_99; pos 257516 to 258022 reverse strand)

SEQ ID NO: 89084 - DNA, 760 bp, Citrus clementina
  Intron number 1 from transcript clementine0.9_004866m (loc us clementine0.9_004866m.g) derived from phytozome v7.0 (c hr-ID scaffold_68; pos 939184 to 939943 reverse strand)
ggatcttggttattgtgggataactacaattcaaggtatacaacaattcacttccttcaatgacaaaaattgttttagatgttaatcaagatgataatgtatttctatttttttaattgcttttttcacattttaaagtttactcaaagtgcaaactaatttaagaattatgattcagatactccaaatctaagtaatgctaaaagggacggtagatattaaaatatcaatagaaacaaaaaataactcttcatgtcatattagttattcatgaacatcattgagaaaatttatgtctcataatacagtgctaaaaaatctcattggttttgtatggaagaaatcctttttttttttcttttaaatagaagaaacaggtttgataataaaaataaataaaaactaaagaatggggtttacactaataagttttaataagggtatttttgtcattgaaggtggtgttaaaacaattttataataattttaaatattttaatgggattaataaagaaaatgggtgttaagaggtatttagaggggtgccaatagttccactcttatttgaaatgctttagaaataaacaccataatatacgagaatcatacaaattgattcctatgaataattttacagggttttagtgtttttttttttttgataaatcatacgggttttgactaaattcactaaaattagaaaatcacaaagtcattctttctatgaattttgaactttttattttttactttcaggatt

SEQ ID NO: 89085 - DNA, 663 bp, Citrus clementina
  Intron number 1 from transcript clementine0.9_002089m (loc us clementine0.9_002089m.g) derived from phytozome v7.0 (c hr-ID scaffold_8; pos 4697385 to 4698047 reverse strand)
gaagctcgtatgtttttccttcactaattttggtttatacctacaaagttacccttatatttctatctattcgtttaaagatgaggcattaatcaaacccttaagctcttaaaagcaagtagaagcaaagtagttacttatatgttaataaaactattgtgatttgtttagcaaatagctcgagaggattaggaagttactttagtttgttgactgtatttgctcatgagtgggatgattgctatggtgctgtttgattatgtgttacttttgctgacatctgattgtgctgttccataatcgtctgtttgatgatactagaggaattgaagtgattatgttcttgattttggatgtgtattggagtgctagggatttggctttttgtttaacagtgagtttgattatgtcaaaccttaatacattattgatgtgggaggttgacaggatgcagttgcttttagataagttgtttcaccgtctgtttatttatttcaacagtttgcttgtcctctaggtcactgtatcaggattgttttcattgttaatcttctgtattttttgggtggttaatgttgtttgaattactaattacagcactcatgcttgctttcacttattttctttgctgattactttaaaaatacgcttcctgttcaaggt

SEQ ID NO: 89086 - DNA, 648 bp, Citrus clementina
  Intron number 2 from transcript clementine0.9_025264m (loc us clementine0.9_025264m.g) derived from phytozome v7.0 (c hr-ID scaffold_81; pos 288718 to 289365)
aatcttctgttagatcagctgatttatcttttcaggtattacattttggattcttgatgattcttcaatatttttcattatgtttaattaatgaattaaattaactaatgatcttacaatataatcataatcgtttcatgtctgtggaatactatcaaagatgtacttattctctttccccatcgtcatcattcaaagttgaataaaatttgatccggttaacatgcgcctgaaaacagcatgaggagagagaggtctctgaccgtctgatgcatcatcgtggtcattattagtaaatcacactagggtttgtggtccacatatcaccaaacattaaacggtgcacgttagcatttaccccatgtattattagaatttataaagtttttataatccgtcaattgtcttttcaatgggtctccgtaacctgcgccatcagtgtcagcggcttaaccgcaaccatgtacacgtacccttcaaaattctttgagaatccagtgaacatggaccatgttaattattaaggagtctactatttttcttaaaaaaatcttattataattattttttactattattactaattttctattatgtaaatggttaatgtgtttgtaggaaattgggaaaataaaagatcaagaagtg

SEQ ID NO: 89087 - DNA, 808 bp, Citrus clementina
  Intron number 2 from transcript clementine0.9_005257m (loc us clementine0.9_005257m.g) derived from phytozome v7.0 (c hr-ID scaffold_70; pos 191093 to 191900 reverse strand)
gtggccaataaaactggctgggaattgaaggataggtactcattcttgttctctattattattattattattattttgcatgcctagcgactacaaaacagattttagttttcatgattcaacattgtttcaattaagcagcttctatttaatacgtatatatatcatatgatatgtcgttataaaaacagtagtactataaatgaattaatatttctgcaaatgaagagacatggacgttgatacgttaaattattgtattctgaacctttgaagactatatattgatttgatgctttatgctctattaatcatattttttaaaaaatacataaataaaactttattcttagattgactcttgagctagattgctaaatactaataataacatcaatcgcaacaccaatgatattcaataccattacatatttagctaatctaattaatttcatatgtgtaataaatgatcttatcaaaaattgatctaaattctctttcaatctaatttgtcgggctatagaaagaaataatgtatcaataatgattgggaaaaaaaaaactgcagaagatattaaataaatttcgcaccctcaatttttatttggttgggtttgaattttcttattccaatcgtctctgacttgtgtgataataacatattactttggttatatgacttcaatttgatgaaatgaatattgcatagtttggattttatgcataatatggaactgactagttactacgttcacaccaactttaatttaaccacaacaatcttttcttgttatttcaatctgcagca

SEQ ID NO: 89088 - DNA, 897 bp, Citrus clementina
  Intron number 1 from transcript clementine0.9_005257m (loc us clementine0.9_005257m.g) derived from phytozome v7.0 (c hr-ID scaffold_70; pos 192345 to 193241 reverse strand)
cttcattggagaaccaacaggctgtaagttttatcttgtacatttctcttctactttccgagttaatttacatatcctgtatgtttaaaaattgaagcaaagcttgaatgttaattttgtataaactctttggctttaattaagatttgcttagatagaggtcggggcgcacactctcttatatatcagcatctgaaaaaaatttctaattacatttcgggatttattaggtataatgttttcttacggggggaaaaaaattaagtaagaagctgcggatcagttttttactttttaagaagaggatcactaataaatttaatttcgaaaccagaagcattctcatgttaactttttatactagtaaatatcttatttattgcaattaagatctatgcacaaagtatttattaaaaaaatatatatatgccaagttctttttgtttatatataatgtcaatgattagtagtaaccttaatgttcttctgaattctttctaaatgatatgaggttctggcacactattttatttaattatataatatcaatttatttatttttctttagctattaataatttattatttacttttattgataatttttttaaaatttttattaagaaagttaagtaataaatttaatggaagtaatggtagaaaatattaaaattaataaataaaaaatattttatttattgtgatgcaacttatgcaatataatatgacgtacgaaacacatcctaaattaattatacaactttgagtctttgacacttgatatatacattttcgtttttttggtgcccatagttttggatgaattttgtcgtttgcattgtattcttcccaagatgtcagtgtcaaatttttcattcagtttcaggaacaaagata

SEQ ID NO: 89089 - DNA, 585 bp, Citrus clementina
  Intron number 1 from transcript clementine0.9_023950m (loc us clementine0.9_023961m.g) derived from phytozome v7.0 (c hr-ID scaffold_16; pos 3206318 to 3206902 reverse strand)
cttttgtgttcttcgcttctcttctatccgtccaggcatgtgaatattgtttttatcgtattatcagctcttattactttttagtacttaacttcggtttattatttgttcaccgtttacttgcttctgggtattatgcttttgggattctttgattcaattctgtagagtttgtacttatgatccctaatctgcgtggttgctagaaaaatttgaaagaaaatttgatctcagtttttgaaattgatgatcatttaatgggtctgcttgcatctcgatttagtttctttgaaaagaattaaaatttgctttattggtatgtgctttctcgagtttaaaattcgaaactttatttttttgcccattagcacgcgtacaaagatttaatattgcttttggctttaatgaggcatgaaaatttgcataattaatcatcctcgccgtcagctatgggcgtgctttagcaaaatttttgttctttaattctttgttcaatctaacggttacctaaatggcatgttttcttctatgaaatggttgttaactacattttgttgtttcacttcaggcatatcgcttctgaaa

SEQ ID NO: 89090 - DNA, 471 bp, Citrus clementina
  Intron number 1 from transcript clementine0.9_012057m (loc us clementine0.9_012057m.g) derived from phytozome v7.0 (c hr-ID scaffold_16; pos 4216859 to 4217329 reverse strand)
cttcagcgctgaaactgacagtcctcttcccagtatcaatacgatcatctctctcctctctcttaatgcttatttgagcttgttatgcgcttgttaccctttctttaatgtgtaatatatatatacacacacacatacatattttagctacttttgattgttgattttgtcttctttagctttctttctttcaacgggaacttgtgactttgattgatgctatgttatgttggttgccaagaaaaaggaggaattagtttaaatgaacatttgggattttgatttttggattatggtcatggatcattattgaacccagaaaaaattatgtctggaacatttaatcagcttaagtgcaatatgaatctattttacaaaattggctttgtttttttaaaaaaaaacttcaattgactattttgtttataaatagctatatatggctttgatatctataggggcaaattcaaa

SEQ ID NO: 89091 - DNA, 820 bp, Citrus clementina
  Intron number 1 from transcript clementine0.9_019638m (loc us clementine0.9_019638m.g) derived from phytozome v7.0 (c hr-ID scaffold_16; pos 2946073 to 2946892 reverse strand)
caacggtaccgtttctcttcttcatttatttatttttgcttttaaaaaaatgttttccctttaattttctaatcgcttttcaagcaagttctggtttttctagtttctcttgaattgaaggaaaaacaattttaacttcaaggcctgtgttatttatgcgtagagtgtatgtatatggcttctgttgctgtattttgcatattagatacggtcattgttaattttagttataggtagacacgctccagactggaactatataccactgattgaatgaagcatggggaaatgccttgtaggttgctgtaggaatagttcaggagcctacaagtcgtactttgagtttattttagtgatcaatcccgtacccatgagtggtttagaaaatagttgtcatctagtctctgttgtaaggtgattaatttgcctgtaaatttgggttgggctacatcttgctattacgccaaaaccgaatgtgtttcggcatgcgtctgacaatgtgtattttcatcttgctttctctaccctgctgtgtcagttgcttattgatcgtaaatggttcttgaatatgtttctaaccttcatgaggatgtaagggttcaaaatgaaatttgaatgttctctttggagtttatctcgtatgtatgttttttaaatgtcattgagcagcagcaatgtgtgtttttagaaactaaaagagcaattttgtttatgatatttcctgtctaattgtgttctagacgtatcttggtgacttttattccctttgattatttacaataatatacttcttcataaaagttgtttgcccattatcagc

SEQ ID NO: 89092 - DNA, 525 bp, Citrus clementina; identical to SEQ ID NO: 78184
  Intron number 3 from transcript clementine0.9_019264m (loc us clementine0.9_019264m.g) derived from phytozome v7.0 (c hr-ID scaffold_16; pos 1886723 to 1887247 reverse strand)

SEQ ID NO: 89093 - DNA, 244 bp, Citrus clementina
  Intron number 3 from transcript clementine0.9_008327m (loc us clementine0.9_008327m.g) derived from phytozome v7.0 (c hr-ID scaffold_39; pos 851522 to 851765)
ggtgaagttattaaagctgccacggaactgccatcgtgagtttcttttgtttaactttttatgtcaccattaatcacagagttcagaccaacaacgtactctatgcgatatgaatatgctatttttttttttcaataactccaatgatttgatacacaaatcaaaaagaaaaagaaaaagaagattaattatattttttggttgtttagttcgccaaagacacccttagagctcgctattgact

SEQ ID NO: 89094 - DNA, 868 bp, Citrus clementina
  Intron number 2 from transcript clementine0.9_010163m (loc us clementine0.9_010163m.g) derived from phytozome v7.0 (c hr-ID scaffold_12; pos 4651790 to 4652657)
caagtttatcagtggtggggccgatatcattgcaggtatgtatgatggtgtatcatcaatatcattcatgatcaatccgacatcactctattggattacgcttgtctagttgtgtatactgtctgtctagattcttaatataaattgctataattaatctgattcttatacacgtgtcgtgatctaaagggtgtgtgaatggtgtcttaggacgttgattgcattggctaataatatatacaagcattaatatgacatctataatacatttcggacatcgaacaggacaacaatttttttttttttttccgccttgttttgtttgtgatttttcctctcgtgaattatatttatggctgtcttattcacttttcagttttctgcgtgcatgccaacagctgttctgcccttattgggggatgtcaaattttaattagccaattcttttggttcttgacaacgatttttcggataagagatatgttcgtacttgtaggatctaaagatgtcgtgtgcggtttttgatcttgtgtttgttttcacttggtatgttaatctctgtgcgcgctttggtcgaatttcgcattcaaattgaaattgaacttgcccaaaaagtaagggcgtttcatttcctgttactgcttatttaataatttggtctcttcacgtgtcccgcatgaaatatgacttgttttattattagtatttaattctctgtttggatttcccacttatttcgttgggaatggaatattcccatctgtcttattgtgctcactttcacaacataagctgaagcaatgatgtaaaatttatgaaattccatgggtcaggtgctgtttgtgggccagcgaaccttgtgaactct

SEQ ID NO: 89095 - DNA, 993 bp, Citrus clementina
  Intron number 2 from transcript clementine0.9_023629m (loc us clementine0.9_022799m.g) derived from phytozome v7.0 (c hr-ID scaffold_56; pos 1236196 to 1237188)
tcaagctggaaagaagctctatcacattgaaagttctattttttccatttttgattgctaattgctgcacttggtggataaatcattgttttcttgttggttagactctagtatactaaaagatggtatcagaagtattttgtaaatgcctgggtctgaaatttagtatattacatttgcccatccctgaggtagttctgtgtttgtttggtagaacatatatgaaacctaggttttcagaacatacatgcaacctagattttcagtaatcagaaacaatgagaaaataattctgcttttcacctgctactgttatggattgttcattcaaggagacatatgattaaaggtgtagtcttatcttttgataaatagttattaaatgtctggaattgtgaacataattactagattgaattgctttatttcataatggcatggaatttatcagaacttgctcatttaaggagttagtcatcgaaaaggtttttgatacaataagctgacctttggaagtctttttgttagctgctaatgagatgtttggagaggatggactggcagcaaatccctgtccaattcagaaaattattattgagataaaaggatcagaaccattgagggtaataactgttctaaatagcagttataaggattcagatggactatttaattcagactcttttcatatcattgcaatatgcctttagctgtgtttcttggatttttataccaattttctatataaagggtatatgtatctacctaatgaaaaagtcacttattaattatgaattttatgcttagtattgtaatgttgtgtctatcaatatggggcaacctcattttacgtaagaattttcattctttaatctgtaaactgtcctaacatcttctgtactcaacttgaagcaactctggaaccaatcttgtttgctagaatattgcttttgtgataacaccctatcataaaccctttgttacagacttgga

SEQ ID NO: 89096 - DNA, 580 bp, Citrus clementina
  Intron number 1 from transcript clementine0.9_009626m (loc us clementine0.9_009643m.g) derived from phytozome v7.0 (c hr-ID scaffold_84; pos 509119 to 509698 reverse strand)
attccactagattcagcatacagcatcattgccaggtaagtgaaattctttttacaaaactctccaagctgaaacagaaattaattttatttgggacgttcagtggaatagccttggcattactttcttcatcttttatggttcattgaactaggttgttatataatcatttaatgcttgttttggtgcattactggaaaaatggaattgactcactgatgcaatgaacacaaagttggaatctgcataaagctaatcgtaattttctggaaaaatttcttcgggcttagagtcctctttgacggcatactatatgtgtgtatgaaatgacttgcgttgaagatattttttgtttaatgtggaggagtttttattaaatgtgcacaaatttatagacattcaagagcacataagcacaaacacttacttcagcccttaaatttgataatcaatagtgtaaacgttttgatttgtgattttcttgcaactcttagtgacttaatttcttcacaatggtggacccatcggaatatctctgattgcagattgaatattctgttgagccctgtaaagccagtga

SEQ ID NO: 89097 - DNA, 957 bp, Citrus clementina
  Intron number 1 from transcript clementine0.9_033473m (loc us clementine0.9_033473m.g) derived from phytozome v7.0 (c hr-ID scaffold_28; pos 1219843 to 1220799)
agtagggttggcaaattgggttggcaaattaagggagtttttttaagcccagacccaagcccattagataagaaatgcaaggagtgggcctaggctaggcccgctgcgagcttaggctgggcttgggcttttacttattttttaaaattttttaaaatttgttgtaaacttgaaatgagttaataataatcaagttgttataattaatattgaattaaagaaaataaatattttaaaataaaataattaataaataaaataaaataaataaaagtttagagatataattttttagtactggattctctgattcaagcactctcttaactaactaacacttaaaacagagtctagtattataattttaagttttttgattcattattgatatatgaattaggaatttaagcttactttgttctaatttttcattatttttaaatttgaatttattattccaaattataaatttattttttcaaaaaaatagaggacatggacttggctcgaacattttttcctaagtccttgtccaggccctcatgtgcgaaactaggacttttttgtcatacctatctatgagccatgtccctaaatgaaattaaccacatcttatattttaagcaagtcattcttttctcctaataagaaaccaggagcaattaatcttccctctttatatgtacaagtggcgcccctcatatacatgtgctagtcagctcaatataacgatatgtcaaaatttcttcccacttcccctttgtagttaagcaacctttgaatattcattgatcacaacacttcataaaccctttaaatgaatcttaaatcattaatcttttttaacttcaaaagtgctttatctattgccttccttttaatttaaggtcttgtttcatagctattgcaacgttatcagcagttgttttattgctcatcattagcctggtggcagca

SEQ ID NO: 89098 - DNA, 677 bp, Citrus clementina
  Intron number 3 from transcript clementine0.9_024222m (loc us clementine0.9_023453m.g) derived from phytozome v7.0 (c hr-ID scaffold_8; pos 1208261 to 1208937)
aagctggacctgttcaaatttttgtttcaaatcatgtaagatctctctacttctgatttttcactcaaaggatgggcatgcttttgtttagatcataaaatctcttgattgctttcgagttttttgttttttttctaggagacttaggttttgtagggagggttgcataaataatctgttctcttctttctgtgtctcaacattcagtgactgtttctctgaattctatactccagtatgttagagataagaaggctgaaattacttctctattaatactttttggtgtagtgtggtggtgtttaaatgtttcttgggatccaatatgtttcagccttcctactgaaagtgtagtctaaaatttaaattttgtaaatggtttaactgtattttcacatatctaacctgcccgtttggttatataaaagaagaaatccaagtttcatcgtctaagtttgcggcattcgtttttttgggatttaaatttacatcattcattttggttttatgtgtttatgatgtaaatagtaagttatgcttcatttggtgtcttatcaattactttctttcatttggatttttctcggcttatgtggttactttttcacagttcattcggtacaatatgttctgacttttgatttgttggcatttctatttgttttagttgataccgg

SEQ ID NO: 89099 - DNA, 631 bp, Citrus clementina
  Intron number 5 from transcript clementine0.9_023346m (loc us clementine0.9_019588m.g) derived from phytozome v7.0 (c hr-ID scaffold_12; pos 2353691 to 2354321)
aacctgtaagtcttcatatccattgtgttggtatgtttatttcagaaacttgggtttaccaagaaaaattgttggtaatcccgtcttgttcttttttttttcaattttttttttttaaatgggaagcatggtatttgcagattgccaaaatagctgattttgtttatagtgtttgggctaagtatcgtcttcaaatcacaggtaaattcatgcattataaggaattttctcattagagtttctgagttgtttttatgttctttggcttgcacggccaagtatgatgctataggtgcagagtcattggtttgctgcagtagcatgagttattttctgaatcactttctgtaacttatttaatcaaacatcaccagtttgtatctcaattgaccttcaatagactggatcagtatcattcagtttccactgcatataatattcagcttgccctatcttaacagcatgatttctcctattactagtctgagaaactccaacagaaaatcttggttaaacctatggtttctgggattgattctgtttccttcattaaaattcttataattccttatgccgctggcctattttggttttaggtcgccctcctttagaagaaattttggaagcacga

SEQ ID NO: 89100 - DNA, 323 bp, Citrus clementina
  Intron number 1 from transcript clementine0.9_009148m (loc us clementine0.9_009148m.g) derived from phytozome v7.0 (c hr-ID scaffold_16; pos 4129210 to 4129532)
agctcccacggaaagtgcccaagactccacataaggtcagtgagcctgatttgattctgtggccgcaatttctttttccccttttcttaggttgcattgaagatacgagatagagcaggaaacaatttttatgtttatttcaatggtcaatatttaagcatcattcatgtaggcagtggcattttggtcctttgctacacattgtgtagaaatgcagtcattcttttgacaaattgatttgagcattgcgtaggagttatagagatatctagacagctttgtgctgatggggtaaaagttttaatgatggctgcaggttctgg

SEQ ID NO: 89101 - DNA, 869 bp, Citrus clementina
  Intron number 1 from transcript clementine0.9_034418m (loc us clementine0.9_034418m.g) derived from phytozome v7.0 (c hr-ID scaffold_16; pos 582726 to 583594 reverse strand)
tcttcggtgctagcaatatcatcaagttcttgcaggtatgcacttcttttgtatgtgataaattcaaactaattaaatgtccaaccattttttttctaattgggagaaaaaaaaaacttgttaattgttttattttcatcaattagttgtgtgattagactttggagtggttgattgttccactcttttttggaaacttacggacttctctaatcaaaagaaaagagagtgtgacatttcaactgatttcatgcaactttaatgtttgttttcaattcactttctttaatttaaatagagtagattattcaaatggatcctttttatttctccttataaaggaatcatcatcactcttccttgacggggcactggcgcagggtcaatctgcctcgtatacaagttttacaaagcttaaattttgcccctttctagaaaatattgtgaattttacaaagtcaaacaatgagtatgaacttagcacatgggtccacattagaaaccaattccatgccccagcagcttaatatcataaagttagcacatggcccgttaagacttaagctttgacagaatccagcgctcagagaacggtttaaaatgtttctcatttagactagacttgcaaattaaaattaaaatatttcagtcattttattttattaaaatgtaagggagggtaaatcccaaattaatttttcgcctcccatcttctcaagattcaaattctggtggtcagacaataaaattgtttgaaaacgatttgaagcagccttggggctgaaaatttcagtcatccatatttgcacacaaacaatgtctcatgccattaaaaattttccaggaactgccagaatctcaacgagcag

SEQ ID NO: 89102 - DNA, 950 bp, Citrus clementina
  Intron number 2 from transcript clementine0.9_005910m (loc us clementine0.9_005910m.g) derived from phytozome v7.0 (c hr-ID scaffold_21; pos 3813905 to 3814854)
ggttggttacttgcaaatcttgtcttgaatttggatggcatggctgttctaattgattgaaatgatattttggcttctcatttggtctttggttagataaattgatatctctatatcagcatccagttcggtagttgatggagttcacttgtcaaaattgcagtgatagttgcatagaaattaagaactgatactacccttcggtgtcatcaaagttgtgaagattactgatcttttctaaacattggttttagaccaccctgtaattctttccctaacaagtgcaatttttgctgtttgctgagttaaattaatgattgaaggagactgattggcatgtaacttgttcccggagatagctgtttcttcctgtctgagagaatgttgaatccaaatgtcaaactgattggcaattgacttaagatgatggatccctaatcaaatgaatttgctaaaatctagctttgaatatgctattttgtgggattataatagttaatgcataacttctaagtaacacattttgaaggtttgaagaaagtaattaaaataatggcattggagatatgtggaacttctcttctacgtctgatggaaataaaatagggaaagaagagctgtcattgaaattaactagggttgaaaatatggaaaatggtattggtgaatttacattttcatgttattttggatcaatggatgagcattatagttccgtctatctgatagaaggaatgctccagagaagggttctctgattatggataattatttaaagtgatatgatgagatgatttgtcttgcgaaatggaagttggatgcataagcttgtgaacaatgattttcaatctgtattaagcaggatttcaattctttattttattttattttatttttcgtgtaatggatcatcaggtgaaggaaatatcaaattaccacaatccaacagc

SEQ ID NO: 89103 - DNA, 817 bp, Citrus clementina
  Intron number 1 from transcript clementine0.9_009280m (loc us clementine0.9_009280m.g) derived from phytozome v7.0 (c hr-ID scaffold_11; pos 76067 to 76883)
gatactggctcaaagcccttggattacgctgtaaggtgagtatcttaagctttctttcaaagcttcttcttcgcattttcgaaaacgggttttctgcgaatgaagtgaaatatcgcacaaggatccaaaataaatggaccaacgaagcactgccgggtcgatggcccttgacccgagatttatattgcgataaagatgatttttctttttcccctttcagctgctaatttctctatgttaatgcatgttaatttatgctctgtaagtgtgatttgaaacggctcttcatcgcagaagtaatattgtttttttactttttattttcctttcttctgttttgatcttcttttcgatatacttcggttagtttgttctatattataatattactagggcagaagctttagtctttgatctttgtgctcattgcttgttctgattcttttttccagcttatattgatgtgaattgatatgattacaaagtagatttaggtttagaggtggaattgttttatatttttcttttatataagattatctaggtcatttgtggtccattgaaaacctgtaaagcatggttctggttcaaagaatcagcatcgccaatagaccaacagaaaaagaaaacagaaacgccagataactttaatatcagagatcttgtcctaacctcaatatacaaaacttttgttgtataatttaatttgtgctgctattcttttcttttcaattataaatgggctattattaatgttgttgtcattgtcgtaatcatcattttgtggttttaatgcatgttttaggattgtatttga

SEQ ID NO: 89104 - DNA, 515 bp, Citrus clementina
  Intron number 2 from transcript clementine0.9_008313m (loc us clementine0.9_008313m.g) derived from phytozome v7.0 (c hr-ID scaffold_60; pos 732682 to 733196)
ggctgctctttgcagtgattcatattggtaagttttaggctagttttcatttatttatttttgtaccttggcaatcaaatgctgttctttggtctctctttcttttctttttagtcagtttttaatcattttcttatgtatgtatatataaagaattttcgtagtttgatttggaatctcaattagaatgatgtgaaggtgggcaaaaagaaaaaaaatttgctcaaaaagattccaatgcatgtggtcactggtggaataattggcttttttaactttgtctatattgagttctcgtgttgttcttttttccattggggtaacataatgtgccatcttacaatgaagtgttgtgttaggatacgtcaacttgattacagtattaaatgactctgttcgtggttcgtctaggctttattttgtgttaagatacaccgacttgattatagtattaaattactctgttcgcggtttttctaggctttattttacaaaagtgaagctgggttctcccc

SEQ ID NO: 89105 - DNA, 981 bp, Citrus clementina
  Intron number 1 from transcript clementine0.9_019080m (loc us clementine0.9_019080m.g) derived from phytozome v7.0 (c hr-ID scaffold_79; pos 468608 to 469588)
gtcattagtcataatcctgataacgacactactaggtactgcctctctcttgttttgttacttcaagatattgcctttttttttggtttatttggtatttggtttgattgtatttgtttttctttttcttcgtaagagttttttaatgggtgggttttggtagaattttgtgaccaactattttaactttaattcggtgaatcatgagcttgttcgacgaatggattgtaagcaatttttttaatttattttctggttccttgatatctatgaacaatacaaatggggggttttaatttgaagtgtttgatggtttaattttttaaattttttaatgagtaaattggatggttatattctctttgttccatcggactggtgcttgattgttttgagctggttagctattgaggctttcatcttttgggacctgtaattttggttaataaactttatggttcaagttattcagcagtgggtaatctatcattttgtcttctctaatgtttatctgttttgttgttctgagatgtctggttttgatgagagagattctaatgtgtatatgtatgtatgtattaaggattggattgttcattcaaagtttttggactttgaaataatattggtcgcgtatcatttaagtatgttcttgcgatgtagcaacaattaaattgtattcaggagtggtgagatttgtacgtgtttattttcaactttctgagcttttgaagttggaatttttgaataaatttctttctatagcaacattgtggcttcgacagtgaggcattggctaagttggataaaacccttggcttgaagtttgcagatgagatggtttttaattgtacttcttttggtgtttctgatttttctatttgaattagttgttaaatggcttttaatttgttgatttggatggtgttggtgtatatacggataggattaagctcccatctggtgccaagaagattgtgc

SEQ ID NO: 89106 - DNA, 566 bp, Citrus clementina
  Intron number 6 from transcript clementine0.9_006239m (loc us clementine0.9_006239m.g) derived from phytozome v7.0 (c hr-ID scaffold_87; pos 593608 to 594173 reverse strand)
gtttagtcttcatattcaggtatgggggttgtggtgaggagctttttttttaaaaaaaaagtcaaaacctggcatgtcatactaataggtttttcatgaaaaaggagaacacccttggtgtctgctagttgatgttacagttttctgcaataatgaacgtagttgatcatatgtaactataagacgtagttttatgtgacttctacggggttcctaggtatcactagctactctcggtgtttcgaaagcatgttttaacttttgttttcaagtattttgcaaagcttaaccaaaaaactgtttaaaacctattgatcacaacttgatcaatcagtggtgactaaatagttaaggcgggttattccttgtgcaatggctaccttttgagttattattgtaaataatagttctccaggatctcttctcatttatttcctacatatgcgatgcactagagccacattaactctatgatttaagttttgaagaaaacgtgagtgtttttttcattttggttgaactaatttgcaggaaacaacggcaagcgtactgactgctgcacttgc

SEQ ID NO: 89107 - DNA, 613 bp, Citrus clementina
  Intron number 1 from transcript clementine0.9_006339m (loc us clementine0.9_006339m.g) derived from phytozome v7.0 (c hr-ID scaffold_12; pos 873010 to 873622)
ctcttaatcagtgcaactctgtttctgaaggtgactttgctcagcacctcctagattcaatatctctcttttagttgagtgacatgccttattcatgctcattctgtttcatcacctgtttaaattaatgttagcggatgttccatttattgtattaggttaatagaatacactgtttgttggcatgtttcgttttccacttcacaaggcattcttttgaggttgttgctgcatgtctctttatgctcaagtttcactgaaactgtttcagtggcttgtttttgcttttgttcagttctttttggcttttagcttctaatatttggttgctgaggtagatctagtacgccagttaaattgctttttcttgtgcaaagtatgagtttatctggcctggtttatgttgtgttcgtttgcatgtggttaaaactaaaaaattcactagatgaagattttcatgcagcacatgtttctccgattttgttttagttttaaccaaagttatctattttgattttctcaaagttatctaaatgttatactcagtttgattcaacttgtgtgttcaaccttggcctagcatagcatctaacggtgtgggtttgcagggctt

SEQ ID NO: 89108 - DNA, 540 bp, Citrus clementina
  Intron number 2 from transcript clementine0.9_009355m (loc us clementine0.9_009355m.g) derived from phytozome v7.0 (c hr-ID scaffold_69; pos 335057 to 335596 reverse strand)
ttgcaaaagaggcaggcattctggttctatacttttaacactcaaactatagattcaattttgtcatcaggtgaaattgttaacgtaacatcacaattcgctagcgagtcagtttctgaactgaactattttataaggcatgaactgtcttaactaagtagatgcgtttcaagtaaaaaagtccagaacaaaactgtgactgactatgttaccaaaactaataatatctacttaattgttgggcccgagatgtacaattattagtatataacatgtttaagctgttaatgtttagcaacttaaccgctcgggtgtaagtttgagtgagctgcatatgaatccctttagttaggtcgttaggctgacaatcaagatgtctaattcactaaatgtccagtttgcttgtcattaattaatttatatatccatgtagctttagttagttactgatataggggggcatagaagagaaatcaatcaatcagaaagcaatcaatcaatgattaaaatgttttaatttattgtttgttcttccaggcc

SEQ ID NO: 89109 - DNA, 703 bp, Citrus clementina
  Intron number 1 from transcript clementine0.9_024452m (loc us clementine0.9_024452m.g) derived from phytozome v7.0 (c hr-ID scaffold_8; pos 2768680 to 2769382)
tcataacgttaactcccgacacattcactgacaaggtaattataatttacaatcttaccctgttttgtatttgttttgtttttcattcagatatcaagatattacggatccatggtagcatcatgaatgcgattctggattatgggtttttctttatttctgttgtttcccttctttgcatcgacaaatcttatgttgccgactgtatctgatgcatcttcatttattttttttttttgagaagatgcatcttcatttatttgaatactcaagagttgaaaattttgttatttttggattcctatgctgtaggagttctgtttcattagattcaaatgactagagtggagttgtgacattttctttaaatcctgattgctaaatgcaatattacttagaatctttagcttgtgattgggcaattggtcatgcttgaatgtcaataatctattcgctgagggttgttagccaggggtgccaaattgaactttttatttatgttatgtgctttttctattgtcattctattttgtttttatgatgtccccccacccccccccctcccttcttctggggaagtgattttgtttgcttcattctgttaatctaagtactgacacagaaatgagttcttggcttcggatatgactttttaagtaattatgtttgctcattatgtccaggtgaaggaaaaagacaccgc

SEQ ID NO: 89110 - DNA, 953 bp, Citrus clementina; identical to SEQ ID NO: 79667
  Intron number 2 from transcript clementine0.9_002894m (loc us clementine0.9_001787m.g) derived from phytozome v7.0 (c hr-ID scaffold_64; pos 193568 to 194520 reverse strand)

SEQ ID NO: 89111 - DNA, 551 bp, Citrus clementina
  Intron number 1 from transcript clementine0.9_029776m (loc us clementine0.9_029776m.g) derived from phytozome v7.0 (c hr-ID scaffold_8; pos 3312914 to 3313464 reverse strand)
taccacctgttttgctagctgcacctgcacgtcaggtaccttttcctttattactccttacagaaataatatctttgaacaattcaataggtcttagtggtaatatattttattgacgcatttacattgactcgtttagtttcaaaataatcatttgtttttttcaagcaaattgctttattaggactacttgttccgaggaatcatgaataatcaaagatttgataccttctagtattggtttaatattaaatcaatggctggataaaaaaagaaccagattgttaggcttttttggatagaatttttggtaacatatagtatgaattcagaaatattgccccaatgattaaaaatcatgcagtttatgtatacatgaaagcatgttgtattgatagtgtatatcttctcatttctgcatgatacttatgttttatatattagattattattcattttctgatgttcaaatgatagagttcaggagcttaccagtggcattcaattgcttaacaggttctgtcagcggcgtgaaagcttcagggaagcac

SEQ ID NO: 89112 - DNA, 1008 bp, Citrus clementina
  Intron number 1 from transcript clementine0.9_012621m (loc us clementine0.9_012621m.g) derived from phytozome v7.0 (c hr-ID scaffold_16; pos 3029242 to 3030249 reverse strand)
actctattttagtcacacttggcgacatagctcaagtaagtttttaactcttaaataattttgctattttgtaatggaaaatatttggaggagaaaagaacgagagaaaaatgagagaaacaattaaaaggtagaaagagagtaagtaggttgagaatgaacaaaattatttgatctttctctcgtgattttctctctcgcactactcttttgcaattattatgcaattatttggagcagcaattcaaacagttctctgagccgtgaattggacccacttaacttaaaacacgtaaaagaaggggccacaaaaacaaccacatggcaaattaaaaagcaataatttcgacatttaacgtatttgtgtttgataagtaagcataattaaattattaatttttagaaattcataataatgtgtgttataagcatgactcaatcaatttccagatgagtagatataagttaaaccgaaattatttgatttggtgagtcttcaatgtatgttgcatcaccgtacgtctcttttctctatcacttttttttaattaattaaagttggctcgtgggaattttataaggtagttcaaatttgacttatttcagatttatatcatttatacatgctaatttttttttcccagatttatttatatatcgcgttaataaataataattgaatgtcactatctcaaatcttctaaaaaaaaaatcttaaatttttgccaatgtaactactcatcaaagctttgtattattaggacattcaatttttttttttagtatgctcgggtgaatatgaattcctaacttcgtaagtctgtatttttaaaaatagatataattaagctagactactttgtgcaagctctaatttgacactaattgtaattaaacagtgcaacttaatctcagccagtattcttaaaacataaggacatcttcattggggattcccttaaattaataacaaattttcttatattgaatgtgggttaaatgataggt

SEQ ID NO: 89113 - DNA, 772 bp, Citrus clementina
  Intron number 1 from transcript clementine0.9_012366m (loc us clementine0.9_012366m.g) derived from phytozome v7.0 (c hr-ID scaffold_93; pos 590077 to 590848)
gtggaaaacactcgcttaccaattaatttcttgtacctgatggaatacctgagtttccattgaaagtcttacgaattactgctgattatttattgtagcttaatgcagtgagtaagtttctgacatgttggcctaggtttgtatcttaagataaagtatctagcaacaaccattgctgaatctgacagctatagttcgttgacatcatcatattgcgcataggtttcagttttccttgtgattacaccttatccatatcacagataggggcaagttacattgcatatatgtcttcattgttggggtatggaagtaaatgccactggaagaaaaaaggcctcaactgaaaagaaaagggttaatttcagtttacctcctaataaattggctatcttcaaaatatcacccaaactagtgtaaacctcaacttaccgccaattactgttcaaaagattaggacaaatgggggcacgtatacaggaaaaaatcttcttaacaataattgggggtagattgaggtttataataatttgggatattttgaagatagtcaatttattatgagttaaattgaaattaacccaaaagaaaaagcatatatgtgaagagtactgaagagctagggggtcccttgattatctatttaatgtttattctaactttgattgcaaatatgctgtctttttaacttttcagtttatgtaatagatcagtaatgtcttaaactaaaagctgctacttaatacaggttatctgacagagaccatcaaag

SEQ ID NO: 89114 - DNA, 727 bp, Citrus clementina
  Intron number 2 from transcript clementine0.9_020700m (loc us clementine0.9_020700m.g) derived from phytozome v7.0 (c hr-ID scaffold_115; pos 384891 to 385617 reverse strand)
tgcacaaaagttctgtgctacccaaaacagttcaggtacttttctatttcacccccttttggctgctgagaaaatactggaaattgacaccaaaaggggaaaaaaaagtttcttggttttacatttttcatgtttttgagttgttaattttaagcgtttttaaggataccaagcagagttttattttcaaaactttttttctttttgcaatttgaaaattatatattaatggtatgaaattactttgtctgaaagaaatgtagctgaattatgtcgttttattgtttttactttgagtgcgcttgtaagtgatcttgtagaaagcttgcattttctgttaaaaaaaaaaacactttatgaaagagctcctattaattgcttttcctaaagggaatttcaaatgcttttctaacctaatcacaaaagcaagtttatatatttcaaacactacaagagataaatagaaatgactttagttgttcctgctgatagtatctgctggtaaaactttttgggtagtacaagagatcaatgcccatcaagcttttactaaaatttttctgtcaaaaaataaaagaaaggaaaagaaaaaatttaggagtaatttttacttttttttaaagattttatttgcctgtttttagcaaccaaactcattactggtatgtcctgtgtaatttggagagtttatttgaggtttacagagtagttgttcacagggaaagtc

SEQ ID NO: 89115 - DNA, 684 bp, Citrus clementina
  Intron number 2 from transcript clementine0.9_016509m (loc us clementine0.9_016509m.g) derived from phytozome v7.0 (c hr-ID scaffold_39; pos 633506 to 634189 reverse strand)
atcgccacaataaattcttaaaagattacggtaaatttgcaaaaattgatgtttaattttggtttaattaactgaaaaaaaaaggacataaagaataatgcaaatagtgagcattttatttgctgattcttggtgtcctaaatcaaaaggatgacgaacaatctcctccatcaagccaggaaggaggctacagtcggcctcacatttaatttttcattattaatggaaaaaattattgtgtataagtgtatgtttgcttcggtttttcttaattttgaaagtgttactgctaaagtatttggtttgatgcgaaagctattgattttgtttctcatctttacctgattaaaagccttaacacttcaatccccaacatttaagtaacagacaagtgatcttgcttttaacatccaaatacttgctgtgaaactgtttggatagtgtgtttgttggattttcaattgttttttgagaaattttggttctcttgtagttatttggattgcttattacaatttgatttgttcaccatcattaattctgattccattttagtctaggagaaatgggaaagactttgtttttttttttctcttaaattttatattaactttactttggtgtaaaattttgtggtcaatttttagaagattcctgtttgtctttttattgcagttgcctttt

SEQ ID NO: 89116 - DNA, 932 bp, Citrus clementina
  Intron number 2 from transcript clementine0.9_011890m (loc us clementine0.9_011890m.g) derived from phytozome v7.0 (c hr-ID scaffold_56; pos 575956 to 576887 reverse strand)
agcttggtgagggaggctttggacctgtctacaaggtaagttatcaattcaactgggtttgattaggagtctaaattctgtttggtgcctgagaaatattttgatccaaaagattgatgagttcaccgtaatctttgcatttcctgcttcttcattttaattttctttgttcataacaaagttttttattttgtcggtgttgtttatttgatttattctttggtattgaaattgctatgtgatcaataaatctttctgttaattggggctaagaagttattgaagggtccacacacgcggttttgaagaagaagaaagacgtgacccaacatgccaactcagctgttcaacaactgcaaaccgacttgttcaagaaaggatttttcttttttttcccccctcttttttgttttctccctatcaacaatgaaaatagctatatataagataatgaattttataacacttgcaagggaagtaacaaattaagggtatacttttaaccattgtgcttttgcttaattgtggaagcatggcacctaaattccttggctgctaatgttgaccaactgccatttatatatgtttgactgatggtgattcagtcccatagcagctgtgaattaaaaacaacaacacttgatcctaaaaataccctaatgagtaatgagtgagtctattatgcctgcagttactatgtccacgcataattttgctgctgatatccatatttaaattagcaatgtcatgcttatctgcattattgtcattagaagattgtgtttgtatttattacactccagcgatgcatgctgcactaaattacttattctttcttcagctatgaccatacctttgagatttttctgttattttggtcataaatcaaggttttgaggacttctgcgatgtttccttgcaggggaagttgg

SEQ ID NO: 89117 - DNA, 1026 bp, Citrus clementina
  Intron number 1 from transcript clementine0.9_011152m (loc us clementine0.9_011152m.g) derived from phytozome v7.0 (c hr-ID scaffold_69; pos 410854 to 411879)
gaatttgcttccacttctcgttgaagcgcttccaggtgaggcttctaaaaacgatccgtttcaatatctgaatttccgataataaatttttggttttgaagtgatttcatagcttagaatttgtttatttatttattttttttttctggtcattttttttcatatttatacgggtgaaaaagttggagtggtttagttctagatctgatcataattgtttattctaattattccttttgattattttttaaaatttttttacagctttattatgctaggaaaagaaaaagaaaaggaagcttttaggaattttttatttattaatctaatttttggtaattgtaaatcgctaattttaggaaatggaatctaaataaaatagtttggagttggctaacaagtaattaatattttttttaattttggttattgtgtaaatatttggaataatgatactgcacatataaattatcctgtacatcttttctttgaactaatttttttatttcacctttaaatatttttgtgtggcaacaaagagtttgaacctgtagtatgattgaaatatttaatgcaatctactggaatttatgtttttccggttaaaatttattgcaatatgtgagcactgccacttcatttatggaaaattactatttttgggattttacgtcaatttttagttctagttctcaatcttgaaacaaacatatatgaatttgcacttatgtatgcatcagaactttggttcaacctttgatggtatgtttgggattgcgttttaatccaaaaggaactaccagttctcaagtattaaagtgtaccaatggtggtacatactatctaaccaataaaagtgggtgattagctaacattttagttgctgtgctttcaaagttagacggaagcatagaagttctaaatgtcccatgagtgttggaaacacaaaatatgtttctgatgtatgaattttgttattcatattaggaagataggtgtttgggtggtacagaaggcacgacctca

SEQ ID NO: 89118 - DNA, 646 bp, Citrus clementina
  Intron number 3 from transcript clementine0.9_023638m (loc us clementine0.9_023638m.g) derived from phytozome v7.0 (c hr-ID scaffold_102; pos 706510 to 707155)
cgtggacattcctggtggcactaaccccgctcaaggtgaaaacggatagctataacattttttctttttattctttccatggtaaagtttatgcatgaaaaagaaaattgttcttgaaaccatttctttctttaaaattttccggaatattatttttgttattattgttcctaattttgggttatttctaaatgcatgcatgcatgcaagttagtgcaaaaatttctcacgcgttatatcacatcgacgatattgtgcccattttcttgaagtaagccagtacccaacgggtgttaaacattagtcactagccgcaaattctctcaaatgactgatacaactcttctgtgtgttgcacatcacacgtgtcacccatgaaattatccccaccacgtgctgacgaaggattttggagaacgtccagtggatggcgccacgtccaggccacttgtacagatgatgagtgttattactggacactcgtctggcttctctgtctccacgtggcatccatgtagagacacacgagtcaaccaagagtggggaaaaaataaagcaaattcggactaacgtaactttgtaatatgtttcgatgtgttaaattttactgtctaaatattcattgcttgctgtttgtaatgtaggg

SEQ ID NO: 89119 - DNA, 452 bp, Citrus clementina
  Intron number 2 from transcript clementine0.9_004168m (loc us clementine0.9_004168m.g) derived from phytozome v7.0 (c hr-ID scaffold_12; pos 4613329 to 4613780)
ttgttggcctttttgtcttaatccctctccggaaggtacataatcttttgatctaatctactacttagcaattttttctattaaaatatgatatattgaagctgcaactctgaatccaatcgtgtaagttctctcgatgggtttatttttgcataatggtaatcccatcataaggataatggttccaccttaacttaattagtggactcatttgctactttgtatacttataagtgcttattttgtgcaaaattttcaagccatgcatggtagacactcggacttttctataactgtagagatttagacttcaagtagacccatgattgtattaaaagaagaattaggaaaaaagaaaatgccaatcggttttcttccttgagctgaattatttatgaggttcttatgatttcacagatcgtgatagtggacctgaagttgacttatcctag

SEQ ID NO: 89120 - DNA, 914 bp, Citrus clementina
  Intron number 2 from transcript clementine0.9_004367m (loc us clementine0.9_004367m.g) derived from phytozome v7.0 (c hr-ID scaffold_21; pos 587038 to 587951 reverse strand)
ctagcttaagtttgcaggaagtgtctattattgaggtatgttgttgaaacatgataatttactagaatacttgagggatcaaagtatggatggcagaaatctccacatggatgggcccctgtgggattttctccattcggggaaggtatgaggataattttatacccaatttcttatttgggaaaagtacgaatgcaatataatacccaatatcttattcagggaggggtcggggattcggtgaaatctccattccctccccatttgtccatttctatttttgatttttaattttaattttatttcttctaaaatttttattaaatacatttaaaatttaaattgtaattgtatggatgtaatgtaaataacaaatatcataatatttataaaaataatataaataacaactaatattagcactttaggattgacagagataattttattgataatttataccatgtgacttttatggatgtgttcaattttgaagctttactttttcttaatttcatagattaacttgtaattttgatgacattgacttggtttgatagaaataattttaattactttggtttattttgatgtttctatgttggtaatacgattttatatttgtactttaatatgattaaaccaagtttagaaaataaaattatcacttattttgggattgggtacctcggggatccccatcccctacctcaagcaattttgaaggggacaaggaggatacaaggatatacacagagtattgggatgtcgatcccctccccattgccatcctaagatcaaaccatgtcgtgcttgttcttttgtcactttttaagtattctgaaaaatctttaagtatactgatggggtcaaagatttactggttttttctaatttaggggaagtccatcaga

SEQ ID NO: 89121 - DNA, 767 bp, Citrus clementina
  Intron number 1 from transcript clementine0.9_004367m (loc us clementine0.9_004367m.g) derived from phytozome v7.0 (c hr-ID scaffold_21; pos 588154 to 588920 reverse strand)
gcttctacgtaaaaaatattccgtcaatacttgaggtcaatttcttaatcttgctcttttcaatttaggtaattgcttcaaaacgcttttgtcaatgagaaaatgtaatttttttttttgttcgaacaaaatttagaccaagaaggctgaacgtgggaacaattttttttccccgcttttgtgggttcttgtaatggattgttttttaattttattattattctttaatttgatgttttagagtgaaatgaaatgtcggtactgaaaattgtgagcttttggtgatgtttttgttcaatttgccacctttagctaattgacttgctttggtgtgttagctgaacatgggtttcatttattcatattattctgttagttgatgttatggtgatattaactgctgtgaaagcagaaagattttatctgggttcttttatggttttatgtttttagtttatttttgaaggttttgaagactaaatgtaaagaatgagaaaagcgtcactcaattccttgcgtagtcagcgtatttacttgtcatcacatagatgatccgatattaaaaaaaggaaacttcttttgaatatattacatatagtatgttactcactagtatctttgttttcagattgtcattaagaaattgatatgcttaattctggtattacttgaatttgctctgttctaacaaagggcttatgttgttaaattgagtgcttttatattttatttatttatttttcatttgtcgttttcttcagcgtaaa

SEQ ID NO: 89122 - DNA, 562 bp, Citrus clementina
  Intron number 2 from transcript clementine0.9_012587m (loc us clementine0.9_008655m.g) derived from phytozome v7.0 (c hr-ID scaffold_69; pos 1030159 to 1030720 reverse strand)
attcatctgacattgtcgaaacctctgcaggcaatgtactatttctttgatatatttgcttttgattttgattttgatttttgaatgaatgattataagctcatttgcaacttaggttttaaaagaacaaagtagcagtttcatttttgaacatatcgcgcatctatgctgataagttttgtgattggaatcccagttaattatgatattctacttatttctttgtccaattttattggatgatggtcgcatcaaagaattaggaaaaatgaaatttcattagtaaaagacttaaaataacttggatgataatttttttattgcattccctgagaatgttatgaagtgaaaactcaacagaatttgcagagataatgctagttcaacagaatagcatgtcattcgaatgtttcattttcttatgctattctttcctgcttgttatttatccctacccttctttcttgttcgatatacacttgcagaagagttatgtttttattaattgttatgtttttcctcagcagaagcagattacaactggaagatatcacacattgct

SEQ ID NO: 89123 - DNA, 638 bp, Citrus clementina
  Intron number 3 from transcript clementine0.9_000432m (loc us clementine0.9_000432m.g) derived from phytozome v7.0 (c hr-ID scaffold_35; pos 155820 to 156457)
tcttcttggttcccaaagtagttctggtacctcaggtatgcccagatatgtgtttgtggattctctccagtggaactctgtatttttttttttttccaaaattcagtcagcaattgcagaagggaaaaaaaaattgcccctttttaatagaatctttttttttttcttttttgcaactagaactttaaaattcttgatctgggttgaagataaaatagataaatatgacatttctttgtatttatacaagtaccttcgaaacaggcttcacgagttttagattcgtttgttgaagcttaaagtttttgaaattcagagtggaactgatgttgagctatgaaaagcattatatttcaaattcaaatattagttccaccattcaatttcagaatctgttaacactaaagtagaaaatcttacacattcgatttctattcatagctcttattaaaacttttagacttggttattgtttatgtccaaaagttgtatattgctgacattgtagaattagtggctatgttcctggagttaaaattcaaaagttttacttttcattgctttggttttgattttatgttttatttttgttttttaaattagcaagctgaagctattaaaaagcataccgacttgaa

SEQ ID NO: 89124 - DNA, 795 bp, Citrus clementina
  Intron number 3 from transcript clementine0.9_016405m (loc us clementine0.9_016405m.g) derived from phytozome v7.0 (c hr-ID scaffold_91; pos 766397 to 767191 reverse strand)
gtggatattggaagtggtaactcctcagaataattactcttgcataattgcttattatcttaatgatcatcgtttcttaattgcaattcttcagctacattgaacatgccaatattcaagcagaagttacgtcctctttgtttctttgtataaatactaatagttttgcttatgaaatcatcaatatatacaccaaataataaaggatgttatataggcaataattttgatagaaatgaaaacttttaaattggcgaggctttgttgggttgagctatggcatgttggtttgaattaaccgatgtgcatgggtgaaatacttattctcttgctaacttgtcaacatttaattttccttcctccaaaaattgtttaattgccgaatcttgattgttattgtgtctttctctatacttttcttggctgaatggctaaagccactgagagtgccttttcaacttaacctcaggcacttctgcgcccttccacttggcagatggcagtcctaaattattaaccctttcaacgaacaatgtgagggaaaattttgtagatacatatggttattttgctcagttgatgagatttgtccttaaactttcctttaaatgttagtcctgattactgaatgtgcttcagcgggttggatgtttggttgtcatataaattttattcctctggtagttgtattatcatgtacattgtcaccagtgttattggagataggaatgtatatctcatgttgacctacatatctaattttgaaaagcccccaggtagtggcagatttctcat

SEQ ID NO: 89125 - DNA, 712 bp, Citrus clementina
  Intron number 1 from transcript clementine0.9_017553m (loc us clementine0.9_017553m.g) derived from phytozome v7.0 (c hr-ID scaffold_8; pos 1481306 to 1482017)
atccgttaagaacacattgctcattttccagtcaggtaatgctctgcctctactctgctcttatatcactgcttattcaaaatcttctttctttggtgggtcgttttagttctttcacattttagtaccatttgtaacatgcttatagttttagtgatctggtgctttaacggctgtagatttcatctggggtgtttttttttttttttttttggtgagtttagtacattcaagaattaatttgttggttggtaaaaaactgttctttaccttttattttggtgggttgttttgttttcttgcacattttggtaccgtttgttaaatacctatagttttagtgatctggtttttgattggggtagattttgatctggcgtggttttgcttattcatatctgtttcaaaactctatttcattctagagttaattggttgaatcgatggtttggggttctgtttgataggtggtgcttgtggttacagatttattgatgaagtttcaggatttgtggttctatttcatcttccgaaagacattatagctagtctcatggaatttacgtgtcaaaatttctgataattatgctcgacaactttcagaactccttttctgatctacatgtgctattgctgctaaaatttgcgtttctgtgccagtaactgtagctgcggtaattttcctttgcagtttgagttcctttagcttaaa

SEQ ID NO: 89126 - DNA, 520 bp, Citrus clementina
  Intron number 1 from transcript clementine0.9_014221m (loc us clementine0.9_012599m.g) derived from phytozome v7.0 (c hr-ID scaffold_25; pos 3155111 to 3155630)
cgtccttaatagtgactacgccgtcgttttcggtagtagttataattttcccttttgctttgtctttgtggctttgttttgatttaaaacttttatcattagcattaagcaagcattctattttttttttcttttttgattgataagcaaatttaattcaagcgaagaacctcataaaacaagctgtttacataaatttaaatttaattctttaggtgcttattggaatgggagtgccttcgtagaaagaaactaatgtattttcagctgatacctctttctccccgaaagtttctttgaaagtgatcttgactacggttttaccaacagagccgaaacgaaaagcattcttttagaaactttttccactagacttgtttatgcgtaatgctattttcctgccattgaatttttcttagttatgaccattgcaagttacatatttggaaatgcattttagttatgtgtacatataaagttttgtttggacttgctaggtgttccccttccatttattgga

SEQ ID NO: 89127 - DNA, 500 bp, Citrus clementina
  Intron number 1 from transcript clementine0.9_034651m (loc us clementine0.9_034651m.g) derived from phytozome v7.0 (c hr-ID scaffold_28; pos 929344 to 929843)
cttttgattgattgtgagcagaatgactgtggttgccctttgactatatgaggtactcctcatcttctgccagcacaatcttttgtgttttatagatcacgatgaggatgtagatgaatttcagaagaaagagaaacttttaattaaatctcaagtgttggacaaatccaacggttgagattgaaggtcctgacaaaaatttctatcaagacgtcccactagtaaaaccaatttagctatatatatatatggggtatacatatgtatgtatgtatgtatattatatggtaatttctattttgacctcattttattattatcattcttttcattgaagcatttatacacattaggtttatttatgctttttgttttctcttgagtatgcttgtccatctgacttgatcatgcattgatgcttgtattatgaattctgtattctgatatgcaaattatgccttgcagtgctggactttaccaggcagcttctggagacagga

SEQ ID NO: 89128 - DNA, 546 bp, Citrus clementina; identical to SEQ ID NO: 88972
  Intron number 1 from transcript clementine0.9_023975m (loc us clementine0.9_023932m.g) derived from phytozome v7.0 (c hr-ID scaffold_88; pos 568055 to 568600 reverse strand)

SEQ ID NO: 89129 - DNA, 893 bp, Citrus clementina
  Intron number 1 from transcript clementine0.9_013100m (loc us clementine0.9_013029m.g) derived from phytozome v7.0 (c hr-ID scaffold_8; pos 1713883 to 1714775 reverse strand)
aactgagttgttttataaagcgaatttcatttgcggtaagtttcatttggacgtggtttcaatttcatttcttaaattttgaattgaaccccagggccaagggcgggctgctgagatcggagtctcctctccccaaattatctgttaatcttaccgtaattttttcaattgctctgctcattctttctattttagcttggctgtttaatctgtttgattcttcagaaaatgtgagagaaaggaacataaaatttcagattccggattccctcgttcatatagctgcctgatacggatctgtttttaataatcattatttgatctggattttatgattctttgtgattaatgtgctgccgatggatctataatgttcgtgttttgttcttgtttgctgtcttcattgtggagcaggaactgacgattgaattatatgattatttcttgtttgaatcattttactataatgtgttaagcatcaaaggagagattgtactttgtttcgattttttgccatgtatggtttaagatttttagtttctccatgatgttaaaaatttcaaatctcgaaaattaaaacttatggtttaattacattacttatcaattgtgttctgtatgcatgaggattgagaaatttttacataattttgtttttgtgggactatgggagagagtttgtttgtcatcttttgatgtgaacaatttttctgttctatatgtggagtaagttagaaattgtgtagatcaaatgactcaaatttgcttagttgtggttgctcattgattgctggaatttattattgatgtctatgttcctgctttgttttgtttttgttaattcctgttctaattgtgagtcattacttacttattccagctggtgatagaag

SEQ ID NO: 89130 - DNA, 512 bp, Citrus clementina
  Intron number 1 from transcript clementine0.9_004003m (loc us clementine0.9_004003m.g) derived from phytozome v7.0 (c hr-ID scaffold_124; pos 444561 to 445072)
agggctcatcagagattggcttctctttattttaggtaattaagttaagtgaatacttattagtctctgtctttatgttgtgtttcctgttcgttttgctataacttggatctgtttcattgggttctattagtcccttgtgtggttggtttttgatttgctgaggttttgggttttgtttaatattctcttcaattgttgaattttttttttttaaatctttttggtgatgtaggatgttagatctcttgtttctttctcactggtctgcttttattagcttagattggtcgaccattctatgttgtttctgtctttgattgaagttttatttgagagttgataatattttagtattcaatttaaattgtactgatcataacacacctatgcaatttaggttcgtgggtttttcaagaacatcttgattttcgctatttattaatgaattttccatgatagcttatccacaacttcaactggatttcacttcagattagggcaggttgaaa

SEQ ID NO: 89131 - DNA, 868 bp, Citrus clementina
  Intron number 1 from transcript clementine0.9_019765m (loc us clementine0.9_019768m.g) derived from phytozome v7.0 (c hr-ID scaffold_21; pos 3825877 to 3826744 reverse strand)
tggaaacaagaggtgttgaatccatgactgtaacttcttgactgttttgttgagatgggttgttttctctagtactgttttggtcattgattggggttccatcaaatggttatctcagtttatatatttcccaactttgctatttagaacttgctacacttgagtttcacaataatcatagctgccagatcaacctgtatgatgatggtttcacaatgattttagtccacaacatattttttgttgttgaaagaagttttagatttcctggttagttaaatcctattaaccattatatattgtatttgaaacttgtattaatatatcataacatctatgtgacgagtcagtgcataatctgtgtggatgtgctcgctctggattattgaaatcctcttcttttttctgtcaatagtagtgggagaaagaatcatctaaaagggtttattcttgtccgaggactatttcgtttgtaattttctttgtcttgtttatttattgcctgtgatgaaatgttgaacgggtctacacacacacacacactaagtgagtcgctcagatgtcctccagtgtccgaatgtttggaaaaattgtatcataggtgggctggaatgattttcaggttcaggctgtaattctgttcttttatgccaaagaaatcaagttccctgttcctagtctatgccttaagataaatatacatacaagtgcaacattttgtagtattttatgaaaatttatgttcttgagtaggattcttacaattgcctgttgaagtagttttgaatgttgccaaaccaattaaattaacatgctcttttggttgtcttgttgtagttttttccttttttcttgaaagattggaaga

SEQ ID NO: 89132 - DNA, 529 bp, Citrus clementina
  Intron number 2 from transcript clementine0.9_012688m (loc us clementine0.9_012695m.g) derived from phytozome v7.0 (c hr-ID scaffold_16; pos 867974 to 868502 reverse strand)
accacctttttgacaatatcaagagtatgctttcctccctcttgctcaatgtaggaacgtttgttcagtgtactgtttcggttcatggaagttgctagtacattattgagtctttgtgataccacattacatcagtctggtaaattaattgttttattatttcattcttctattgcataccttttagagtcataaatgcaaatatacaggtgtttgtgtttttttcaaaattccttgggcataaacaacaaaaactttagcaccaaatgtgttatgtgcctgccatgctgtaattgaaaactgagtatcacagtcggtggaaaactgacaaaataagtaaatgtgtttttgaccatcaattgtgcactgatatttagttttagtctgttcttttctaagatcaattaatttttttcctcccatagctttgattccaaatatttaggctgctggtgcacatgtgtactgacttttgacagctattcatggtgcagagttcacatctgaaagttgtgggatatctgctgat

SEQ ID NO: 89133 - DNA, 932 bp, Citrus clementina
  Intron number 1 from transcript clementine0.9_023364m (loc us clementine0.9_023364m.g) derived from phytozome v7.0 (c hr-ID scaffold_56; pos 1350096 to 1351027)
ttgtgaggtaagtgtcccaccaccttcttcttctttttttttaacacctatttgttacaagaatctacgtatatgttataatttgaggctactgaaaatttaaataaaatgaaaattttcgatttttttatttttttaaaaagtgaacttatacattcggtgctcttaacattttttttttttttttgcggagttaaaagacagtaacaataagatcacccatgttatgctcagttttggttgaggttcaaaaattaggtggcaaaagtctcatcgcatggatgatcccaatatgatgcaacaattgaacttgtaactgtttttacactacaaatttgactccatttgataagctttcaccaaagcttattggttggaaatggccaatttcttccataggaacaagatccactaccaaatgtcatcaccaaagaaaatgcaaatgacaccaccttcgcatatattgtttaagaaagcaattatataaaaacaatttttttattattcacgcgaatagtataaataaaaagaagcagcgcagtgctcttaaaatacgcattaaaaaaattaaaatactttgcagaaaatatgaatttatggtattaatttgaatatccaaacatggaggctttggtgataaattttgtttctttttttaaaaaagaaaatcatcaaatattctccgtctaaagtattaaaatgatcataaaccttattcaaaagttcattaaaaatcctattattaataattattttgttttgaaagagattagaaaaagacgccccaaaggccaaaaccttatctactctaggcacaaatttcacatagccaataataataagattttcttcaatatttatcacaaaataaacaaatatgttttaattttcatataggtcccaccacacatagccccccaaaatctcccccc

SEQ ID NO: 89134 - DNA, 280 bp, Citrus clementina
  Intron number 1 from transcript clementine0.9_023452m (loc us clementine0.9_023452m.g) derived from phytozome v7.0 (c hr-ID scaffold_56; pos 469758 to 470037 reverse strand)
aggactctgtgactgctgctccgactgctcaacttgtaagttcccttcaaaactaaagtgtaatttacgtactttttttttttccctccgttaatatacgattgacgttcgtgatactgacacacactggttagcattagtatgttgtgactacaaattagcttatgctgatgaagaacagatcgaggctggctactgaaagtttttattaattaatttatttgtttctttgaattaattaacaggttgcttgacatattggtgtccctgcatcactttt

SEQ ID NO: 89135 - DNA, 298 bp, Citrus clementina
  Intron number 1 from transcript clementine0.9_013990m (loc us clementine0.9_013990m.g) derived from phytozome v7.0 (c hr-ID scaffold_21; pos 2704645 to 2704942)
ccaaattggcgttttcttaaaaccgattgttggaggtacgttttgcattgatttgcattctgcgggtttgtcgttttgtttggttagggagaaacgcataggagaattacacagaaaagaaatggaactgtgaaatgattggaattttttataggttgcaaaattgtgaacactaagaatttcgaagattcataattgagttacattttttcacctttaaattttcagcatgcagtgtaatttttgttgaaactttggttcattttgaatttgaattgattctttgtttacagtagta

SEQ ID NO: 89136 - DNA, 773 bp, Citrus clementina
  Intron number 1 from transcript clementine0.9_012293m (loc us clementine0.9_005737m.g) derived from phytozome v7.0 (c hr-ID scaffold_35; pos 1370256 to 1371028 reverse strand)
acggtgaccacactgctgtttctgctcttgttcaggtttgcgcattgcttcaattttattttcatttttatttttttattgtgctattattgttttattagtcattaaattagtcttcaatattagcagaaaaaacttttatggcacgttatgtgatattcatcaattcgagatgagaatggagcaatgaactattctgaaactccatgaaatacactgttcaattgattagtgtagcttaacttcgtattcatgacgtgtaattaaaatgaataatgtctttaaaatgaatggacatgtaatgactgtagcatacatatttcccctaaatattgttggatgttactcgttcttaccttggatgggaaaaaaaggaagagttttttaggcaattatcatatcatcaatgtattttttctttaaggattgtgaattattggcctggattttaccaagtatctgagcctccgtattattaagaaaaaatatatacaattatgatcctaggaaaggagtgttttatagtcttttgtctattttggaagaggactggttttagtaactaaggattgtcaattatgggtatgtatttggcaaaatatccaagaaaataaataaataagtatatacacacaaaattttgatcttgggaaggatttttctagtttttctgtcttgcacttctataagtttctaattgttatgcttcaatgatctgttgatataatcgttttgtagactaggcaggaattacaagagttgttgttggaatc

SEQ ID NO: 89137 - DNA, 483 bp, Citrus clementina
  Intron number 1 from transcript clementine0.9_019015m (loc us clementine0.9_019015m.g) derived from phytozome v7.0 (c hr-ID scaffold_115; pos 582769 to 583251 reverse strand)
gtactgtaagtcaaagttgacttaccttttatctaaacaaatcatatactatatattaatcttttacctcaatttatcctgctatttgtgtagataatttttattttgagtattatgaatattaatattaacaccaagagcttcatcatatgtacatttaaccaaacaagatggttgacttcttcttcattgtaatatccgaaaaacgacatgctaactatactaactataccttgaactcatcaatttttttgacttgaattttcctcttgtttcgtagaaacacaattttaaattatctttgatgttttgagttctaagcttttatatattctctttaaaagtctggacgtatatgtctgcaattaacacccagttgaaatattagtaagcattgaaatacaccaaaactgattttatagaaaagctaacatcatgagtactttgacagagctttgcgctggagctagagagtgggaaaaa

SEQ ID NO: 89138 - DNA, 866 bp, Citrus clementina
  Intron number 1 from transcript clementine0.9_027512m (loc us clementine0.9_027512m.g) derived from phytozome v7.0 (c hr-ID scaffold_104; pos 429353 to 430218)
ggtgcgacaggcacaccaagagacgctgtctcttggtgcgacaggcaccaagtgcgcgacctgtcgcacgcgagatgcgcataggctggcatgcagctcgcgtgcacaggctggagcacccacgtcgcgcgtgacagatgcgcgcgacagccacatcccacgcgcgccagcctgcgcgcgcgagttgcgtgccttccctttcccacatgcatctcacccatcaccgccattaaacatcaacaacagcctaaagactcaatccatcaccaatgcaaccagcacaacacaacaacaacaacaacaacaacaaaacacaacaatgtcgggttttcaataactcgcctagggttttcaattttagtctttgattttggagatcttcaaagattttgaatgtgatatagcttattttcaccgtcgacaattgcctatgctgccgatccacgccaccgacgatgtatatgggattccggtgatgagattttagttagagggagaggatttgggcttgagagaaacatgagagtgatgagggtagtttggtcctcaattttgggatttggctaatattgattgaaaaaactttggagggttaaagttgaaaaacgtaaaacttttgtggctatttttataaatttgccgcaaaatattcgaagcctaaattaggaaattaaaatgatgacgtgagtaatattgcctgccacagtaaacgaaaggaaaaagcggagccacagaaaaaaaagggagtgctcacaattaaagactctatgctgctacaaaagatatgcatgctgcaaaccaattacaataaacttgtagagatcaatggaggtgaactgcttgtccaaatttgccatgacaggcca

SEQ ID NO: 89139 - DNA, 654 bp, Citrus clementina
  Intron number 1 from transcript clementine0.9_012409m (loc us clementine0.9_012409m.g) derived from phytozome v7.0 (c hr-ID scaffold_35; pos 2297350 to 2298003)
atcccctcaagcaaagtaccagtagagcaatagtacaagatatcaggtataatttatctgtttagtatcattaatttttgtttctttctaacaatggaagaagtagaaaattaatacttcatgtaacttgaagtagttcataagctgtctccggtttttgtcagtgagtctctttgtctatctgctgaaacaagataagtgccgttatgttttgtaactggaatcaaaccttttgattagctagatccgaacttcgaagttcgaacctgggtggtcagtcgaagatagctgcttgaaaacgactgtcgactgtcgcgtttaaagttttgtgctttgatttgttaattgctcacacttttttctaatttgtatctgacagcgaatgatttagtcatagactcatagttgaatcatgctttgggtggtcagtcaaagatagctacttgaaaacgatggtcgaacttatgttttgtgctttaatttaataataactcacacatgttgtttttgacggcaaatgatttagtcatagttattctacagtgtgtttcattttctgagctgcttctttatagtatgctaatgtcacatgtaggctagtttttgattttatcggaactaattgaacgttgaactttcatcaaaatttggtag

SEQ ID NO: 89140 - DNA, 593 bp, Citrus clementina
  Intron number 3 from transcript clementine0.9_013888m (loc us clementine0.9_013888m.g) derived from phytozome v7.0 (c hr-ID scaffold_104; pos 70382 to 70974 reverse strand)
ggattattggggaaggtcagattacataacttttaaaatgtttaaaattttctttttaactttttcattctacctagggctgtgatgttagagcaagatataaactgaaatgttttgtcaaagaggaaaaataaccagtttgggccatttaaatggagagctagcaacatttgcttgatgaaaaaaaattgaattttgataatttttattgtagaatagaggtgcaaagacatctttctggcttaattagggatgaaatgtataaatttcaacttcaaacttattcaaagctacggtgaggtttggcatgtgaatcacaaccttaagtgacatgctttaaggcatcgaaacctattttgacaacaatctggtttattttctaacctttctgagtcagagtggttgcagtagtatagaaaaaattgaaaccaaataatttggtggttgcaaactggtttttgctacttttaattatgttctttcagttcagtttaacctcttcatttcctttgggtcttgctaatgattttttgagtcaatcttgggagcaataaagcttataaagttgttgtggggttaatatgatcaggtat

SEQ ID NO: 89141 - DNA, 611 bp, Citrus clementina
  Intron number 1 from transcript clementine0.9_003443m (loc us clementine0.9_003443m.g) derived from phytozome v7.0 (c hr-ID scaffold_39; pos 1711754 to 1712364 reverse strand)
tgcagtgcctttaagaaccagtactaggactctgggtaagtgtaattaaattacatttatttggctgttttgtgcataatttgactattatccatttctgttttcatttgcgaaagtttttagcttgctaccataacatcatagaaattagaaacacaagtagcttaaagttttttacttttttgaatctgcttctacagactcggtagtaaaatcttagtagctttgtgattcaagtaggacggtcatcatttccttgtgtattattgtcacatgcccaagatgcaggaacaggacacatagagggacctggagttgatattagcaaaagaagtctgctagaagaatctcttgactcttccagtggagatcttcttctgatttgcagttacatctctgttagagatttattttacccttgaaatttacaaaaccatactaaatgtgcagcaagtgattgtacagatttgacaattggagtggatacaagtaataattatcaagagggagagcttaccggtggccctgaagtcagtgaagttactactgccaactgtagtagtgattgcaaagaagaggagaacaagtgcgaagaccattctctagaaatc

SEQ ID NO: 89142 - DNA, 885 bp, Citrus clementina; identical to SEQ ID NO: 88205
  Intron number 1 from transcript clementine0.9_025324m (loc us clementine0.9_025324m.g) derived from phytozome v7.0 (c hr-ID scaffold_16; pos 1459973 to 1460857 reverse strand)

SEQ ID NO: 89143 - DNA, 487 bp, Citrus clementina
  Intron number 1 from transcript clementine0.9_003686m (loc us clementine0.9_003686m.g) derived from phytozome v7.0 (c hr-ID scaffold_16; pos 3851885 to 3852371 reverse strand)
tcaagcgtattgttgttaaggttcgttcatatcgtcacttttcttttccattttgtcttttcactgcattcatcaccctcctttttttttttttgagtttcattggtctccatgcagtttatggactcttttatatatatatatatttttaaaaaatagtggggatagggggaacacaatggcatgcatgtttggttgatggcatgatggaagatggggttttgtttagagcgtctgcatgatgtattcaaaatcttttctttggaatgtaatattgatatctagtttttaatctgtttttgggtcctaggaattgctaccatttgttataaaagagggtgctttcctgtcattttcattacatttatgtgttcatattttgttttcgcgtaagtttttttctttttcttttctcttttctgtttcacgtgttaactaattctgcatttacaattgaaggttggaacggctgttgttacccgaagtg

SEQ ID NO: 89144 - DNA, 1003 bp, Citrus clementina; identical to SEQ ID NO: 81231
  Intron number 1 from transcript clementine0.9_030802m (loc us clementine0.9_030802m.g) derived from phytozome v7.0 (c hr-ID scaffold_12; pos 4407252 to 4408254 reverse strand)

SEQ ID NO: 89145 - DNA, 340 bp, Citrus clementina
  Intron number 2 from transcript clementine0.9_019129m (loc us clementine0.9_019129m.g) derived from phytozome v7.0 (c hr-ID scaffold_16; pos 831690 to 832029 reverse strand)
ctgcggtgcccaggtgagaaaatcaggtaaaattgttctttctggaccttaacgttcgtgtttatgttgtttttattttcgttgaatcgcgttaattgctgccatttacaattcataaacctgttttaatatgaaaaacatggtatagttgtagttgttggtagcataggtttagtataatgcagacgagttttttagtatattgatcagtttttttagaaaatatcttttgatatttatcagactgagttttcaaagtgataggacttagaagaaagactaatatttttgaagtgattttatctcaccagaatctccgtttctgttgatgaatgattag

SEQ ID NO: 89146 - DNA, 814 bp, Citrus clementina
  Intron number 2 from transcript clementine0.9_005091m (loc us clementine0.9_002885m.g) derived from phytozome v7.0 (c hr-ID scaffold_44; pos 1321645 to 1322458 reverse strand)
ggaaacaatcaaactgttgtggtacaatctaacttccttttcaaccatgaaattcagcataacttgcacaaaaaaatgaaaaaggaataaatttgttcatatttgaaaaatggatatgcttttggcaatttgcccttttcagtctcatgatagaaatttgaattccgaagaatttttttaactaaggtatcaatagaatacgtactgatagcattgttgtttgtagcttcagaaagtttaaggtatctgcataagaagtttttttgagattcacaggaataactataatactggtggcatttagtttccaactgatcttggtagttcaaaaagactagacaagttactggtatgccattctgaagatagtttagtggactgactagttcttcaatgagttctaattctatacttctttgcaaaggttttggttacatcatggtatgcatgttgaattcagaacatgtgatgatttgtacgagaggaaaaatgtatcagttggaattttttgttctatatgatataactctatgaaacagctttccattctgtgttcaagttgaccaacacaaatttgaatgaagatcattcaaatcaaattgcagatttctgcttgaatattttgaatagcaaaattaattttattgtcatgcagtagcatttaatcaagttccttgtgctgttgaaacaaaattataacatccttgccggaatttcagcttgatatgaagctactcttgtattgtcaaccaactcatatacatatagcctagaaataagttttattttctcaaacagggtcaggctttttata

SEQ ID NO: 89147 - DNA, 835 bp, Citrus clementina
  Intron number 1 from transcript clementine0.9_010417m (loc us clementine0.9_010417m.g) derived from phytozome v7.0 (c hr-ID scaffold_8; pos 4316983 to 4317817 reverse strand)
aggtttttttttttttttttttttaattctgaaaaattttcaggacgcttttaatagtgtgtttagtaaattatgcttcatgcaaagcactttgcaaaaactttctggaaagcacttttcaagtgcttcttggaaaagcactcttttttttttttttttggttcccctacattataagcactattagtacatatcaaacgcttgtccgaacggcacttctagttagttaaaaaaacatatacatgggccaaacccgttaaaattaattagttagtgccttcacctgtttgagcaagcttttgtccgcgccaaaagcacttttagatgcactatcgtagtgttcggcttaaacatagaggacttatttaaaggatttaaaacagttggagtgcttatcggggaagcgcttgacatgtgattgttcagaaagtactattagaggtatgaaagcacttgaagtcttattttctctgctgagacaatgtgtcataattaatttaattccattttccagaaattgttttgattctaaaggtgtaagagaaattaagataaggttgttaatttggctttttggcaattaactactgtctcacaatcacaaagatagaaaaataaaaataagattagaggtaacgtactaagtatgaatgatcctcgtactgttaacaaagttagttgagagtctttgttttgctctagctatttattatatttgctttgattttgatctgcacttgagcaattaatggttttttgatttatatgcatgattcttcgtcatttttttcatatttttctttatcttatttaaaggtggtggaagtgaagtcaa

SEQ ID NO: 89148 - DNA, 572 bp, Citrus clementina
  Intron number 1 from transcript clementine0.9_001665m (loc us clementine0.9_001665m.g) derived from phytozome v7.0 (c hr-ID scaffold_21; pos 1902930 to 1903501)
actgttcaaagcttcgcttgcctttgctcagtcaggtaaatccctgaacccaagccactaccactcttcttcttgatttgttcgtaagttggtatttttttttccctatatatatatatatatatatcctttgcatgtgggttttgctgtagacttgaatgtttgttctccaacttatgtttgtgttccaacttgttcttttattttaatatttttttcctcctttagtggctgtcattgccatggtcaagccaatattatatattatatatgggtagtttctttaacaatttcttgtatatttttttgactttcaattttatggtttctcttatgggcagagctgtctaggcttcaagttgagagagcctacttaatgcttcaagttccatttttttttctcttttctttttttagaatttcacggtttgagaatccatgcttcttttagtagaatcatactatatgattttcttgattccatggcttcaatatttatctgataactggattgttggaatccatgttcactctgacattgttggcaggtgctggttgttatttttgaacaa

SEQ ID NO: 89149 - DNA, 958 bp, Citrus clementina
  Intron number 1 from transcript clementine0.9_015228m (loc us clementine0.9_015228m.g) derived from phytozome v7.0 (c hr-ID scaffold_57; pos 113009 to 113966 reverse strand)
gcggaggtactttctttattaaccttttgggctattcttgttctctatcattttttgggcatattttttttccgtttatatttttcttaagtatagttctcacactgtttggctgctgagaaatgaaagagaaggaaataaaatttcttagaaatactcaattgtggcagttaatgtagtaccttagtgagttctgttcattacaatttgtttttatatttttgggtctcacaattaatgcaaaattttaaaaaaaaattgcattcaatttttattgcctttcattttttttttttgagcgtccgtgaaatttggtagtaccagtgggtttggcaagtattagaatgattattaatttttttataatttgcgttttgtgaaatttgattgttgagtgtgcttgctattagtataattaagttcatatacagtgttcatatgtacagctctacttttagtggttactacctaaactgaaggtaactcaaataaagatcaaatcttttgttttatagtgagtattggattttcaagaagtgataatgaataggtggtatgatgattaggacagtggcaccaaggttaactggtttggagtagaagtataagtgttgaaggattttttttttttccctgttgagtcaggagtaccatgtgaaagtagacgtggagaaggagatagagataagaatttacatggattctgctctattttgttgttccatttgggtcctcacatgttcatgtaaattgcagttgacctttatttatttatttaaagtatgatgaaacttatttggaattggttattttgttgattaatgttgtttttgaaattatgactgtatatggtatgccatagatgttttgataacttgttcatactcatttctgtattttggtgatgttaattttgcttatagtgggagctctaaaagttacaaggttaaggattgct

SEQ ID NO: 89150 - DNA, 883 bp, Citrus clementina
  Intron number 2 from transcript clementine0.9_022358m (loc us clementine0.9_022358m.g) derived from phytozome v7.0 (c hr-ID scaffold_8; pos 284236 to 285118 reverse strand)
ccgttgctgcaaaggtacccaaaatccttgccgttttgtgcatgctacttactattattagatcaaccgatgagacgacaccgtattatttcaattttagtctccaattttatgcttcgtcttcgtttatattgacacaatttatagctctgtattacacctggttcttcagtactatttaggattttacaaaaagatgctgacgaatttttggaattcgaataatggggcaatggttgaactggattttgaattttgtatttatatgtatacaatgagtctaagagaacatataagaggtgcattaatacaagtgattgttctttggtggatcatagatgtagtaatttcagaaatcatagtaaacatgtgatttcagaagacatttgtggttgctccattccaacactctttaaaattaaagatttatcatcttatagcgatgtccataactatcttatgcctcttgttacggttttccagttatgttttaattgtaacgctttatggtttcctccacaaaatttgtgtttaactcctaatgagaagttgagaacgatattctatttgttcactcctaggccctcacctgaatttggcttgaagttcacctccaaggcattgtctccagcaacctataataaatatccgtacaaattacagaaaatgttggattatatgatttgttaatgatgcatgaacattctgcctgccctttatttctacattaccgatttgagttggaatttccatttacaggtctattgtcaactgtgcctgacttttgctttacttcactgtctggctcattgaacttctttttgatttctcaaggatcaagtgcctctgttcattttgtttctgaacgtttgcttatacaggc

SEQ ID NO: 89151 - DNA, 773 bp, Citrus clementina
  Intron number 1 from transcript clementine0.9_000651m (loc us clementine0.9_000651m.g) derived from phytozome v7.0 (c hr-ID scaffold_12; pos 4453851 to 4454623)
caatccatccgatccatcaactcatcaacatcaaggtcagtaattatttggtcttaagctctcttccatgctctataattctgccaattgccaaatctttacgctctcaatcaactatcaaagcaatcagtcaatcaccattgagttgtaaataatgccatattgtaagtagctgttagtaaatgtgagtaaccccaggcgtgccaatacagttcaattgaaaccatttttttacattattattattattattattattattagcaaatgagtcaaaattatgaatcagcaaaccattttttttacattattattacctctaacccgaattaacccaaattttttgaattgaactgttccaactcgaattaaccctaaccgaaatttgaaccgaaattaccaacccaaaccaatccgaagtatgaatccaaactgaactgaagcgaattaatttgcgttttcaacacgattgggttgtaacgcaaaccgaacaacctgaaccgaaatccgatttagtcacccctacctggcaccggcagcaatctcttgtgatttgttgccattgtactcaaataagtaattctagggattgcaattttgttgctgttatattgaaataaatatttctagggattgaaagtcttcttcctggagacaaacagagagttaaatttattacaccaaaaaggtttaggttaagctatttttatagttggtggtgtcattttctttttccagttttagttgattcaagtttgaagaacaaactaatt

SEQ ID NO: 89152 - DNA, 768 bp, Citrus clementina
  Intron number 7 from transcript clementine0.9_000651m (loc us clementine0.9_000651m.g) derived from phytozome v7.0 (c hr-ID scaffold_12; pos 4456040 to 4456807)
gtggaaacagttctaagtcaacggtatgttacttatctgtagagaatagaacttgatgaatatatatttttcatgaaaggaactcgttttcttcccccccccccccggttggggttggggtgtggggggggtgttgtgcttgtgttttggcttcttagatcaacagttgtgtagtattatgtgttttgtgctatcatgaattccactttagtttctggatatgggaaagaaatagaaagtacataaataatttttatatatccagtaatgtttatttctgattattttctgatttatttgagaaattcgtttctcaaattttattcctctaagttggacattggaatattttaggttaatatagataatgaatgtctgttgtgccttcatgacgatattgtgttagtgaaagtaacttctaaagtataggatttcactataactttagtgcccctctaaacagtatatggatctttagaagcctgggtaaggggaaaacgaaagggaatgggaattgctttatataggtattgactattataaaataccaccgtcagaaaggtttataattagattcattgaatgccattaaagtcaaactttgaacttatttgcacaagtgatatgcatttgttacacttaatttgcagcatgctgtaatgtttgatttattgtatcatataaagtgatagaaatattttctttctctattatacatcactttattcttatcctataatcagatgctgtgggtttgattgggacagg

SEQ ID NO: 89153 - DNA, 484 bp, Citrus clementina
  Intron number 2 from transcript clementine0.9_003514m (loc us clementine0.9_003514m.g) derived from phytozome v7.0 (c hr-ID scaffold_57; pos 430359 to 430842 reverse strand)
ggattgctctgctcctttggagaaaataggatcaggtgggtgtggagaaatttacattgccgagctaacgtgtttctagagaattcttttgcaccctattttttgcgttatatatatatatatatatttatgagtcaattgttagagatcaaattcagtcttttttttttttagctgaaattcaggcttaattgaagatgattacaggaaattgaatctcaagtaaaataataaaatgaaaattctttatttatagttagttctagcatcagaatgcatgatggtattatttattttttcagttattttggaattttgtcttatttacacatcttggtgaaattgttgtatgttcattttgtttgtcgtgattgcttataagctatttttatgttgataagtatggcttattaataattttattaataattttctttgattattgatagagtttcctcgaaagcacaaggctggttctcaaaaa

SEQ ID NO: 89154 - DNA, 627 bp, Citrus clementina
  Intron number 1 from transcript clementine0.9_029382m (loc us clementine0.9_029382m.g) derived from phytozome v7.0 (c hr-ID scaffold_28; pos 705585 to 706211)
cattgttagtttggcgtttcgggttattgccacttgtaaataacagggatatgtagttgtgagccgtcccttgtaatcactttcactgttaaatcctgtaacaagacaagagaagccttccaggagcctgcgctgtgttaattttacacggcatacatacatatgagccaaaagagaatcctttgattgaatctttttttcacagaataagtctttttgatctataatccgtattgatgaatccaatgattcttgtttttcttttctttttttttccccagcaaagcatgatgtgagcaaaagcagtaactgggtttctctagattacattaaagcatcttttcttagctagtatggttcataaaagcctttgtttgtctcattgtaatgcatactctaggtttatcatcaagtctcatatcctgctgctctccaagcaaaatggagttgattttttcttatctacacctgtttactctggcgttcgcattactgattgctatgggaggcttagcaggcatttccaattttcttctgatgactctttattgatgttacttgcgtggaaagcataatggtgcttgttgctgaattgcatacactttcttttttgcattgcagattgct

SEQ ID NO: 89155 - DNA, 359 bp, Citrus clementina; identical to SEQ ID NO: 82188
  Intron number 2 from transcript clementine0.9_000846m (loc us clementine0.9_000845m.g) derived from phytozome v7.0 (c hr-ID scaffold_87; pos 927882 to 928240 reverse strand)

SEQ ID NO: 89156 - DNA, 493 bp, Citrus clementina
  Intron number 1 from transcript clementine0.9_000846m (loc us clementine0.9_000845m.g) derived from phytozome v7.0 (c hr-ID scaffold_87; pos 928355 to 928847 reverse strand)
aggaaaagttcaaggaaacagttcataagtaagtttagttttcattttgattgttttctttcattttaagattcttttttgctgccgggacaactcaggaaatcaaagaaacatttacaatttaagcttacagttaagtaaagcttgttgacattattctgacggaatactgttgtgggcttaattataatgggggttttcaagttgttaagttatgaaaattttttgagttgcttactgtttttgaagtactttgctcacttttcaaagtcgaagttgcttgcttttagctcttcatgatgagacaattactttcacagtgcttgcaaagtaatttcttagttgtttcatcattttctgtattgtctggttgcgggtggagtttaagacagttgagatgtggatagctggctaatcctctgtttttgtctgtgtacatgttaattggaaactaaatattaggttggagcaagagtctggttttttcttcaat

SEQ ID NO: 89157 - DNA, 982 bp, Citrus clementina
  Intron number 1 from transcript clementine0.9_002167m (loc us clementine0.9_002167m.g) derived from phytozome v7.0 (c hr-ID scaffold_13; pos 3422170 to 3423151)
aggcagctccctctgctcagttccctcctcttcaggtactcttttctctcttcactttccgtttgtttcccgagaaaatgagaccagagacgaaagtaaaatatatatgttttcagctgttagtttcactaatcttcttaaactctcgagttctgtaagtccttaagttctgtaagttctgtaaatctgatagtaatgcatctctttttgctttccaagaaaaaaatgttccgaatgaaaagaaaaatttttaaaaagaaatcgagaaataaaaataaatgttcatgaacatgattttgttatgcattgtctcctcgtttctgcttttactaatgtgaatgttaaaaattgaattttgtttctttgttattcttgttaattgacattgagtgaattatgaggtctttcaagtgacctaatttctggatgattatcgtttgcaaacataaaataatgtaaggagtaggcttgtttgatccttattttccaaggaaatatgcgttggttgtttagtaaattgtaaactttgtaaagcatttagtgagaaaaagaccagcttgtcaacagctgtttatcttagggaaaggggcaaacagaaaaattttaccaaacggcgtctttaaaaattagtctgagctttataacattgtgtcaatttttttttttttggaattaaaaaatgagaaattcacctgaactggactgtctagactcgtaagactcttcactccattggagagaagtggggggaggtttttgagctctaagatgcaagatatgaaatatcttggttcagaattagtctctcttctttgtcaaaccaaactaaacttgttatatttttattgctcaaaagaaaattagtttatttaaacttagatatgtatgtttggatgcttgtgtatggcttttcctaactttgggttcgcaaattgtacccttttcagaggaacttagatcaactagaagcattgtcaaagaa

SEQ ID NO: 89158 - DNA, 630 bp, Citrus clementina
  Intron number 1 from transcript clementine0.9_007800m (loc us clementine0.9_007720m.g) derived from phytozome v7.0 (c hr-ID scaffold_57; pos 282257 to 282886 reverse strand)
agctgaaacctctccgattacattttccagctccggtatttatctctctttctttcacttctgtttggcttccgagagagtgcaagaaaataaaaaacatttcgattttcggtttcgtttttgcgtttcgacttgttaaacatgttaattcgatctattcatttgttaattaatcaattattctatctaaatgttgaagatatgaaattgttaactgtatgagttgttcttgtttaaagaaatctatatttgtgtataatttttaaatatcttgcacatttaagtttgataaatgattcaatctacaaacgtacttgtccatacgcgtgttatccatattgggacaagttgatgtcagattcgacatgtttcgattatttagtacacatgtacttgctaattggatcttgtaattagtaaatcattgaagacatatatttgcttgttttaggttaatttaaatctggcctgattagtccatatccctaaaacatgtatatgtatctagattttgattttactttctagttgaagttcggtgcttactatgcggcaagcttttaggaaatatttgtgctaactgttatatctgcagttgcaccgtcgacaattgagtagcatctcttttgc

SEQ ID NO: 89159 - DNA, 841 bp, Citrus clementina
  Intron number 2 from transcript clementine0.9_014480m (loc us clementine0.9_014462m.g) derived from phytozome v7.0 (c hr-ID scaffold_56; pos 1218138 to 1218978)
ttctgtctgggtaatttgccacttttgcatataaggtaagaaagttaaaattaattcttttttttttctaatcatatagttttataacatcctcgttttgctatattgggctaagtaattctgtgaaagttattgatttgcatgttatatgtgaatgattagatgagtgtatgttccttttgtgattgttatataatgtgaaacactttcttttgtagtgaacaatttataatgccttaattcttttaggatatacatgatccaaatttctgagttgaaatccattgagtcttttaaaatttcatccatagattgtaggagctggtgattttaatttttagcacgttctttactgaaattgacttttcgtggtctttaaattggagactgtccttaactctaagctggatttgatcactgaaacttcaggtttgatttaggtggtagttaaacttgatggtgcttttggtatgtcagaggatccagtatgttctgagaaagtaaataatgggtactttaactaagttgatgtaaaagaccatcatctacttgtttaatggctgtcttatttggctctattctatgtgggtgtaatttgtaaatctttctgttgtcatactctttgtaggcataccttataaattggtttttattatgtaccatggtattgattcatgcttcatcgcaaggttgtttcgatactagtagatcatgtttctcccatgtgtgtatggaaaactgaatacacgtgccccctcttattaattatatgcaactgcctattttatgaagcccttctttgattatggaggaactaacattattttttctcttctgtgag

SEQ ID NO: 89160 - DNA, 465 bp, Citrus clementina
  Intron number 5 from transcript clementine0.9_028562m (loc us clementine0.9_028562m.g) derived from phytozome v7.0 (c hr-ID scaffold_126; pos 347010 to 347474 reverse strand)
atcttattactatctttgtaagtctcttcttttaattctccccattcttcacttttaatctgctgtaaccgtgaatctgtttcttcttcgcgtcttcctttttgtttcctttatttttgagtcatttagatatctagtaatgccatttttttccttcttttgtttttgcttctcccaaactgttgcaggacaggaaagctctctataatgaattaaattttgttaagggaatgaaactagagtggggtcttaaatccccatacttcttcacccataagaataaaaaagaatgtgtaagaatctcagtttattagtgggttattatgttataagttttttattgtactttaatatggtacaatgctgatgtgttaattgtgagaaagttgtatcattctcacttggtactaaaagattattggatttgttgtttacaggttttagacggtgcattggttttgatct

SEQ ID NO: 89161 - DNA, 696 bp, Citrus clementina
  Intron number 3 from transcript clementine0.9_035212m (loc us clementine0.9_035212m.g) derived from phytozome v7.0 (c hr-ID scaffold_121; pos 316934 to 317629)
ctggactgtgaatttaggtctctggaacactgctggtactctctctgtctcttaattttgtagtttgattttcatgttagccatttagctatgactgactattgacacactagttttatttaaattttattagctagagttcgttaatattctcatacttacttctggaagattggtttttttattcacatgatatgaatctgatgcaacataaactttgacaatacccagagaagaaaatattgaatcttgcaaaacttgtcactcggattgtttagaaattcaaactttctttctagtggcgacaatcaggaggataattaaactgcgatcaaagatgcttagaagttttagagagttaaggcttagtagtttttccactacaaaagaagatagagcttctgtacaattgaatagttcagataacctctcaaatgtgaaaaatctagaggtgttggaatctagacacagccttgtcaacttcaagcttttcatctgcttttgaatagcaaaagcaaccttaattcatgggattaatagtttacttttattttcaagttaatgttcagcaaatggtatgattttacaaaagtgacccgccaaaaagtggaaggataaggattatatataattcttggtttttaaataacttattatgcaggtcaggaggattataataggctgagacctttaagt

SEQ ID NO: 89162 - DNA, 697 bp, Citrus clementina
  Intron number 1 from transcript clementine0.9_000434m (loc us clementine0.9_000434m.g) derived from phytozome v7.0 (c hr-ID scaffold_8; pos 3150182 to 3150878)
agacttctttccgccatcaaagaacgtctcgataggtactcatctctctctccatacatatggatgaaaaattgtgatgagttttaacctacaaccaatagaaacgatcttcaagtgagttatacagtgccaaggtcttatttttatcttattcttgtagccctacgttacattaaatataacttactgttttattatgctttttttgttttttttgtcatttgatctttttcgacggtacaaaataatagatcaagagaaattactgactttatactttgttctgcctgggaaattttccagggtcaattcctgaggcaaagtgcgttactgttttattaagttgtcgagcagtgatagtcaacggacgtcaaacctcacaaatgtgaaaatatttataaaaaaaaattatatatttttaactgataggaggagcccattcggccccttcaatgagaccattatttttctaaattgagtcagggagaattttgatagtaaattttttttttcgtacggacgtctgttgtcaaaattcaggttcttttattattattactatttatttatttatttatttttcgtgaaaaaaatattatgtatttgtctaactattgtttttataatctgatgcgtgtttgcgtattggttgaatgttaaagggttggtctagaagtgccgaaagtagaggtgaggt

SEQ ID NO: 89163 - DNA, 404 bp, Citrus clementina
  Intron number 1 from transcript clementine0.9_024336m (loc us clementine0.9_019542m.g) derived from phytozome v7.0 (c hr-ID scaffold_39; pos 978796 to 979199)
cccgtaatttctcctccactccgtacctctttttctgtttcttctactttgtctttgttgttccctttttttaatttatttcttttaatttctctgtttgtttggtcgcggctgttattttttttctttaaaaaataatatatttgaattgctttccactactgtcctgtttgattgctaagaaaacgcgggaaaatggggaggaattggagtttgcttgtgattgcgaattctcttctgagagtctagggtttgaattaattagaccgttggattcttgcaaatctggaatagcacatatgagatgttatctaattattggatagtttaaatctttaatattttctcgatactgttttatgaatcgtgcttgcaatggaaagttcttgaatttctttgtagtg

SEQ ID NO: 89164 - DNA, 752 bp, Citrus clementina
  Intron number 2 from transcript clementine0.9_009214m (loc us clementine0.9_009214m.g) derived from phytozome v7.0 (c hr-ID scaffold_8; pos 958680 to 959431 reverse strand)
cgagcttcggtccctagcggtgatccctccggaatgtaagtttcactttcattattcttttcaaaattcaaacataatcatttcatttatttttgtgagaatttccataaacgtcttgtgcatatacatacatgcaatatttgccaacttgaacaaaaattctggtaaagaaatgtaaattcagttgtcacagaccgtttctttttttgtggagagattcaagtgttgtggcttttaactttacgcaaccagtatgtaaaatctttaatttatctgactttcaattgtatccatttttattttttctgctagagtctataggaatatcttatatgtaattgtaacgtttggaaattcgaacaaagttgttggttcaaaaaacataaaattcaattatcaagatctggatttttttggttagtatctcaactaatgtgtcaccaattaaggacgatcatatatttagtaaaatctgaatttattatcttgccgtattgtgttgctttgaaactttgcatgcgtagcattactcattatgaaggccacaactattaatcactacttgttaagtatatgtttgataaatattaattcccaagtaaaagtgagtgtttaccaagtactttagttatggtgcattgaaaattaagtagaagattacaaatatttcttaaaatgattttatttttagttggcacatggcgttatcctgtttaaaaatcatttaattagtgttgagtgttaatctaggt

SEQ ID NO: 89165 - DNA, 973 bp, Citrus clementina
  Intron number 1 from transcript clementine0.9_033330m (loc us clementine0.9_033330m.g) derived from phytozome v7.0 (c hr-ID scaffold_11; pos 559942 to 560914 reverse strand)
gtgcctgtcaattacatctcatgactcagtcaatcatataatgtacgtacatataatcataacattatactaaatcatactatcaaacataaatgttttgtaaaatacataatagtaataataataatccactcacagatcctattgatgaagcacgcacgtgctttgctttaagctaacagcttgctattgctttgacaattaaccacatgtgcctccttttagcttgcacgtgcgtcacaatacatgcattagaattggttgtattctcatgggtgaagcatgaatgtgctttgctttaagctaacagcttgctattgctttgacaattagccacatgtgacccgtttatagtttaggaaataacaatattgaatagaaatattcttagaatatagtatttattttccattcaaacattttctcatttaggcaaaggtcaccaaaaaaaaattacttttttaatttaaatgtaaatatttaaaaatcatatataagttataaaaaataaataactaatttttttttttaaagttagactttatatgcttaacaatcaaccctaaggaacatgaataagagctactaaaacaaaaaaaaaggaataattttgaaactaaatacaattaattgagagagaaaaactaaaatatcagcccctcattgccgatagttatgagatgaaagcacagaagccgtgtgttgaaaagtatggtgttcatgtggaattttcagctaaaagtctacaaagtagcggaattaatcaaacgccgtggagtgcacggtggttggacaatgagatgaaattgaaaaattatcacggaacttgaaggaaggggcatggcatcgatttattgtacagagtcacgcacatttggttcaataattgttttcatccgaatcaaaatctctctctaatcaattcaactgtttctgttgattatggcttcttcttctcgaaacaacaagcaga

SEQ ID NO: 89166 - DNA, 392 bp, Citrus clementina
  Intron number 1 from transcript clementine0.9_002540m (loc us clementine0.9_002495m.g) derived from phytozome v7.0 (c hr-ID scaffold_71; pos 353415 to 353806)
caggtattcatcttcttcttcttctttttttttgggggggggggggggggggggcaattaatgagtggaaaaaaaaattgagttcaatttttcttctttgatttgttggcatttaaatgaaattctagagaattcatagcattgtaatctggattgctgttcttattaattgttatgtgggtcaaagttcaaatcttgtatttctgaggtgttggaacttttggcctacaaggtggagacatatctcttttgtttgcacgtgtgcaagatatgaataagtttttggacaagctttttggaaatgggattttttttttaattgtgttttcatttttttttttccctcttcctactcttgtagaggtctcaggttacttctttgtttggagctg

SEQ ID NO: 89167 - DNA, 341 bp, Citrus clementina
  Intron number 1 from transcript clementine0.9_004388m (loc us clementine0.9_004388m.g) derived from phytozome v7.0 (c hr-ID scaffold_16; pos 3764571 to 3764911)
aggtattaaatttgaaaatcgaaactttctagtgattaattacttaataatcgatcaattagaatgggaaatttaactgcctgctttactttaacatcttctcaaattttccttaatgtatgattctagatatataaatatcaagtaaattgttttgaattttctggatatggtagcccttgtaagcatggataaatatgcacttatatcagattgcagataaattttaagaatatttatacaaaagctaaatttggtgattggtatttgagatctggtttgttgattacctaatctgtttgcgtggaggttgcttaattggaatgccactttttgtaggt

SEQ ID NO: 89168 - DNA, 801 bp, Citrus clementina
  Intron number 1 from transcript clementine0.9_034945m (loc us clementine0.9_034945m.g) derived from phytozome v7.0 (c hr-ID scaffold_11; pos 4993504 to 4994304)
aaggtgcttcgtttaatttaattaatttactttctcccccctaatttaagttgaatatcaagaccgagcaattatatgcatattcatttagtcgacaattttgactttttttttaaatgattaattttgaaattacaccagtatctatgatcttttttttattttacttgcaggtatagagaggctatcaagattgaacaacttgaagatgcttaatttaagtggaaactcattcaataatagcattttatcatctctaactcatctttcaccattaagatcattaaatttattttggaatagattggaaggaagtattgacgttaaaggtacataattaaaacttcaagttctttcattaacttgctaaaataagattcaaggctttgaattcaatttttttatgattaatattaaaaaaaacagttttaagcaatttataaatacaagtttttatgtttctcgtaatttcatcttgtactttcatatgtcttgaatttaagattaaaaaaaaactccaatagtgaaccaaacacctccacaacttattattattattattattattatttggtgaggtttgaaacattcaactcaatttgtacttattacagaattagattctttgagagatttagaggagctagacattggcgggaacaagattgacaaatttgtggtctcaaaaggtactacaaataccataaaaaatgctaacttatacaaattagctggattctttgccatttggtttattattttacaggtttgagtaaattgaagtctcttagtttaagtggt

SEQ ID NO: 89169 - DNA, 640 bp, Citrus clementina
  Intron number 1 from transcript clementine0.9_025715m (loc us clementine0.9_025715m.g) derived from phytozome v7.0 (c hr-ID scaffold_57; pos 274536 to 275175)
acaaaaaaaaaaaaaaaccaacagcatcctttccggtcagtttctccttacgaacttctcttctgttcgttacaatcaaatccactatctgggttttgtttctttatttacaatgtaaaatttaacaccagaattttttttttcgctttattcttgagggtttaatttgcgaatctattaaaacacttcttttgtaatttataatcactttttaatcaaagctctaatttatccttactgggtttaattggagttaaaatggaggcttcagttttgttttgatccactggtcaagcttaagatatatatatgttggcatgtataattgatggtgactattgtttagttcatttatttcccatctgacccatacgcttgtcttggataatatctctgtattttgccgaaataaatgcattttttattacttaagagtggtttagagtttgtttgtatttttatttttttggtgctgagaatagtggatgaaattttggccaaacttttatatatgttatttaagacagcataagtgatccagttttattttcgtaatcaaaggatatctagttggttaaaggaatagtttgtactgttgtattgccgaaattttctcatttcgtgtatttctgtagcaaag

SEQ ID NO: 89170 - DNA, 446 bp, Citrus clementina
  Intron number 1 from transcript clementine0.9_030321m (loc us clementine0.9_030321m.g) derived from phytozome v7.0 (c hr-ID scaffold_12; pos 4036177 to 4036622)
aaggagtttaagcccaacgtatgttttcttggctttcgttttgtttttccaagaaggaattttttctgtttgtgttcaaattttagggttaggggttttgtacagctttttgttttttctttttttcccttgattctctctacatttgatttgttagggtttgacaaaattggaaaaggatgattcttgattggtagcacagagaaattggtagtagaatattcagatgattcttgattctcttgggttgctagggcttgtcagtattcggaagggcaatagctttttgatgattcaattttgctcctcatatatatcttattttctgttcgtttgctgagaaattgttggaaaagtgatggaatattgcattgtcgatttttgaatgggtttcttggagtagtgacttttgtataattatttcatcagactctcccaattgttca

SEQ ID NO: 89171 - DNA, 797 bp, Citrus clementina
  Intron number 1 from transcript clementine0.9_027964m (loc us clementine0.9_027964m.g) derived from phytozome v7.0 (c hr-ID scaffold_39; pos 1865009 to 1865805 reverse strand)
agcagcaacaacaacaacaacaacgggacgacaaggtatgcacataaactgatgtgtatttgtagcattgaatgacccctttgaattttgcaagtctattttgttagtgggttgtttttagcttctcgtgatatcacgtggtgacagggttttgtgcttggtgattttagttttaccaatcaaacagtctttagttacataattgtctaaaaggaattgattcactgtgttaaagctttaggtcagcctaatcagacataaactctttacacaagtaaatgggagaaaaagttaagttaaaaggaaaagaaaggagcctgatattctacactttcttaagtcttaactgtaattaggattcaaaaattcaataccttctgatgaactccatgtcaatttattcatttatttattttctctctgataatgacaaaaatatgtatagcgtgtgtataattttcttatcagagaataaataaattaaaatttataatttgcaaaaatatgaatacactttttcaaaaatttattcttccatgattctctgattaaattctctgtctctaaggacatgaaaagaaatcaagtgtaataaggccaatatagtggcttttgtctataacatttcagctataaaatgtttggaatatgtactaaatcaccaataagtttcttaagttccatgattgaagaggacttatattagatgttcacttattactttgatactaatagtttttctaattggaacttttgatgacaatttcaggaacattcagggcaacaaattatagagg

SEQ ID NO: 89172 - DNA, 423 bp, Citrus clementina
  Intron number 3 from transcript clementine0.9_005250m (loc us clementine0.9_005250m.g) derived from phytozome v7.0 (c hr-ID scaffold_12; pos 3307829 to 3308251)
acagcaaagtgttcagtcgttctctgctggcaaaggtaggatactgagaactaaattttcagcctaaaatgataccaattggctaagaaattcaaattggaagaagaatctaaatattttttttctgtgtttggtctttgtttcataaaccggcactgcatctctcagagtgcatctattcaggtgcagtttctctttccctctatatctttttcaatgacgcatttactagcatcttattgagtttccatttctagagtcaagaatcttgcacaaatgagaaatggaaacaaagtaaatctaatataaaatatatgatttggtacaagtaaatctaatataaaatatatgttttggtacaaataagagcagtcataattcctctctattatttatctatttatttatttttcagacagtagt

SEQ ID NO: 89173 - DNA, 1016 bp, Citrus clementina
  Intron number 1 from transcript clementine0.9_034307m (loc us clementine0.9_034307m.g) derived from phytozome v7.0 (c hr-ID scaffold_11; pos 5072185 to 5073200 reverse strand)
ctgttcagcagaatctggcattactggcaaaccaggtactcttacagaaatgatatctggtcattgcatgttattgcctgacaactgattttgtttgtaaaagtctacttcttcatacatatgaatgcatatgttagtgttttcttctcgttttcatacatataaatgcatatgttagtgttgtcttttccttttcatacatattactacatatgttggtgttctctcctgagatggatgcaataaaggcttttgctcctaaatttagctgaagaaatggcaagggatgtgagattctgtctcattaaattaacaaaaacccaaagcaatgaaaatccataataatgtggtgtgggtaaattggctccatttggttcgtttccttaatgtgaatgcgcgagcaatagagactaacaaaatgaagtgacaacaagaagtcagtgtcctttgatggatgcatttttaggcagaaataggtttgtaattgaccaaatttgtctggcatgccaatttcaaaaaaattaaattatgtggttattagctgtaatgaagggggatagtaggtgcaatcaggtggatcctggaaagttcaataaagttttggtatggcgtagtgaaattggtttgtgcaactcaggagtctttcaggtgaacgatgataggttttgatttatgaatattataaatctactgtgcatagtattctagtagaatcatctataagttctagttattgaaattgtatactttgcccggtttgagttaagggcacatgtaatatgaaagatagttgtcgcatcttttaggttacctaacatttgatcaatcctattatgggggcttcaagatgtctaacaatatgtagaatgcccatgctcctccccattgtttatcttctacaataatttgttttagatgctaatatctttgtcgataccggtaacaatattacaatatctgcgtttattgggttttacataggttcgactgtttgacagtacacactatctgaaggc

SEQ ID NO: 89174 - DNA, 1019 bp, Citrus clementina
  Intron number 1 from transcript clementine0.9_007842m (loc us clementine0.9_007842m.g) derived from phytozome v7.0 (c hr-ID scaffold_39; pos 1691115 to 1692133)
cgttgttcaatctccccctcctcttgttccccctagtgagctcgcttcttgtttatttgtttagtgctttttatttctattcatgaaagtttatttttatatctttttcctttcgttttggactcagttaagtggtgatgctagttatgaatttttattaagttgaaattttttgtgcaccattttcggttgtgagcattcatcatattcggttgtttactattactaatttggtgggcaaaaactgacttattagttgataagtgatcatgttgagatatggaacatggataattgaaggttaatatatttgggtgggtgtgttttgaattatgagcagttgttatgtgttttaagagtacataatacaggatattttgtttaggcaagtacatttgtagcctcaatgtggtggtcgtggcattcggggcagcatagtgatgattatagaatagctgattatggtctttacttcaggccttcttaagttttgagcaattctctccatggattagaagttggttttagtagttgcgaaaactctgaaagagctacaagtattaggtggtttcagtattttctcttccatttcttaggtggttgctagatgcttgatcagtaatgtccactatgatagtgtagtgtcttcaaatttgttataaagcttttgacaaaataacaaagataaaaattaatctttataaagtaaatatctctacaaacatgaattttatataaataaaaacatgaaagagatcaaagttattgtggttgtaattgtaatatttctcaagttcttgaccttggtttcataggagaaagtcaagaagatagagcactagaatcatgtaattttacttgttctcatggtcatttactgatcatctttaggtgatacatcactagaaactaccctaatgaccgacttgcaaaaatggcttttattatcaaagacacattttcattcccaactctggaattgattataacaccttgttttgcaggaaattatactagta

SEQ ID NO: 89175 - DNA, 356 bp, Citrus clementina
  Intron number 1 from transcript clementine0.9_025615m (loc us clementine0.9_023421m.g) derived from phytozome v7.0 (c hr-ID scaffold_21; pos 1231695 to 1232050)
gctcttgctcaattcctcaagatcttcaccacttggtccgtcggtttaattttctccatttttcgttgtaattttattttatttttttcgcagcatttctcttcatttggttggttacgtgttgcaaattttgttgatttgatattttgtctgtataaaaaagtagattgaccttttcattagggcttggagctccaagatgctccctttgattgtggttgatctccaattcaaagaataatggatgtacgatataataaatgttaattgaattgaaaattagtttaagcaaatgtaattaaaaagttgttattttgaaataaaaatgtctcagttattctgtatgtttttgctag

SEQ ID NO: 89176 - DNA, 607 bp, Citrus clementina
  Intron number 1 from transcript clementine0.9_020606m (loc us clementine0.9_020606m.g) derived from phytozome v7.0 (c hr-ID scaffold_12; pos 3446796 to 3447402 reverse strand)
cttttctcgtaaaggtatttttcggatattttatgattattattataattagtttttgtctttctttaactaatgcttgtcaacttatattattattttgtcgtctcaaattcagctgccactccaccgaggttctaattaacttcatttttttaatttctaaagcttcttcttcgagttttcgcttcttttgtatcaagtatttgcattaaatttctgattagtgagttagcaaagtcgctgacttttctttgaatttaaatttcttagcgctggtattattaacagtaattcattttacgttgtgtaattttaagcttcagtgtgatttgatgtcactggtaactcaaacgagggctttatgatactgagcttactcgtatcgtatcattcatttattatgatcaatctgactccgtgactcattttatttgaatttcttctatttcttttagcatttcatccaaatattcgtgttagataaactctctctctctctctatgacatcactgtggtatgttgaatctctaacgacatttttttttaatatattttttagttttggcttcaggttcttcagttgaagcttgggctaacagtcgttca

SEQ ID NO: 89177 - DNA, 712 bp, Citrus clementina
  Intron number 6 from transcript clementine0.9_033171m (loc us clementine0.9_033171m.g) derived from phytozome v7.0 (c hr-ID scaffold_16; pos 4247338 to 4248049)
acttagagaaatttagtgctacatctgcagtgaaggtaggttttttatctcttgtcctgaatctgttgattgtgatcactacaatttgccattttgcagccttatagaatttattttgatcatcatttaagagatatgacaaaaatgaatatatgtaaaaaagaagcaaacaatttgaattttttaatgctgaaaaaaaaggctgaagagcatgaagggacaagttttgtgtttgaaacttgggggagagcaagaagaaatcctctttatgaaacttgaagaatcgcacttctcccatttcgcttgtcaaaataaaactcaatgcactttttcccccatggagaggaattatacagcagagataatgtgtaaattattaaaacttcccttgttatgtttatgatcttgtggagccagctttactctgaagattagcatcaagccaattgatagactggagtagatgtcagggttgttatgtttagcgcatcttcaataattattttgatgattatcaagacattgtcagtgagaaattatcaaaatacttgcataaatttcccctgggttgcaaatcatgaaacatttatgtgaatcatgtgtccattatttatagcatggactgttgaactgcatttatatttgttttctttttggttaccttgcttctaaaatgtctaatatggtatttcagattgcccatctgtctgca

SEQ ID NO: 89178 - DNA, 736 bp, Citrus clementina
  Intron number 1 from transcript clementine0.9_013335m (loc us clementine0.9_012740m.g) derived from phytozome v7.0 (c hr-ID scaffold_103; pos 134899 to 135634)
aatcgaaattgtaagcccaaaaacaactttttgtaaatcttaatatgcccctcagctcgtagttttttttatcttgttttcatataattttagtgttatatgaatgatcgtctcggccctacgattgaactaaataaataaccaaacttttgtttcgatgccttcagtagaggattcaaggggaatagttgaatttttatcgataatattcttaatctcttgatagttattcggaaagtactttgaattctttgctttccttttgcccactttctgcaagaagcccaagcatacctgcaaaatgggggactattttcttatttggctaaatagtctgtgtaagtattttcttaacttcaggaagtgtcacaatttctagtgagtgtctcgggcctgtttgtcactagttgtagcaaatgtttatcatttagaattcaggacaagatgattgcagaaaatatagatattttgggtttctaatgagagaattgtattaattctgcaacaggccatcctcactgtaaagtagcctgctttatcccatttgtctcttttttgtccccccaccccttagtggagaacctctgcataaattaaaggcaaaaggaaatatataattttaatttttttataggattaatttatttattatctttaaccaatgtctccatcctagagcatttgaacaattctatatatgagtgtcttcgctctttgctttcaattcatagagaca

SEQ ID NO: 89179 - DNA, 774 bp, Citrus clementina
  Intron number 3 from transcript clementine0.9_019374m (loc us clementine0.9_018232m.g) derived from phytozome v7.0 (c hr-ID scaffold_16; pos 872134 to 872907)
gggaacattagaagcacttataggaaaatacacttgtaagattgtcaacttttatattttcttgagataattgcagttggtggcaaaatttattttgcttatatttttttctgcttctgcattgcgtctactaaaaaaatagcatatttctgcttcatattgtgtctatagtttacctgcaacttcatgggatttttagctcagtgagttttttggattccgaggactattataaatatttctttcaaactttagaaaccatcttcctaccaaaaatgcactgacattccccttccaaatatgtggtgtggtgtttcccttttctttggcagtttgtttctggaagatggccttatctgtgaagtgaatagaactatgcccaatttcttaagttaagactttgtttgccgtgcttggccctcttgctatagaaggtatgcaaatgagaggagttttcttgttaaaagaacagtcaaccagttgataacaaataagagagtgagacagatgatggaattgttgtgagattttaatcttactcataggaaaaaggttaacagaagccttacaggcatgctaggacatactaccctcccttcttagaagatactggccttctcccatgtcttattcagggaaacaacaagcttgactctcaaagagaatgtggcagaattgcttcccttttactacttctttgatcttagtgtgccatgtttattattctttcttggatgtgttatgtctctcggtgtttatttatctgaaggtttg

SEQ ID NO: 89180 - DNA, 388 bp, Citrus clementina
  Intron number 1 from transcript clementine0.9_034590m (loc us clementine0.9_034590m.g) derived from phytozome v7.0 (c hr-ID scaffold_121; pos 334623 to 335010)
gagataaacaagcctgtggctctagattcggtgaggtgtggttttcttttcaattctgttaaatcaaaactcgtctttttaattttaaatgtttcttcttcttcttctttttcgtcttcttctttttttttttttccggtgggaaagaacaatttaaaaaaaaaaagaaaaagaaaaaaccttattttcgttgtaattataggaggtggttaatggttactggattgtggaaatttaacaggctgaaatagaatttaattaatagtgtgtctgggtgtacaaattcagatttgattattacaaatatctaacgggacatcatagggtgattatgatgatgcgatctcgctctccttcttgctttagtgttggctgaagaagcagaaag

SEQ ID NO: 89181 - DNA, 301 bp, Citrus clementina
  Intron number 1 from transcript clementine0.9_021733m (loc us clementine0.9_021733m.g) derived from phytozome v7.0 (c hr-ID scaffold_69; pos 309794 to 310094)
acttacggtttagcatagacacaccatattataaggtatgatttgggtcaacgcgaaagttctcaatgccttttgtgtcttctgcatccttagggctccttcaacctgaataatgttttggtttgtcttttcttttaccattgattgtgccgaagtaatagttctttacctttttgtctttgtagtttctagtgctatgcatcaacccatttttattctaatttttgtgtccaacatcttatatttctattcaaaatgtcttactgaccagggtttacgagaggacttggggattcatcat

SEQ ID NO: 89182 - DNA, 539 bp, Citrus clementina
  Intron number 4 from transcript clementine0.9_021468m (loc us clementine0.9_021468m.g) derived from phytozome v7.0 (c hr-ID scaffold_25; pos 791496 to 792034)
gttgggttgaaaagcatcctaacaagaaaagtcaggtcattatttgcttacaatttttatttaacgcaacttttagtttttggtgtcggcttattccttaaagttttttgtctgttctagaatgacaatctgctattgttgtttcaaatcttatttgaatcatctggagttgttaagaatcttcttttggtcatggggacagaatatttagtttttgtggagaatgcatgttaaatactcttttaagttagaacatggaattaggttacttccataatgtgacagtttgaaattttctgttctggtatgagtttggagtacttctttatcatccaccgctccctgacctaaacaatttatgttggcattttaagtgtagcatatttttgttttgtgttttttgttgacttgaaaaattattagtgcagggctttttatcttagattacttctaagttgaggtttaggctccgccatgtgctttcttttggttaggttcatatctgtttgtttactaacttctgaaataattatgcagat

SEQ ID NO: 89183 - DNA, 894 bp, Citrus clementina
  Intron number 2 from transcript clementine0.9_020664m (loc us clementine0.9_020664m.g) derived from phytozome v7.0 (c hr-ID scaffold_8; pos 2988593 to 2989486)
cttggtaccaccatttaattcttttctttctctttcggctgtaatttattttgcttgattgtcataagcattttttgtcgtttattttggttgttgaatgtctttaatttgagaacattgcattacaaaagatttcaaataaatgacaaaaaatgaaatgtcaggatgtaagatgatttgggatgtaaagagtagtttttgaatcaactggaattacaaattcattgagattgtatataaatgcatttatggagtcatatagtataattaattgcaatggttgaatcatgttgatatttcattgttctgtatctcctgtgctatttcactcagccttgcatcctctatgtagattttaagcccagctaatggataagattggtaggttaaattgattgccaagttatgccttctttatttgatttcttccttataataggaattcagatggtagattttgttccacggtctatgtaattaagatgttgaagtggctagatgagtaattcttagatagattgaactcagacttatcttagatagattagaaaccctgttttgatgaaacaaccatcctacctgagtaatttggcagaactttctaagagagtctactggttgagtatttctctaagaagtgttacatctgcagaaggaaaggttgaagacggcgaagggagtttatataagaataagattttcaaaaactcggaggcccctgtagtaaatataattaataaagcaaaagtcagtgtattgtgaagttttagaattttgtggccggtttaaatttggtagttgtagtcaccagattaagagagtaagatttcactttcctttcatttgatcataattgcagttctttggaagcagttaatcgaatttacgagatta

SEQ ID NO: 89184 - DNA, 850 bp, Citrus clementina
  Intron number 2 from transcript clementine0.9_023415m (loc us clementine0.9_023415m.g) derived from phytozome v7.0 (c hr-ID scaffold_35; pos 1544020 to 1544869 reverse strand)
gtttaaaagcttcaaaagcttctctcaattatttggtaagcttaatttaagacttaaattgagatacaataaattttcattcatttttctttacgatatctaatgtttttaactaattttttcacgcaaaatgctgaattttttatgctggcaacttagacaccatctctactgatggactagaatgtattcgttcattatttgtgtcacaatgatgatgattcattcttagtaactactttgtttaaaagaaaaatgtccacgcagctagttgattttctttaaagaaattttatgtatttttaatttttttttatggtttttgactaatagataaatacaatttttgtatttttttaaaagaaaaactgtgcatattttatatttactaaaaaaaattgtggtggacgtactcatctcaactgctgttttatttatttatccacttcctaattaactaagctttagtttttatttttgagatatttttatagttaaactaatcgaagtttcttgtttttttaatttgttatatacctaaaaatttacagtatctcatgcatattgttaatgacaagattaacatgattaaaaacattgttaaaaaacaaattattgttgattgtaatttttttttcttaaaaggcaaagctgtatatatttttaaccttttatctccccaaagatttgaatccccttgggggcttgtcgatagtaaatttgtttttttcattaattacatgaataaactgatcttcattcaataaaaataggtaattatctcttttttgattaattgtttttggttttttttttaaatcatgttatcttgtagtgtacaaggagattg

SEQ ID NO: 89185 - DNA, 583 bp, Citrus clementina
  Intron number 1 from transcript clementine0.9_008471m (loc us clementine0.9_007363m.g) derived from phytozome v7.0 (c hr-ID scaffold_8; pos 674645 to 675227 reverse strand)
tgctttgtgagtgcccatttatacaatatttaccttctttttaagctatttgagttattgatgatttttatcttgtgaaatttagttgtttgtagtggaataagttagattgaggtcagggtttgtggggtttgttttggaatggatgtaatttgattcagaagaagcatatgtgtggatatcagatgaaaattatgtttggatttaggtgaaggcatggagtttttgtctgttaatacactagttgccaagtcaaactagatctttaccaagcacttcagtttttgtgctttctgaattgagtaggagcacaacaatttcacgtataccccaaatttgagtggttaagtacatcaaagaagtaggttttgaagttctttgaaaacagtgcaaactcctattaaattgtcttttttggcatatttttcagcttactgtaaagtaatattttttagtctttttacatgttgcatattccttttaatcagggtagttgtaaaggttgattttagttttatattgcatgacatgagaatgtgtacatgcaggtcagtgcgggtacaacgttgaaaaggtattgtca

SEQ ID NO: 89186 - DNA, 451 bp, Citrus clementina
  Intron number 1 from transcript clementine0.9_017882m (loc us clementine0.9_017882m.g) derived from phytozome v7.0 (c hr-ID scaffold_13; pos 2820657 to 2821107 reverse strand)
tccctccttcttcttctccatcctacaaattccctgtacgtttttctttctttctcgcttacccattactcactttcacttgaatgtcaattcctctcacaaaaagtttaagtcttttgctcttcaattcttccatttatccctgcctaggttttcactgttctgttgactaatgtgtttaatttgatgttgtgtttcttaatcattaatctttgtgctggggttaggatggtaaatttgtaattcttgatcttcttccgtaacatgttttatgattgggattattgatgctaaaaaagatgattgatattgattgaatgggaaaggaacaggatcaagcatgttttgtgtttgaatttggtagaattttttttttaattgtgatctaattggatctgcttttattattttttcaggtgctttactggctctctggtcttacctgcactga

SEQ ID NO: 89187 - DNA, 245 bp, Citrus clementina
  Intron number 3 from transcript clementine0.9_022654m (loc us clementine0.9_022654m.g) derived from phytozome v7.0 (c hr-ID scaffold_25; pos 3363198 to 3363442)
cttcgaggtaaaatttattttatattactttaccatatgatctttaagttgctgaatttgattgtcaaatgcattatgtttttgtttatgtctaggttgtttgtagcaatttgttctctttacctttttcgaattaagactttattctgcaaattcttcatcttgtgcttttttattattcgatttttcatctccagctaaagaatgtattgttgttttttcaatggcagcccggaatcttatag

SEQ ID NO: 89188 - DNA, 595 bp, Citrus clementina
  Intron number 1 from transcript clementine0.9_025332m (loc us clementine0.9_025332m.g) derived from phytozome v7.0 (c hr-ID scaffold_8; pos 1991224 to 1991818)
agccccaaaaacgcagccgctgttgtagagctcaggtaacatcactggccaatccatcaattaatttaacggatctgatctgtttttatctctgttcttctgtatatgttcttgcaaactttgcactagcttcgtgtttttgttgcactttcacgttctataatctctttcgcttgagctaatgtcgtttgttcaaacgcatagcgtactgaaatgtgttttgataatcactaagaacacagcgtaagaaatcgttcaaatttaattttctttagatatcagtcatttgtttttttaaaacttacgaagaaagaagcgatcgctgattgattagtcatttgcatttagcatacaaatatttaggtcgcatctgttcaagtagcattattgaaatttcatcactatattgttactttaatttaacaacagagctctatcaaagatatagagatttcagggcaccttttttcttttcttttaaattttgactatcttatattagagaagtggacgaatgattggctactttgcttctgattttatttttcctaatgagttggatcttttaatgttttttgcagcttcattttgaaga

SEQ ID NO: 89189 - DNA, 1023 bp, Citrus clementina
  Intron number 3 from transcript clementine0.9_018858m (loc us clementine0.9_018858m.g) derived from phytozome v7.0 (c hr-ID scaffold_8; pos 621629 to 622651)
acttacgaacctaaggtatgcaaagtgcagtgcatgtgagaatgttgtccgtctcacctgttaattgcttgttctgagttattattgctgtttatttgtgtttcttcccatgaaaaacttgtgtatgtaatttaccactttagtggagtcaatagatccgtgatgtttaatgcaatttgtttactgggtaaaaaatagtaaaaaagacacttgccagattgcttttcagatgtttaaggaggttcttggcttcctgaatgcatgttgtaaaaaagcgaagcaaaatcttatcacttatttagaatgaatgatgatttctgcagtttagatgcagatataaggcaataatgaaaggaaattaagtaatcttggagttttttatttctggcagtcgggaaatatatagaaagctcttcccatactacattgaacttttagctagtatgcttgaattgtgtttctgatttttggatcaaaagagaactgaaaagctgtcaacataaggttcagtccttgtaaatgctgaagtggaatgatatttgatttttcagtatattattaccttgactggattcaatggaaagatggacttgagaatcttgtgcatgaatattttaacattggtgatgattcctttatttgttttgccttcttctgaataccttttattgtttaatgttttgatcattggtatcaatgttacccaagcatatctaaacttgcatgtgtccaggctacaaggtgaatgcatgaatctattatataaaaggatgccaaactctttgtaggcagttatttcatcatcatttctgctaaatggattccctaatgccaattcttttgattaacactttgaatgacaataattttgtttgtgtcctccgaaaaataaacgaaggcttcaatacttttaaactctgccgttattacttccggtattatgcctttttttttgggccatgcttgagtaatatatgtctttctgcaggatcttgatcttagaaagccaggagtacgtaaaac

SEQ ID NO: 89190 - DNA, 362 bp, Citrus clementina
  Intron number 1 from transcript clementine0.9_003519m (loc us clementine0.9_003519m.g) derived from phytozome v7.0 (c hr-ID scaffold_39; pos 650935 to 651296)
tgacctgcgtcgttctgcttcaagtcttgtagctggtgagttcggtttttattttaatctcttccgtaactttctttataatttgctaatgtgtatgcctgtgtcttgttttttttttttttttttcttttcaatcatgttttggttgctaagaaaatgaatgagagaaaaatagaagtagttgtagactttgattagaagaataagaaaaaaagataagaaggtagctatgttgattgtgcgcggatctatactgatgtttctcttggttcttttccttctgttgtatgcaaatacttcgatttacaggatcgttgattttttttttatttttaatttttgatttttcagttaattgaagc

SEQ ID NO: 89191 - DNA, 701 bp, Citrus clementina
  Intron number 1 from transcript clementine0.9_027645m (loc us clementine0.9_027645m.g) derived from phytozome v7.0 (c hr-ID scaffold_148; pos 93173 to 93873)
cttcgccatttctccgtcgattttctcccaagctcgtaactttcttttctctcttgcaaattaatattataatttttattatgttttgttttaattttagcttctttatttttgttgttgttatggtttgtttgtttctccaatttcagtaatttaatgtagtttttattatgaagttaaagtgtatttggtcaaaagctgattttgattaaaaagaaagtgtttttcgtacgtgtttcctcagaagcgcttcctgatgcatcattacttctttctttaaattgataggaaattgaaaatgaaatgatttgattaggctataagataaatgaatccccgacaaaattaagaaaaatgttgatgctaatatttgtaagcctgttatgattcattcaatgttattggggcaccagtccaaaattgggtttgatgagtgaatctgactcaaaaggttaagagaagtgcaggctttatttaatgttgtgttgaaaaggattaagatgaaagattctggaatctttttaacagaatgctgtccaaagttccctgatgaaggcttgcagttgtgttgcatgtgctaataaaaaatggttgctggtgctggttaaatcattactgttttgtttattgccagattttgatgctgataatgttcatttgattataggcgtttgatttttgaaattgtaggggagatcacc

SEQ ID NO: 89192 - DNA, 626 bp, Citrus clementina
  Intron number 1 from transcript clementine0.9_013774m (loc us clementine0.9_013774m.g) derived from phytozome v7.0 (c hr-ID scaffold_87; pos 554029 to 554654 reverse strand)
gcaaagagagaaagaaagagagagagagtaatcaggtaattggtttttttttttttccgtttatctgatcctttgatttcccttaagatcttggctgcacttcgtttgctatctgtctttgttataattagttttcgtttttcttaattcccttttcctcttcttttttaacccttttttcctctttactttgttttttgattgaccccattgctttgattttttttttcttttttcccttgttttggggtcggttctgtttttgatctctctaattttctttcctgttttttcatggactatgattatcatccgcgcgctttaggggtatgaattttattgtctttcttttttttttcgttaattgattgttaaacttgtcgttttgaatgattttattgatgggtcgtgagtggtatatttagaacttagtcggctttttatttttccccaattttctgaaatgaaatacccttttgcagcaaatttgaatgtcaaattaacgctgtatggttatacatcattttgctgtcaaatctttttctcattttgaatgttggcttatgattaatttgtttaattgcctggctgtggtgcggaatttcgtgtgtaacgtgtgcaggcac

SEQ ID NO: 89193 - DNA, 977 bp, Citrus clementina
  Intron number 1 from transcript clementine0.9_008549m (loc us clementine0.9_008549m.g) derived from phytozome v7.0 (c hr-ID scaffold_11; pos 2753050 to 2754026 reverse strand)
ggttatttgctcatgtatgtttctttatttcttggatttccccccctttttttctttccgaacgttatgagtataattttaagtacagtttgagtttaaatgaactgctgaatgttttagattttgttgtttctatgagttgttattagagctttatataagaaaacaattatttggaagttcttttttaatgcaaatgttcatacattttaaaataatttaacaatgttatttttatttaacgtcaaatctgtattttaaaatgtgtaaatgtatgtaagagcggagttatttttatttagtgtttagaagtgttttcggtatttgataaaaatgtagcatctcttttattgttctctttggaatattttgacagaaagttttaaaaaatattacattttttttcccaaaaagaatgcttgaaatatttacataaaacaactaaatgtttttgtcggagatattgtacaacgctttctacgaagtgcttttttttaaaaataaaaataaataaaaaatcttgctctcaatctcattattatatttctcatgtgggtcgagtattctgaggtcaaaagtttccttaattctcaaaaagattaagcaaaagtaaagaataaattaaactatcctttcctcaccatattcgttatttgaagcactactccatcttcttctcttttttttttttaatattatcaaatgtaaaaatataatttttagattcaaggtatttccttgtttaattaaataccattattatccagataatgaatatggagtccatccatgcctcaaaatatcatcaagcaccatagttacttgaaataatatttagtttcccaacaaagaatgtctttctttccaattttcttgtagaaatgttttatttggtgttattataataactttatgttcaattttcacttatttgttcatttaattttttgttcaggttgatttaactggaggttact

SEQ ID NO: 89194 - DNA, 407 bp, Citrus clementina
  Intron number 3 from transcript clementine0.9_011747m (loc us clementine0.9_011747m.g) derived from phytozome v7.0 (c hr-ID scaffold_75; pos 1199883 to 1200289 reverse strand)
cagccaagcggcgacttctgtcagctgttgtcaaggtagaatccggaatatttattatatctgttaattaccaagtcatttgagttcattttcatctgttgtttttagcttcatataaggggggggggagtgcccttgtttcatgatcaatgctggattgtctgctctgtttcattcataataaattaaaatatatgaagaggaaataccagttaagtgttgtgtgcttttgcagttttttctcttttccaaatgatttgcaaagggcctgaaatttaagccatgacagttaggttcagttgaaggaaagctttgttattattaatatttttctcttaattttgcttgattggatagactaactagtgttttactgaataatgtttgttttgtaatgaagttggagg

SEQ ID NO: 89195 - DNA, 928 bp, Citrus clementina
  Intron number 1 from transcript clementine0.9_003637m (loc us clementine0.9_001912m.g) derived from phytozome v7.0 (c hr-ID scaffold_12; pos 3357613 to 3358540)
tttgttttggagactgagacttacacttgtacgctgtgagtaatgatttgggttttgcttcgtttttattcttgtttttgtttattttgttatcttgaatgtcagttatgagctgcaaaattggtaactttactgtatttgctggtaatttttgtgattttgtgagttttaatgagctcatgagctggtggagaatgagtttgaagagggttattcgagttttattgctttaattaagattaattttgcatttccagttatttgattttgtttttaaggtgattgtaagacttcgactttggtttagttattaccgtcgtgttgagttttgtgtttttaagttagatatatgaatggatgagtttatagatccacgctgaaagagtgtgttatgtgttattgagctttgagcatcttgtgttccaatatgggatataatgtgagtctaaagcggggatctcacttgttttcttatgctgatacattatatgtccctttttttaatatatagtcattcctactatgttttagagtttatgaaaattggtttgttttgggtaggatgtctaattgagaagtgatgggtagtggggcactgatgaaagcagcttcatttgttcgtgttgttgaactgcatgttcaaaatgtgtttggataaaagaaaagttcttgttgcatgcatatctgctttgtgcctggatcctattatggtttggaggcctgagacaattggcttgtaccatgaatttgaagtttgctggtcatataatacgaagattgtgtgtgtgcataggtagaaatttttctatatgaattcccttgctattttctgccttgacaagatcttttaaatgtgatattttgttcttttaaatgtgctattttgttcattcattgaaatatttctggtgtaggttaatagtaaagc

SEQ ID NO: 89196 - DNA, 902 bp, Citrus clementina
  Intron number 1 from transcript clementine0.9_035457m (loc us clementine0.9_035457m.g) derived from phytozome v7.0 (c hr-ID scaffold_193; pos 14864 to 15765 reverse strand)
aagttgctatatcctttcttggtaagatgctctgttcaggcttcaatgtacttggcttgaattggcaacttaactcgaatcaattcggtttatgcctttgatcaaactcattttgcctatccaagaatctgcaaaattaattggtattatcatatcggtgctgcttataattggcagtgcttgcattgccctgaatccaggcgttgctcgagtaaagttgggcttccttattcattttagtgacagatgaaaacattaaaaaaaaatatcaggacttgtttgtcaaaatttacagatattttgttctttaattaattttattgttacaaacaataggatagcagtgtcgtcgaaccagttgcttacacctggggcaacatagttttttttttttttttttagtttgtgagatggccaatatatgtgtatatatatatatatatatataattattgactcaatgtgtaaaaggtaccaatattgactcaatgtgtcaaatttcttgaaaagtttaacatcaaatgccttttttccactgttgttagtataagtcaaatttcttgcaaattttctatgggtgtgatgatttttttttttttaagtgcaaacggcccacccttctgtccttcacatgttctgcgttccccatgttcacattttacaatattaaatagagaattttgagtccagaagcaatgactttctggtcagtcccctccaagatggattatcagtaatggtgtttaattatatttatttaatttgttagagagagctctacgtctatagagtataacaaatggatgtatttatgttttccttcatctgttgtaagttactgtttttcttgtctgaatcctctttcgcttccgacaccattacttcatctcagtccctcagtg

SEQ ID NO: 89197 - DNA, 972 bp, Citrus clementina
  Intron number 1 from transcript clementine0.9_030039m (loc us clementine0.9_030039m.g) derived from phytozome v7.0 (c hr-ID scaffold_11; pos 484916 to 485887 reverse strand)
acctccgcttaagctattgtgagaggcttcaatccgtaccaaagcttccattccttatacgatgtttagatgccgataattgcacatcgctgcaatcattatcaggtttgttcccaagttctgaattttatatataagcagtgtttttttactagagcaataatttttattcccaagttctgcaatcatttagtgctattgtagcattttcagaccgtcatgtagatgatgacagatggttttcattttcttgtgagttcaaaatgaaaaccgaagattgtgatccgcatgtcacgcggagatttctgaagcgccttgcttacgtagaatcagctcacttacttttggggtgctattttcagtgaggaggatttcaatggtttttggaaatataattgcgttcctgaggcagtccgcttcttttttgatgattttgatcgttttccatctttggagtgcgagtgctgcggggtgaaaaaatgtggagtccatttactttacatcccagattctacggattcaatggaagttccaagcagatgtttcaactgttacgaagaaggcttaagattttcatgaatgtaattttatttttttctcttttgctaatcactattaataattcaaaaaaaaaaaagccaagatcagtcttggaacaaaacatgcgtgtaatcattgccgagggacgtggtgcatgtaacacaaattcacactagagtgttgaattataccgtattagatgaagggtatagtgaaagcacgtatgtagcattgtaaaattactggccttcttttcctgcagatttaatctacttggcgtgttatttttttccctatttttttttaaatgcaggtgtttcattcatgatattttaggataacgaaaaatggactgaatagagagaagagaaaataccttcgtttcacatcttcaaagattgcatctgcaattggcctttgcttcaacaaagg

SEQ ID NO: 89198 - DNA, 564 bp, Citrus clementina
  Intron number 2 from transcript clementine0.9_002899m (loc us clementine0.9_002899m.g) derived from phytozome v7.0 (c hr-ID scaffold_11; pos 5063109 to 5063672 reverse strand)
aaatcgacaatcttgtggttcctcaaggtaaacaattaaaatattattcaattacattattttaattcatttgattagagaaggccaaaaaggtcccaaaaaaattaataataaagaaacagataatttgtattatttaaaaaaaacagaatgtaataaagatttgattccagttctttaatctttaaagcgattgaaaaacaatgttgctcttttcccaaagtataaaatacgaattgaatgccaattaacttaatcattcatttcgtttagctctaaatttagacaatgaatttttatattatttcaaaaacaggacgtaatagaatttttttaaaaacagattgtaatgaagatttgattccaattttttaatctttgcagcgattgaaaaaccataccgctcttttcccaaagcataaaatacgaattgactcccaattaaattaatcatttattttgttcatctctgaatttaaataatgaattttgatcttcaatcatattctaactactattaaaaaacaagttacaaaggtttgaggaagctgaaaagccttgatc

SEQ ID NO: 89199 - DNA, 627 bp, Citrus clementina; identical to SEQ ID NO: 79915
  Intron number 2 from transcript clementine0.9_032744m (loc us clementine0.9_032744m.g) derived from phytozome v7.0 (c hr-ID scaffold_21; pos 576953 to 577579 reverse strand)

SEQ ID NO: 89200 - DNA, 732 bp, Citrus clementina
  Intron number 2 from transcript clementine0.9_001957m (loc us clementine0.9_001957m.g) derived from phytozome v7.0 (c hr-ID scaffold_93; pos 122111 to 122842)
tctggtgtctgtgctgatctctgctacgattgcgggtacttgttctctttatctaatttaatttttagaatttttcctaaaattgggggttcgaaagttgagatttttcttcattaatgcaattcttttatattacagtttaattgcaaaatataattagcaacgctactggttattgatatattatactccgcttagtttgttatttttatttttgtttctaagatttttatagaatcaccatcggtccctataattttcccaaatataactcttcagtcccaagccccgaataatgtattaaaatagtcttttacgtcattgttaattgaattgatgtgatgctttgcaagttgaaaggagtagcaagttcaaatgcaccctgctctgtgtttttagtttctgagctatgtgagatatctggcttattagaaattctgtgggactttttttgagtttctgtaatgcattaagtttataattttacaagttaaggcaatgtcttttattagtttctttcactaattgacattctacttgtatattcagatacatctctatgttcaacaaagaaatattgcacgactttttttttttctgtttttaatcattatttaaacattttttgaccattttagtagttttttttaatttgttcattatattctattgtattgattttttttatcgtttcttcctcgatttggaattgcatgtactttagatctgcat

SEQ ID NO: 89201 - DNA, 780 bp, Citrus clementina
  Intron number 1 from transcript clementine0.9_014709m (loc us clementine0.9_014709m.g) derived from phytozome v7.0 (c hr-ID scaffold_91; pos 316759 to 317538 reverse strand)
catcggagctctcccaagtttctacggttagtcattgctcttcatccctcaacactaactttgataattttttttttcccaattcatttaaataactttttaattttaaatattggtctcccaagttcctttttctcaaatgtagaataagattgatgttaatggatttgctctttgttgaagccaattgaagatttttatacattctgtggcctgttaaaaaaatgaatagaaaagtttcttaggattgccaatactaaatcttgagtgtgtatgcattggtaacaaataaaaaagaagtgggatgaacagttttgtgacatgggttttaataggtatttgggtttgccaagtaatgcttgattgtttaattattattattattattttgacttgttttatattgtttgttgttgtctgttatgtgctttgtgtatttgagagatgccctccatataaaggtgcattgccggagattctcgtgcctcctctcaagggcagacctcatgtcatgcaatagtctgagtctgtttatgcataaatcatctgctgcagtctgttctttgaagcaattattttgtgctcctgtggcagaactttgtattgctgcacatttatttattgaacattctgttgctgctgtgcttcagtttgatgattttgtggtttctattttgaattaaaatttgtaatctaaatcatttctgtggtccttcttgacatttgttaattcttcttatgacagagaagaatttgcttcttgcgtatcccttatcgttc

SEQ ID NO: 89202 - DNA, 861 bp, Citrus clementina
  Intron number 1 from transcript clementine0.9_005964m (loc us clementine0.9_005964m.g) derived from phytozome v7.0 (c hr-ID scaffold_8; pos 3097848 to 3098708)
aggtgagttggttcgctaatgtatttatttcaacttactggtagtgaattttaagtttcatctggttgtgttttaagacattaacttctaagtgcttgaatactagtacattctggttaatgatttatcaagcaataacgatatttcttaaactgcctacacttggcactcgtaaaattcaccacgtgctagcttgtggtaatgccatgtgatgttgggattttgtgtcccaactttgtcaacatagacttgttgtataaacattgtatgggatttgctatgactgtattgtacattggcataaagcattgttgttgtttagagttcttgtatgaccgtcttgatagaaatttaatgtagaaaactctcctttgcttgacccacatggttgattacacatatatacactttggaaacgtgagatgttactcagttgtgctactagtatacgaatatttttctagttggtttttaatcgcaattgaggataagatatagctgccttattttgactattataaaacggctttttttacgtattatctattgagcttaggaggtaactttcaccaatatgaaaagagttatgatcatgcatacagaaagtaagaagttcacttcatcattaatggatatgatcatgtacttttaaaaataagtttagaggaaagtaacaatatagacaagaagggatgttttaaatgttttaccgtaagtttgaactaaagcctgcctatgatccaaaaatggcaatatgttatttgaaactttttttctctctttttcctgaccggcaagttaaatctataaacatacctgcagtgttatctcattttttgatatataataaagtgcaggacg

SEQ ID NO: 89203 - DNA, 459 bp, Citrus clementina
  Intron number 2 from transcript clementine0.9_019285m (loc us clementine0.9_019285m.g) derived from phytozome v7.0 (c hr-ID scaffold_61; pos 543122 to 543580)
gtcttggctgtggcgcttgctaccaggtacatatatccaaccaaaatgcctgagagacaaagtgctaattgagcaccgacggaaacagggtaaagccaatgctggtttagcttgttttcaattaaatgagtaaaccggcaccggttttaaccttgcttttgtcaattcttttctgtctaaatattatttttcaaatgcaaccaaacaaaattttcaaacagtcattgtttctttttttcagttttccgtcttgtatgcttagctggggcaaatgctcttttaatccttaccgtttgagttaaatgcgtaactattttatgtaatttcaaacttaccagcatattggatatatgtgattattatttttaatcatattgtcataatttctgtttataatatatttgtgtttcaatgatcacaacaggttaggtgtttgaacagctactattgctcagacag

SEQ ID NO: 89204 - DNA, 500 bp, Citrus clementina
  Intron number 1 from transcript clementine0.9_016072m (loc us clementine0.9_011768m.g) derived from phytozome v7.0 (c hr-ID scaffold_12; pos 4641277 to 4641776)
tcttgcctcccgattctcccgtcctcattttggttaggcctctcctctttgaactcttttgtttttgttcttatttttctggtgactcttcgcttcgatagatagaggcggtggcgtactcgtattactggtgccagtatttttaattcttcattagctaatttgaaagattatgtatctcatgctatttattatttaatgagatgtgctgagcttttgatggacctgtttacattctcatctcattcaataaccaccgatcacagtcttgtatatgtatgtgtgcgtgtgtttatatatatatgggattgaggtgttgcgaaaaattattggcattcaaatataagcagggtgacttgagtgattagtaaaactcggtaatgtttttaaagctaaatagaagcacaacagttacggaaggttattttgctggagatattgattttgattggtgattgcagccaggtttaacaggagggagtgaggattcatacgtcagg

SEQ ID NO: 89205 - DNA, 966 bp, Citrus clementina
  Intron number 2 from transcript clementine0.9_019599m (loc us clementine0.9_019599m.g) derived from phytozome v7.0 (c hr-ID scaffold_37; pos 1245364 to 1246329)
atcactcacatagccccaccatctccgtcaaggtgtgtgaattttttcgatttcgtagttttggatcattttaggttggaattttattttggaaaagtttgactttttttaaattttgatcaaattgtagggttaggtttcggcaatttttagtgacagtgtgttgagtttatgtcgattggtgatgaatgtgtatcagctagaaatgagtttgtatagttataatattgattgttgagaaaataatttgtttggttagggaattggtttatttctcgcaaatgatgtgtttcagagtgtttttagtagcggcaaaaagacctttaaacaactagaaatgctgttgtgtttattttgtggtgttcgtttgaaatggataaaaattttattttcatggcgctcaggtctagacgtccggatttacaaaatccggatttaaactagaatcagagttgtatagcattgtaaaataatatgtccgggcatccgaatttgagctagaatcagtgttctgcaatactgtaaaataattgtacaacttccagattttacaaaataaccatataaatatgtagtgatttcgaaataatcatttgatagaatgattcttcagaaaatgaaattcaagttgctaaagcacttgatggttgcattctcccaaaagcaaacccaggaggttattgcgaaaagtagttttacttgttaacactttctgctaaatcacttccaaaaatagcttaattttgtcatgggcattgtaattatagttggaccattagagtatgcttttgtttacaaataagttgtatttttctgtagcatttgtaaatgaaatatggattaaatgaaacttcttgtttatttgaaatcgtgtgaggaaatgctgttccgtcctttttttccctttttttttatgtgatcaatttctgaaaatgtttcatgttttacgataggtgacatcaccat

SEQ ID NO: 89206 - DNA, 1018 bp, Citrus clementina
  Intron number 1 from transcript clementine0.9_016234m (loc us clementine0.9_016234m.g) derived from phytozome v7.0 (c hr-ID scaffold_28; pos 2714307 to 2715324 reverse strand)
gaggaaacggtgggtaacatttgagccgccggcatccattttggagtcaagtgcgttcttaaatttgatttgtgcagtagtgttgtgttttggtaaatcttgatttgggtattagggttttgaaagcggcaaaataaataatttttttttttgtatttttaataaggcgtgacacattaagaccttaagtgtttggcagatatttgctcgttaattttttaatttttttataagcattattgttctgaattgttaagaaaccacaaggtggaactcactcgtaaaaaaacgattagtaagaaggtgccttggagttaataaactaccaactaatcctaacattccactctccttcataatctacgacaacgaaggttcacacacgactacgataccccaattaggtgataccctcaagatcacgactacgatgattcacatactccgactaggtgacaccttcaaggtcacaagctaagaacactggcaagggctaacttcagaggtaccaatagttacgacccacaaggtggaactcactcttaaaaactaacttgtaagagggggtgccttgaagttaatgaactaccaactattcccatacctagtcaatgtggggtcctaacatcaatctggctcatccatattgctaaaaggaaagaattagtaaagtaattgaattgtgcttttctattttgtgaatatgaaagaaaaaaaaagacagatttttatggaacccagttgcaaaacacacatatatatcaaaagttttagcttttatattttttttgcaattgagataaaaatactttacttctctatcttgatattttctttgcttataattaatttgagaagaagagaagaagagtgcttggtgcctcctgccttttgggtactgggtttacaattttatctctccttaacattatctatatcaatatatgtatttgcatttgcaaatgaatctaatatggttgctgttttaatttctcttgcaggctgaatcctggagcag

SEQ ID NO: 89207 - DNA, 919 bp, Citrus clementina
  Intron number 1 from transcript clementine0.9_031353m (loc us clementine0.9_031353m.g) derived from phytozome v7.0 (c hr-ID scaffold_13; pos 3526792 to 3527710)
agttttcaagttcaaggttcttttttttttcttttcttttttcttctttctaaaagccatttttgagagatctctaaatctttatctttgataaaattagactttttttttccaattttttggttggttggttggttggtttggtctatgtatgcatggctctatttcatagcgcctttagattagtgttgttgaattgtgataaaccctttaaccgaaaaaccaaaaaaaaaaaaagtttgtttaattgctaaaagaaaaaaagaaaagttcatatagagtttgaaaatatgtagaagaagaagaacagagtaatgatgtaataaattaaaagttttaattcttttttgaagggaaaattggtactaacagtaaataactaatttaagtaagaaaattttatattgaggaagaaaaaaaaaaggggtaaaagatcattgggcaaagagagaaaaaaggtaaagaacttgcctaacaaggaaatagtgcaaatggtgtgttgggccgggccccaaatccatgcaaaaccctacatggacctaactttaggcccagtttatcctgaaaaagtcccacttttttgtgttttttttgggtaactctaattacaattctgataatagagagagtgcactactcccttatatatatatatatatatttggttaattctcaatcaaagctttctggagctcaaaaactaggcgggcttgacccatatgacgggcttactaaaccctcaacaaacaaaacgggctaaacccatagtgggtccagtttatccctttgatgatattattatttacagtaggaattttttattttgacagttatagtaggaaataattagtcattagtttaaaaaattttatatttatttattgactgtataatttaccgtatccgtatgtattgtagc

SEQ ID NO: 89208 - DNA, 766 bp, Citrus clementina
  Intron number 1 from transcript clementine0.9_003168m (loc us clementine0.9_003168m.g) derived from phytozome v7.0 (c hr-ID scaffold_16; pos 2747972 to 2748737)
gcgttaaggtagtgcaatttctttttctttttcttttttttaatttatatttcgttcttgaacaataagtgcttagttagttgaaaattaaaagacatgccttttatgttttgcttttgttttctttgcttcttgattttaattttgtgtttgtttaactgtttgtagtgtatggagtttaagggaggaaatgattgattgtggataaaaacctcatataagcttttactctttgtagtgtttgctttttctttattcaactttattaatgatcttttaatataatatgttcaacgacaatgtacacatcaagacgattttccttttttctgcgagtttgtgtgtgagtagggggtggggggttaaattcttgaatgaaagattgatcaattatgggaaatgaccatagctgttataacaataattatagagactgagcagaaattttttcggagggcaagtactatgctttaaagttggtgcagtgtaagctcaaaatgtctagatggtatctatgatatgattacgacatggtggtgcaaggctatccaattgggagttttttttgaattattattatagaccatgatttgccttttattttttattcctttggtagcttgacattttgaatattgatggtgtactttattctcaatccatgagagtggtaagtgaatgacttgaggaattttaattgtatatgatgatatttctcttgtgctcatggaataataggttttagggactttcatcacagaagggg

SEQ ID NO: 89209 - DNA, 780 bp, Citrus clementina
  Intron number 1 from transcript clementine0.9_025935m (loc us clementine0.9_025935m.g) derived from phytozome v7.0 (c hr-ID scaffold_79; pos 1096391 to 1097170)
cgtaaggcagtttgattcgcaatcttcctcttaaggtaacaatcgatcttcacctcgtgattttatgttatttatcaattaatctttggttattattattattattgttattatctgggtaggtaaacgaatctgagttctcttcggttgcttgatgtgttttcttttgagcaaaatttttattttattcgatcggattattgattgtgccgaatcttggtagttgccctaacctagggtttttggattgtgtgtaggatcaattctgaatgatcatgtttttatttggtatgagcttgtgtgtatatatggtcatttttgcttatgatcagttctattttggtgtctgcatgtgtgtgtatacatgttggtgtccgtgtttggttctctttgaatatttgggtgaggaatgattagggctttttgaatctcatgtgtatgtagattaatcgggttaaaaagtacaatagttcattggctgatagaagtcagggcactgaacataatttaagatgatcatcgagtgggtattatcgattgggtacttgcaattaatctgctgagaagagtagtaaccaaagacgatcatctatgtatatagcatgtgatatttgattgctagtagcttaaatgtgttttctaataatttagagtagttaggaaattcatggactgttgcggttaagatttcactcgttattgttttgaactttgtctgatagtttcttcctatcctctcttccagctaagagcaatttaagtgaattgaagccaatttct

SEQ ID NO: 89210 - DNA, 798 bp, Citrus clementina
  Intron number 1 from transcript clementine0.9_011705m (loc us clementine0.9_009477m.g) derived from phytozome v7.0 (c hr-ID scaffold_12; pos 1370561 to 1371358 reverse strand)
ttgctgaaactgaacagtttttgctaaggtatgctaaaccaatcattcctgtacggttattatcaaatgctttctctcagattttcactttatgtttctttgttgctaaatttagtactagacaaaattggttgctgggtctgcgaatgctggtgaagatctgaccttttttgcagtcttgagtgattttgcattgaagggcttgctctttttttttttttttttgggttgggactttgggactattttccctagttcattttcaattttaatcttatttgttctactatgacttttggaaattatgtatttgtgggagaaaaattccaaactttatctgttgttcttaatgacacctagactttacaaagttttgactggcttttaaaatttttggataattatggaattaaagatgcattttcatattgtggtcacgcttcaagtctttgatttctttctttttccaaattgtcattgtttttcttgttggccgcacatttttggatatttgcaatataaaatatatattcctaagcatctaattggatttttccaatttggtgaatagtgcatggaaaaatttagaaaaatttccagttaacggcacacgatggagtactttcagttagttcagttgtcactaattgtgctttatctttatcattgcgagttctcttttggtcaacttgggttcagaacgttgaatttgcttaaggtctttacagttatggtcaattcacttagtttttttcatattggttggatgttgcagaatatctgttggttatagagttg

SEQ ID NO: 89211 - DNA, 651 bp, Citrus clementina
  Intron number 2 from transcript clementine0.9_031651m (loc us clementine0.9_031651m.g) derived from phytozome v7.0 (c hr-ID scaffold_21; pos 3656990 to 3657640 reverse strand)
aagctgaactatctagaaaatagaggtgatatttctttactggtattagttcatcaccttctcagagttcctgcatagcacacttctttctaccgtttgtttgtcccttcatcttagcatctcagacattgctgtaaacgggataaccacacagtctacacttgtgctatcatcaaagaatttttcatgaactgttatttttgttatttggaagtgaatattttcagcaactagaactcggaagcatccggaatgatccattttttttttttttttatgtcaaaacatgaagtaattaaaggaggtcaaacaacaataaactcattcatcttgtccaaaattgaaaaagactacatagtaatcataattgaaaacaactaagcacaaaaacaaataacatcctttttcaaaattatgttcccatgaatcttgtctccacacattaaagaagactaaatctataatgaggtgctgattcacgcccaaaattacccttcaactccttaagcagaggcagctgctcccttcttccttggtgctgcctgagtaccttctctgaagccgctcttgaacctgcgagggacatggcgcagatacctcatcctgccggttccagtggtctttcttcggattgccttcacactccagtta

SEQ ID NO: 89212 - DNA, 727 bp, Citrus clementina
  Intron number 1 from transcript clementine0.9_022643m (loc us clementine0.9_022643m.g) derived from phytozome v7.0 (c hr-ID scaffold_13; pos 3498556 to 3499282)
caccagcacactgccgcaagcagtcaccgtcgactgtgagttagtaattgttctttttttttaagttttttattcttatatttgggttttgggtaatcagtttttaatacatttatgtataaatggatggttggaataataatctaactaaataaattttttatgattataacatcaaattatttaattgcttttttctaaaaaaaaatctggaaacaaatgctaattaattttttttttttgtttctcactggcatgtatgcttttagagtgtaaatgaactgtcaaaaagtaattaagcacaaaatctgtagataaaggcgcaagataaatctgttagagaaaagagtgcgtttcttgattcttttttgtagcttttgtggaagtttaatctgtttttgagtttaaattgttggaactgattgtgctgtttttttttttttttgaaagggtgttgtttttaagcttgaatttgtcttttttttttttttctttttcttcttctgatagtttgtgtgcaatcgatttttgaaaatctaatttaaaattattttgttggctggtttccattttgtttcccatttctaaggatgagatagtttctcttggtgatataggggtataaccgctgattttttttttttttttcctcaagcggttggaataagctaatgaggagttgaaatctgcaggtactaacattttttgtagagactctactcgagtt

SEQ ID NO: 89213 - DNA, 331 bp, Citrus clementina
  Intron number 1 from transcript clementine0.9_033811m (loc us clementine0.9_033811m.g) derived from phytozome v7.0 (c hr-ID scaffold_12; pos 1443486 to 1443816)
agctctctcaagagaatctcaaagcaattttactggtctcattctccctctaattcatacacacacacacacacacacacagaggggcggactcatgttggtgggtggatgaggatgggggtgtaccccatatgtaatagaaaaaaataatgataagataagggtacaaattaaaagttagcacattccaaatgatcttacctttagaccacctcttaaactatataattttgattggtcaaataagtttgtattcttttcattctggccacatttgattgaacaagaatcttggttctagcagtgcattttaatttactttttgcaggat

SEQ ID NO: 89214 - DNA, 502 bp, Citrus clementina
  Intron number 1 from transcript clementine0.9_010337m (loc us clementine0.9_010337m.g) derived from phytozome v7.0 (c hr-ID scaffold_99; pos 663446 to 663947 reverse strand)
ctggtgagaatttgattaaccctttactgattatcattatttttaattccgtggtttttattttaaagcatacctgttagtttgctttgcctactttcttcttttatcctcatagtattaaaattaccgacattcatctgaccacattatgtaatgagaacttttgctaagcacacaaattccttcttttgcgctttactttctggcaaaaaaaatttacttacttattagagaatctggattcttctgcaaattcttttcagaatatgaaaaaggtctgcaatgattatcacttaaacccacaaataaaatgaagcttatggaagggtaaattgagtcattgatcttccaaatgtctgcttttgcatttgcttttgcttttgggtttcttttgagccactaaaatgctcgcatttgaaattttaaagtagctttatcgagaagctaactttactctcttttgacagttactgagcttgtagaaggggattcatcaaggaaa

SEQ ID NO: 89215 - DNA, 554 bp, Citrus clementina
  Intron number 1 from transcript clementine0.9_007868m (loc us clementine0.9_007868m.g) derived from phytozome v7.0 (c hr-ID scaffold_91; pos 811408 to 811961 reverse strand)
atcactctttgaagcccttcaaaaagttaaagaaggtctctccccttttaaccccttttcagtttttttcttattattattccatgatatagtatttgaagttcgaagtatgtcaccatctttgtcccgtctgcattttttgtttttttacatttcctcaggatgatttattatggtcaatgttgtttgcttctttgtatgtttttaatttaatttaagtttttttttttcttttgggggggggggggggggggggttatctggtttttgagtttagtagttattccactaaaaaaaaaaaaagagcaaataaaaaaaacttcccatcatgatactgtgttatgtatataggcaggtatgcgtgtatgtgaataagaagatctgtaaattaaaaaagggatttgtttttggtttacagattttgatgtgtatttgtgagtgtgaaaaaaaaaaagaatccgttttttcttatatttttttgtgaaaatgtttgtgtgtgggaattctttcgaaatttgatttattggaagtttggaattgtgatggcagagttg

SEQ ID NO: 89216 - DNA, 671 bp, Citrus clementina
  Intron number 1 from transcript clementine0.9_006636m (loc us clementine0.9_006636m.g) derived from phytozome v7.0 (c hr-ID scaffold_44; pos 181169 to 181839 reverse strand)
caaatttaggtactgaaactttcaatatctttaattgcacattaaatcagtgggagtttgggactgtatttggctttgccgatgtgaaggtgtagacatgtctgctacttgtttatgcaaagtcagcttatttttcatgtagttatggcttcacatcactggtttgtaaatcaatagaacagctctagccggagaagttagggtttttgatttagatgctattaaagtttttgatttttctgtagtctttttattaatgcctctatcaggtttttggtttagtgttcttctggttcattttgtatcaatataagttatttttctttttttaaaaaattaaattacgtcttcgtaatactgaactgtttactcagtgatgattgtcacatcaaaattgtgggattttttgtctttgtgcatttgcattacagacggaacaaattttgattttttgaataatctcaactattcttgttttggccttgatgaggtgttcgtttatttgcatcttcatggacgggaattggttaagaaaggatgtaataaacatgtgatgtcatatgatctgatattatgttgaacaattattctgtggagatttgtgaacaatcttcttgctcaagatttatgttattggatttatattgcagccagggctggcactgctgaaa

SEQ ID NO: 89217 - DNA, 648 bp, Citrus clementina
  Intron number 1 from transcript clementine0.9_006271m (loc us clementine0.9_006271m.g) derived from phytozome v7.0 (c hr-ID scaffold_12; pos 2362252 to 2362899 reverse strand)
gaggataagcgtagaaaagggcatacttttaaaaagttagttgcctttttcttgtttgattttctcgcttattgactgtttttggtattactctttaagtttatttttccttttcttttatagtttagatttgaatgagaaatgagttgggggaaggcttatttagctgaagattgttgaaagttttaattgcacagtggaaaattgatggaaagggaactgaatttgcttgttgagtgataattaaataattttgatcaatgtgctctgcctatgttatctgttatttgaaatcactgagccaatgttcaaagtcgagagaaaatgaactgggccaggtgacaggtccgcttgtgtactggaaaattatgaatttgtggagtataggcaaatgtatacttactgctttatgctgcaaggtgctgtaatttttatggttttgaagttgggccagaaataagtttgctccactgttctgtgtttatgtaaataataaatcaacggatcagcttctctctcacttctatttagttgatgccttgatagtgcctgttgaaacatgtttgtgcctttttcttctgggttcattttctcttatttcagtctctaatttattagttgactgtgttcagtgtggttcaggaggtt

SEQ ID NO: 89218 - DNA, 709 bp, Citrus clementina
  Intron number 2 from transcript clementine0.9_000650m (loc us clementine0.9_000650m.g) derived from phytozome v7.0 (c hr-ID scaffold_16; pos 1492305 to 1493013 reverse strand)
atattggaggtaattttgtcagagtaggacattgttttgagggagtaatttggtctatagaatactctttcgtgtctggttgctgctattcttgttgcttaacttctcatccttctggtgttgttatttagcaagtgtgtcatcctgcagcttttacttgaaaatatttccattcatcgtgctgctgtcatctggttaaaatatttgctagtctatcatgatcattgtcaatgattcatttgttggttcctgtaaacataatagttgtgctttctccaccttaattgctttcgtgctcattgtatgcattggattggtcatgtgcaacatagctctgacatttagtaatgatctaaagtttccgcggctaataatttgcatcatagtagctggtgttcattatcatgaatttaatgtagcagactactagatctccaattaatcaacacaaaataatataatttacagaaattccttttcagacttgtgaatagaattcagtttttgttttttattttttttattgttgtgaactataaggatcgactagctactgttgacttaaatacatttaacattgtacctttttatttttcaagaccatttatttttgttttaattttttttttatctttcaatttgaagatgtttaatatttttttttcctggtttaggcactgataagcctgaaagaagaatccaagaggct

SEQ ID NO: 89219 - DNA, 635 bp, Citrus clementina
  Intron number 1 from transcript clementine0.9_025596m (loc us clementine0.9_024588m.g) derived from phytozome v7.0 (c hr-ID scaffold_12; pos 1513427 to 1514061)
tgatactgttcctgtacacaggcggcgaagagagagtaagaagaatagccttagaaatttgtttaatcgtttctcttcaaggagatttcatgagggtcatcaagttcctcgggacggtgacactcaattttgattaattagtgccgcctttattagaaaaataattaatattaatctgtgcgttttctggttcattatgacaacaactagtagaaatgttagctgtattcttttaacttcagttgcccagaaatttttctcttttattctttaggattgatgatatatatggttgcatgcatctagttcttttatgttttgtcaattcactcaatatcggttatatattaacgggaacattcgcactagctatttatatgcaaaatagaacaattcgcactcctcatttatacaaaaatattttttacatatacaaaaaaatatgcaaaatgcatccaaacaaggatgtatgccatccaagcaaacacaaacaacattcgcactagctatttatatgtgctaacaacacatcaaaggcaggccatttatttaattaggactagaacttattgtactgctggtaacgctaaaaaaagggtgcttttgtctctgccagtcagtcaactgtgaccaac

SEQ ID NO: 89220 - DNA, 511 bp, Citrus clementina
  Intron number 2 from transcript clementine0.9_018155m (loc us clementine0.9_018155m.g) derived from phytozome v7.0 (c hr-ID scaffold_8; pos 1118377 to 1118887 reverse strand)
cttctgagtcacgcaagaaacaaggtacagaaaactggaatagccgcttcaatatccttttccgattttaatgggtcacttcagggaatttggtttgatttggtgggcattttgctttttctttccatggttgttggggtggttaaaggttcactcattaggtttactttaactttgtattttcagtaatttattagattataacttgtttggttctgattctttagattccaatctagttttcatgttattagattctatcttgtctcatcaatcaatggtttctagaatgctactggccaagttatatatatataattctagaagtgtacacttggaatcttcccttttctggtccacttgttttgttttattgttaggattaattttgtaaccttatcaagaaattgtgacttgtgactttgtgaggttcgaactaacatcattattgttttttgtttctttttctttaaaaaataaaaaaaaaaattgtttgttgggtctatatagg

SEQ ID NO: 89221 - DNA, 909 bp, Citrus clementina
  Intron number 4 from transcript clementine0.9_027539m (loc us clementine0.9_027539m.g) derived from phytozome v7.0 (c hr-ID scaffold_81; pos 1095724 to 1096632)
agagggaagctttgcttgggattcttggtgatcaggttattagttcatccctaactagaaaatgatccaaatttagaaaattatatgtaaaattactaccaagactattatcttctcataaggaaacttaattctatgatattgaataaaagaatccatttaaaagtaacaactctgaaatatttaatgttttaacattgctagtgacatccatgacttaataattttgttgggtcaaatgttgaagaaaccttgtctctttctacataactagcaaatgtatgcctgggacaagttactggccttgatttctctcaatggactccaagcattttggataaagacgcttccatctgcactaaaatcaaatccatttgaatgaaggatgcatttggaagcctcacagccctaattgaaatacttgcataggtttatttctgtttttaaccataaatacagaaggaagaaccctaacctagtaccagtcatcctaagacccaaaattgcataaaatatatttatatatatatatatagccgaagaagactctggccaatcccgtggcctgcttgacgaacatcaacgacagagacgtcgtgcccatctttcttggtgtgtggaatattaggggtcttaacgacccgatgaagcaaaatgaagtggggaaattgattctagagcacaagctttcttttgttgtgttaattgagacgaaaataaagaaagtgaataaagacagagttttgagagctataaccccgggatatatgtatgtatgtatgtatgcccaaattccatgattatactggaggaactttttaattatcgttttgggctttcttttctttttctaattatgttacaggtttttggacatgtaggtatccgagccactacggacattaatca

SEQ ID NO: 89222 - DNA, 964 bp, Citrus clementina
  Intron number 2 from transcript clementine0.9_022894m (loc us clementine0.9_022894m.g) derived from phytozome v7.0 (c hr-ID scaffold_21; pos 1279364 to 1280327 reverse strand)
catccattacaggttattttccttatcaaaacttgactgttaaagaaaggtgttattgaattagtttctttgtctatgattttgtcaccaatgtggcacgaggaaaggaaccattacactccttgccataatgcagcacttgtttttgtcggagcattctcttcagatacaaaccattcttgtttttcttctaatttgtcatatagattactttcaaatctgggaagggctatgtgaacatatagtacattagtacctattatgtagaaaatggttaactgggtgtagcactgatatactcaaaaccttgcccattataatttcgtagcaccatgcttgcagcctgaaaaggtggcttcataggcatatgatttcattagaaactgtacaactaaaattccaaaacttgtaatgatattgatgctcttcagaaacagtcaattaaataaaaaccattccttctccttgcatgaaacgtcctttgatgcacccttttttaactgtccttttaacatgattgataggctggttctagagtgcttattattcatgacagtcagagagagctctgatgtctctaaaacaaatgacacggtaaaaatcaagcccttagatttttgaccatttgtaatctgttattatctaaaatcattcagtaatcttctctttgaatgccactgcatcagaatgatcataacaataacatgatggcagtcccatcgcagaacaattcttagtgatggaatgtaatgattaacatgtgtggtttattttatgtggataataaatttactcttttttatttgttttgtaacttcaaaattgcttggtttaagtttggttttaggtaatgaacaagctgttattttttttttttttaattttttgcatacttccagatgcttaattgtactaattgtactatttcttttatttcaattggttcatgcagattgtgcaaagc

SEQ ID NO: 89223 - DNA, 682 bp, Citrus clementina
  Intron number 3 from transcript clementine0.9_027055m (loc us clementine0.9_027055m.g) derived from phytozome v7.0 (c hr-ID scaffold_11; pos 2873446 to 2874127 reverse strand)
cgggtgactcaacaagctgcaaacttttttataaggtcagttcttattacctgcatgattgtttatgttacgaatttcattgttaagcaagtgctggaatttcattgatagtttattttcttttcttaatgacatattttattaatatatatgaaggaaaaatagaaataaataataatatattgtcattcgctttggttatttaataatcttgtcttcttaacaaatatcattaacatacttacatatatggacaattgaatatgcaaacgaatttatagtaaattacattaatagttgtgttcataaactgattaggaacaccgtgtggttaataatggggttatctcttcagtaaaagaaattcaaattaggcctctacttttgaatgtactcaaacagtaaaataattaaaaagactgaggctaataatatcaaactctacattttttttggggggtgattatggactatggtgtttgctggatcaaaagcttttttttttcaaagatcagagaagtacttgctcgtttgatcaaattcaaccggccatttatcaacatcaatacttaaaaagaaggaaaaaaaaatttttgtctctgtattgcttgttaatttattttgcaactgttggaatttggcaaccaatttcttttcctttttcttttatttgtttgcagat

SEQ ID NO: 89224 - DNA, 330 bp, Citrus clementina
  Intron number 1 from transcript clementine0.9_002294m (loc us clementine0.9_002294m.g) derived from phytozome v7.0 (c hr-ID scaffold_8; pos 3126428 to 3126757)
cctaaacagatcaaagtttggtttcaaaatcgaaggtaaattttttcgttttttttctagctttcgattttgattttctcgtacttgatgagattgtatcgatatgattgcgttagaagtgctatcgattggctgaagattttgttgacgaagaattgtgcatgtgggaagaaagattggattttttgaattgggatttgaatagaattttagctgttgttttgattcgtatgtgaatagatttattcggggcttgatttgttttgggttcaaaggcttgcatttggttgttcaggtgtcgagagaagcagaggaaagaggcttcaagac

SEQ ID NO: 89225 - DNA, 527 bp, Citrus clementina; identical to SEQ ID NO: 79368
  Intron number 2 from transcript clementine0.9_002294m (loc us clementine0.9_002294m.g) derived from phytozome v7.0 (c hr-ID scaffold_8; pos 3126865 to 3127391)

SEQ ID NO: 89226 - DNA, 953 bp, Citrus clementina
  Intron number 3 from transcript clementine0.9_004972m (loc us clementine0.9_004972m.g) derived from phytozome v7.0 (c hr-ID scaffold_12; pos 4147234 to 4148186)
cttactccagtgagctactccgccacgcttaccaggtatcattttgctcatctccattttcattgttgtaactttttattcaccagttaaaaaatcaaaagaaatcgaaaacaaaaaagaagcataaaagaggacggcaaaagcgcttctagaggggaccactgggccggtttccttgctttagagagacggttggggtagttgcgcatgatagcaaacactgtcgcagtaaagaggcagttatccttggttctatttttgtcaggcaacttgtcaggcgcaagttagcgctgcatttatggtatacatcggcttttcggttgtctccgtaattgcggtagggtggagaatgcattcttgcgactatgaataattgtttttcattaatgattttttaaagttatatttatttcactatcagaattttcagtataaaaataaataaacggaacgaaaaaaatcaggtggattaaaagataaattttaattaatttaaaaatatataaaatataatacttaacacgaagagacccattaaataaataaataattaattaaagacttaataaatggttagttctaacaattgaagtttaaaaaattaattgcgggtaaaatttatgggcccatgacttggatcgtggcaccgcccatcacctgtagtgggtgctggccgtagagatcttgtcgaacggtcagatctcaaccgtcaatttcaacaataacaaaaagtccatactgtcacgtgctaagcctgtcggtgctcggccacaacaagcccactatcagaagtaaacaatcacacacgatctctggcttttagtcaaaatttggatgcctaaataattatcccgtttggtcttgatcgattaccgctgatgtatattttaacattttgttattcttacttgttttcagctctttgatttcgccgacaaatacagaggaaaata

SEQ ID NO: 89227 - DNA, 302 bp, Citrus clementina
  Intron number 4 from transcript clementine0.9_033144m (loc us clementine0.9_033144m.g) derived from phytozome v7.0 (c hr-ID scaffold_13; pos 1844576 to 1844877)
ccgaagatagctgtagtaaatcctaccttcaggtacttctatttatatacaacttgcaagcatacatgggcttaacgtgttacatcgagcattccatatttcccatgaatatttcataatgggctctacatttaatgagagggtttctgtgtcttcctcttttgaatttgatatattatgtatagtgatgatgttcttttcgatttatcatatttccttttacccttatgtgtatgtagcctattgaatagttctcttcagaagatatattgcttataagtagccgttacttgttttccagg

SEQ ID NO: 89228 - DNA, 828 bp, Citrus clementina
  Intron number 1 from transcript clementine0.9_027477m (loc us clementine0.9_027477m.g) derived from phytozome v7.0 (c hr-ID scaffold_8; pos 2276692 to 2277519)
gttccttttctaacccagataaagttcttactcaggtaattaatcacatttcactcgattccatttttgtacaaaacgtttatcactatatattttcacattaggtatatgtaaaacaaaacatgcttgctacaacacctctcaccctccatttaaacccctaactaattgttttgtaaaattttcttaaattcctttgttgacaaccccaagtttttcagtgctacataatattatgaattaagagataaagcctcctaaaagtttgtgattttcaaagagttttctttgacttgctatcctgattccaatcctgaggagataaagagttaattttttttctttaccccaaccttttaagcaaaaaatataaataagcaaaaataagataaataaataaattgagagacaagaacaaagatttagagggccggaaacaaaaattttaagaaacctgaagtcttcattggagaatagcgatacaaacaacactatagtgaccaaatcgcagtcttctctaagagatatatcatgttgttgtaaataaagcaatatgtatataaatttttaaataacatgtgaatgggatgggttaacaaagattgacttacggatttattttgtcggtttgtatgacttcatagtgttttcagtttagggtttcatgcaagcaatctctttttctctgctctgaaaaatgactatctttattgcgaaaaaaaaaagatattttatgtccaaaattttataatatataactgatttcttttaaggtttttatttattaatttgcctctttaattatttatttgtgcgttttaacaggga

SEQ ID NO: 89229 - DNA, 917 bp, Citrus clementina
  Intron number 2 from transcript clementine0.9_019125m (loc us clementine0.9_019125m.g) derived from phytozome v7.0 (c hr-ID scaffold_12; pos 3043797 to 3044713 reverse strand)
agaaactccaagagatccaagacgagcttgaaaaggtttttttttttttaatagaatttatgcttatttttgttatattttatccattatttggtttacattctgtttgattgcagagaaatttgagcctttgttccacgtcgttgatttgggagctaaacattaaaattgattacttcataagaaagtattgtttctaatgaattttcggggcaactaaaccggagtgttgacccttaaatttgttcattggaaaaaaatttgattccaaaaaaaaaaaaaatactgcgatggaaaagatttctcttttaatcttttgacagagaacataatcactattcaaattgtcttgaatatattgggctgtattttatttgttttcagttttaggggttttcattctctgtgaattgagttgttgatttttttaagaggcagcattactatatttatgtgtaatttgaattgtatgaaaatctgaattttttttttttaaatttatggggaagctcagtgaaactacctgatttgaaatatgtgggttgcaatggggatttttcctttttgttcttaagagtgttctgtgtgacacaatataatttggattgatcttggtattgttggatacgcgtcaattcattctttccggctgctgacatgtgtaagcatcatcgttgttatttaacatagattctattgcatgaaatttgaattttctttttgtatatgaattgctacatctgaatgaatattacgtgtctttttcccttgtaattacttttaatgctgaatgagtgcattagtgtatgaacaagtgcacctatgaacttaccattttaccattatttgtgacctccaaaatattttatgagcatcttctagattaacgaagaggcaagcgagaaagtcttggaggt

SEQ ID NO: 89230 - DNA, 549 bp, Citrus clementina
  Intron number 1 from transcript clementine0.9_013550m (loc us clementine0.9_013550m.g) derived from phytozome v7.0 (c hr-ID scaffold_39; pos 529250 to 529798 reverse strand)
atctggtcctgcatttgctgccaagtactttgaaggtatttctatgttcagttctaacatcttagctgcctacaatataccgcccattttgttttattttagtttctgttatggtgtgtagtgtgagctgagatctcttcaaatttctgttgttctttttgcaaattttgtaatatttggaggattttaatgaggcatagcttagctggtgatttagtatgttcttctcacttaaaaaaattgaagctttttttgtggaaacattgttatttattatttgctcattttttgtatttttagctcttttctatgtttgacactttattctactttgatctgttctacgaagtttgtttttttaccttaatctgatttgatctgttgactgcttgcttttgtgtggcttttactgttctcacttttcatctacactaacttgttcgcagatatataaacagctttcccaagtttgtttttatagtaaagatttactgataatccctcgtgttgtacttcttcttcgttttttttcatcagggtacctcccaa

SEQ ID NO: 89231 - DNA, 888 bp, Citrus clementina; identical to SEQ ID NO: 82115
  Intron number 1 from transcript clementine0.9_032219m (loc us clementine0.9_032219m.g) derived from phytozome v7.0 (c hr-ID scaffold_35; pos 17831 to 18718)

SEQ ID NO: 89232 - DNA, 549 bp, Citrus clementina
  Intron number 1 from transcript clementine0.9_004499m (loc us clementine0.9_004499m.g) derived from phytozome v7.0 (c hr-ID scaffold_21; pos 882749 to 883297 reverse strand)
tgttttccctttaacaagtctgcaaattgggtatggttttatttattctttatatttattgaattcgatcattgaacaatgattttattgagttaaatttggtggaaatgccgtattgatttcactgttaattgtttactaaaatttgaactgtttcattagcaagagaatagctcgcaggggcccccgtgcagtaatattctatgtggattttgaaactgggaattgtagtcgatttacttattaactaatttgagtggaaagtgaactaagttgattattttggtttcttcttgtttcattgaaattttttgagcaaattgaaattttccgggaaatcaccaagcttaaggttgtatatatttttgggagttggggatttatggtcgtgttaaagcttgtgtttggctatatggcttgatttggctgttaataatggaggattgataatcattgttgtcttcttttggcttgcctgaaaaatttatgcattttctgctatttatccctgcagagacttgcaatcatatctttcagatcttagtctct

SEQ ID NO: 89233 - DNA, 595 bp, Citrus clementina
  Intron number 1 from transcript clementine0.9_015025m (loc us clementine0.9_015025m.g) derived from phytozome v7.0 (c hr-ID scaffold_16; pos 2684374 to 2684968)
ccactgagtagtgacaggttagtttgatttttggagtttttttttttcccttatttctgtttctagggtttttgattccttgatctgattagattttctttaagtgggcatttaatcaattagggctttgtttttatcctaaacggctttttggagtttgcgtttaatttttctgatttttgaatacatcaaaatttgagtagtttagggtttataatttgttttttttttttataaaaaaaaaattacccggttttgtgtctataggatctgacttttatatttcatttcttaattacttggagctaaagtaatccttttaaagttaggcgaaaggatattacttgcccccaaaggaattccgtttttaaaatggattattatcactagtggacaaaaacctttttttttttaatgttttttcgacgtagcgtttgccaacttgtttttggattcctacccataaaaatgtttccttctatataaaggtggttgctttgccacattatcgaggttattaggaagatggctgtttgtagtaagcaaggttctaacgtgtctgcaattgattcctccaggaaaaggaaacgaagag

SEQ ID NO: 89234 - DNA, 381 bp, Citrus clementina
  Intron number 2 from transcript clementine0.9_026977m (loc us clementine0.9_026089m.g) derived from phytozome v7.0 (c hr-ID scaffold_92; pos 324244 to 324624)
aaaaacattaatattgaaggaacattgttccaaaggtacatagttttcattgctctttaattgatttttatgttgttacaattaatgatgctaggagcctcttcacatctaactttctcagcatgcttaccattttttgattttcaaacactttgactcaatattgataatgaagctgtacacaagatccaaaagtttctggatagtcttgtcatgagtaagaaaaagattccatgccgtctttaacattttttgcagcttaatccagattgttttattttcttcttgctattaagcttccagaatgacacgatttcgcaacgtgatacttgtgcacattttacagatttccccggagctccttaagaagttgagtacgga

SEQ ID NO: 89235 - DNA, 872 bp, Citrus clementina
  Intron number 2 from transcript clementine0.9_018512m (loc us clementine0.9_018512m.g) derived from phytozome v7.0 (c hr-ID scaffold_16; pos 2064261 to 2065132 reverse strand)
gaacttgactggttgccttcaattctcaccaactggtaagttaaatgttttggtggattgtcttctttgtgctcatcaagtgtttctcatgggatgctttttgttttaaatgagcgtttttttggggcaatggattccttaattggaataatataatgtcgagtgtatgctttcattatttcatttttgtgatggaagcacttattaattggacaaaatttgatgtatgaatgagtttgtgtgtgtgtgcgcgagctagttgtattgatcatgtattcatgtacctatgggactgcctgatgtaaaaacatgcggtatggttcttcatacaaggaacatgggcttctccaatatgagtgggcatcgcagtgtgacttttgcagttttgtatgagaatattgttctagtataacttgggacaattaggattcaggactttggataaacactgcatgtgtataaaccaaagatcaaagtagtatatatgttgggacctatgacagcttaggtatccattggtatgacttcaaggttctcacaatgaaataagatgatcaatgagaacctgctttccattgctgtgttctatggaattatgctctggaaaataggtgtttgtttttttgattttaagtattataattgtatataagtcaacttgggttttctaaagctatgcctgagccactactgatgttcctcaactcttgttttctacttgcttgctaacaatgaagcaaatatgtaatgatatattagttttcatctaaattctgaggtagcatttcaatttgattcttagctttctagaggaaagtacttaactatcttttcctgtgtagatcccggagaagcatttctatttgtcaaga

SEQ ID NO: 89236 - DNA, 894 bp, Citrus clementina
  Intron number 1 from transcript clementine0.9_015981m (loc us clementine0.9_015977m.g) derived from phytozome v7.0 (c hr-ID scaffold_12; pos 1460258 to 1461151)
cgcagaagacggaagctgttaagctaataataatcgtgcgtctaatacgtctccttctctctgtttctctctctttttttttttttttgaatggttatttaaataatttttttcctattcgtttgattccctgataactttgtcatctctctctgctagattttgtcacaatgtttgatttgtaattttattaataaatcgtttataaatttatcttctgcatttagaatttgtatattgttgttttcatttcatgtgttacttatacgcaaccattgcaattttgcttttttttttttttcaatttttaacgtttgatttagttttgaccaatttatgcaagtagttcatgtcaaatcatagcatagattagtttctctttttatgctactgctgaagaatgattcagcaaagcagaacatgcggtcgatgattttatgagatgtcatcgtcatttggtaaggtcttaattaacttaaaagaagggctgaaaataagaaccagaaaggaaaaaagttgcagaaaagaaggggcttcatttcgattattggtttgaattggtttggtagcttgcatgatctaattgggaaaaatgcccaatgaactactttgagttggagtagccattggagtaactagccttgtttatgtttgttgcattgccttctgttctagggagattttatcggattgaaatcattagttttcttaatgaagtggccaatggaagaaattttattaagatactgatgggtgtgctgatataaatcgatgattgctactaagattatgaaagatgttattcaacttttgacagttatattaggacaagttgacgattaatttttctgtttgacaggatagggtgctagccagatatatattaaatcatta

SEQ ID NO: 89237 - DNA, 991 bp, Citrus clementina
  Intron number 1 from transcript clementine0.9_016554m (loc us clementine0.9_013020m.g) derived from phytozome v7.0 (c hr-ID scaffold_39; pos 1279548 to 1280538)
tagaaggaaattgtatactgcgattcagaagcttcgtaagggcttttcgtgacttttttcttaataatgataatgatgagaataatttgtaattgtatgattatgtaactctttttgatgatgatgaaacctcggtcttcgatcaaattttagatataagttgcacgcctaggttgtttgagtttgtctgttgtaatcatattactaataatgatcatgataatgatgtcagttttgttatgtgtggtagttttggattgagatggttgtttgttttgctttctcagtgcatgtatttgatttgtttctacaatggctcgataaattttaggatggaaaacagcagacaaatttatcacttgattaatgtttgtgtctcctccagaaatggtgagtgcttgtgcatgttggtgagcagagaagggaggaccatctttttggatagtttcttttattgtaacactgctgtagggcctaataagggaaaaagaaaagttcagttatggaatgtgtgtgagtgaagtttcttgaaacttgtcgaaggaagggaaatgataactgtttcattggtagcttgtttttaattgaactttcttcctagagacatttggggctagtggagttagataataaggttgcttgtaaaagagggggactgctttgctgtctagagtcgattcgcgtattgtgtatcaataatgtagggcttttgattagctagatggagtttagtaataagattctgagtaacttggtcatatgacttgtgtggtaaagtccatttctcttggtgtcattccatctgactgcttccgattggggtccaccatgaagtttagacggtttaggttataacctcaaagggagtcaatatgtcttttcccattagacttgtaattcgtttgcattttttcccccttcttttgtccatgtctcactgtaatgttattttacaggggcagagaataccaatattgcaaagtgttgcagc

SEQ ID NO: 89238 - DNA, 462 bp, Citrus clementina
  Intron number 2 from transcript clementine0.9_035598m (loc us clementine0.9_035598m.g) derived from phytozome v7.0 (c hr-ID scaffold_64; pos 668954 to 669415 reverse strand)
gcacactgcaactggtaattttgttgttagatgagtttcacttcccttatttgaatgcaaaattttactagagaaagtagtgcatgcattgagaaatttcaaattttctaatcatataagaaatttctgtttcttcatatagcaaaatggtgattacaatcaattaactaaagttgagttctagttgcattcaaacttaagtctttcagttcaacttcatttccctattgcatgatcttgtgagaaaattcataaagtttcacattaagaaaaagagaataaaggttcccattggaatatgcaacttctaaattgtttttacaatgaactttgattaccgcaaccatatttcttgtagatacaaggaaatgcatttactcattcactggtttcctaagaagttgactgttttcaatttttttttgaaaaaaaaaggcttagtgactaatatgattctttcag

SEQ ID NO: 89239 - DNA, 1025 bp, Citrus clementina
  Intron number 4 from transcript clementine0.9_026093m (loc us clementine0.9_026093m.g) derived from phytozome v7.0 (c hr-ID scaffold_12; pos 907904 to 908928)
ctctatcacctttcccgttgggcaaggtctcaggggtaagcatctgcatttgttgattttttggaatcacttggttgcaattagacattgctttcgtagctgattaattttctatttatcatcttttattatgctaaaatttacaggtttctgcaatcaatatatatatataaacacacactccaataaagtgtattttatttcgtagtgtattggaatttgcgttttttcatcttttagttgatctcttactttgttaaagctttaaaatcgtaggattttaaagctctcccgaactttttcgcactttaaaattctggactagaaaactactatatatatatatctaaatacatttatgtatatatgagcggtgatttggtccagtatcctagatcttattgaagttcgggacgaattgacaacaatgtgaatataattttacattgttgttaattgttttacaacgttgtaaaagtatgttcatatcattgtcaactggtccaggattttaatctcggattataatttcggattggaaaattatatatatataaggttctaactggtaagagggttgttcaaggttggctttcacctgctgtcatcaaagttgcactttattagggacaagaaagactagttagttttcatgttaaaatgtacagagtaagtttgtatttgtgcctgtcttatattttgccggagaaaaagattggcttcatggacattttagtatatctttattggacaatctgaaaaaggtaaaaaatatatgaacagaagaaaaatacttgactgattctgaaaattctccacatcaaaattgatacattggaattgcaccaatttcttttcagcaacttttatttgttttccatccaaggccatatcaattggaattgatcctttaatttgttgacttcctctagccttcaattcttgctttggcaactgaagcagccaattgtaacgaactctgtcatattttcttcattgtaggtatttgtcagagaagaagaagg

SEQ ID NO: 89240 - DNA, 558 bp, Citrus clementina
  Intron number 1 from transcript clementine0.9_007357m (loc us clementine0.9_007357m.g) derived from phytozome v7.0 (c hr-ID scaffold_56; pos 551215 to 551772)
agggggcaccactactttccgcacagcaacttttggtaagctccacgatccacccatgcatgagtatgactccgctttaatgatcaaaataataataattagaagaacgataagtttatcaaagttattaataataacaaacaaaattacttccaccaattaaaaccaataaacaaactgagcccttttcgaattggtgagagaaatagcaaacttgtctcctttgttcacatcaattggtaacgactttgacaattttaaaactcttcttatactttcatatttcacttttcgaaaataataattcataaattaccatataatacaagtaacatctaacaatcttttgattacactttgagggttacactttgggggatttgacaaacagctttgttttattagttacctgaattcaaagacagccagataggttaaaaagttaattttcattcccatcttttgttggggagggggtggaaaaaaaaccttatactatactcactgtgtttacttattatggcagctgtttccggccaaggcttcattgctagagac

SEQ ID NO: 89241 - DNA, 368 bp, Citrus clementina
  Intron number 2 from transcript clementine0.9_010509m (loc us clementine0.9_010509m.g) derived from phytozome v7.0 (c hr-ID scaffold_28; pos 980385 to 980752)
tggttagtcactttcttcttatgttgttcttttgttttgcatgtggttttagtttttttttttgttttgtttcttattctataatttagacgattcatcaattatttggattgttgactgggattgatgctttaggcttttgattctgttgttcaagaatccattcatcaacttctttttcctattgcagggtttaggcctgctttattttagttggattattgactgggattgatgctttagtgagatgtttcatcaattacttggatttgatgaagcatgtagctctggttgtttgacccttttcatcgatcctttcctgtgattttgcaggtattgcttcagtattacatagagcgacagtgctt

SEQ ID NO: 89242 - DNA, 608 bp, Citrus clementina
  Intron number 2 from transcript clementine0.9_016956m (loc us clementine0.9_016956m.g) derived from phytozome v7.0 (c hr-ID scaffold_70; pos 136083 to 136690)
taactctttcgagcagcccacccaattcgcaattggtactagttctaatctttcccttgattacttttgtttattaaaattttcatgaagggtaattgatttttattcctttttttttttgggcaaggaaactctatttagtgccatgagtttgctttcttgcttctatattattcatggaaactgttgctactttagatttttgttgggatttagttgataaaattttgattgagcattattaattacactgttactccaaaaaaattacttctgcttttgagaggaaataatttcacttaattaaatgaaaattattttctttgcttttctattaattgtcccaaaaaaactgtgctcggctcacttattgttctcaaatgctgttcaagttctaattaattaattagtaaatatataagacaaatgtgaaatctctttccttagtttaaataaattagacaaataatctttactttctaacttagtaattcgctgtgaataattaataaatgagacaattaacaagaactactaattaaaaaaagaagaattatgaattaacctgtgcagagagaccgatcacatcggacacatctgcttaccac

SEQ ID NO: 89243 - DNA, 638 bp, Citrus clementina
  Intron number 1 from transcript clementine0.9_033386m (loc us clementine0.9_033386m.g) derived from phytozome v7.0 (c hr-ID scaffold_81; pos 918980 to 919617 reverse strand)
gcacagattattgtaagttcattgcatgccttaatttctaagtatcaatgtctcagacatttgttgtccaatggcagaacgaattgatagcatacgttaatattatgcccctggggtgcggaatgcggacgacttgctttcgacctccttgtctggccaaccaattgaattcgaaatcattaattatatatgtgcaatgacgtgatttaaattataaaattcaatattttagacatttcttgtccagtaggatatgaacagatagcgtacattattatgttcgtaggccatgattaagtggctttcaccctctgtctacctaataaccggagtttgaattctaaggtcacaaaaccggaaaatttctaagatatattaaagatgtcatgtcaatcatataataaataaatgatgatataatatgtgttcgtttattttttaaaaatcaccatacaactgatattcgcgttaaatttaattacatatttcattaattagttgtattacttataatatattgtggaatttctcccaccactgatagcatttttctttgatttcatttatgagtattgtgttttacaatctagctatacatgttgattatctgcgtttgctttttccagggtggtgcatta

SEQ ID NO: 89244 - DNA, 852 bp, Citrus clementina
  Intron number 2 from transcript clementine0.9_002633m (loc us clementine0.9_002615m.g) derived from phytozome v7.0 (c hr-ID scaffold_104; pos 697376 to 698227)
gaagataattgcagtcctaaagaaatttgtgacaagtaagattttctttgtctttttcttttttttgaaataatttatttcgtttttaattttagaatcatctaattcataaaacagacttataatctcctgattaataatgctgttattaaatgaagttagctttggtgttatctaattgttgatatcttgtatctgtttgtgtgaatttgggttcaccttcagtgcagcattggtaagtaacgtctgccatgattgttcgatattggtatcaaagtttttgttgatatactcctatacaatgaagcagttttaacaataatgaaagacttgttatcggtaatagaaaatgtggcatatgttacttacagatgttgcaatgtagtagtgcttggaatttgtgggagtatgtatttaggcattatgtttggaatcaaatgtatttataattttgaagcatatttatgtgcagttaatattaatgtgataatgttttctgtttactgtttttcctttacaatatgttttgttgaaaatgatttgcattatttgcatgctttttaagtgtattgccttgatttgaatccataatagtgttctatatgatatttccctgatttgggtgatgctagagaaattgctataaaatcttttgcttactgagtgatataacagttgatttgtgctatttaggggtgcattctgtgtattctctaattcataggggaggttctcatttgcattatgttcttttctatattttgtatggctctatttgtgcatgatgatgacttcgtattgcaattccttggactatgtattcaaattgagaattgtgtctttatagatatc

SEQ ID NO: 89245 - DNA, 320 bp, Citrus clementina
  Intron number 1 from transcript clementine0.9_001396m (loc us clementine0.9_001396m.g) derived from phytozome v7.0 (c hr-ID scaffold_44; pos 844122 to 844441)
ctatcaagtgcctcaacaacggcgagtccgttgttcgttttttattattattattattatatacacggacgcgcgcccgcgcgcacacacatatgtataaagctctaattttttgtaaaagatgtaatttgaatttggaagtgctttcgtacaaagcgctcttcttttcagctcactgataataatttttgcattaagtgttatcttgtgtgaaaaataaaaatagttttttttctcttcttttttttataaaaaaatcgggtttgcctttcatttatttgacaggtatcggcccatacatctgctgggaagactgtggt

SEQ ID NO: 89246 - DNA, 840 bp, Citrus clementina
  Intron number 1 from transcript clementine0.9_031232m (loc us clementine0.9_031232m.g) derived from phytozome v7.0 (c hr-ID scaffold_70; pos 850415 to 851254 reverse strand)
aaattggtaactctctttatctatgcatttgatttatatttttataattttttttccttttcaaaatcctgaaggtacatgaaaatttatatacaccatgattgcatgcaatgcagggtattttaattgctgatctgacaaattattatgattacttctttgctagctaaaaaaaagcataaaacagatgtcatttttagatttttctcctttgtaaatttgtgtcacactcttgagcatagttagaaatatctgtgaagtgagtttcatagtcatggcttcaatgacacaaatccaaattcattacaattaattaattgatttcctacttctatcccttttaaaaaaaataacaaaataaaagtacttgtttagttatctatttgggggggggggggggggggggggacggaaggactattgccgtttattgctctgcccctacctctatatgtctctttgggagggctcgcactgtcccataatatttatttctaaacaatcacagtcattatcttaaatcaataaaaataacagaattttttcttttattttttacatttattatatctacacccacttatacctaacttgtattaatccgcaagtacgatctgtttggggataaattcaccatatctggtaggcatgtcttattaatggctaaaagcttccatatgcataacctctttaaattgtgtcccctttcaaagaaaattttcttttttgtccattagcttttatttactcttcacaaatatttttaatgtcatattaaccaaatcttgtaaattcatccattcagctgaactactgggacttcctctgattcctgcatac

SEQ ID NO: 89247 - DNA, 410 bp, Citrus clementina
  Intron number 1 from transcript clementine0.9_006930m (loc us clementine0.9_006930m.g) derived from phytozome v7.0 (c hr-ID scaffold_12; pos 2212109 to 2212518 reverse strand)
cccttctgcttctccttctctgcttcgctctcttggtattttttttctttttttttttttaaatatttacttcttagtttatgttattattttttaattttattttttcttcatgttttgattgtttggtatgtgtttatatggcttttgaaagtccatcacgataagttttttatttatgtaccctttgttgcctttcattggctgagaaatttgcgggaaaattattagaatttttttttttaatcttgtttttgttgatataaagtctgcttttgagtctaacgtaataatcatataactataaaagtaatattaattttcatccttaaaattttattctgaaactcactgtttatacaatatgatatttaggtagggagtctagcagggcaagaggcatcagcagg

SEQ ID NO: 89248 - DNA, 592 bp, Citrus clementina; identical to SEQ ID NO: 88671
  Intron number 1 from transcript clementine0.9_023222m (loc us clementine0.9_022982m.g) derived from phytozome v7.0 (c hr-ID scaffold_69; pos 1240599 to 1241190 reverse strand)

SEQ ID NO: 89249 - DNA, 713 bp, Citrus clementina; identical to SEQ ID NO: 88464
  Intron number 1 from transcript clementine0.9_023580m (loc us clementine0.9_023552m.g) derived from phytozome v7.0 (c hr-ID scaffold_35; pos 351688 to 352400 reverse strand)

SEQ ID NO: 89250 - DNA, 304 bp, Citrus clementina
  Intron number 1 from transcript clementine0.9_029303m (loc us clementine0.9_029303m.g) derived from phytozome v7.0 (c hr-ID scaffold_8; pos 1418437 to 1418740)
tccaggatttattgctgagcaacctgcagtggtaagttcgtgtgtggttgtatacattggtgccgtatctcagatttatgtgtttagattgtggaatgggtggccttgtctctcattgtgcttatttttcttccttcccctatcagcgtatccatgcaactcgaccagttaatgtcaactcattggcatttcttgtcataggtaatgtttcttcttctgtacttttggttttgtcgcttttcatgtcattagagtgcatctaattcaaaattttccttttttttgtgcagttcttttgctgttc

SEQ ID NO: 89251 - DNA, 511 bp, Citrus clementina
  Intron number 1 from transcript clementine0.9_028743m (loc us clementine0.9_028743m.g) derived from phytozome v7.0 (c hr-ID scaffold_13; pos 24786 to 25296)
ctctagcaaagctaccaaccacattgattcttctcgtaagtatccaaatttcagtctttttttttttttttcattttttttgcttgtttgagcaaatgtagtcactacattattgtatttgggtgagttggtgctcaatgtgtcttttcttgtttgactcgatatcaagtttagttgtttggttgactcgatattgagttgagtcgtttggttgactcgtgataagttttagttgctttggttaacttgatatcgagttgttttgtgcttggttatttttgtagactcggtactgagtttggttttttgttgcgagttgagttgttttggtagactcggtaccaagttgatttcctttcttctttcaattatctttaaatgatacgggtgattagttgatggattatgagaatatgggtgattaatcaagtggtggggaaactttgcacacacctagtgtagcttttgactgtaagccacataaagggcaaggatttgataatttagaaga

SEQ ID NO: 89252 - DNA, 333 bp, Citrus clementina
  Intron number 1 from transcript clementine0.9_001644m (loc us clementine0.9_001644m.g) derived from phytozome v7.0 (c hr-ID scaffold_12; pos 2924728 to 2925060)
ccaacgctttactcagaaagaacttaacttttcaggttcttttttttttttttttttccatcttttccttttgttaagagttggggtttagggttcttgcttgttggtgaaaggttaacgtccgatatattaaatattattcttttgcaattttaaggttcttaaatttctcttcgtggacatggcaaaatttcatttgattcctgatgaatttattggtctttgctttgttcaattcattaattttgtaataaacttaatttcacattctgaaatgtaattgtaaatggcatcatccatctcatcatctgtgttctcttctgcagaaacgaa

SEQ ID NO: 89253 - DNA, 873 bp, Citrus clementina
  Intron number 2 from transcript clementine0.9_002199m (loc us clementine0.9_002176m.g) derived from phytozome v7.0 (c hr-ID scaffold_11; pos 3713358 to 3714230 reverse strand)
gagattctcttgcgattgaggcttctttcttgcaggtcaatttttttctccttattatctaatatacattgactttgcccatgtaatgttatggttactggtactgccacgcagcatattccgttaaatcctccatgcataatgtgtgtctggtgatcccagagcacttcattagtgtagttgaaactgtgtctgacaatgttgctcaccttactagagtatgcatattagtgtgttgagcacaacaattgatgcaggattttatgaaattagttttgagatgcttgagtgaagcatagttaatttctttgctctatgttaatctgagtgactctatcccatggtgtagtcaggttaatcccaacttaaagtatattgaagaggtgttatagaattacggaacttatattatttacaatgactttgcatatgttatgacgagtgacactgccacgttgtgcggtctggttaattgacagcttttgcactctacaaggtatcataaagcaactttgcgcactgcatgtagtgtgattctgtagcacctcatggatttggttgaaactatgactaacgagatgtcattaggtggcagtgttgcttacctcaatagagaatgtatatattctagtgttgtatttgatgtgagagtttctgaaactacattgagttacttgaggagcatagttaggacttacgaggcagctattgaggccatgtgatattagtgtcttaatttcaattaatttttgttaggtgttatttgttcattaaaccatgatatgaagaactctatggatgtgttttaataaggcaactggttgaacacttgttacagagagaggaagaacttctctctaactggtggaaaga

SEQ ID NO: 89254 - DNA, 495 bp, Citrus clementina
  Intron number 2 from transcript clementine0.9_030248m (loc us clementine0.9_030248m.g) derived from phytozome v7.0 (c hr-ID scaffold_8; pos 2167533 to 2168027)
agcaggatcaactttggcgcaaacaaaactgttgagtaagacctttttttatttatttttcttttaagccaaggcaaaaagtacactcagactcgtttgctgcagtagacggttagactctcagtgtttcaaaaaagggtagttatagtacccatttcatcagtgaagttcgtatatcatgctgttggatattatagtacaacagtgcctttatctccaactaaatacacttaatttattaacaaaagatatctaaaatattcatttatgaaattgtggggtttgattgtccttttttggaaaagaggggtcttgctgtctattggggcaaatcttgagaattgagcgtcctctttattcttcttttttttttttagaaacaaaaaataataattattattattattataatttttttaagtatcacatagcactacacatttaggatgaacaatttgctttctatgttgtttggttgatgagaatactacagga

SEQ ID NO: 89255 - DNA, 435 bp, Citrus clementina; identical to SEQ ID NO: 82028
  Intron number 1 from transcript clementine0.9_023109m (loc us clementine0.9_023109m.g) derived from phytozome v7.0 (c hr-ID scaffold_69; pos 948289 to 948723)

SEQ ID NO: 89256 - DNA, 680 bp, Citrus clementina
  Intron number 1 from transcript clementine0.9_001203m (loc us clementine0.9_001206m.g) derived from phytozome v7.0 (c hr-ID scaffold_11; pos 4013114 to 4013793 reverse strand)
cgtattcgctctgttgtaaattataaaaatcaaaagtaatttttgttaatgttcatacaataatataatttatagttgttatcgaatttgttctaaattcaacctagattttcgctcttgttttgttcttccctttcgatacattttgcaatctccagcttctctttaaccgtaagccctactacacaacgacgccgtttctgttccctgtctatttctcttcaattccttcgttttctttttttattttaattttttttgttattaccatttcagttatcttttttttttttttgccctttatattcagtttctggagattttaagttattgaaacagaagcttgttcgttattgtgtatacggagatttgctaaaaaaggcatatcttttgagtttaattttcttgctttatttattatacttattgattaataaattaataatatttcttttgtttggtcgctgagaaaataaaagagaaaatcaatcacttagttgtgtgttatgcaagtaattgttgtcttattattctcctcgtgattttacgttttgttgaatttttattttatttattgattagggttagcattagggtttgaattttctgctcatcgtagcttttaatttaaatgtggtttatttatttatttgtttgtttgataaattgtagtatcatat

SEQ ID NO: 89257 - DNA, 761 bp, Citrus clementina
  Intron number 2 from transcript clementine0.9_006417m (loc us clementine0.9_006417m.g) derived from phytozome v7.0 (c hr-ID scaffold_39; pos 86766 to 87526)
agtatagcaaggtatattaataacagtttacaaatgtttgattttttattctacttagcttacaatgtaatcatagtggtcgccttgttggttgtctctcgtggtatttacttgatgtacttaaaatttgtgctactaacggttgtttcttgtagcaggttatgcatctgattagttatattaattgatggctactgatggcattaaattttccacaaatgtttatgaccattaaaatttctatatatgaatgtccaatcgttgattttagttttaatttggttggatatctcacatttattcggggactgatgatgctatacatatttaggtgcttctgtgaaatacacacacacacacacacacacaaggtgtctgcgctgaacccatgggtggagtaactttgattaccaggttaagagtcattcacgtggtttacttggtcatggtggtcctgtgaaactggatatgcagcttatagtatttgaacttgaattttgctatacaaaattactataatcagttttgtataattttgagagttgaaacatctgatacaacagcctcgatggaagtatctgtttatatttagtcctagacgtgggatatgtggaattttttcataaagacccactgaagttatgtaaaagtgtttctgttcacttttcacattttttttcttgatagcttttgattcctttttaattatgtttttcttatcagcagggtagttttgtaatctgtgaaaagtgcttcaaaaa

SEQ ID NO: 89258 - DNA, 881 bp, Citrus clementina
  Intron number 2 from transcript clementine0.9_003134m (loc us clementine0.9_003134m.g) derived from phytozome v7.0 (c hr-ID scaffold_21; pos 1206677 to 1207557)
ttccacttggatcaaataggtaagctgaagcatctgattttaaggtgtgtcagtattattatcttctcacaccatcattgtttatcttttcttcctgatgtttacactttgactaaagaaatttttacaaattttgacataagtgctggattatttacaaacacgagattgattttcttattattagatggtttagctttcatcggagttaagaaccatgaagttagattctgttttcaaatttttatgcaaatcaacatgacagtcaaaaagatatggctggtgttgccactattaaatgattttcttttagctttcaacagagtcaaccattttgaagtagatattttcagagctttattcaagccaacatgacagttagaagatgtcgtcgattctgtctgtggattgacaagtttcactacacattttcagaatgtcttcactccaaagattttgtagcaatcttggctcttgggcctttttagggatttttttttttttaagaggtagggcttctacagcttttggttttatgtgtgtttcagtatatcagcattatgttttataggcattacaaacttagttgaaaggcaaagggactacaggctttgaatggtcagatgtatgaccattgggggatttcattttataaatcaattatagagccttggccttattgattttattattttcatatgggatcatatgtgtagcactttgaagatagttgtggtgagttgtattttggaatttcttttttcagaatcattattctccggtgcaaatatttccaccaatataatatttaaatgttggcaaagtaaaatttattcttatcttgtgcaaactttggtcgcagattttggacccatctggta

SEQ ID NO: 89259 - DNA, 643 bp, Citrus clementina; identical to SEQ ID NO: 83224
  Intron number 1 from transcript clementine0.9_024929m (loc us clementine0.9_024929m.g) derived from phytozome v7.0 (c hr-ID scaffold_8; pos 561337 to 561979)

SEQ ID NO: 89260 - DNA, 532 bp, Citrus clementina
  Intron number 1 from transcript clementine0.9_026533m (loc us clementine0.9_026533m.g) derived from phytozome v7.0 (c hr-ID scaffold_8; pos 4724770 to 4725301 reverse strand)
actttgagacagattgtcaaaaaggtattaaaaattttagttttcaaactcttttcatgtttcctttttataaagttgatttttttaggttttttttttttttttctttctccaacaatgtttgtatataaaactgaattttaatctgtagagtgttaacgatagagttgtagcttcaaaatcattaacgtatgcgcccagctcaatttctacttcatttcattgaataccaggtaagcgttaatgagaatatgcatagattgattcaaatattttaatgtgaattatgcgttttgacatcataccaaaatttcagtggcacttttttaatggcatcttttttaatgtataggatacaataatgcttgttttgaattttgtaaggcattcgaaacaaaaaagtaagatcaagtactgatatgcattgacaattatataatgaatacttcatgatttgattcttccaaggttctcacttctcaaattttttgatgcagtgtcttggtgctcgtgtttgcaagtgtctctttat

SEQ ID NO: 89261 - DNA, 876 bp, Citrus clementina
  Intron number 2 from transcript clementine0.9_005088m (loc us clementine0.9_005093m.g) derived from phytozome v7.0 (c hr-ID scaffold_8; pos 2613826 to 2614701 reverse strand)
tttttttttccaaaaggaaagcgaatctcaaagtgattgtacacattgcacccttttgttagttttttaagctgcattgcttcttctgcttcttctttctcttgcttgctttagatctctattctctagtttgatgggtatgttacttttggatgtaactcattctcttttttttaattctctcatgctgcaactttccgagaacatgttttcttaggaaacaaacacactaattgctggcgttttcaagctttacacagacaaaatagaaaaggtttgagtggtttcctgaaaacttgttgtgttgtgttcttcaaatttaattgaccgtcattatagtgtcacagttttattatccttatttcacggcaactatggaggagcaaacctcacttcctaaattaccacaacgccctttcacgggactgaatttacaacaaatagacactaaaacaatgttttatcccttgtctttagtaagggtatttgtgtcgctttatcattgttgtccttgtcctgtaggtcccctggaccgcaataatggggtcatgagcgtggtagaattgtgatagcattcaattgttagagatgattgcttttaatctcttgttgacaatttgatttttactcacctgacgatctcttttacttgtttattcatttgcattttttattcttgggttggtatgtgtgatgcgaatgatgagtgtgtatcttgtgcctttatcgcttcatgcatattatgataagcggtagttgtcctccatatgcttatttaattttttcatggatgcattggattctcttgtctgaacttgtgatattttctgatctcttacaggcttagtgggacagggagcattgaagtggtgaaac

SEQ ID NO: 89262 - DNA, 773 bp, Citrus clementina
  Intron number 2 from transcript clementine0.9_005517m (loc us clementine0.9_005517m.g) derived from phytozome v7.0 (c hr-ID scaffold_8; pos 3639906 to 3640678 reverse strand)
tgctttgctcgcatcctctgtcaagagatattcgcgtaagttttggaaacatgatgattttgatttttaattttttagggaattgtggattttggaatatattttttttttaggtcgtgtgtgctttatattgatctattatatttttcttgtgtatatgtaattgagtttattaaaaatggttgtatgttaaaaacacacacacacacacaaaaagtgaaaggaaaaggtttgcgagagagaaaaagaagcagggtcgtaattgagaaagaggagcaaggttgtaattcttactttctggattactagaaagtatcttgagcaccaaaacaggatgaatttcattgattctcttcgtgaaaactgtgacaatttgattttgatttttggttttttggggattgtagaatttgttatttatttatttattttaatattttgaggttaatttgttatctctatctaattatgttatttgatatgttttattgtatttatgcaattcaaaaggaagaaatagaattgaaacttttactctttccatgagtagaaagtatctttagggtcaaaacaggatgacttgcacagtttcttttcaatgcattttagtggtttttcagtttggtaatgctgtggtggttctgtgttagaaaaagtctatgttcatattgcatgttatttctctgagtttgtcactgaattaagatggaaaaatgttgtgattaatggtctttgcttgatgctgcagatagagtcattatctgttacttttc

SEQ ID NO: 89263 - DNA, 849 bp, Citrus clementina
  Intron number 1 from transcript clementine0.9_006198m (loc us clementine0.9_006198m.g) derived from phytozome v7.0 (c hr-ID scaffold_91; pos 495357 to 496205 reverse strand)
cggggagagtacctctccgctcagtcaatagcagggtaacataatttattcacctaattttaatttctcagtctttgtcaaaatgacagatatgtgttgttgataaactatagtaaatagaaattaatacctaattaactttcttttgtttatattttgagcagttttgcatacataagtgtaattgattgactgactacatatagttgagaagaaaatttagacacaaaccttagcaagtttcatttttagccagtaactagacagtttgatggttgattgtcgttttttcttagtcccttgatttttccgtaacccacttttgatgattgaagtataaccaagtctcaattacctaatcactcaaactccatacttgccgctgaatggttttcaggtagtttatttgacaggacacctgagttcaaatctaaggggtggtagaggctaaaaaattgattttggcctttgctcacactcctaacttcttaaagagaaaaggaaaaatttccagacttctcataccatcacaagaaaccttgcctgttgaatcacatttgttttcaatatcttattttctttatctcttggtttcgttgagagactattttgacgatttaagaatactcattttcatttgatctaatgttaccttcacgcattgattttcaaatattgattttcaaattatgttcttttgatggttgcaaaagaaatttaccttctacttgattaagcaatgtgagtgcgtgcgtgtatatatatttgtatttttattgctctctatcttatctgactgactttcatctctatatcataggattctgaggtgctttgtaaacataagaa

SEQ ID NO: 89264 - DNA, 791 bp, Citrus clementina
  Intron number 1 from transcript clementine0.9_016807m (loc us clementine0.9_016807m.g) derived from phytozome v7.0 (c hr-ID scaffold_12; pos 1937572 to 1938362)
agaattcaggtgataatctgattccatatgacaaaaggataactttgatgcttctgtttcttcaatcccttgaacctctgtaactaaagtagttaatatattatgtcatgaccgatcattgacctctgcaatcagtccaacttgagatgctaaagtgtcggcttatcaaactgtagtcacttagcttgttgattttagagagacaaccgtcaatgtcttcgatgcaaaaatcttattggttttagagactcaacatttctcatcacattctcattacacattttcatcgagttacatcactttcttgacatttcttgttcttttttctttttttatcatttctcatcccttttccatggcgttctcaacaattctcttgtcgttcactatgttcccatcaactttctttctccaattctcctcacatgctcattagtttcttaacagctctcgtcattttgtcatcactttttaggtttataagctaaatatcctctcagaatcattttttttcctactgttaaagtaccataaaattataatgaagtgtgttgttgttatctttttactggcaaaggcagaatgtgtctgctgttttcttcatctaaatgacagtagcctaataatgaaaaaagcatggccatgagaaatttaacgttttgcaaatataatggaatgggatataatacattgcatttaattaagtctacagggttccatgtagactgagtgataggctgatagcttctgcagctggttcttacttggtttgtttgatacaggaaggaaac

SEQ ID NO: 89265 - DNA, 538 bp, Citrus clementina
  Intron number 1 from transcript clementine0.9_000517m (loc us clementine0.9_000517m.g) derived from phytozome v7.0 (c hr-ID scaffold_13; pos 277419 to 277956 reverse strand)
cacccctctgaactcgtagaattcgtcaaaggtcaatcactcacctctctccccatttcatttttactcgtgaagttccctagtccttggtttgtttctgagattaaaatgtttttggctgttttatttgcaagatcaaattttgattctttcttcgctcgcataattagaatacacacacacacacacacacttatatgttgtttctgtaaaagcactcaaagttttcctctagaatagcccctactactaagtgcttctgagaagatacttcaatcggttgttccttttgaaagcacttctgtggtcttctactctcaaaagtttctttgtttgcttcaaccaaatcctacaaatagattcgaaagtgtggtattttgaaaccagtttgggtaccagccaagtgcatattaattatgagaactaaattgtaggcagttgaacgtaatttgtttggagttagtagcatatctcaaaattttgtggtttattttttctggcaggtgtatcctttgatctatctgataaagaactattc

SEQ ID NO: 89266 - DNA, 952 bp, Citrus clementina
  Intron number 2 from transcript clementine0.9_009787m (loc us clementine0.9_009787m.g) derived from phytozome v7.0 (c hr-ID scaffold_39; pos 1433091 to 1434042 reverse strand)
gtgtgtacaaggggtggcttgagagcactggtcaggtaaattctcctatgtttggtttactttaactttgaaaattctgatttggatgttacaagcaaaataaacaatcttggaatcatacttatcccgatacagaaaggggatgagtaagaatttctaagttgaacctgttatgatgattgtagcaatttgaggcaaagtccttgggcagtggaatggatcccaataattttccagtacctattgtaataatgaattggggtttagttccccccccccccccctccccccccccaaaaaaaagaactagggtttatggttactgaatcacaaggatacatggtaattaaatcgcaaaaccgttggtggcatttatattattttgaaatttataatcttcatttaacaatcatgtaattcttgagctcatacctgagaatctgttattaatacttagtaggcttactgttgtctgttatagtcgatttcttaggagaacagagctgtattatccatcattctgttcaaaatctgaatttttattcagttctgctcttgattttatgacaacctagctaaaatttagtgtatatttgttttgtgttttcaatgaggttgttattgctccacacatttgcattagctccattagttctcttgttttcagttggaagaaatgtaaaaccatatgtagcctaaccatgcattttgttagacaaattacttctttgtttgtctttttgggggaaaaaaaagtaaccgatcaaattaaacatagcaaatcatactaatttcaactagatattgataattgtgggacaaattgtagtgagaaatttcagtaacatgcctcagttgtttctgtagcttctttttttgtttgaaaagtttttgatttcttgtaaccgttcttgccttctgcaggtcgttgctgtcaagcaattggatagaa

SEQ ID NO: 89267 - DNA, 679 bp, Citrus clementina
  Intron number 1 from transcript clementine0.9_009787m (loc us clementine0.9_009787m.g) derived from phytozome v7.0 (c hr-ID scaffold_39; pos 1434187 to 1434865 reverse strand)
aacggtctccaataacatttccagattgccttctggtaagttttattcatttgctttattaattaatttatttttctgtattttgttcttattattgtgtttttagttatggaataaattgatcggatctgagtatctctgatttgttactgatcttagtgctttattcaatttgtttatttggtttttcactgtatcatcaataatcatggttagattttggagatagtatcattctcgtactttttggattattagtccgttggttcttttgataaagtattaattgattaatgagatctcctaacgaatttgataaattgggttgatctgatttgtaattgagctattgaaagacaaattatatgtgtttaaagtttaatttagtaagtagaaaattccagtttttgtgaaattatcttgtaactaactatgattggacaaatggtagtgaaagtgtatcgtcatcactccatgaattgggtcatgctcttatgggatcactgcactttcttctttttaccgttgtggtagaatttatgttcttgttagtcttttacaatttaaggggttaatatttgtcctcggattgcttagtgttgataagacaataaatacagatccgttattctctgttttggttgacttgtaggaagagacagacttagatcaagaagta

SEQ ID NO: 89268 - DNA, 460 bp, Citrus clementina
  Intron number 1 from transcript clementine0.9_019644m (loc us clementine0.9_019644m.g) derived from phytozome v7.0 (c hr-ID scaffold_87; pos 933000 to 933459)
cctcaaattctagtcacgggtactttcctctgtttaatattgccgttaattattattattattattattattattattattattggttcatgatcggatattggataatattagggtttatcatttggttatccttttgagttaacgaattattttttccagtgataatgacttgttgaaattcctatacgattaatttaatttgcaaggttttaggtttttcttgttgggagtaactttaatttcttttttgcctatattgttttgcttttttactttaatgttgtgaaatgatagtgacaatgttgtcttacaaccttcttagcttgattggtgggagggaattcggatgtttgttatctgtgttcaactaagtactatattatatttgctgccgtatttattttactattttacttcaatgccagagatcctgaatcggaacccaaacctgaattta

SEQ ID NO: 89269 - DNA, 1005 bp, Citrus clementina; identical to SEQ ID NO: 82656
  Intron number 2 from transcript clementine0.9_019644m (loc us clementine0.9_019644m.g) derived from phytozome v7.0 (c hr-ID scaffold_87; pos 933480 to 934484)

SEQ ID NO: 89270 - DNA, 960 bp, Citrus clementina
  Intron number 1 from transcript clementine0.9_029048m (loc us clementine0.9_029048m.g) derived from phytozome v7.0 (c hr-ID scaffold_60; pos 996467 to 997426)
aagctcagggaaggctaacccgggctgcagcccgggtaagctttttgaaaaaaaaaattataatttataaatttatatttattaatatttataaaaaaaacaaacctaataattataggaatccttattttcctcaaatcacaattcataaaactcactagtatctaaccaaatacgaatttgaaattcaccaaaattcaattgctcaagtctcttactgctgctgaatacccagtctcctgcgctcgaattgacgcccagccactgcctcatgagtgacgccgagccattgtcgcaagactcacacccgtaggctgaatctctcaccgccgagccaacgccgaatgcccagtctcttgatgcagccgctggtacaaagcactttgccttttaaactttagtttacataatagaatatgattttatgataatgatggttggcacacaaagtggaattttggaagagaagttgtcgattttgtgaactgagaactgtgattcatctttctaaaattataaaataatagaatatgacaaataatgatgatagcatataaagtggaacttgtaaaaggtgctgattcatcttcttgggattataaagtaatgatggcatgaaagaatgagtgatcaaaatagtaaaataattaatttgaatgctgactttttttaattagcttttaacttacggttttgtcaattttttataaaataaatactaaatttttaatgtattttattacagattcaatgataaataaaccaagaaaaactctactttcttttttttaagagaataggtgaaaatcaatcatccaccaagtttttatctccatgtcaagttaatgctcaagattccagtgagcaacatgcttccaagtttcaaagggttgaagttgaagaaactagaaatacttatctggagcgtgatcctagattacgtcatcaaatagggacata

SEQ ID NO: 89271 - DNA, 588 bp, Citrus clementina
  Intron number 2 from transcript clementine0.9_025957m (loc us clementine0.9_025957m.g) derived from phytozome v7.0 (c hr-ID scaffold_91; pos 747168 to 747755)
acctcaagcaacaggtactgtgttatttatgttgctggaacagtagtgacatttgtttgttgagtgccaactatttataaaacatgagttgtgacatggaatgcagattttctaacatggaaaataataatttggttgcacattctgtttgatgttcgatgtcatcagtcgtgttatcgtgactgtttcagggcgtgtactgcagcaaatgcctttttcctttgagttaaagttgacaaagtttaattggtccttggtttttgttaatgagtgcaaaggtatcttctttttttttttttgttgggggggggggggggggtttgtcaggttggagtactttgtagcgactttgtgttcaattatgttattcttttgggattttaagcaagggaaacgcatagtttgctgtgagataagctgttgagaagaattgagtttatggatttctgtatctttgtttttgttatacatttagttgttaggatctgtggagttcagatttatggtttgtgtgggtgtcttggttattggaattttcctgtggagttatacaaacatttccttttcttgatgtgcctgggcaggaaa

SEQ ID NO: 89272 - DNA, 685 bp, Citrus clementina
  Intron number 1 from transcript clementine0.9_003107m (loc us clementine0.9_003107m.g) derived from phytozome v7.0 (c hr-ID scaffold_21; pos 1985237 to 1985921 reverse strand)
gacttggatcatcctcaggactcaccctcagtcaggtcaggacttgatcgagttttgagttttcctcgtgtttctgctcttttgaatccatgtttttttgcaaagaccttttaattatgtgattgtcgacatattctgctgccggtattttagatttgtgaatcctgaatcatcttatcattgtcttcaactttatttttaaaaaagaggactttaaaaagttggattacggcagtgatctggctttagtgggactaattttctatttcaagcaaaatcgttctcgatatttgcaaaacgcgtaaagtcttttgctctgcacagtcatacacagagagaaaaaagaaaagtcatctcttataaaatctgacttcacagcttctatttcactttccgatgtagtagtagtatatatcttcttaaactgtggttctttctctttcacaaaaacgaaatagtttcccccccccccccccccctcttttttcccttgaatttagtcctggcaaagcttcttctcatcataaactcatacatttttttaattttgttttggatgtgttaagagacatcggttttccatttattctttgagtggaattaaatttccaaattctgttgttagattgaaaaaccataagcttcggaatcttaaagatctgtagaaatgttccagccaacaaac

SEQ ID NO: 89273 - DNA, 691 bp, Citrus clementina
  Intron number 2 from transcript clementine0.9_022742m (loc us clementine0.9_021559m.g) derived from phytozome v7.0 (c hr-ID scaffold_39; pos 1060045 to 1060735 reverse strand)
gaaggtcagtgtatcattattttaaggtgaataagaatttgttgttgtttttttgtaacaaagttttccattttgttataatatatcatagtggctggtgggaagacacatttgtttgccttataatcgagatgatgattttgatctccattcaatcctgcttttctttaggagaattctctcttaattattttgctttggcatgccggtctacggtaattttttttctatttttaattataaatgtttgatttttcttatatcataatcatagtggtaagaagacacgtttttcattgtttgggttattattaaaatgatgaatttgatctccattcactcctgcttttgtttgggagatttaatttacattggcatgccaatctaaggcattttttaagttgaggtgatgtgacttttaatctaaagctgctatgaaatagaatcatggattgtcaaagatacaagtgggtaagttggttgttaattgttagcaaccaattgttctgctgtctaaaccgataagaaacagagcaattacaagcatatttttgtttagagtctagaccatcttgctgcagtttattgggcttttgaattcagtttcttctttgttgatatagttttttagtcttgttatatgatgaaaaagactttgttgctgatggtttaatttggtatgccaggagca

SEQ ID NO: 89274 - DNA, 965 bp, Citrus clementina
  Intron number 1 from transcript clementine0.9_014233m (loc us clementine0.9_014233m.g) derived from phytozome v7.0 (c hr-ID scaffold_11; pos 3786820 to 3787784)
gctttcgcgtcacttcctcagcgtcctccaactcagtcagttctcttttttcttttatctttttttctttgttatttattcttgataaattgatatactaatgatcttttaattagttaattaatcatttttttagttagtgatagcttaaactttgtagtttagatgaaggcgtaaaatgatctttattattatagtttaaaaaaaaaagaaatgatctctacaattgtgtgtttttgttttattgacatgtaaggtggattaaattggactgcatagttgaatgattatatgtacaattagtttgtaactagtagcagtttagaaggaaaataatgatcacatgatcagtgtactttgtgtctgttgtagaatatagtctattggagctgtactttggggtccatacactagtaatcattaaataagtgattatcaatcttgatttgagcgtagatgatcggataagtgagtatttgataatttgccacaatcccagtcgtttcactctccggggaaaaaatgagcatttggcagaattagtacttgtgcgggaaaatgaaatatacaaatgccttaaatggtttcacagatatgggacattgtgtgatgacatggaaggttcttcaaaatgatgtccaatatgatggtgacgctgtgttaataagttttcattaaggtgagaaattggtgggaattggattctgctatactacttgatgtgggatggggcctctagattaagttaccagaagttctttgcaataggcaatgagggatagccatgacaagttattttaatcgatggggtttggaaaaaaataaggatgtaaattaaaattttctaacatcataggtagtaattcgtgggggtgtgttcttttacattatgattcttttatttttggtaaagaagttctctgtgttagtttataaattttcttgcaggagttccttagaaaaat

SEQ ID NO: 89275 - DNA, 912 bp, Citrus clementina
  Intron number 1 from transcript clementine0.9_013336m (loc us clementine0.9_013336m.g) derived from phytozome v7.0 (c hr-ID scaffold_16; pos 1579952 to 1580863 reverse strand)
tctccggcctttgcctcctcggtgccttagatcgcgtacgtgtatttaccttcttaccactgttgaattcccacgacaatgtcggaatctttaagaaaataaaagaattaaaaaaaaacttgatttaattttttttaagtcatatatgttcggtagtaattcttaagttagtgttttatttgaatgattgcatttttgttttgatatgctttatttggttgctgataaaatgtaggaaaacttaaagatattcatttggtttaaatgttggatcttttgttgtttgcaaatgctatgattgggaatctttaagaaaaagaaagaaaatgtagctcaattttatacttattaacatcatatttgttcaataattaatgcttgttaggatagtgattgtgtgaaatgctccctttttctttagtatgctttgattggttgctgagaaaacatgggaaagttttaaaaagtaaattgtaattttgaatgttagatcttttgttgtttgcatgtttttaacatttaatagtatgtcttgttatttcaaaatgatttcctgttaaataattggaagaattataaattttactggtaattgttgccaataatgaaaaggataccacatttgttgtctgactggcaacccctctagtttgcctaaataacaagtagtttcttaaggaaggtttttgaattataaatatcagccaatgaaggaatgtttatgaaatatatcaaagtatcttcagagtaggtgtctaatgaatttatagtgtcagagatcagcttgtgtttaggccataccgagggggaaaagtcagcaatgtttttctttatttttattataaccttgttgatttaagattaatcagagttctgatttgatgtacatattgatgtactaggttgacaagg

SEQ ID NO: 89276 - DNA, 585 bp, Citrus clementina
  Intron number 2 from transcript clementine0.9_016052m (loc us clementine0.9_016052m.g) derived from phytozome v7.0 (c hr-ID scaffold_16; pos 3341357 to 3341941)
tgaaggaagtgaaagaggaggttgctaagtacaaggtgagtttctgattctattgttttattaaactaaatttgattgcttatttaataagaaactgattgatttccttttttcttggctgtttgtgttattggtaactagtgcaacgtttttcacaatgttatattaatttttcgttcattcgattgctattggtagtagattaagtatagattatttttattttttgcaaataagcattgaagaccgtgtgtatttttgttgtggaacaatttcatattgtttcatctgattatacagtttttgtaatttgatgcctaggtgatttgtgtggtaattgatgcttaggtgtagatggtaactagatataaatctgtttttgtggtcaaagttagatgtgactttgttagattctccctgcaatgacacaggtgtttttttattgtttgcttgagtagtttggttgtatttggcactttctattgcaatttgctttctgattagtattcttttttacccccattaatgttatatgatattttgtgaacaggttggagctcctgctcgtgttggtttggttgctcc

SEQ ID NO: 89277 - DNA, 630 bp, Citrus clementina
  Intron number 1 from transcript clementine0.9_008941m (loc us clementine0.9_008941m.g) derived from phytozome v7.0 (c hr-ID scaffold_39; pos 1148896 to 1149525 reverse strand)
agcttctgagctttctctggtgagtcctgttgatatttctcgattttggctgcttagtttggagaattgttaaagtagtacattcggcttgctctgtgtttttacaaaagatgtgagttttcttttgttttagacattattcatttagggacttttagttgctgaaatgtgtttggaaagctagaaaataacattatgagagtagaaatgcagaattttttcactcatctgattggcctcgttgtataagctgcattcatgtgtttttgagggtgataactaaatgaaacatttaaaaaaatttataaaagaaaacacttactttgttactccttttcatttaaatgtcgtttttttttttcactcgtttttctatcttattttctgtactgaaataattttgcgtagtcactgacaaaagaagatagcagacaagtacttgaacttatcacattctactagtgatttttcagctgggactgttgttattcattttttcgaaaaattaaaccatgtttcattttcctctattgacgtctttcaaatttgattggtaacaacatgatctatttctggctgaaaatattctctgctttgcatttcagggaaaggagtttgcttttattgtga

SEQ ID NO: 89278 - DNA, 895 bp, Citrus clementina
  Intron number 1 from transcript clementine0.9_008769m (loc us clementine0.9_008769m.g) derived from phytozome v7.0 (c hr-ID scaffold_16; pos 1808092 to 1808986)
cccaggaaagatttcgcaacattcgtttgcaggttagctcttttcttgttcatttctaaaacttttagccttttttttttttttaatttttatataggtcattaattagcttaagcctgggaatttatatttccagctatatgaatggattttgcttgatgggtagctgagtttgactctttttcttaatgagcatttgatctaatttgcattcttttagtgtttcactgcaaatttgttaaatttaactgctctgggactaaaagagcaaaagactctacttttaactcctaattcaagctaaataacctttcctatttttctttcttttatttattttagtttatttaatctcatctacttgattttgaagttgcgggtatgaaatattttgactttattatccattgttgaacggctaaataattgtgttttagttcttttatgtgtttcttaatattgcttggttgttgttttagccgctggtcatatttcgaatatgtcagagttagaattcttgggagatttattttctcaattttgaaattggatttagaaacaatagttacattttctttgtgatcaatatctgaagataagtttcatgatttacgttatggacatagttctagtaaccaggagcatggagagtaagaggaggacgcatacaaaattatgatatttctgcaattttgatgaatttagctgggagcaaataatgattccaccctatggtggaccattatgaccgacatttgacatacatttaatatatgtatcatttagggtcaattattaatggatgcttcaattgtgtatcattcagtgtcgtttagggctttcttatttaagctctgcttcttacttgtagtgttattttatacacaggaggaat

SEQ ID NO: 89279 - DNA, 779 bp, Citrus clementina
  Intron number 1 from transcript clementine0.9_020160m (loc us clementine0.9_020160m.g) derived from phytozome v7.0 (c hr-ID scaffold_96; pos 23867 to 24645)
tttgctcagccacatcaagctgttcccattcattggtgagatatgagatgacacttcctatgttggttattttctttttgagttgcttccaggctcttgcattaataaaattaggcaatgagtgaacaaattatgatggtttcatactaacctaatttgtttgagatcactagatgattgtctttagttaaaagtttttgcttatctcaatgttagagaaaaaaaagagaatttcattaagtgaacttgggtatctttcgtttcatgtgataagtattcataattcttcagttggactcataattatgacatggttctttctgcaaaatgtttcatgtatattcaagaaattgtaattttttcttatcagataaaaaattgttggttacttgctgagatatttgctaatctggtatgcaccttattcctcagtcagcattgttctttattttgcaaaaatcaatccacatagatgttgtaggtcattgttgcatgattgatatatcatactccatggactaggattttcttaaccaagagttctggtaaaatacacaagtggtttagaggagtcatagaacctgcaatttgtgcacttgaactaccctacattacaaagatgacattttcactcagtaaggactatgaatcgaaatgtacaaaaaatgatgggaatcttgcaatacatgccctgaaatctcttacttttttgttgccttgggaatcttgcgtttaaacattgattgcgtttgcatttttcaattagcagacatcattcc

SEQ ID NO: 89280 - DNA, 722 bp, Citrus clementina
  Intron number 1 from transcript clementine0.9_025641m (loc us clementine0.9_025294m.g) derived from phytozome v7.0 (c hr-ID scaffold_39; pos 776941 to 777662)
gctggtacttctcccaatcttatctctcttgtgggtgcttctaaattgtttagatctggtttcaaatcgaaataaaccctaagatgagttgaattgtttatcgtgacttgatgtttgattgcgttacatgttagttgataaatacttgactgtgatttgtgggctgcacatatcttgtgtagttgattatactccgtttcatttatggtaattgggattttcttattgttttgatgaattgttatgggaaaataatagtttgttgtttaaatgatttgtgttcggcaataacagtgaattttcctagccagtagttggagttattgtaatgtttttcaaacttttgcttataatttaactggattcatatgtgaaaaatttcattagcaagtatgctctattgcgccgaagttcttgactttggttttggtctcggtctcaaaggcattaaggtgtctagttttgtggagtggcgttttcagatttgttacactgctcgtgtatgaaatcacttctttttgtattcttcccttgttatcagttattgcctcaagctaaagccctgagttgtattgtgtataccactgatgctgtttcctttttcttcattgttattttgatttgttttcctgttggcttatggaatataatcctcagtgataagtgtggtcttccaattctgtgcagcaccttcaagaagaaagctccaaaagccataaagg

SEQ ID NO: 89281 - DNA, 984 bp, Citrus clementina
  Intron number 3 from transcript clementine0.9_010232m (loc us clementine0.9_007301m.g) derived from phytozome v7.0 (c hr-ID scaffold_84; pos 1081041 to 1082024 reverse strand)
attttgacataataacttcagctgaacttaaagaggttactctcagtttttacttactgcaatgctagggagatggtgatgttatagtttgtatcaaattgttatgtttctttaaatattattagcgccattttttttttggctactaattagacatacaattcattaaccaaatgtattttctttgaattgcctgcctggcaatatcgattttcatcaaaatgtaggaattttgagactattttttctggactattcaagtaatgcttttgttgtatgcacagttttggtggattctgtatactagtcaagacaataaatttagtaaaaaaagggataagcgaagcatgctaatcgtaattaaagaaggaaaaagagaggaaagggataagtgaagctcctcttggtccaatttggatggtttatgttatgcaaagcactatgagcagtttttcttatatctagatatgttagagtttctttttttttttttttttgactgtcaatttctgagatggaacattttaaataaaggtagatagattatgacattttgaagttttctatctgtcacaaaatgtttatggaagagttattgaacttgattaatagctgtgtaagtcggcgatgcttctaacaaacaaaatgagagaggtattttccagacaccatgatgttgggtagaactgcgatcaaagatgatggtgtattaatttgattgtgtatttattctacccgacatcatggtgtctggaaagatcctctctcattttgttattactataacttgtatgtgcatattaatttgaagaagtttttcttttgaactgtcaatacttttattactgctccgtcataaaaggacattccattttcactccttttctttttcagataaatctcattttcactacttagataccataataatttcctactggatttgcaggtggtgagggtgttttcgcagtgtgaaatagttgg

SEQ ID NO: 89282 - DNA, 488 bp, Citrus clementina
  Intron number 2 from transcript clementine0.9_010232m (loc us clementine0.9_007301m.g) derived from phytozome v7.0 (c hr-ID scaffold_84; pos 1082085 to 1082572 reverse strand)
ggctcaagaagaaaggtttttgttgctcttgtactttcaaatgaatgtaatttatgttgctttgtttggagttgattttttttttaatctgttggagttaaaattttgtgttatgtgatcttggtgctgattgaatgttggagggaatgatttgagtctgtttccctatgctgtttatgatggatataaactaagcaaatgatcttatagagtaaatatgccatcaattagatatactggagtccgttatttatcaatatgactgatgacatctaagcttgccacagtgtgatctagttccaccaatgatttgcttcaatgtttctgaactcgatgaatagttcagtgctataggaactcagattgtttcacaacaattacatctttattaacttctcttgaccatataatttcctgttttatcctagctaggtaggatctaatagcaactcttcttttattttttgttttcttttcccttgtagggt

SEQ ID NO: 89283 - DNA, 511 bp, Citrus clementina; identical to SEQ ID NO: 82568
  Intron number 2 from transcript clementine0.9_034161m (loc us clementine0.9_034161m.g) derived from phytozome v7.0 (c hr-ID scaffold_12; pos 1060083 to 1060593 reverse strand)

SEQ ID NO: 89284 - DNA, 829 bp, Citrus clementina
  Intron number 1 from transcript clementine0.9_015462m (loc us clementine0.9_015462m.g) derived from phytozome v7.0 (c hr-ID scaffold_8; pos 2968898 to 2969726)
ccgcggcgcctggaaggtgaaatttttattaattttatttggagttctaattattattattattatttttggtttatgtgtttggttttgaaaatttgacgatttgttatgattcttagatgtggtttttttttttttttatgggtttcatttttgtaaaagaaaatgcaaatgatttttagctatcaagaatactaattataggagagaaatttttatgtgtttgagggtgttcatgtggaaaatgggagtgtttattcattttttttttaatttcttatattgatgctgaatttaatttggaatggtgttgatttcttggtttttttgggcatctgaaaaacattaattcttcctttagctgaataacatgttggattttgagtgatgcttgaggattttatcctttggttgcttgaagttttgttgacaagcatcgttaacatttgagttaaaaaatgtggtttatgacctggttgcaaagtaaacatttggtgctactgatgttcaaataatataatactggtggactccccagttattgtcatgagtgttatctagagagaagccaccttcatcaaggtctgcatattgttgacaaagttactaatcattgaaattatgaacctggttaattatcatagtaatattgtcttgcttttagctgtatactactttatagacattcttatgtttatggttcatttgttttagggatgatatgaatcacattttgcatgtgtcaacaaatattcttcttttcttagtggtttattgttctttttccttttttcctgcagtattactgtcgcatttttcggtaaagaag

SEQ ID NO: 89285 - DNA, 434 bp, Citrus clementina
  Intron number 1 from transcript clementine0.9_008514m (loc us clementine0.9_008521m.g) derived from phytozome v7.0 (c hr-ID scaffold_35; pos 1326217 to 1326650 reverse strand)
atctttatctccaaaaagtcatctttcttttcctggtaagctgctcaaagctattgaatcatatttcgttttggctctctggttgattctgttttcagctttttgattttgtgattcgttagaacttatatgaggttttgtgaagttatctgataattaggctgttagctcaaaagggtacgtggcaaatcaaagagatttgatatcaataagatttagtcttattgttaaactgtgtattcttcacaagggtatgtgcaattaagtagttgaggatgtgtaaggataaatttcagattgatctgttattttggttgtcaattgtaaagaattcttggagatttggttaatgattgtcatttgaggagatttcagtaagcggattaatctgtttttcaggccaggaaggttttcaccaacaagttctgacggat

SEQ ID NO: 89286 - DNA, 683 bp, Citrus clementina
  Intron number 1 from transcript clementine0.9_004628m (loc us clementine0.9_004628m.g) derived from phytozome v7.0 (c hr-ID scaffold_8; pos 389279 to 389961)
ggaaagttgttatcttgtgagtgattcattcattgatttgttttataaaacatgttttttgcttctgaaaatgattaattgacatcatatatgtttgttgcgtaatgcacatacttttggtctaaatttttaagtgcgaaaatccacaacgtttgaatctgtttttgatcactagagggtgtatagatctcataatctttgtttaatagagtcacatggtcatcattgtttgtatttctttttttacgaatttgaaaatcaatttgagatggtaattaattacattgtgtaaagtaaaacctgtgtgctattaatgaatgacacttgccattgtttcaactgctaccggtgtgtttgttgagtcaattattgattttggctgaagatctaattttgaagggtaaggctcttgattaaagtttaaatggatggacagaagatttattgcagccccatttgattttgttgatgaagaaattcaattgaatgtgacatttaagacttttgaaagtgacaagatgacaaaatgtttaatgctgcatttgtgatgttgatgattgtaattgcataactccccattcttttctgatctgtcatatcacttggataacagtactgctgatgggttcttcttttcatccttttttttttccaggaatttgagggatctttgtcttggaggg

SEQ ID NO: 89287 - DNA, 654 bp, Citrus clementina
  Intron number 1 from transcript clementine0.9_001202m (loc us clementine0.9_001202m.g) derived from phytozome v7.0 (c hr-ID scaffold_39; pos 1642088 to 1642741 reverse strand)
ttgttaatatttcaccaggtaacccaatatgtttatggttctaaacttttttgcttcttcttcttcttattattattattttaaatgcaaatatggtttaagcataggattctgtgttcgaactggggaatcttcgtcttaatatggaagcagatttatttttcccttttcgttgattgtttttgtaggcttttttactctgaaggtttatatttgttggctggtttcagtgtgtgtgtgaaaaagaaaaaaaaagtttttttttcattgtctgtgtgataaaaaagaaaaaaaaaagtgttttttttttattatttcaaaaagctaaagccttcaagagaggaaatgtttattattctgttggtcttttttgaaatcaaaaaggaaaatcaaaatttttgtttcaatatctctcatttgaccgcttttgattttgtttttcagcaataaggatgatattgttgccaaaatgatactttttgattgttttcatgtatgaatctggtagtagcttttgaaatatcacttaaactggaatgagatcttatcatacaggtgttcatgagttctacatatcagttggctaactatttctttgaactcacgtaagcatctccagaggggctttgcaggagaaacaaggtagctgttaaa

SEQ ID NO: 89288 - DNA, 826 bp, Citrus clementina
  Intron number 1 from transcript clementine0.9_002149m (loc us clementine0.9_002149m.g) derived from phytozome v7.0 (c hr-ID scaffold_16; pos 849231 to 850056 reverse strand)
attaaccaccctctccttgctttcgaacacaagcggtattatccttcttctcctttcccgtactacctagtacctcctctcgccacgtgtcctccccctcctctttctcatttttcatttatttatctccaaagcatttattttagttttagcacgcaggtcgatcgctacgtgttcgtgtcatcctgtgatgtgatgattttgactgttttgactttgattcgtgcttaattattgaaaatttgcgacagattttgcgtttccgaattggattcgctttttgtaagttaaaaaaataaatttcaaatgcgtcgatcacgttgatttatacgcaactgtgttcatattgatgcattatgcgcgcatttacgaattctcatttaatgtgcaattcttggagaaatcttgattagaaccccccctccctttctggtgattgatctggatttgaattggtcacgatttgattggattttattaggattaatttaggtttttgggtggaaaatgtggtgctctcattgtgaacttgagtttaagtgaatgtattatgcaatggcgagtgattggggaaatagaattgtggttttgagtggaatatgttgttgtctactgtgaatcagcaatctttggaggcggatgacaggtaatttgtgttggctgctgttttaaaacttttctgttgttcggcttgtcattgatggtttgggtttcttgatgctgttatgagtatttgattaatattttagcatgaagtgttatgttgtcaatgagaaggttctttgaatttgggatttaatagaaatttattttggttttgacaggg

SEQ ID NO: 89289 - DNA, 1040 bp, Citrus clementina
  Intron number 2 from transcript clementine0.9_028585m (loc us clementine0.9_028585m.g) derived from phytozome v7.0 (c hr-ID scaffold_16; pos 3910107 to 3911146 reverse strand)
tgttggtggcaaggaaatatacttagaaaatgtgctaagtgttgttgaagctgattacaaaattaagagtagcgatgcggtggatgtgatgccttgaaattttgtctgtatttttatttgtgaatgatgaaatatataagtagttttttttttcatttatttgtttagatgaagtttaaagtacatcccttgagtcaaaaaagatacgcgcgcgcacacacacttaaatgaatatatatacacttgaatcacgagattgatttaaaactgactttaattccaatattatgacaatagacattgagctctatagcttaatgataaagaactcactcacttaatgacggaatgattttgatgttcccaaccctttcgtgattgtaaactatctagttataattaaaaaaaaaatcctagagaaaattaccatgacagtcggatgtttggaagattcaaaatattaaacccaaactcaagctataagttaatgtgcaatataatgggaaattatctttcatgttcaagttctcttgtatgtatccgtaagaaagatgtattttaaaatatttatagtatttccacaacttgtcaaataactaaataacatttttaaaaaatccaagtgcaatgtgcttatgctgtatgctaaggcggatgtgactagatttgaggttgaaacactctcccctgcaaacatttgtgtagtaaacaagattgtgattaaaatacccttcaagttcaacatctcctctcaccccccactctcgcgctctgtctctgaaacttaagtcaagagcttcattcatggcagaaaatctcaaaccctacaatgcgccacaacaaaacagaagaaacaagcgtagattcaccaccaccactcaaaccaaccaacaagaacaaccacaacccacatcacatatcttccaaacaaacttaacatcgtttcttcaactaaacccaccaacaaaaccacctcctgcttcttcttcttcttcgtcgttacagtctcttcaccagactaattttcacacaccctttga

SEQ ID NO: 89290 - DNA, 699 bp, Citrus clementina; identical to SEQ ID NO: 79764
  Intron number 1 from transcript clementine0.9_008127m (loc us clementine0.9_008127m.g) derived from phytozome v7.0 (c hr-ID scaffold_21; pos 566345 to 567043)

SEQ ID NO: 89291 - DNA, 782 bp, Citrus clementina
  Intron number 1 from transcript clementine0.9_014696m (loc us clementine0.9_014696m.g) derived from phytozome v7.0 (c hr-ID scaffold_21; pos 3872535 to 3873316 reverse strand)
agctgccggctgctccaatcacaacagcgttggcggtaatcatcaattcgtttttttttttaattttggttgcttttgagatgtgggattttcttgattgtgttggtaagcatttcggtccgagttcatttgtaattgtgttactgctgctatgtgcattgctgatgcatgtaatatatgtcattgtgcttgattttcggtgctagttgcctagttctgtgatacattagccaaaagatgctgggacaagttaattttgtaggctgcccgtaaggacttgggcgagtggttttcaaacagctttgtttggctggccacctgagttcgaattttggggaagataaggggccaaaaaattgattttggcttgtccgctcccctaatttttgttttaagttaattttgtaagctcagaaatataggagttgcattggagaggtgtgaaatttacacatttttattgagtttctgagaactttcattatcttacttatttatttattttcttttttagggctatcattgtcaacgaactgttgtagttgttctttcctttatcctctaagttttaattatcctcaattttaaatcgttgttttagtttttggttcttctttttatcttttcgatgcacttgatttgatgtatttcgacaaggtttctgctaacaaaggtatagaaatctcatttatgttgcattatgatggctgaaatataaaaagagcgtgtattatgaatcaatttcttctcatgactatcaattgttttgtattttacagaag

SEQ ID NO: 89292 - DNA, 851 bp, Citrus clementina
  Intron number 2 from transcript clementine0.9_000113m (loc us clementine0.9_000113m.g) derived from phytozome v7.0 (c hr-ID scaffold_13; pos 3781233 to 3782083 reverse strand)
acacgggttgatacgcgaattcaccccgctcaaccgtaagtcttcagcgacctcagttctgtttccataatagtcttctgttttgctttttgcagtcttcagcgacctgttttatttgcaatccggatataagtctttgtttctgtaaaatttaatacctaaaagattagggatattcctttagtggagatttttcaattaatatatattatccatgattttgtaaatattaattttttgttgagtcatattggggcttgtaaaaaggatgatccttctgttaataaatagaatgggtcactccactgaatcggatagtgctttgggttggatacctgcatccttgatcccaataggagctatcaaaatcagccatggtaggtagactgtgatggcctcggtgtttcagggaaagggctggggtgatggactgagtccttaacggatagaaggttcagtgtggccacacgccagcagaggttttgcctaggggagagattgttgagtcgtatcacattccccaataaaggcatgatcaatgcatttacaaataggatgagtcattccacccaatagtttagtcttttagattagctatcctcatcctagtcccaacaattttctcaggttaatgttggcagagaaatataatttgattagttgaaattggaggttgtcttcaaaaatattgaagatgatattgaaattctattgaattcctgttcgaaacacgaatgatgtgctacccagcaactgttaatcacataactgatgggcatttagcttcatggtttgagagaaatgatgccatgatggttttgttgaattgatctaggtacataaggaaagac

SEQ ID NO: 89293 - DNA, 335 bp, Citrus clementina; identical to SEQ ID NO: 83045
  Intron number 1 from transcript clementine0.9_000113m (loc us clementine0.9_000113m.g) derived from phytozome v7.0 (c hr-ID scaffold_13; pos 3782108 to 3782442 reverse strand)

SEQ ID NO: 89294 - DNA, 443 bp, Citrus clementina
  Intron number 1 from transcript clementine0.9_007012m (loc us clementine0.9_007012m.g) derived from phytozome v7.0 (c hr-ID scaffold_121; pos 355372 to 355814 reverse strand)
ctcttgaggttgtcttggattgctctgttacttgttctttactaaatgaaattgattgaaatctttttattttttgggttcttcgggtgggtttatggttcccttctcttcaaacgcacacagctttgtatatgcctttgaaaacctagtcttcaatttcttagtgtgtttgattgaaaaaattgtttagagctgaatgattaagcttgtcagctagaactttaaccttgtaccacaaagatgtgctggtgatgccgatgcactgtgcgtacagatattaatgaactggtgatttgattgatgccatgcgtcatagtgctatgattggatttggctcctcaccatcatttttgctgttctagtcaagtgttacagagtttgataaatgatataccttatatcatggacatgtttattgaaatttctaacattcttgcaggtat

SEQ ID NO: 89295 - DNA, 209 bp, Citrus clementina
  Intron number 1 from transcript clementine0.9_000505m (loc us clementine0.9_000505m.g) derived from phytozome v7.0 (c hr-ID scaffold_8; pos 2249593 to 2249801 reverse strand)
cgctcgtcaatttctcccgctctctcgcaaacgaggtactttttttttttttctaatcagattttggaattatcgtttgatatttaatcttctcgctttgtcaatttcgaaattttgaattttctttcttgtttttgattcagttactcttaggaattataattttggtgaataaaaggagagaaagctagggtttgtttgtcatagta

SEQ ID NO: 89296 - DNA, 1006 bp, Citrus clementina
  Intron number 2 from transcript clementine0.9_019023m (loc us clementine0.9_019023m.g) derived from phytozome v7.0 (c hr-ID scaffold_12; pos 2229704 to 2230709 reverse strand)
ctttttctcactttttccttgaccatttgtttgaggtaatttttttttttttttaaatttttgtcccctttctattgatatggtatgtccctgagcgtgaccacaatcattttgtttattgcttgaaaatgttcgtttgtaaatcgttttgcgagatatgtattttgaatcgtgtgaatagcagaattgaaactggtcgaagcctatatacatgttgagtgatcaatgtagatgtttggagagctagagagagacttctacttctgctatttatctaggctttgaaaatgatatggtgaacttcagagtacaaatcatgttcaagataaactttaagctgtgtgccagtcattggtttaggaggatggcacgtgccctttctgtaagattctggatgaactagttacgccaaaagaattgccttagtagatgcactgcttacaagtgacagtgctattgtcaatttagtacattttcagaataattaaaatcagggcatagtatgtacattttcagaataattaaaatcagggcatagtatgaatctgtttttttggtttccacaaaaaaacagttaagacaaagttttataccagcagcaatgcttctcaattttggtaaaaatttcagacaagttgcatctcttaatttggaacttactagagatggctgaaattttctttaattcttcattcttcatgattcatcttgttaaaggatttattttattctttgactaaattgggcttttaagacctgataggtgtgaggattcctcaattttaagactctgttcagagaagagaaacagcgcaaattgtctttatgattttctggtttgtgtgattgcctcactcccaaatactgcaaattcaaaagtaaccgctgcattcatggaaggccaaatggcaaacacccccgcaactcccttcctccttttggtgcctctgggtgccacatcttattgtttgttatattgatggatcaaacattgtatcacaggaaa

SEQ ID NO: 89297 - DNA, 240 bp, Citrus clementina
  Intron number 1 from transcript clementine0.9_015561m (loc us clementine0.9_015561m.g) derived from phytozome v7.0 (c hr-ID scaffold_8; pos 1767712 to 1767951 reverse strand)
cagtctatttagatccccccaactggcatcatcaggtaaaaatttttttttccctcttcgttttctttgaaccaacaaaagcagattaaagaaaaaaaaaagataaatattcctattcctttgtaatctcttcttgaatataccaaatatttgtttctttataattatacttgtttttgatgtctttggtttatctatttttcagcaaccaaatcatcaacaaggtgctggcagtgaaaa

SEQ ID NO: 89298 - DNA, 269 bp, Citrus clementina
  Intron number 1 from transcript clementine0.9_024357m (loc us clementine0.9_024357m.g) derived from phytozome v7.0 (c hr-ID scaffold_56; pos 493064 to 493332 reverse strand)
aggactctgtgactgcttctccgactgctcaacttgtgagtccccttcaacttaatactttttttttttcctcaagtaatatacgattgacgtacctgatactgacacataccagctagttagcagtagaatattgtgactacaaatttacgtatgctgatgaagaacagatcgaggctagctactgaaagtttttattaattaatttatttgtttctttgaattaattaacaggttgcttgacatattggtgtccctggatcactttt

SEQ ID NO: 89299 - DNA, 906 bp, Citrus clementina
  Intron number 2 from transcript clementine0.9_023799m (loc us clementine0.9_023799m.g) derived from phytozome v7.0 (c hr-ID scaffold_88; pos 536609 to 537514)
tcgctagttatccatctgcgcgttcctctagaattgtaagaatcttgattgacgctttagctcatttaggattaggtttttctttttcttttttggaaaatgtacgaaatgttatagagaggacttagttcacctaatgaaagaaattgttgttgtctactagttgaaacttccatttgattattttgatgatgctttgtcggagcttttgatacttttgaattgtttgatggtgttggaggtgaaatataaaagtgggactgagtgatatctgaatgaaaatgatgtacttcgaaagggtttttctccttttatgtttccggactacatgtgcgttttattagttgaaatcagtaattatatgtatgtcgctgtcgttgaactgtgactctgggactgccaaaagtgctttcaaataatttttgatgattttgcttctatgttggagtaattcaatagagtagattttgcttaaacgagaaaacatggatttctgttggaaagaatttgattggtgccatttttagttagtgttttctggttcaatgaagaatttgattggtactttctgagaaatgatttttacaaaaaggattctcaatgagcacaaaatcagatttttttttaaaaaaaaattttttcttgttccaacactgagttaattacattttatttgtgagggttagtgtgttcaaaaacttttattcacttcagtctgggctacaaattgcatgggcgtcaaatgagctaagtgatagacatgtttacaaagtcgtcgtattatcatatccatcactgccaaaatatgaagtattttgcttagtatgtttgttattatcataataggaacaatagctcatgcttttgcgttttattgttagtaggtatccggatccttgtaccgca

SEQ ID NO: 89300 - DNA, 622 bp, Citrus clementina
  Intron number 1 from transcript clementine0.9_023221m (loc us clementine0.9_019890m.g) derived from phytozome v7.0 (c hr-ID scaffold_12; pos 878788 to 879409)
cgcctccaagccagacaagcgcctcattctcgttggtatctcttacttctctccttgtaattcatgcagataatatttctccgttccttttttcttcgaaactttcagatccgcaattgaattgtagtttctgtcgaaaagttcgaattttgattctatctatatgatttaaaaccgaattttgatattccaaaaaacgaaaaaaaaaaacgaattttggaaagttcaaattctgttcggtcgtggtggctcgtaagtttttttttttttctctcttaatagttattaagttaaacaggaagctaacaagcattgttacttatttaaggtgtatagagttttggtagtttacgaagagtactgcttgagttggtatccatgtcggaaggtctactttgtgtttctgtttagtcgaagaatactatggtttcaatatgtgaatgacagattgaaatgaaactgtaaactctggcaggcctgtttagagtgggacttgttgctcttttattttctgtttgctgtattttagtaacttagatttttcccgctaaagtaattaatgcagttgaataaccaaaagggacaattttctaattcctggtgattgaatgcaaatgtagag

SEQ ID NO: 89301 - DNA, 339 bp, Citrus clementina
  Intron number 2 from transcript clementine0.9_014219m (loc us clementine0.9_014219m.g) derived from phytozome v7.0 (c hr-ID scaffold_70; pos 247311 to 247649 reverse strand)
ctgttgccgagaatctattagatcgattggaggtaaaaattctacttataagtttatgttctttgatatctctatcattgtcgttgctattattgtgataatctcttaaaaaggagactttgtatatcaatgctttaaatctacggaaaattggtattaatcttcaattatgttgccatgtttgataatatttcctaaaagagcttctttactctttgttttggtctctctctctctctttgtttttttgttcttttgataatcctaggttgttttataatgagtgagccatgtgcttgcttttttgtaggattgtaggaaaacatttcctacggcatt

SEQ ID NO: 89302 - DNA, 839 bp, Citrus clementina
  Intron number 1 from transcript clementine0.9_027873m (loc us clementine0.9_027873m.g) derived from phytozome v7.0 (c hr-ID scaffold_70; pos 775911 to 776749 reverse strand)
aaattggtaactctctttatctatgcatttgatttatatttttataattttttttccttttcaaaatcctgaaggtacatgaaaatttatatacaccatgattgcatgcaatgcagggtattttaattgctgatctgacaaattattatgattacttctttgctagctaaaaaaaagcataaaacagatgtcatttttagatttttctcctttgtaaatttgtgtcacactcttgagcatagttagaaatatctgtgaagtgagtttcatagtcatggcttcaatgacacaaatccaaattcattacaattaattaattgatttcctacttctatcccttttaaaaaaaataacaaaataaaagtacttgtttagttatctatttggggagggggggggggggggggacggaaggactattgccgtttattgctctgcccctacctctatatgtctctttgggagggctcgcactgtcccataatatttatttctaaacaatcacagtcattatcttaaatcaataaaaataacagaattttttcttttattttttacatttattatatctacacccacttatacctaacttgtattaatccgcaagtacgatctgtttggggataaattcaccatatctggtaggcatgtcttattaatggctaaaagcttccatatgcataacctctttaaattgtgtcccctttcaaagaaaattttcttttttgtccattagcttttatttactcttcacaaatatttttaatgtcatattaaccaaatcttgtaaattcatccattcagctgaactactgggacttcctctgattcctgcatac

SEQ ID NO: 89303 - DNA, 1019 bp, Citrus clementina
  Intron number 1 from transcript clementine0.9_018277m (loc us clementine0.9_018277m.g) derived from phytozome v7.0 (c hr-ID scaffold_91; pos 803341 to 804359 reverse strand)
tgtttctgggactactatcggcaagggttttcaaggtatcttctttcacgcacactctttcagcttagtttgaatgcatggttttggtttggtttgggctaaggtatgtttatgattgaggtttggtgtagtcgttaagtagagcattagctgtcaagtacaagtgaataaaatcacttggatagtacaagaagttttgtgttcgaattctccttacatgggtggggaggtggtttattgacttaacacttcagttaccgtgctttcagagttcagttgaagcacaattgtttcaatcatatgcctgaggggcatgttgggatgtgaaggaaatattttgttttgtttgaggtattggaatctattggagagttgattttgagagattcacttttgaatttggatgagatggttgaattttaatgtatgtaactgttactatattgatgcgggatgtttgatgctattgtgggatgggagtgttttatgtgtcagatggtgtgatttgtgtggctttcttgactgggatcacggttataaccctggcagctctaaacgatatcaaagaaaaccgattcttggataggaacaaagttgagaaatcattatgtttactttaccaacattcttaagctaaaagacagagatgctgatgcatggcttttatatttttataagttatgttgaacagcagccattaggtatcaagttaccataagatgtctcagcaacgttaagaggattgaactttggagaaactcttcttttcctaatttattgagtgtattataatcaatcgtgttgagtccggcagtagaacgtcactgtgtcagtgaatcagcatcagttttaacttactgttcttttctaatatgaaattttaatcctatttgtgtagagaatgtattttctgctgtctcaataactttgaattccttaatacttgaccctgatttgttctctctctttttctatatcccacaggtggcattaagcggcacaatttcagaaggggtgcg

SEQ ID NO: 89304 - DNA, 452 bp, Citrus clementina
  Intron number 1 from transcript clementine0.9_008945m (loc us clementine0.9_008945m.g) derived from phytozome v7.0 (c hr-ID scaffold_39; pos 1472273 to 1472724)
cttctcttttagatcgaaagaaccagacccagaaggtaaattcttctattctttaatgggcagttctttttttctttaatttctttttcgtttttgtttttgggttcattttcatattgcagatccgctgctgttgtttctgttgtttacattgtcatacattttgttctattttacatgcccagttcgtggatctgattataaaatattagttcttggtctaattcttattggaaaaataactctttttctcggttgattaaattattgataaaatttcactgaaccgtcggtacaattgattgctgattgaaagcagttgatctcttatgatatcaattggtgtggccacgtgtcatgtctttgcgtattgtacaagtttcataaaatatacatacatatataactttgtttgagttgtaattttttttcttttttgtagcgttgtaaaa

SEQ ID NO: 89305 - DNA, 614 bp, Citrus clementina
  Intron number 1 from transcript clementine0.9_006707m (loc us clementine0.9_006707m.g) derived from phytozome v7.0 (c hr-ID scaffold_60; pos 686172 to 686785)
cgggttttgccattgctgaaggccctctttgggtaactcttctttttttcactcaatcgcatttttcttttttcttttttggttgtctcttgtgtgcttgtttcttgatttggaccttccatcttagcttttctcaaataggtaccacattttcctctagattttactgattgaggctatttttcggctcttaccttgttagccgttgtcctaacttgcgattgggttttagattctcttgtggcttatgatgtattgttggccgcaatttacaaagaaaattagttgaaaaaaaaaggtcaaaagaattacatattagtttttgaacatgttactttttgaatataaaatgaggattctacgtgttacaaaatgtacatttacattttgaaaattgttgcatattatataaaaaatggtttcaatatcagtaaccctaactttccatagcatgttcttttgaaatgtgactggttaataataaaaagatagtgatataatgagctgtttgatattaccattattatgatcctattttttctattcatattaatactaaaaaaaatggtttcttgacagggaaggcgcagggctgtggctccatctcttcacaa

SEQ ID NO: 89306 - DNA, 319 bp, Citrus clementina
  Intron number 1 from transcript clementine0.9_014436m (loc us clementine0.9_014436m.g) derived from phytozome v7.0 (c hr-ID scaffold_39; pos 1836584 to 1836902 reverse strand)
cctctttcaacctgtcgtttgatttgctcatttgggtatgtatgcttttccctttctttctttctgtcttccattttttttttcttattaaaggtttattttttcacccttttacccatatgggtttttgtttgttttttacgatcttcaaatctgctgaattttaagtttatgaatcattgctttgattatgatattgtgttacgcttggattggaaatttcaattgattattattatgagatacattttttttaaaaaaattgtttcgtgattcttaaaagagggaatttcaagacattttgtaaattatttgcagg

SEQ ID NO: 89307 - DNA, 668 bp, Citrus clementina
  Intron number 1 from transcript clementine0.9_028924m (loc us clementine0.9_028924m.g) derived from phytozome v7.0 (c hr-ID scaffold_16; pos 1568022 to 1568689 reverse strand)
cagattccagaaggattccagatttccagtgaacggtaaaaaagaaataaaaaaataaacgtcgtttatgaagtgtgtacgtgacatatgatcaatgggggaatatcgcccacttgtaatcactttttggaagtgaatggactgaatacgtttttgtttgctaattacagagagcaattaattgaataattgacgttagtaatttctttccagaccaaatattcgatcgtttaatttgaatgttgaacatccctgcctttatggaattccaattgttgattgatcagaagattaaagaaaaagagtacaaaaaaatagatgcatggcaatgcacaaataattaattcaattatcagtgtcactttccttctttactttaattaaagaataattaataacacgaattgctcaatggctcgttttgctttccatggttgcctctgctacaagccgactgcaatttcacaaaccggcgtatcggcccggtaaagcgggcaactcgaatgagagcagagccacttatcaatacaaccgagatgaaacaagtgtaagcattcagaaactcacgtaaacatattgatcataagattttgatcccaagccaattatattaatgctcttttgagaatttgccctggggaataagctcattgattgaatctctaaag

SEQ ID NO: 89308 - DNA, 861 bp, Citrus clementina
  Intron number 2 from transcript clementine0.9_031235m (loc us clementine0.9_031235m.g) derived from phytozome v7.0 (c hr-ID scaffold_12; pos 1356731 to 1357591)
taggtttcatcctcctagcagcgcgatcactcaaggtatggcaaatcatgggttaatgtttcttcaatccctataatttgaactaattactcaatttttatattttaaaaagttacttgcatatgttaaggagagaatatccaacattgattgagaagagtttttgagttaagaatataagggtacagttgatattgtttttcaaatgaagtacttgaatttatttttatagaataagaattagtagtttttattctaagtaaaaattagaatctgaacagaaaaatagagagaagtatgtgtaattggtgtgtggagtagtaactatttttaacgacccaaattttttttactttaatttgagtgtgtaaataaatttgagtaatttatgattttatccctctctcttagccatggggacgagttaagatgtgatacgttggaaacgtgaaatcattgtttccaacttttctttgataagttcagaaagcaattatgttcatcttgcttccaatggaagcaaaaatgcaacagcaattgctgcaactaaacaattattttttcgtaaattaaaaaaatgaagaataaaaaccaatactaaacgcgccgtaaacttgagaactaacttttgaatttgagttagaatattgtgcttttattaaatcctacagtttagaattaacggcaaacacagttttggttaattttgaaaatccaaaactaattactgcgcgatacctaaaggagaattcactcagcaaattatacatgaaagccaactgcctcatgcatgcataatcggggtatgtagtttggctgtatacagggaatcagttcagaattcagtgactctcccctgag

SEQ ID NO: 89309 - DNA, 447 bp, Citrus clementina
  Intron number 1 from transcript clementine0.9_003597m (loc us clementine0.9_003597m.g) derived from phytozome v7.0 (c hr-ID scaffold_87; pos 914540 to 914986)
agcgaggtggggttaaagagtcctttttatttctggttcgttcaaccaaaaaggatgaaaaatttacttgggacgaccatattttaatctttatcccggtatcccctgaccataacaaatcagtgcccgttcccacaaggatttttttttttcatctttaattattgttttaaagacaattacagtaataaaatggtttgggggattttctttttaattttttaataaaatttaccaaactccggatgcgtcgggataaacaaattgaaatatgaatatcttacacgtggcaataagtgggctccgaattttcaaacttcaaatggcgctccaacggtcaaaaatttctaggtttcctttctacttcttcacatatataagaggcccgacccctggtcttcattttgttcagtagcagtcgaagaagaagatttcgatatcaaatca

SEQ ID NO: 89310 - DNA, 195 bp, Citrus clementina; identical to SEQ ID NO: 80787
  Intron number 1 from transcript clementine0.9_018924m (loc us clementine0.9_018924m.g) derived from phytozome v7.0 (c hr-ID scaffold_12; pos 4742288 to 4742482)

SEQ ID NO: 89311 - DNA, 780 bp, Citrus clementina
  Intron number 1 from transcript clementine0.9_012542m (loc us clementine0.9_012542m.g) derived from phytozome v7.0 (c hr-ID scaffold_103; pos 146865 to 147644 reverse strand)
aagcgccctcaagaagcccaaaactgactctggtcagttttaatatctggatctttgtttaaatcttgttttttatctggggttttttgaaaatttgcatttatcttataatgtctgttgttgtgagttttgtgactcttggaagttgaaaaagatgaaaaagaatgacaaaaaagctttatttaggaaacaggacactctttgtttacttatatgcttgtgcttaattttgaaagcatatgtaagagacccactttacttttatttgacggctaatgtttagcaatctgctacgtacttatacttgacagctatacttgacagttagtgatttcattttacatcacagtagatcaaaagccacatctcctaaaaaaaacttaattgattatttattgtattatactattcagtttggttcaggaattttaggttttcatgatattgaatttggcttttctcttgttaaaatgtaccttaaactcaattcactgttagaatgacagatggaaatccattaggttttgttgcttggaaaacacatgtttacaagacccagagaacagagatctttctataactgagtctgataactggacaacctagccaagtgtttctcatattaaagagaaactgtttctcatattaatgacagatggaaatccattaggttttggatttcttttctttatatgtttcttatttatacattggtttgcttgtttttaacttggatttgtgttgcgccaagctaaatattcaatgcatttctcagaaact

SEQ ID NO: 89312 - DNA, 537 bp, Citrus clementina; identical to SEQ ID NO: 82691
  Intron number 1 from transcript clementine0.9_026858m (loc us clementine0.9_026858m.g) derived from phytozome v7.0 (c hr-ID scaffold_12; pos 1053828 to 1054364 reverse strand)

SEQ ID NO: 89313 - DNA, 832 bp, Citrus clementina
  Intron number 3 from transcript clementine0.9_023277m (loc us clementine0.9_023277m.g) derived from phytozome v7.0 (c hr-ID scaffold_21; pos 3371927 to 3372758 reverse strand)
aggttattttcttgcatctccttgtgttgtattgcgtatctctcttccaatttgattgacataaagatgccataagttttgaaatttgtattgataatgataggtttaattctggggctaaacaggttttttgaacttttaatgtgaaaattcatgtgaagtaaactaataaagataaaatgtgaatgtaccttgattagggatctttctagtctataatgtgagaagaatggttacgaagttcaagttttgtacataggttaatagaaattatataattttccttagaatatcccatttgtttccaaggggttgcttaaatttttccttcagaaattgtctcagcttgctgctattaacttaggaatgcacaacctgccgtcactcatttcactcatgctacattgtacttgtcatattctttaaaaaataacaaatttatggggaataaggtacgatagaatagattacgctaattgtacataggataggaaacaatctatttgttacttgttttcaccggcaatgactaggccccttccctccaaaaaccgaacaaagagaatgaaagaggctgaggttttgtcctctatcacacctgggaattttttcacaaagaagtacatattttgctgtatgatgcaaggctcaggagttctaataattatttagttcttccgagcaaagaaaatgagtttattgtgaccttgtgatgtttaaatgttgcatattcttattttgaatattgatttattttataattttaactacttatggtactggatctcttattgcagatttttgaaaagaacccagcaaagataaagaatta

SEQ ID NO: 89314 - DNA, 374 bp, Citrus clementina
  Intron number 1 from transcript clementine0.9_029807m (loc us clementine0.9_029807m.g) derived from phytozome v7.0 (c hr-ID scaffold_25; pos 269248 to 269621)
attgtcaaagcgaggtactttagcctgcaaatgcactgttccttctgccgagatagtaatgaaaaatacagagaaaatgttatataaaggagaattcctttgggtggcaagggtggttagttgttaaagattgcaatttttaattcagttttcttttgtttcaatttttaattcattttttttccagccgagaaaatctgagtggaagagcaaagaaagtaacagcttgaatctttcgacaattcctttactacttcattagcttaaaggagatttaatttcggtttatctttttaagctttatttttgttttcaattgcggctttattaaaagttcaaattattcaaccaggagggtattcaagcgtcagtag

SEQ ID NO: 89315 - DNA, 686 bp, Citrus clementina
  Intron number 3 from transcript clementine0.9_023582m (loc us clementine0.9_021330m.g) derived from phytozome v7.0 (c hr-ID scaffold_39; pos 1677397 to 1678082)
tggtacatagtcatttttgttttgactttgcgtgattcatggttaccatgttcagctttagattacttgttttatcttggagaagagattgctcaacttgattttaactttaatcaattggcgaatggttgtctgctgctatatgcattgaaagtgtctttgagaacatgtttgttgaaagggtttttgagagaatgtgcttttgtttttttttcctctcccatctgaaagttgctttattaaaggcatctatcaactgcttccctttgtgtatttaatccaaacactagaaagcggatataaaacccattttaagcatataagaacatttaccaattccaaagagtttcaaatgcaccactaatgttgcttggtgccagttttgctgatagatgagaatgggcagaaaaatgtttgtcggtcaattacttgtgggaactttgacggaactaatgataagtgtgaattgtgagtgcgaatagtctgttcatgacagcttgttgaaggttatttttttgttttttgaattttaccggaatagagattgattagttagtttgatgccttgcagtttgaacaatttgcttgccagatgaagtggagatgtttgtatatattctgtagacaatttctatgactgataactgatgttacaggtttctggggagcagagagaaagattggcc

SEQ ID NO: 89316 - DNA, 806 bp, Citrus clementina
  Intron number 1 from transcript clementine0.9_006363m (loc us clementine0.9_006189m.g) derived from phytozome v7.0 (c hr-ID scaffold_123; pos 338685 to 339490)
gtcctcctctgcttcttcgtcttcttcttcttcaggtaacttttctacttcctgtgtttctttcttttgtttttatctcttttcatgtttcttttgctacccggttggtggtgtgaggaattatttatcgctttcacattctatgaaatttctgtagatgatgggtagctgctatgaattttcattttaagttgatacacactgtatgttcatgtaccaataaagggaaatggggaatctgaactatgtgttattgggtttgcattgtatttgtttcactatgtgtagtttgctgcatatgtagatgcgtacgataaggtatataattgcaaacttcaagagagtgtggatttttaatccacagtactgtagtaccaaacatacccttagttacagtctcagttatattttatcttattgttctatttatgatgatgagtctattttaagcatgatgatgggtcgatatatttagaaatgggattttcacaggcgatcttagtgtcggatgttttgcttgctaattaattgctatagttgtcttgagtgtgtgcatgtgttatgtactttgattgtttggggatatagagatttcctctatttttgatgaagcaaatgataggatttgtttgaccattttaatttgtacatcgataaatgtcttgatcttctgtgagatacttagagatttgtagtgattctactttttagataacatcttgcatgtttatgtgcataacatagcagttttgatgcataatgagcaatcagcccctgcagttgcttctgttccaacttcttctgta

SEQ ID NO: 89317 - DNA, 695 bp, Citrus clementina
  Intron number 2 from transcript clementine0.9_032166m (loc us clementine0.9_032166m.g) derived from phytozome v7.0 (c hr-ID scaffold_8; pos 2677314 to 2678008)
acagtatggtctcataacatttcattaccatttggtatctatcagcattgatgattttggtttatgaattaacatgcttattgcttttatttttatctttaatttgatacttcttgtggttggttaatggttaatcataaactttggtgagttagtgacttcagattgaaactgagccagttatagtttaactcgctttgatttggctcctttattttttttatggatatgtcatagtgtgaagcggtagttgaataaaattgagaatacagaaagtattgggggaagcaatcttgtcttacatgacacattaataaactccataaaagaatgagtgatggggaagaaggatggttgctaattcttaatttgatttcagttatgaagtcaacttacttgaacttgattgcattccttgttctaatagtacccaactttatactctctcgtcatattcactagcagtgtgctaattgaaaaacagagccgtaatagctgaaaatgggtgatcattactgaaaatctgataaattttcatgttcatgaaagtactggttatttttagagggttttagtgtttcaatattgagtgcattcctgggttctgatatcttgttggtagcttgctttgcattgccgtgtttgagcatctttttgttgcttttcaggcattaaggtcccccagtctgtagaca

SEQ ID NO: 89318 - DNA, 564 bp, Citrus clementina; identical to SEQ ID NO: 83574
  Intron number 1 from transcript clementine0.9_007631m (loc us clementine0.9_007631m.g) derived from phytozome v7.0 (c hr-ID scaffold_12; pos 1549586 to 1550149 reverse strand)

SEQ ID NO: 89319 - DNA, 820 bp, Citrus clementina
  Intron number 1 from transcript clementine0.9_028670m (loc us clementine0.9_028670m.g) derived from phytozome v7.0 (c hr-ID scaffold_124; pos 164680 to 165499)
cagcaatcatcctcggtgagcttcgttaaccattgtctctccctctccaaagctcaatcctgattgcttaattaatatgtttagccaatgaattttctaacagttttggttcgtttccaaaatcaattagacaattgcttacagcacaagttttctttccggttcagtagcctgcatcgtttttctcttgcttctacgtttggaacttgtctttaagttgaaataaatagtactaaaatattccaatacccaaaagaactttgtcaaaaatttaattataaaaaaaaagtcacattttatattacaaatcaaggtcgaattgctgcttgtcgtgtgagcaagaccaagaactttgttcattagtttgtagattatccaatagtcaggatttcttggagactgagtcggtttttttttttttttttttataatttcctcaacaagtacaatcttaaaggtttcagacaactacatttccattttcaagttgctttcattgagcgcaattcataaaaaaatcaccttctttgagtttgttggacgattgataagtgattagcttctaatataaaattatgattgtaaaaattgattctgaggtacaaatagaaatagggttctttgggtagaaaatgaaaattctgtggggcagtaacaatatacatagcactactctgtcttttcatgttgtagtgagtcctctgattccttcaattgcaagttatgtagccctgtcattaattttttattttcttatttcttcttactctctgattatccaatagcatccgggctatctgggagtaaagaaacagctcaa

SEQ ID NO: 89320 - DNA, 601 bp, Citrus clementina
  Intron number 2 from transcript clementine0.9_026051m (loc us clementine0.9_026051m.g) derived from phytozome v7.0 (c hr-ID scaffold_16; pos 634131 to 634731 reverse strand)
atacttttcttcttaacagtgtgcatcatcacaaggcatgactctctcttatccatcgattttattatataatttgttttcttctttgcatgataaaggctttccatattttcaacttaaatttgatttgtacgatctctcataccatacataaacagattcttttcaccaagagttgcatttaatattgatcaactcatactactcaacattgactagttgaatacctacttacaaaattctgtttcgccatgctagaggaatattgtatggtttatagctcaatcgcattacaatagcaagtattgctgatgggtaaaataataatggttaaggaattataatggtatatgcctgtgaaatttatttttcttaaaagtcttgtatgaatgaaaactaacccactaacaatcttggtttgagcagaatttgaatgctacctagtggattttgcttgtctagtttgtcttgttgtctacaagggtagttaaatgggggtaatggaagatcttatactgcaatgaactattccatcgtgtgttatactgatactgtgacgaatgcaggacttattgttctcgtacaatattgctgtagatag

SEQ ID NO: 89321 - DNA, 712 bp, Citrus clementina
  Intron number 1 from transcript clementine0.9_026051m (loc us clementine0.9_026051m.g) derived from phytozome v7.0 (c hr-ID scaffold_16; pos 634933 to 635644 reverse strand)
gtcttgcttgtttggatttgctcacactcccacaggtgcgcttcttctctcaatttttagatttttcttccaataactcaaatgggttccttaaattaaacttatggcagttgaaaattttcattttcatcctctaattaacatttacttggcttctcttcaaatatttttcttcattgtgaaagaagaacttcgaaaaagaaatctgggtattcatttaattccatgttttattagtttaaagcaaatatgtttcttgttgacgtgagcattatggttatttagctgtagtcgtggaatcgaattctatcactgaaagttcattaagtaacacttatcattggacttcaagtgtttgatggaatgcctgatagaataaagaatgaccactaattatggtgtattagttccaattaaagaaagagttggcaaacttcagtatcagtcttcaaattttgtagtttgaactgaaagaaggagcttttgactatgatagccctaattcattgtttttatctcaataaacttctcactcaggtcttcattccctcttagaaaatacatttcatttaaactctttagaaacgtttgttgtatgtatcaactagctcaaatgtgcaattttatgatctttttgttcatttcgcaaagcttgatggatcgtgtttgtgtgtcagggccatagggaaaatatacaagtatagtgatatat

SEQ ID NO: 89322 - DNA, 913 bp, Citrus clementina
  Intron number 1 from transcript clementine0.9_011528m (loc us clementine0.9_011528m.g) derived from phytozome v7.0 (c hr-ID scaffold_28; pos 2551407 to 2552319)
ttgctaagccgcttgatatagtctccgtaagtttgctgtcctgtttttgtcataaataatgcatttatttaatggtaattggtaatttatagggttaaacttggattgattgtgtaatttcctaggtcactagcaagtgagttcctggactagttttgtaaatcaggttcgcctcacttaatagatgcattttgggttttaaacccaagaacaaatttgtgatgcgcattctgcctagagcagatgatatctaagccacttgatgtagtgtctgtaagcttgttgtcctgttaaagtgttaaaaatttggattgattgaaatgcttttctgtgtgatttttcacttcacttttgatgtggaatttggatggaaaatgtttatatgttatttagggtaagcatttcatcatttgaagctataataacaatcaagctgaccccatttgacaagaccaagtggctttaagcctctttgtttatattcgagctaccgcttctgttaactgtatggttgttgtagatgaaatctaaaaaagcacatccagcacacaattaatggtgtgtttcggattgaggttctgtgccttttgattgatcacagttactgtagagtggaatcactagctatctggcacaagaacattagctgagagataaatgtggacatggtgttgttagtttgttgttttcctttcaaattttagcagaaagttgtgacaaacatgctgttagtctgttagttacatgtagagacacatagatttgtggagtctaggatcagtgtgtgaaccttaagaatgtgattcaatttaatattttgcttgacaccagttgcataaaatatgtaaatgtgcgatgccattttccacaaaaaatgtagaaaattttctcattgattgtgatcttctacaga

SEQ ID NO: 89323 - DNA, 646 bp, Citrus clementina
  Intron number 1 from transcript clementine0.9_008196m (loc us clementine0.9_006498m.g) derived from phytozome v7.0 (c hr-ID scaffold_39; pos 1100744 to 1101389)
agtgattctaaggtgagttctttgttcgactctagtgatttatttttggcttttttgaattcagttgatgggttttgggatttttgtaaattggatgtgtgtaatactgtaatgtgtactaggttgcttgttgatgagtttgttaaagggtgcacttttgggattgaatatttgattaactcattgcttttacgggacttagtggatgaagtatttggcttttatttgcttgtattgtgcaaattagttcttctgtgaatgggaatttttaaacttacccctacaatcagacaattgttggtctgagctgtgagtaactttttttctttttatattcatgatttacttttctggaagctttatatatgaggaatactagtaattgcatgcatcagggatattagttggtttatgcgtggaaaatcattgacattattgtatcaggaagaatagttcatttacacgtggaagatctttgacattattaattgtctactgcttcttattggttttgtcctggtcatcatagataaattgtgatcaattattattattattattattattttgtgtggttattcaccatcttcatttttcttttgcaatggcagttatttgtttttgggtcatttaccgaagaggaaac

SEQ ID NO: 89324 - DNA, 562 bp, Citrus clementina
  Intron number 1 from transcript clementine0.9_035439m (loc us clementine0.9_035439m.g) derived from phytozome v7.0 (c hr-ID scaffold_12; pos 4193621 to 4194182 reverse strand)
attttggggtttgtttttttattcctttaatttttttattattaatataaaacgatgagttttgtaagttagttttaaattagaatttgattaaattaaaaagtttttattatttaaatgggtttaatttcaaagcccaaaatactttgtttttgttgagaaaagttattggacttaataattaaaaggggttttatgggctaaatttaaaaaaattttaaggctcagggggggcttaagcccctcctgggcctgaactgggtccgcccatgcacgggttccatacaaaatataacaagatcagtctaaaagtcgcaattcctcgacgaataaaaattccacatgcacctctataattataaacatgaatcttttaattagaaatccttaagcttaagcctcctggccgaccttcaactctcttttgtgacacaaaaatttattataataaaaataacatggcttcctcagaagcagaagcacaagtattcctcttctccatttgtattgtactgtcatttattcacggaggcggcagtactgctatcacttgccccataaa

SEQ ID NO: 89325 - DNA, 656 bp, Citrus clementina; identical to SEQ ID NO: 77806
  Intron number 1 from transcript clementine0.9_004057m (loc us clementine0.9_004057m.g) derived from phytozome v7.0 (c hr-ID scaffold_16; pos 987582 to 988237)

SEQ ID NO: 89326 - DNA, 664 bp, Citrus clementina
  Intron number 2 from transcript clementine0.9_014022m (loc us clementine0.9_012325m.g) derived from phytozome v7.0 (c hr-ID scaffold_8; pos 2361945 to 2362608)
tcctatcaacccttctgatatcaatcgcattgaaggtctcttttgctcccttttttttccttcacagaagcatgaaaattgctctgggtcaaaattgctcttcacaactaactgtttgtacatttcgatgattattaactcagccgagtaaaatttctactttacgccaagcacagaaattgcaaaattttatttattgttttttatttatggtttctgcatgattggtttagttcattgcataggatagaattgaaaaattgttaatttggtgttgttggcaggggtgtacccggtgaggccaaaagtgccagcagttggagggtatgagggtgttggagaggtgtattctgtcggctctgcagttacgagactggcccccggtgattgggtcatcccctctccaccctcatcaggtagatttgctttttccaactttgcaagctatttcatacttgctgcttgtggtcatgatgtgttactctttttaaaagaagaaaatgtgtgctggtcttgcagttgcacgtgggacaattactgcaccttagagacttcacacattgtgaaaaataggaatagaaaagacattttggataatacttagaacacctttggcacaaaatattaacatatttaacaagagaacataatagggcactgtgtg

SEQ ID NO: 89327 - DNA, 1014 bp, Citrus clementina
  Intron number 1 from transcript clementine0.9_025530m (loc us clementine0.9_025530m.g) derived from phytozome v7.0 (c hr-ID scaffold_115; pos 450184 to 451197)
gctttggagacttgtagttgttgcttgctgcatccgtaagcatttctttttattttatttttatttttttatgttatggatgatgaaattttgagattgacagtgttagcatttcttccgtaagtattttttttaattttataattataactttttttcttgcacgatcggacaaagatgataagaaaaagataaataattgaaaattttgtattaaaaaaattggaaacatgggtgagttgttgttggtggtgttggatttgattttgtttgcgtgtgtgaatgtgtaccgtagctcacatggtacggcctcgtgttcatttaattcgttgcttcagtgcttcttcttcttcttcagagacactgaacgtcagagcctcagcctctggttttcattttctcactcgtcttcatagatactaacaaggcatttattactgctcactgctctgtttttgagtgtcgactctgtgaaaattcatttgtttggttattattgattgttgagttccgactttggatctatgcacttgggttttcaaaagggtaaccagatttgcttttaagttatttcattttttttttaactcagttcggatcccgctccgcattgctttagatcaaaatttgatttttattttctttttgcccttcttttgacttggtactatgttgggaaatattaattgttcagaaaatgtttgctggatgtttattttctcgttttcttttggtctgaatttgtttgctggatatgtttgctggatattcattttctcgttttcttttggtgcaagttgctgtgatctgtctcacttacagttgcagaaattagtttcttggttgatgctggcctttgtgctttgctgtgaggctcccattctttttcagaaggttaaaatgttactctttttttccctcctggttttgaaattctctcttattgttagcagttgaaattcttagcataaaagtctagaatattgatctaaaattttccaatgtagaattcaa

SEQ ID NO: 89328 - DNA, 971 bp, Citrus clementina; identical to SEQ ID NO: 78192
  Intron number 1 from transcript clementine0.9_010771m (loc us clementine0.9_010771m.g) derived from phytozome v7.0 (c hr-ID scaffold_16; pos 1881837 to 1882807 reverse strand)

SEQ ID NO: 89329 - DNA, 993 bp, Citrus clementina
  Intron number 1 from transcript clementine0.9_022512m (loc us clementine0.9_022512m.g) derived from phytozome v7.0 (c hr-ID scaffold_16; pos 3442443 to 3443435 reverse strand)
taggtaatctcggttaaggtaagtttatgtactaccttaatttatctttgttgactttaataatgctgcttcattcgtcattttgctttgaatttcttcgtgggttttcattttatcagttcgttatttagaacgattgggactattaaaaacttctgaaatgaatgatgtagaagtttatgctgttttaacattgagaattaaaaatgtaaagtcaactgagccaaatggtatacttcattttatatttgacaagtgatattaagttttcttcgtgatcacatactgaatatgattggttgaatccataacttcataggtttactttgtaggttatgctatagctccgagaagtaaagaccacgtgtgaacctaaaacaagtgaaataggctgctctcttgtgatcttttgagactcactgtcatttcattcgggaaatcgatagaactagtatgcgacatgaagtccaaagaaaagagtttagttgttctgatggtgtaatgggattttttgggttggatttcgtgggtacttgcagaagggttttctccattggttcacggtgagctatttggtgagatttgtagttcatgagattggtgagaactgaaagtgcttggattgttagtaatggcatagagaattgttgtgaatgatgaaaagtaatctatttgttttttatggactgttttcagaaattgacagtgtaaattctgagattctgtaacggagaccaagagcaaactttttagtttcttttggcattaaagcttggagatgtttgaaacaacttagagtttggatggccatttgctgttattcagggattaaaagatatgagcatctgtaagtggtattagataagtatattggtattgtgggttgattatgcttctagtgattccttaaaaataagtttttcatgccagttcaagttggtaaattgttaaatgtagatactgatattcagaaataaagattaactgagagtt

SEQ ID NO: 89330 - DNA, 634 bp, Citrus clementina
  Intron number 1 from transcript clementine0.9_001822m (loc us clementine0.9_001822m.g) derived from phytozome v7.0 (c hr-ID scaffold_21; pos 1890857 to 1891490)
ggttccattgaaggtgactttaatatctcttgcttgaatttacattttttgtttttcttgtggatgcttggattaaagttttgcagaatttttgatatgatggcactctcttgatggtttttagcatttgtaatgaataattatgttgatgcaaagattattaacttaatttgatttctaatcagtttcttcttgagagacaatttcttatgtccattttattttgtgaggaatctgttatctgtgaacccctttagattttttaactgtacgtgtgcaattctatcagattttgacttagctcatcacttgcataattttgcttttctacatcatatttactgaaactgaagtttccgtccatttgaattcctttatgagcttctagtgtgatcgtgtgtattcacatagagcagttattcttatgttcaagttcaatttctttgctttctgctatgcttgctgattattgattaacatattcttcatttcttcttttttcctggaattaataaatatttgtattcatggttctgaacaagggattggggtttgttgcaaactaattatttcatggaaacttttgattctttgggcagcttttcaactaattgagaaagaggtggtggccata

SEQ ID NO: 89331 - DNA, 516 bp, Citrus clementina; identical to SEQ ID NO: 88373
  Intron number 2 from transcript clementine0.9_005955m (loc us clementine0.9_005955m.g) derived from phytozome v7.0 (c hr-ID scaffold_39; pos 945609 to 946124)

SEQ ID NO: 89332 - DNA, 412 bp, Citrus clementina
  Intron number 3 from transcript clementine0.9_017404m (loc us clementine0.9_017404m.g) derived from phytozome v7.0 (c hr-ID scaffold_21; pos 1470310 to 1470721)
ggtggtattgttgcaatatctttgggtgagtttctgtttttgagaacacaaatgttgcttttgagtgatgagaacatattttgaatagtttggactttggactaacgtttattgtatgtttttcggccattacatctttgggtaaatttcattgatattaactattcaaaatatgaatctgaaaattttcttaattttgatacattttaggggaattttcttctgaatctgaaaattcatgtaggttacttaatctagctctagcaaacttaatctagctccagaagatgcttaaaccattgaagtattcatctattctatgagaaaaccatgcccctgcatgtttatatattttctaaattaccttgtatgacatatatgttttgatttactcatgtaggacgcatctcta

SEQ ID NO: 89333 - DNA, 548 bp, Citrus clementina
  Intron number 6 from transcript clementine0.9_008841m (loc us clementine0.9_008841m.g) derived from phytozome v7.0 (c hr-ID scaffold_8; pos 1212243 to 1212790)
agttggttagtgagcttgaccttgatatcttgttgcatccggttgcattgtgtgtgttattattggagttgttatttgtgcacgagcaaattgcacttttccttgaatggtgaattttttttttttattggagtaatgatgttttatggaaatgaattaatcaaaattgttttcattgaattttctgcttcaatctttcaatttgaagcataggaggaatgacttgggagaaatattttgttgtgtatgactggtttatgaagcttttctgtattgatacttcgtataatgtagtgtgagaaatgtaatggaacattctagaatgtgatggaagcattccggattattgttatagcatttttcttctctctgtttgaattcttcttgaagtcagataaactatccctttttcactgtcattgcgtttgacatgcattgcgtgaaatttttgaaataatcttgtagccgggttctgccaatttatttgtttgttttacatgtggtaaattgtaggagcaaaacactgtcccatctttgagaaaagctct

SEQ ID NO: 89334 - DNA, 797 bp, Citrus clementina
  Intron number 1 from transcript clementine0.9_029437m (loc us clementine0.9_029437m.g) derived from phytozome v7.0 (c hr-ID scaffold_8; pos 4552742 to 4553538)
gcaaagttcttactgatttaataggtatgtgatcaaaagctcgcctatttatacatgatgctggtattttccaattgattgtatatacattatccttattacactgtgacattcattatttattcatatgacatcagtttgtaagagtagaattatttaatcaaatttcaaggtaacttattgaattttttttacatgggtgagtatagaagataaggaaagttaattaatacctaaaatttgaattagaatcctcatataatttgaggttcatgaacttttaaagattctgaacaacatgtcttttaattttgttctaaaaagataataaaatcacgagggatcataatccaaaaaatttagagctctagttttctctgaaatttttcataaaactctctctaaagaaactattttcatcaaatcaagaagacatttgagtaaccgacataaaagtatatttcctagaaactcaaaagcaagcagggatagggacagaaccatgtcgaggcctgggaggcaaaagtaacactaagatatctttggggttttagtgaaatttaacccgtttaatgtgaatgttatgtttgccccctcaaatttctaattttatgttttggccttcataattttattgttttcatcacagccctcgccgaaccaaattaaatcctggcaccagcactggtgcataagaacgcctcaaatagtattttatcatagtttttaatctctctgtcttctctacagctgaacgcttagaattaaagagacagtgccggcgtatctagacccaa

SEQ ID NO: 89335 - DNA, 987 bp, Citrus clementina
  Intron number 2 from transcript clementine0.9_021123m (loc us clementine0.9_021123m.g) derived from phytozome v7.0 (c hr-ID scaffold_21; pos 2352180 to 2353166)
ggtggcaagaagaaagcttggaggaagaagcgcaagtaaaagtttctctcatctttagttgattttcgttgtagcattctgtttagttgttttgatgagcgggactcattgttcgcgtttgggtttgttaatttttggtatgactatgagctatgtagcagataagatcatgtaaagatgcaccaactttgattagtgttgctcaaaaagttgtcctatgtatttaagcaatccaaaaactaatgttactgaaataatttttccttatagattggtagttatatgttcttggaggagagctcttttaggccatcaagttgccctatctcgcgcaattttaagggtcatacagtctttagctaatcttgcaactatctgttttttggtattccctcactgtattgttactgataagagcccaataatatgattgttgtctagttctgaatgtgctgtatgactatgttttgtcatattggaaggttttcgttctatttgtttataggttgattttatagtaatcatgaatacttaggctagttattctggccctgggacgagctgtctttgaacttgggctgagaagaaaaagaaagcctaatagagattctcctcttcggatggagtaagaggctcctactacaatattacatattgcctactttacgggtactttacgggttacaggtgaagtgagagttgttggtactgatccatgtaagacatttctcaattagaataattctatgtatgaatattcaaaacatacccttctgtattactgacaccaaaaagggattgtatgcctgatattttggaatgtatggtgtatacaagtggcctttccagggaattgactgatctttccttgtggcctttgttcattgttgatagatacaatttgcactgttggtgcttgctttataatctcatttttttattgtctattaaggtacgaacttggtcgtcagcctgcaaataccaagc

SEQ ID NO: 89336 - DNA, 896 bp, Citrus clementina
  Intron number 3 from transcript clementine0.9_004399m (loc us clementine0.9_004399m.g) derived from phytozome v7.0 (c hr-ID scaffold_71; pos 392547 to 393442 reverse strand)
cagagactcaggtacgagtggagtggctccactgctattattgcacagtattagattgtttggcctctaatttaatttactcgtggaatgaagatgtcgtgtagaatgcaacagttattgtagttgtggttttatatgtatgcatgcataggtttttatgacatcagtcctaaccaagttaatagtcatctatgtcataattgaaacatgttaccaaatttgcattccatttaaaagtttggtatattttttctatttactctgttgcataattgttatggtactggtgacttttgatgttcctagtttgattttccagattaccagtttaacgactctggtattgatgctagaatttctttcctagtattgttggaaaatccttgggttttagtatcagtgagaagaaattatatgctctgttgaagtgcatgtcaaaactctaattttgccaaagattcatcagcaaaatgagcctagagagttgagcacacgtatgcttttcacaatctaatggttcctattcctagagtttgtgagtcaatacaagtgcacttataatctgtttggaaggatcaatagctaaaatcatgcctgtaaaactccactaagaatatatggtagatggcaagcaacattgaagcgtgtggttgaaacttcatagccaggagggtaatagcacatgatgtgatcttatgattatgtttttcctgttgatggttttatccttggaagatgcacaatggagtggagttaaacttgtgagaatttgcttggttctggcttcattttattctttgacgtttttctttgtatttcaaactgaaacacttttaactttgtagattttattgaaaaattgctaattttatggttgcctttacagtgcttgcccc

SEQ ID NO: 89337 - DNA, 823 bp, Citrus clementina
  Intron number 1 from transcript clementine0.9_000518m (loc us clementine0.9_000518m.g) derived from phytozome v7.0 (c hr-ID scaffold_8; pos 912799 to 913621)
ctgatcccataaaatctctccccgattttatccttgtaattttcattttgcttttttaagttcatcatttacatgacaataagcatttggactcgattgtgtttgtagttgtttggttctttacttcgtagtgaagttaaaagtggtgtcatttttttcaccttttagggtttggctgacaagtgcttgaattgggtgattatgcttaacctagccttcattttcgtcttccatcatttactagttagtttctcttttcaatcattttaatgtttgcagtgtcttaaaatggttaatgaattcagcttgtgtggcttttaatccacagctgctacataatgcaatcactagctgtgaactgtgaagtataagtgggtgggtagtttagtaaatgttagatgcaaagtaaagttggttattaatcactttcaaaatttagcagaaacaaaagatatgtaataatatgggattgcaactattgaaactgaactttgacttacataaaaacgaatcatgaagtgataaatgggtattattaatcataatgcttttcaacctgaatgaaatttgttttgctgattaggtgggggatataaatcaagaatatttggattttttttttcagttgactctgttgttaaataagctattagtatagtgccaactttcacgaattcctctgagtgcttcattttttttaagtggcagagtagaggaggttataatttcttgtaccctatgagttggattctttctactctactaacttatgtctttacatatcttagccacctgcgtttcctagggagacggctgaatcaat

SEQ ID NO: 89338 - DNA, 630 bp, Citrus clementina
  Intron number 2 from transcript clementine0.9_015928m (loc us clementine0.9_015928m.g) derived from phytozome v7.0 (c hr-ID scaffold_87; pos 621103 to 621732 reverse strand)
ctcacagagctcctgactttcctgccataaggttcttttttttttccttctctatacaacttttggatttttctgtaataactagtttgtttaatttttttaaattgagtcaattgctttgctagcgaatttgcaaagtcaactacggcttaaagtcttccatgtattttaaattgttggatgcactagcatgataaaagatttatattgataggcttgttcaatctgctgtttgaattgattttgctattgcatgagatattattttacattaatttcatttgtgctttggcagtaaatatgtgttgtcatgctgcaattgaacacatttttgatttacctgcaaaagaaattgaataagttattatgcttgatggttggaatagtattatgcattttgtttgtgtgtgtgttcatgtttttgtgcacaaacacaaactcagtcacaatttgtaatgtgaatgaagattactgaaatcgtgttatgcttaggcttcactactccacccttcttctcttattttctgaattcgtggaaacaactaaaacttatcgtacttgtagtgaagaaattactgttctatatggggtgcaggaatcccttttttggttccacaaaattcaattggt

SEQ ID NO: 89339 - DNA, 745 bp, Citrus clementina
  Intron number 1 from transcript clementine0.9_007937m (loc us clementine0.9_007937m.g) derived from phytozome v7.0 (c hr-ID scaffold_91; pos 216327 to 217071)
tttgtttcagctcaactaacatttaccaccttcaggtatgcatgcatttctttcactgcaaaactgccccttctttcattatattattctccatgacaatttcagttgcttgttgtttttgttttgttggccaccttcttttgcattttcttcttcttgagcttggtgttggggaaaattaagaaaaaaaaaggtttgagagttgagacaatcatagttgtgtttatatttatgctgagaatttgtcacctatagcactgaattcacttgagtggttactttttcaatatgatgaaaaatgaaacaaaaaaagagataaaaatgctaaaatgcgttctgtttagaattggaggcagtgatgtttttggagactcatgaaattaaaatttagagaataaacccacctgggaaatgagcatcttttttttttttttaatatttatatgtcttggagaatcaattgcttgctacttctgtcgaatgagttgtgttcacgtggttgttggatccaattctccttcttgtgtgactcgtgccctgggattgttatctagtagtttttattttggataatagttgtgataggcattaggcaagttcttttatgtcaactttagctggattttgattaacttggttgattttttattgacaatttgttaatagaagtttccttagattcttatttaattagtttttattaatatcagaaggataataaagtcatcttgggaaatttataaca

SEQ ID NO: 89340 - DNA, 787 bp, Citrus clementina
  Intron number 1 from transcript clementine0.9_013200m (loc us clementine0.9_013219m.g) derived from phytozome v7.0 (c hr-ID scaffold_16; pos 3114144 to 3114930)
ggtctccgaggagcgtctccaaaaacttacggtatgttattttttcctccgaaagaaaatattggattttgttttacgttgacttagactattattattattatattatcgttaaaatttctttctgtaagtttctttgaaattataatatttttctttaacatgaaataagttaattggcactgaattgagcttcgtagcagcttaaattagcttggatggaaatgtactcgaaaatgaagactaaaaatttcatcttttagttccatgtttcgctttgtttacgtgcttgtgttcttcgattaaaggtgtttttctttgtgttattattactatttttttttctttttcttttcttctttgaaaagatgtgtttctaggacagaaggaagctacctagtggtaaacaactgcatagaattctttattgttttagtgaaatacatagaattaaaatcggaaacaggatttagttggtatgggaaatggaagcaattgttggaaatccaagttcaattgaaaaaaaaaaaatgaatgaataaaaaaattgtgggtatgagctttaaactgtctctcgtagcccatttttgtgtttagagcttttgtaagaaggttgaacatcatgacatcttgccggttgaagttagataagctgttttgattatttgaagctataaaaccggtcttggtgaaacatcttttatcccctagtagtcttcttgtttcgtattttgttttatattatataacctgaatggttgcattatacaggtagtacttgatttgg

SEQ ID NO: 89341 - DNA, 524 bp, Citrus clementina; identical to SEQ ID NO: 77866
  Intron number 3 from transcript clementine0.9_002739m (loc us clementine0.9_002739m.g) derived from phytozome v7.0 (c hr-ID scaffold_16; pos 1992566 to 1993089)

SEQ ID NO: 89342 - DNA, 898 bp, Citrus clementina
  Intron number 2 from transcript clementine0.9_017962m (loc us clementine0.9_017962m.g) derived from phytozome v7.0 (c hr-ID scaffold_21; pos 2737382 to 2738279 reverse strand)
gcccaaaatagagagcaagagataaaattgaagaggtgactgcacgaccttagactacaaatatgtgttaaactttcaattttgattgataggatttatgtctttgcttggctatatttttgagcccttttatggattgtggtgtttgatgataatttggatgctgtgatatttggacacagataactcattttcttctgaaaaccaaactattctatgtagttctcttattttgattggttgcagttatagaaatgattcctagttgaatttgatatatgtttcatgttgggctacttcagatttctgtatttcgctgtttgcctgatttttgtattggatattacaagttggatcattatacagttaataaagtggaacttcgacatcttaacaattgattgtctggtttagttgcattgctcgcgctgtccttgtgaggctaagcagctagaatggtatgggattaatttcataattttgcactggtgaaaccaatttatggttcggagaaaattgacctgtcactgaaaacacactcttgagtagtcctaatacctggtgtttttgttgaacactcttttcgagaaaacgtcccaaggttcacgtaaatgttggaagtttttcatgtcggaggctttatctatagaattttgtaactggtgtaattgcatgatattttaatttcttgaagcacaagcatttcgagacagcatcatttaggccttttgactagtttccaatgcttatcagctgattaaatcaaagacagatcaatagcttgaagttatttctaatagctcttttgttttggtttcccttcttttctccattttcctggttctcttcaatttcccttcaagtgatcctgccttagtttaaggctcccctgtggaag

SEQ ID NO: 89343 - DNA, 690 bp, Citrus clementina
  Intron number 1 from transcript clementine0.9_032038m (loc us clementine0.9_032038m.g) derived from phytozome v7.0 (c hr-ID scaffold_8; pos 1885871 to 1886560)
tgttgttgccctatccaaggcttgcttgtcgccaggtacttaattacattcaaacatgctatgatatctagtcattatcaagaagaattatctggctaattccatttggtgcatttatatgggtatgataaatgaaacaattacgtgtcctaaaatgtgtggcagaaatatgatacacacacacatgtacatatacattgtttttgcaccatctcttcaataacagttggaatcatcttgatttagtttgtgctctcttaagcttttaattatctcggatgtgcatttaaaaattgaatagagggccaatagagttcatgaaaacaaaaatatacatttttctttagttggttgcatatgcctattttattttatttttttctcatttatatcaattaaccatcaatcatataattatatttttcttcttatttttaagagaaaaaacctcaaaatcgtgattctttaaagtatagagattagtactgagcccattatcttttgtgatgggtacaatagtaatccaagaaattggaaatccgtacagccaatccaattaaatatggggccattactctttatgttagtgatgtaattaaacccaatatagcaatgctagtaaccgattaaataataatttttacatatattgcaggtgaaaaagaactgtaagctactttctgaaaattc

SEQ ID NO: 89344 - DNA, 721 bp, Citrus clementina
  Intron number 2 from transcript clementine0.9_010594m (loc us clementine0.9_009131m.g) derived from phytozome v7.0 (c hr-ID scaffold_12; pos 1173494 to 1174214 reverse strand)
caaggttagtaaataatttttgtttgtattttatgggaatgtgaggttaactttacttgcccatcatttttatatatctgttaaccagtaaattctatcacttttacttcgtttttttctgtaagtggttttgacatcaccatcatgtacttgaatttattattaccattgattttattttctgtcagctttgaagttatgctttattctttcctattggattgatcattgttattcaggatttgagtatgttgttttcatgagggctgctaataccttatatagttattttcttccggatgagtgaataactgaaggatatgttactagcttttattaagtatcatctctctgcattatgtgcagcatactaataacatattttctgctattataattctcctgagctatttgcagtattaccttaggacaggagggtgtaagttcggaaaggcttgcagatttaatcacacaagagcaaaatcaacagttgccccagttttagagctcaattttttgggtctgcctattcgacctgtatgatttctgtttcgtataaagcagttaaatgaaccttgtccacctatctatgttttttctttagttgtttccaaatatcatgaatctatatgagagttgctcattctacagtctgctggaatgattatcctaattttgaaattttgattcaccgcagggtgagaaggagtgcccttattac

SEQ ID NO: 89345 - DNA, 682 bp, Citrus clementina
  Intron number 1 from transcript clementine0.9_011128m (loc us clementine0.9_011111m.g) derived from phytozome v7.0 (c hr-ID scaffold_60; pos 748054 to 748735)
acaccaaagcaccaaccaaagctatatatattcaggtaaaattaaaaataaaaataaaataaaaaaataacaggattcgatctctttcatctacattcttcctcttcttcctcttcatttttatttaattagtaagcctgattcccatttccatcatttttccaaattcatttatgtttcggatttcaccttttactcgttagattccgatttgtcatcatttaataaatataattttgtgtacgttcgttcctgttttatttatttattttttgttttgagtgcaatttctggaagcttcagatttgaatattgcaggtaaatccagcttttagtgttcaaaattcttcatttttatatctgaattttgctgatgtttattccttgagaattttttcctttctcttttcataatctcagaatttgttcatttaatttccttttccccctccttagttgttagtttttagatgcatagagttgtaaattctgtttcaaatctatgcttgctattattataatttaaatctaattttcgattttcaattttacaattattgtaatttgtaacaactgcctgataacaaatattgttttttgtattaatttgcgggtagtcaacagcttatgtagtatcaattttgcagaatctgtgtctcctctaaattgagctacggagatc

SEQ ID NO: 89346 - DNA, 411 bp, Citrus clementina
  Intron number 1 from transcript clementine0.9_025006m (loc us clementine0.9_025006m.g) derived from phytozome v7.0 (c hr-ID scaffold_56; pos 675063 to 675473 reverse strand)
ctgggtctggtggtaagtttattcattactcttctcttggctattacaaagatcttatgattgagtggcttcttatatattttttttcttttttattggtttatcttttgaatacccatctctattttatttttatacaaatatctgaaattttgcggattttcgtgtgtgattgttttcttttcctttgattgtttgtgttcttgttgtagaataaattatcgtttgaaattttgaatgagatatctgtaactgaacatatttcaatgaatctattaatcgctctgttatataatgaaatatctctcaatttaactggactgattgaaattttttcttgattgagaaacctttctttaattggtgttgatcaatttgcagcactgagcccttgggacacaattggaagac

SEQ ID NO: 89347 - DNA, 964 bp, Citrus clementina
  Intron number 2 from transcript clementine0.9_008352m (loc us clementine0.9_008345m.g) derived from phytozome v7.0 (c hr-ID scaffold_13; pos 1112315 to 1113278 reverse strand)
cactttatctggtttgctacattctcttctttttttcttgttctttattattccatggttctgattaggtggtaacaagtgatgatacataaggaatttggatcatacatttcaagtgactattgcaacaaaatgaaggttgggggaacaagaatatcatggatttttgtccctcttgtattggcacttcattcttgtgttacccccttaagccccttatccaagcaatttggaatcaaaagaatgctctttgaaattttttctgcctgaattccaaattctccacactgacttttcctcattactacctattattttaattccctcttgttagataattaatacacttgagctgcacttgattcttttgaatgattttccatttctaatgaagctgaagtctgggtttgttttcagaaattttggatgtgcttaatcctaggtgttgagatctttttctgcgtttctttggctgctcccttttatacttactgtactatggtttccacatctttcttggtgttttggaatattattgtgtaatgaaacaaaaacagaaacaattaggacgagaaactttatggaggaaaccgtcttcactatatttagaattttgcaaagagaccataaaacctttatcacaattcatgccatgatttgtgaattaatgattaatacaaagttattggttgattctgataatgaaatgtataaagacaatgtaagtgctagtaatttggataaagttaaaaagatattaatcatcaatagaagagacttaatcttatgtttgcggcttatattcataatacatcactttgttgcttacagatgtacttgtgtggtttctggtgcttttaattggtcttttaggatagtacaataatgctctgcctttttggtgtttatactttttacctttttgtttcttttaaaggctggagagaagcggaaggaagaagaa

SEQ ID NO: 89348 - DNA, 553 bp, Citrus clementina
  Intron number 1 from transcript clementine0.9_008352m (loc us clementine0.9_008345m.g) derived from phytozome v7.0 (c hr-ID scaffold_13; pos 1113540 to 1114092 reverse strand)
cctttactctgctgccaagtactaaaaccctaaacccccaatgacttcattttcttattatcgttatcattttttgatactttaattattgtttttaaggtcattcttcgtttatatgaagtactaaattggtttgcattttgtttattgaagcgaaaaagggagttttcaaaacgccaagtagatactacctaaatatttgatattggctgtttcttttatcattatgtctccagttattaacaattagcttgtgggtgctgtgtttctgtaataaatgataacgctacagtgttgatgctccattggtgaatgtttagggagaaaaaataaatcaaatatcgagtttagtgttttgcatgttctcttaaaatttgagaatgtggaaatcaatttgagctaaatgattgaatcgtgctcatttcgaatgagtaactaaagtctggaaatacttactagtttaagtttgccatttgattttagtatcaatgagtattcttgggccattatatattcagggcagcagaacagctggtgggaatcaagcaaaacc

SEQ ID NO: 89349 - DNA, 654 bp, Citrus clementina
  Intron number 1 from transcript clementine0.9_029527m (loc us clementine0.9_029527m.g) derived from phytozome v7.0 (c hr-ID scaffold_123; pos 480835 to 481488)
agaaaggagacgttccgaaggataagttccctaaggtaagaatgtatatttaaccaccaatcacttcaatggattttacttaggagaaaattagattatgagaggtatctgatccgaatttttttattatacatttttacaaagccaacactaaaatcatatatattaacactaaatcttttgttttggtttaccaactatattcctatttatattttgattcaatactcatatgagatttgtgctgatcgttttataataatattgtaattggttattttcgatagtaatatatgtatttgttactaaatctcaaccattaaaattagaactcaactcaggattcaaatttttattaaaaatatttttttgatgggttaagaatttcacctaatctttttctctcctagtctcttctagtattttaaatctagcgaaaaaactgatttgattgtaaataaactgaaataaattggcttgatagtcaacatcaaaattcaaaattcaatcttaaaaaaaaaataggagaggatccttatcttttttttataggacataattttgtttgctgattgagtaattttaacttaatttgtcttaaatcggcttagtttgtctgcaggttctttggtacgccatcacaaactatagaac

SEQ ID NO: 89350 - DNA, 621 bp, Citrus clementina
  Intron number 1 from transcript clementine0.9_016717m (loc us clementine0.9_016717m.g) derived from phytozome v7.0 (c hr-ID scaffold_16; pos 4255546 to 4256166)
tctccgatctggctcacctcgccgacaaaatttcggtaatttcatttttaaatcgccacgacttagccatttttggcagtaggcaattttagttatgaacaagaaatatatttttattataaaattgaaaattttcttctgctctcacggattcatcaacaacatacatttcatttttttatcttatagatttagttgattttgaactgtaattgagaggtaaaaaaaaaaaaaaacgctggtgttgctttatatatatataatcattctccagtagcaagtcacattgtttttctacaattcaacaccaaattgttaacaactatataaaagtccagattttattgaatatgaatatccatatggaagaaaaattatgtatatattatgatgatagcagctggtatgtcaatctgattgtgccggtgtaccgtctgtttatgctaagaaatagtgtgcaatctaataatggtgggcgtcgttgttttacataatagtgtgtaaccacaatttttgggaaaaccacaattttagtctttgatttctgcttgggagaatttttttgatgttgaagtagttttttcatgatattacagttttacaagcgttctgtgcctcagt

SEQ ID NO: 89351 - DNA, 606 bp, Citrus clementina
  Intron number 1 from transcript clementine0.9_015574m (loc us clementine0.9_013141m.g) derived from phytozome v7.0 (c hr-ID scaffold_12; pos 4584698 to 4585303 reverse strand)
tcaacgcccagatagtccgctcccgcgaccccaaggtccttttaatccaaacccatttcactttaatttgcttgtaacttaaaagcataaaaaaaaaaaaatcggttttcttatgatattaaagttcattttttaaaagtatgtcatttgaactaaagttttgtttttgggaataatttgatgtgggtttttcgttttctggtggttattaggatttttagtttgtggttttgttagcatccagtgtgatgtgtgtctatgaattgatttgggggatgcaggtgttggatgatcttgatgcggtgcttgatgttggaggtgtgtatgatcccagtaatgatcgttatgatcatcaccagaaaggttttgaagaggtttttggacacgggttctctacgaaacttagtagtgccggtcttgtttataaggtagtaatttgttcaattacttggtacttggcttgttcaaattgggtactagcagtggcataaagttgggatttttgtggcagtttatctgtcttcttggctggtaactgagtttggcccatggaaatttattttgttttcagcattttggaaaggagttagtagccaaggaacttaa

SEQ ID NO: 89352 - DNA, 517 bp, Citrus clementina
  Intron number 1 from transcript clementine0.9_017112m (loc us clementine0.9_017112m.g) derived from phytozome v7.0 (c hr-ID scaffold_12; pos 2137606 to 2138122 reverse strand)
agcggcgattcctttgatcgttacagagaatacaggttttaatttaattctttcattcactcataattctgtatttttgatacttctcttcttttctaatttagtagagtattaactggttaccagtcaattcaatttttatatatgggggcgtatttaactatttgttccttcccactaacttgaattcaattttgtgtttttttttttaatactgaaaatagcataaatacactacattgcatgtttgtcagttctcttaaaatggacatcaaggactagacaaagatgaataattaactctcaacagtttgtggcagcttatgtatgtttttctgtaaaatttgaactttatggagtcagtagggacccctgcagataccattactattcagaaatgcaatcctgttcttcttgtcatttttatactcatgtaattacttctcaaaggatgtttgattggagatggaacttgatggcaggtactgtttatctgtgaacgttattgcatttgtat

SEQ ID NO: 89353 - DNA, 626 bp, Citrus clementina
  Intron number 1 from transcript clementine0.9_007403m (loc us clementine0.9_007403m.g) derived from phytozome v7.0 (c hr-ID scaffold_21; pos 1732169 to 1732794 reverse strand)
gcggaaccaaaaaccaaatacgaccgccagctcaggtactcaaccccacctcctcactgtcgtagttgtattgaccgttttgccctcctcaattcccattattatcgtcttccaccttctctttgctccgtgttttctgtaggccgataactttccactcggaataattttcgtttaagctctcttcgtttcaatagtaactcttttgctggaaaaatcatagatggttaaataataaatctaccgatatttattgataacaaattatatttcatttcgaaagataattttcatgggatgtctatgtcaactctcaagtgatcattaatttttttttacactatttaatttttatttatattgtggtaggagcttctagtaactatatagtgtttcgctgtttagttttcttgcaatgacagtagctcatgaaacataaaattgcaaaaaataatattaataaggatattaccaaacatattcgtttagtcggaagaaaactctattgaaattcaaaagtgaaaaataaaatgctgaacataatgtttatatttattatttttaaaatttgatctaatgtcgaaattgtaggatctggggtgagcaagggcaagcagctcttgaaa

SEQ ID NO: 89354 - DNA, 433 bp, Citrus clementina
  Intron number 1 from transcript clementine0.9_015543m (loc us clementine0.9_015543m.g) derived from phytozome v7.0 (c hr-ID scaffold_25; pos 422631 to 423063)
atttttcaagctttgtccgccaactcaatacttatgtaagcttagccacacctacctttctcctctactttcttttcttttcgattgtttttttttgtagtattatacgtttaattaattatttaattacttaaaaaaaacttttggatgaaaatataaaggcttgaacatgcttaatttgattttatttttcaactcaacaatatatgttgtccaatttataattttcttttttattgtttcctaggaatagatactctataaaaatatatatatatatatatatatatatatatatatatatatatatattactatctaaattctgaacctgatctggaaagctctgaatgattgaaatttttttttaacaaattttttttttttaaaaaaaaaagggaaagaaagccacgacgttcacccctgtgaattg

SEQ ID NO: 89355 - DNA, 789 bp, Citrus clementina
  Intron number 3 from transcript clementine0.9_025613m (loc us clementine0.9_025613m.g) derived from phytozome v7.0 (c hr-ID scaffold_56; pos 863354 to 864142 reverse strand)
cagtaagttctagagttcttgtgatggactataagtttggttgcattattgtggatggggaggttaaaaggacaagtaatagcgtcctgaatagagcttccttttatgaataaatactgaatttaactgcctctactcaatttgggtgagaagattaagaaatgccatgttgattgttagtttacattttacactttgaacaacagtgatattgaaaagccttgtatgttttaagtttttgtgttctaaactgtatgatgcaaataaacatgaaacttgaccagcatcctcatcaactagtgcaactgaggttaaatatgagtatgaattgagaacctccaatttatgctccttgtttgagtggcactattctttgtactgtgtagcttttatcctctttcatgaaaaggaaagctggtaagaatcgcaatttttctgtatggaagcaatgcatttcggctataatgcattaattcataggcctactccttacatgcctattagttgccttcactttccaaccccaaaattatcaatctcaaagtgtttcctgacctaaaggaataagtgcttcatttttgttgcagaagaaactaggcttttgttttccagttcatctacgtctctgtcaatgttacaagtcttgtctacttttctgattttgtttattaacagtagctaaaatgaaatgtcggagcttgtacccatttatagcatctgcatagatgtagatttagttgccccaatgcttgctaacttattcactttgttttatacttgcagaaatac

SEQ ID NO: 89356 - DNA, 500 bp, Citrus clementina
  Intron number 1 from transcript clementine0.9_006012m (loc us clementine0.9_006012m.g) derived from phytozome v7.0 (c hr-ID scaffold_12; pos 2377872 to 2378371 reverse strand)
aagaagaaagtccacgacatgtaagttttagtacttttcttgatgatcctctgggttaaaattgctaaatttcatttatttatttattttatttctttgcattttagtttgattgtaaatgcttgtgctcttgtgtttgttttgatcatctttgtttaggaatgaggaatataatgtgactagtgaatcctgtgtttgatataaatggataaattagtttgtaggactagaattcatatctcgaccctctgtttagttgctgtcgagtttaggaaagcacttaaaagaaactatactaggtagactattggttttttgtcactgaaatgtagctacatattcacttcgtgaaggttactatagctacttttgatccgtaagaattttctttttttgtttccctaacataatgcactttccaacaggattccatgtcatttgtttagaatcgagagctaataaatcactttatttgttttactttctttgcaggttctacc

SEQ ID NO: 89357 - DNA, 684 bp, Citrus clementina
  Intron number 1 from transcript clementine0.9_010222m (loc us clementine0.9_010222m.g) derived from phytozome v7.0 (c hr-ID scaffold_88; pos 252094 to 252777 reverse strand)
acactgaggtaacttatctacaacttgaactgtgtatgctgtttctgttggtttgtttgattggctctgtatttgaacttgaaaagtaattgtgtaagtgtaatgcatgttaagttttgagacgtctcgataaatggaatggcacccaattagttaagaagaaacaataaaattgctttagaaatttcacgattgtgaggtcaagttttatacagtgttaacatatccggaatttctccaatcattttttcaatgagaagttttatacagctaggaaatttctgactcaagcgagaatttctttctaagaatcttgagtttgtaattaatggactgtggattagttgattgtgatcttcgttgtagcaatggatggttcaattgaccgtattaatcgaaatccagtttaaagcactcaattagccaaattattatcctttactgagccggttttcggtttcttaagaaatgaggaaaaggaatgaagatttagaacccaaaagtctttttggtgagatgttgtaagataccaaaattctttcactaaatctgttgggaatttactagagcatcaataacaaagagaatgttgtttgttttatacgttcactctccttacaaccagttgggaagaaaagcatacctgtaataaagagcatttcttgctttctcaggcatttgcaa

SEQ ID NO: 89358 - DNA, 926 bp, Citrus clementina
  Intron number 1 from transcript clementine0.9_021318m (loc us clementine0.9_021318m.g) derived from phytozome v7.0 (c hr-ID scaffold_138; pos 303319 to 304244)
tttgtgtggcagacctcacttcccgtattcctctatctctcttacttctttgcatttctttttctttcttttttctttcttttttttatgtttaattatatgttcatcatcattatttcattcaccagaccaagctattttaaattaatgccacaagtactctttcatctacccattacccccttttttttttctgcatcctcataataataatgattcagcagttgacctacttcttcttccattcagtttcttccttttcactactaatcatttggctctaaagttcagctcctattgttaatttttgggttcaaggttgtttcagtaatttcccaacaatctgctagtatagtttgccacttgttcatttttatttgatagctaattatttttatttgacattaattctttacaaatccctttctgcctgtgccaaattgccaattgctggtggctattactatgttgttaggttctttctgtttctgatttgagccttgtaatgatgaacttcttttcttttctttttttcaatttttttttcactaatactaacagccaaagtttatactcgatagctaatgattttattataaagaaaagtcacccaacattattctaatgtttgctcacatatatttagacacatttgatttcatacacggtcacacagatgttttactagacaattatgttcaaataaagtttagttaggtcattataattctgcgtgaccattttttgaaggcaaagggatttatgcctacatttaaccaaacctgaaggtcttggtggtagctatttattatcattagtttgtttctataatgttagcttttttctgtaatgatgaacttcttttcatgttccaagaactgattcaatcatggatttattatgatcaataacagctattaaagtca

SEQ ID NO: 89359 - DNA, 788 bp, Citrus clementina
  Intron number 2 from transcript clementine0.9_028909m (loc us clementine0.9_028909m.g) derived from phytozome v7.0 (c hr-ID scaffold_60; pos 534543 to 535330 reverse strand)
ataagtttgaagtacgtaaattaaatcttattcaatattttctctcgggaaattttagttaaatgctatatgatattaacgattgagtataacattgcattgatattggtttgtgatttatggtagaaaataaggaagaagaaataaaaaaatgtgtgctagtaacaagtataaccattgtttgagtaaaaaaggatatgctggactatgggaagaaattgtacgtaatgtttatattctggttgcttccatttgaaagttacagtaggtttttaaatatatatgtttgtttgcattcgtttgcttgtattatttgccaacattttcattaagaatagtttgagggggcttctaatttactgcccaactttaatttttcaaagtgctgaaacttgtctcagtgaagatcaaatagacagaagtgtagcttggatcagaggtaggagaaaaaaaataggggatatcatcctaatgtttaacttatcgttgatagccagtgctggtttgtatatatgctatagcaaaaattctgttttttatatcaatatttgataaaaggtgtcattgaataatacctagatgaaggctcgatggaatgtaaaaaaagtatctttaagttgagatggaagaaatgatttgcttgcaaaagcttttgggaaagccccaaaaaatggccatatgcaagtgaccagcaagtttgtaaccccatctctttattttgacactccacgtaattatgatccgatggaaaaggatagatcgaagttggaagactggttggcaaagca

SEQ ID NO: 89360 - DNA, 814 bp, Citrus clementina
  Intron number 1 from transcript clementine0.9_033938m (loc us clementine0.9_033938m.g) derived from phytozome v7.0 (c hr-ID scaffold_16; pos 1969661 to 1970474)
ggagatcaggaatcattttgggttggaccgaccctgtatgttgttctggaccaaactaaattttgggccacccttgttatgggctcaaatggcatcctggacattcaatttttgatggcccataaaattttaatggaaaatttatggaaatagtcaaaattaaaagcaattaatgaactcactattttctaattgctttatgtccaacaggcagttgagaaagacatgtacatacatgcgaaccagttccggtggatctcgttatgagaccaaccaacttttttgtttttgaaaaataaatctacaaaaacaaaataagtggatcccgtttaaatggtaaagctatcgttcccaacagttttcccaccaacgcacttaggacttttaactaatacttacttcaaaaaaatttataattataaaataaaaattaataatatataataaatataaattttaaataataaatttaacaaaatattaacgacaagaattcacgtcgatcaagtaaaccagtttaaagtaggaaacaattctccacgaggaatcaaacaccggattttgagatttcttttcccattaagtgtcggattctctcataaaccaaccagcctggcttcaggaatcattagacgattcagaaagagccgcacacgagtccctacatacatatatagagctctgtttccactttctctctctgtcaataagactccgtcgcacgttcaagaacccgccatagatggcgtcgaactccgaagtgcaactcccgcgtgtagtcccggttaaaaacaaggccccgaacccaatttgg

SEQ ID NO: 89361 - DNA, 872 bp, Citrus clementina
  Intron number 1 from transcript clementine0.9_028527m (loc us clementine0.9_028527m.g) derived from phytozome v7.0 (c hr-ID scaffold_84; pos 157461 to 158332 reverse strand)
tgctgcacctagccacattgaagaaacaacgccaggcaagtccaatcttatatttaatcccgtattcaataattttcaatcaagttagttcttgtttctattgctttcagatcattataaagcagtgtttgagtttagactgtgaggccactgaaagctcatgtcttattaagcttcattagcctggatatctcttgaatctagagaaccatgtatctgcaataaggttcctaatttgcttcaattacaaatttgaactgtacgtcactatgcagttaaaacagtcatatctgacctgccaataaaatcaaaatctgttataagatccttacagttttgtacagttgtttagagaattgattagcgtggattcaaaatggtcataaaataaaagggaaaaatgtgtttcctaagagcttaaactttcctctattttaaatttatccccttgcaagtgctaaactcagttcaatcctgtgtttctgcggtatcatgtcgaccaaccaccggtgaagttcaaaatgatggtgtctacagaaactggcgaataaaaaaactggtcactaaaaaaatttcctcattgcatgctccaatcttattttagttttagcaactttgttagctggaaactccatctattgactaggctcagtgtttcatatcctaggacgagttgacttccaagttagacacacttcaagtcatgaaaactttgaaaatgattgatataactgctcgagtagaaacaaatataactgctacgaaagaaaatacatgtcaagtatcatatgatttatcttctgactataaagaacaattgaaaacttggattcacttgcaggtaatagaactcttacttggccatcaagcca

SEQ ID NO: 89362 - DNA, 493 bp, Citrus clementina
  Intron number 1 from transcript clementine0.9_010129m (loc us clementine0.9_010129m.g) derived from phytozome v7.0 (c hr-ID scaffold_87; pos 533974 to 534466)
ggagtatcaaagagaagctaacagattaattagaggtgagtggttatcttttcagtagttgtcaggacctatatgatacaaatggacgaaatatgcccttatttgagaaaacttgaaaagttcaagggtgcaaatgttattttattggagcacttgttacttaattctgtgccattctgattgaatttggaatttgcaaaagtctcagcttctgcctctgtcgtaattcaatagaataattaagcaccgtaaatttaggtttgccctaaattataaaaaagataatgaattattggtcttgttagttgcacaaacagacttcttttacagttccaattgcaattgcaatatgttatgtcagataattatttatcttaattttcttgcaggtgaaatgtgacctttttaatattctttactttttctgttcatgttttcttcttcgagtgcaacttatcaatttgatttccagcgatcattgatcaaagaaccc

SEQ ID NO: 89363 - DNA, 668 bp, Citrus clementina
  Intron number 1 from transcript clementine0.9_027246m (loc us clementine0.9_027174m.g) derived from phytozome v7.0 (c hr-ID scaffold_61; pos 777049 to 777716 reverse strand)
cgtaagtgaagattgaggtatgtttttcataagaattgcaaacttgagagtgttagttagcgtgcttgtgagtaattaatttgtgtaattttatagggggtatattggggctctgaaatgttacaatgggatgaaattatagaacaggatacacacagtataggggtatttgcttgtctaatgtagatgtaagtcgggtttctttttgtagtcagcgtattataaatttaaatttattcactttgattatttctctatagaggctttcaaaattgatttcacaagatcccaaaagcttaaccattaaataagtatcttcgtatatgactagttttatctcgattgtacgtgtcactgatactgttttgtcttcctgcaataactccataggcttcaaaccgagttgtgatcgatttcttagaggttcgacactgtcaaacaaaattcggtgtatttttgtggttaaataatggcaattgttgttgtgtgggctgtttttcccttttgtcatttcagggaaattaatatggtatgtaatcttgtgtatgttttgaagtcataataaaagttgtcataaccttcttatgtgataatatgattacaaacttgactacaactagcagtttaagtggtatttataattcattttagagcattgtaatgcagga

SEQ ID NO: 89364 - DNA, 1035 bp, Citrus clementina
  Intron number 2 from transcript clementine0.9_015813m (loc us clementine0.9_012804m.g) derived from phytozome v7.0 (c hr-ID scaffold_39; pos 582766 to 583800 reverse strand)
aagagctagatataaagccaatcccgagtaaacgggtgggttcggttatgttgatgagattctagttcttttcttttcttttagtgaagttgtgatatgtaaatacaaagttgatgtttgtggattacaaacaaattgagttaacttcatctatcaatgcatttcttcatgagaaatcatgtgaaacgtcatctcattgttacatttgctgaggatattaagcaaaatgttgaaagtttttctgtgaaaaagccttttaattttggaattttcatgtaatttcgagttcttcttggagacttttaggcatttttgtggttttgccattgaagtagtacttgaaagaagagaaaatcgactgaatacttgttgcttgccggtcaatccttaatgaagttcttatccatatgcgcaaaataatcaaatcaaactgctataaagaaattagcttgtagtttcatacatggcttcagtttctacctggaaaagctccattctgttatttactttgttatttctggttgcttcgtcatttttcagtgtctatcactacttctctggttggaggaacgctatgagactgtgtatactcgtcatactggttttcagaaaggatctaagccgcttctggcattagataatcctttcccaatggaacttccagacaacttatttggagacaaatgggcatttgtccagttgcccttttcatgtgagggcttaatactcttgctataaatgatattggcagatacaagagtagtattccttttatcagatttaccaactttagaagtattcttagatacattggaaatggcataacgctttttaataatatgcatcaatcaaccataatcgctttcgattggaagttaaactttcaaaaggggtggcagcatgtacaaaattcagtctttagatatctatctgtcagttatatttcccaagctaattccctagcccatactaattttacattctgttctcagctgttcaggaagaggtgtcatccttagagagcaaatttgtatt

SEQ ID NO: 89365 - DNA, 933 bp, Citrus clementina
  Intron number 2 from transcript clementine0.9_025723m (loc us clementine0.9_025723m.g) derived from phytozome v7.0 (c hr-ID scaffold_64; pos 1211721 to 1212653 reverse strand)
ccagctggtatagttgctgggatcaggtaaatggaagatgcatctggcttctttgttcttacttctcatacacaggatattcccaatcctgattatgattgccattctctaattgcaagcaatattatgcataacatgaaaaattgcataggtggaactttcgaaaaaaattagttgttattcagtggaacttttgaaaaaaattagttattcattcttttaaactctcaacctctttcctgcctcttccttcacattgatattatttttgatgttccacttagccatacaatatctgcagttgtattttggataagtgatgatactgccacaaactcttgtacaaacttattttgtacaaactgatgtgacattaattcattggttgaatgaaaatacaaaataatgaaaataaatcatgtgggccaagagatatttaatttaaccaattttatcatgccacatcagtttatacaaaataaatttgtacaagagtttgtggctatatcattactcattttggatatgtagattcttgtatcgggtgcttggcaaaagggatcttagaaaaatcttttatcattttgtatacttgttctgttatgacagcttgtggcatcttcagttcatgctctctgaatgcactcatgctgctatactaccaatcatttgttagtgccgaaaataagtttgacccctgctgatttattaaatttcttggtgattatttcataatctaattccactccgtgcacgtgcttctttaaatattgaaaaatcagacctttactggtgctattagaaacttttaaattagctgcttcgttaattatttcttaacagctgcatagttattttgtttacacctggttaaacattgattttgatgtttaagagctcaactctagcaatctgttatcttgcagtgccctt

SEQ ID NO: 89366 - DNA, 574 bp, Citrus clementina
  Intron number 1 from transcript clementine0.9_025723m (loc us clementine0.9_025723m.g) derived from phytozome v7.0 (c hr-ID scaffold_64; pos 1212690 to 1213263 reverse strand)
gaaaaactcttactttgctatagttatcgagactggtaatttttgtttttttttttttgggttttcttttttgacttttttgatttagcttctttttgcgttaagctttctttctgcagatccagggtagtaacttcgttagagagttgctcagttttgatcttattgaagttctttgctaatgtgtgtggttgtgaaggttaaaattttttttcctgtggaaaattgttgcttgatttgacaattcaatagttggatgagaaacaagctaatgactgcttagcaacttagcatcaagactatgttttcaaccacataaactgaaaagagatccttcataatctatggatttgagaaaagttatgattaaggtcaagcatgcacattggagtagatttaagtgatttataagtaaatgagtgaaattgtgaacattagaggtcggaaaatttgatatagtgactaattttttttggttgtctttctttcttttgatgcaataatgcaagagtttcgatttggtcctgagttttatgctgttgatacagtttgtgcagctgtactgactgcggtc

SEQ ID NO: 89367 - DNA, 345 bp, Citrus clementina
  Intron number 2 from transcript clementine0.9_011136m (loc us clementine0.9_011136m.g) derived from phytozome v7.0 (c hr-ID scaffold_92; pos 287591 to 287935 reverse strand)
gaccgaaagacgcttggctttctgacttattgtgagtttcaaactttatatttttgaattttttgtttttcaattcctctgtataatggtattgaaattgaaagttggcacttttgaggctattttaagttgattggttgctttggtattggaaattcattttgtgaattgagaattgcggagcaagcatattagtttattcacatggaaaatgggagaaaatcagagctacttcttttccaagtttaaaacctgggtttcctggtcctcatttgggtttatcccatcatcctccttttttagcttgcaggaaagcaaatattcaccggttgcagggagactgga

SEQ ID NO: 89368 - DNA, 922 bp, Citrus clementina
  Intron number 1 from transcript clementine0.9_029863m (loc us clementine0.9_029863m.g) derived from phytozome v7.0 (c hr-ID scaffold_87; pos 734968 to 735889)
aaagacgggtattttattttactttttcttattaattctctccattttttttttcttgtgatgctaatgttgtggatcttgataattgataatttatttattctattttaattctaaattcaaattttatttgagaatgttatgtactaaataaatttattgagcatgatttcctcgacaactttttgctatcgttatttggcttcccttgagagtgagtgttggattaattgtgctaggacccttgggttctaactaaaaaattaaagaaaaagatagagaatggttgatttatttattgattttttttaatttgtcagaagattgttttttaatttgattgcttgaatgcaaaagacattacgtatttagagggttctagagaaattataacctacaagaaaacaaattaacaatggaaatcttgaattaaataggaaaataataacgctaaaattaaagtcctaattctcatgggattctaacaattgtacatgttttggtgatttttattttgtgataaacagattttatttggcatgaaatattactcatgtatttccgaaatccaggaataaaatacaatcacaaaaatagaatgtgctgagggatgaatgagaataaatgggaaggaaaaactaaggcagtttacttcaaacaaactcagaaactattaagttacaaccttccttatgtaactcaattaaaaaaaaaaaatgttaagactctatgttaagactctcttctataatttaaattaaggtgacgaacgaaataaaactgctagaaaaccactcagtcaggcctatggggacactaaacctaaattatacaatgcactaatgttacacaattctacacacataaattttataataatttgttgtctcttatatatgcatggacagataaggtacaaaac

SEQ ID NO: 89369 - DNA, 1059 bp, Citrus clementina
  Intron number 3 from transcript clementine0.9_018020m (loc us clementine0.9_018020m.g) derived from phytozome v7.0 (c hr-ID scaffold_21; pos 2465912 to 2466970 reverse strand)
ggaaagcaattcagttggatcacgattctgtcaaggtctgtttgttttttcctctgttttgttataattgtttcaacttattattttttccttttctttttgagggcatttttgtgtttgttgatgtagttctttgattatgcttcttgaaaagaacaatggaattttgctcctgttcactaagcaccggggttaagttctggagttctctgtgggtgtttttgtgcctaagattgcctgaacttgggccttactgacacttacaaattgcttttttgtctttgcatttgggaataggttttgtttaagagttccagtaggctccttatggattttcctcttttctccctaatttcttttatcctattgatgaatgggttatacacaatgcttttttgatacttgaaagaaaaagagggcctttttttgacaggtcaagtatattgaggtcaaaagattatcgaataatgattctcgttatcaaaagtgaagaattttggagactgctatcataaaatatttacacttgaagacctcttgaagagtattgtgtggattaattgttttctggattgatgttattgacttatctggtccagaagttgatagatgggggattgatcatgatgaatagtccagactaaattaatcaatttaatcttaattataagtgattttcaaataggtgctattttttatattttggcacgggaaagcattctggggcttattaggaaattttaatgtgtgagccttcagtttgtttgagatgctgctctgcttcagctgcttaagcaagcaacttatgctgcatgaaactttgtgtcgcttgtttctttttcacagaaagtgttgaagtaaactgtggtctctaccatttagtaaatttcttcatgtgttccttgtttcttaactagcggctgcttcctctgtgtttattcctattcttgttgtattatgcaacatttttttcttcttgataattataatcttatgctttctgttacattttgctaaatgacagggacactatttgttgggacaaacgttgctacagag

SEQ ID NO: 89370 - DNA, 669 bp, Citrus clementina
  Intron number 1 from transcript clementine0.9_019036m (loc us clementine0.9_019036m.g) derived from phytozome v7.0 (c hr-ID scaffold_52; pos 813849 to 814517 reverse strand)
cctataaatctgctcaggtttaatctatttgcactgcgtttatttatttttttattactttgaaatgtggagtatttgttgttttgtgttttaaaattattttagatgctgcattattcattttcttaaggcatgtttgatctaaaattttgtttgattaggatgggcttgtatactgtgactaagcaaaaaggatcagaaatgaatgctaataaggctctgttaagagtttcgtttatgcagcaataagcattcatcttattattgaaattactgatggctcatcactaaatgcaggatcctaataacttcatttctttcctccaatttttttgtgctctatttacaattctatcatgtgcggtttgatgcccttttactatgttcttcattttggttctaacgctgtattgaaaaatattttctcttgttgagctctcttgtttattttaactgtatgccgtgacaagtcgaagtataatacccatttattattgttattatttctgtaaaccttattttgtttgaaatgtggtgcatctttctatttgatttctattaatcttagaagttaatgttatgtgtaaaatatgtccatctatttttcttagttgttgccttttgattttgtgtctttgttgggtatattatttgatcaggatattgcaa

SEQ ID NO: 89371 - DNA, 798 bp, Citrus clementina
  Intron number 1 from transcript clementine0.9_008875m (loc us clementine0.9_008875m.g) derived from phytozome v7.0 (c hr-ID scaffold_16; pos 3516308 to 3517105)
aaagcaaaaacaacacacaaaacacaaaataattggtatgccccaaacatctcactcatcgtttactggtgttatcatcagctatatttttctgtttctgtttctatttctattctgcccccaaaaaattatgctcccacttcgggtaagtgcttagctaaagccaaaagcgttgcagctcctttgatttggaatctgtatttgttttgcatgcaaagtcgaagattttgtatttgatttaggtcatctgggtatttctgatgttggctttagtgttttgatgtgttttacctttttagggtttctgaatttatgtttaattatagatgtgctgttattagttttgtgggattgcttacaaatttggatttgggcatcataaaggtttgattatatctatagttattattatttttattttttcctttatttttacgattgtggtgctgcggcttttaatctatagctgctgtacagtagaatcagtagttgttaggtgtaattgtggttttgggcgatatgcattagctcctgagtaaaagtgagtatgtatagaacaccagttgttatgctttcaacagttgcaaacatgcccttgctcgagtggaattgatacttatagctgagtattcctctttgaaatgagaattcagtgtctaaggttgtggttggaagtccacttttatacactgtccaaaacagcaaaaattgagttctacttttgtccactgtttgcatttttattctaatgatcgaaagttaaaggtcattgcgatgctgttcaggtgctgttgttgg

SEQ ID NO: 89372 - DNA, 493 bp, Citrus clementina
  Intron number 2 from transcript clementine0.9_021756m (loc us clementine0.9_021756m.g) derived from phytozome v7.0 (c hr-ID scaffold_16; pos 3479433 to 3479925)
aggttgcatcgcattatatcctttttatttttgttgttttatgtcgttaaatttagcgaattcttgttggattctgtttggttgataagtcaatggtggaaatggaagagattatcggtctgctttgtgatttgagatttgagattttttaggtattggagatattatgggattttataaatttatttttgttattggaactagacatactgaaatttcacaatttgacacttgattaaacaaacttctaggcattttaatccgtaatgtggttatttgattagctggagtgttccttttaccggagaattaagcgatgtagcgcacattatctgtatttagctttataccgttttttatttagttgttatctttgcaaccaaatggaaatggatttatattttgcaggaattgatttttttctatttttctatttatctaatgattttatttgcaagtgagtttgatccttgactctggcaagtatatagtt

SEQ ID NO: 89373 - DNA, 889 bp, Citrus clementina
  Intron number 1 from transcript clementine0.9_009245m (loc us clementine0.9_009245m.g) derived from phytozome v7.0 (c hr-ID scaffold_57; pos 664440 to 665328 reverse strand)
agcttcctgttcaggttcctgttatgattcaccatttttactactgtttcttgtttgggttaattattgattgacttagtggtttcagttgctgaatgatggagatcattgttgtgagtctagttctggtaaagatgtttaatgtataatagtacaatttatcaaatgccactaagagacagtgtgattctgagctgactgcatggccctcggtttatgccttgcatgtaaaagcttggccaataagtaaaagttttgttctttgagaatttatgcatgcacttgtggtctaatctcataaatattattggcagatccttgtttctcttaagacacattcaaaatattttaattgttttgtttattgtcatttagtgcccaaaatgagtttgttccgttacctgatgcattgatcagatccttggacctaacccattttgtttaaatgatatttaaagttactggtgaaagtaatctcttccttttataatatttatatttccttgatggtccataattgtctatatcagcgtgtctctttttgtgcagttgatttgtgattaaaatcaactttttcaaattgatttggcgctgactattgtagttatgaatgacatactgatatggtgtgatgttgtaggggtggttggataggttttgtatggattatttccctgcccttatatttttgtccttttgattttctttgtggacaacaggttcacttttgtatttggttactttcttcaatcaatgtataattgtcaattttttcctaaaatagaaaatccgatgtgtagcgagagatcctgtgaattttttttttggttgtttcattcaatatactaatagctttatctactgccctgacagattattgttacaattt

SEQ ID NO: 89374 - DNA, 141 bp, Citrus clementina
  Intron number 2 from transcript clementine0.9_017317m (loc us clementine0.9_017317m.g) derived from phytozome v7.0 (c hr-ID scaffold_8; pos 3791431 to 3791571)
aggtttattgaggagagaaagtatcctttcattgttctgtttctttcaatacatgaattattttttttttcttttatttggtttcttcttaattttgattgatcagcaaaatcatcgagttgagtagcagtgagttgcaca

SEQ ID NO: 89375 - DNA, 548 bp, Citrus clementina
  Intron number 2 from transcript clementine0.9_002107m (loc us clementine0.9_002107m.g) derived from phytozome v7.0 (c hr-ID scaffold_8; pos 2357886 to 2358433 reverse strand)
aaggttatctgtgtttcaatctatggaaatcaattagtaccatttaataacagagaatcaatctcaagaatatgtttaatatggtatagatttttttgttagaatttgatttcatagcttcattcttttcaacttacaatcccaagtagaggagtgtggcttaactgctgtttaccgtgccaactagggaggggcaactctttctcatattttaccttctaatcatatcacttaaaagaatggatacacatgtgatggatgtcttcttccatagatgatcttgtttggtagggatatataattattgaataataagaaattacaatcattccttttccagatacttcacttaattatactcctcagaatctaagtctgtagtaaatagatagtgaaatcaaagttgtagacttgtatcctcatctgaagtgcgaccttaggtcaatatggattgagctgcatcagacaacttttccttacctctgtttatttgtgaaaacttatactttgatctggtcttgcagttactgctgttgcaaacagccttc

SEQ ID NO: 89376 - DNA, 831 bp, Citrus clementina
  Intron number 1 from transcript clementine0.9_002107m (loc us clementine0.9_002107m.g) derived from phytozome v7.0 (c hr-ID scaffold_8; pos 2358806 to 2359636 reverse strand)
gtggcttgatcttattctctggataaagagtgaaggttccgttttttcttaattattttctattttgttcatttatataaaatgtttatattatattatactattagtttttgctttaaaaagtctgttgttgtcttctttaatattatgtttgcaagatgagaaaaaggtattgagaggagacaattttgaatgatttggatctaagtttctttcgatgagttcattttcataggttctgttttgtgagtaacctaacagtggtctgtaaacacttctcatgtggattccgttgcatattttaaaataacagattattttctcttctgtttgattggatattaatatcattatttttgtttttattattagtattattagtttgtttgtttgtttcattattttattgtgttgatggtagattctgggtttgagttgtttctgagtaaatagttatagatggaatttgagttaagatgagttaggattacattttctctctacgtattgaaagtattcgtaattgtttccttttattagagattgcattgaagttgtatgctttctacagatatccaaagttgataatcctggattatttacactttacaaattttaacttaaaatctgagtactgattttctgtttcgagtattgtaaaaaagtgtctggatttcctgatgtgcaatgtgcaagtgattttgagggtttcgttttactattagtagttttaaggagagtcttgagtttgcttgtaggtgtctgcttattgaaattttctgctttgtgtttgcagagtttggttctgtggacaacataaaatacaaacat

SEQ ID NO: 89377 - DNA, 428 bp, Citrus clementina
  Intron number 1 from transcript clementine0.9_004059m (loc us clementine0.9_004062m.g) derived from phytozome v7.0 (c hr-ID scaffold_12; pos 3820699 to 3821126 reverse strand)
agaattcgctaaatacagtcaattcttcgcttaaggtaatttcggtgattcttcttgtccacgcttttccttcagctaaatcgcaaacgagtctcctgtttttagatttgctcttcaatcttgaatttatcgtgatataaggtccctaccttactgtttctcacgttttttagcattatttctccttaattacagcatagcggattgagtaatgacttaaattctagttttcagatgaggcacattataatttcttttccttctattttaaaaatattttcaccatgttttctagtttgtctgtcatcactttttactgctgtaattaatttatatacttatgtactttgttaaattgatacacttttgattatttgtttgttttgtttctagatttcgagattcaaaatcttgttttgctggtcgct

SEQ ID NO: 89378 - DNA, 900 bp, Citrus clementina
  Intron number 2 from transcript clementine0.9_014462m (loc us clementine0.9_014462m.g) derived from phytozome v7.0 (c hr-ID scaffold_56; pos 1218138 to 1219037)
ttctgtctgggtaatttgccacttttgcatataaggtaagaaagttaaaattaattcttttttttttctaatcatatagttttataacatcctcgttttgctatattgggctaagtaattctgtgaaagttattgatttgcatgttatatgtgaatgattagatgagtgtatgttccttttgtgattgttatataatgtgaaacactttcttttgtagtgaacaatttataatgccttaattcttttaggatatacatgatccaaatttctgagttgaaatccattgagtcttttaaaatttcatccatagattgtaggagctggtgattttaatttttagcacgttctttactgaaattgacttttcgtggtctttaaattggagactgtccttaactctaagctggatttgatcactgaaacttcaggtttgatttaggtggtagttaaacttgatggtgcttttggtatgtcagaggatccagtatgttctgagaaagtaaataatgggtactttaactaagttgatgtaaaagaccatcatctacttgtttaatggctgtcttatttggctctattctatgtgggtgtaatttgtaaatctttctgttgtcatactctttgtaggcataccttataaattggtttttattatgtaccatggtattgattcatgcttcatcgcaaggttgtttcgatactagtagatcatgtttctcccatgtgtgtatggaaaactgaatacacgtgccccctcttattaattatatgcaactgcctattttatgaagcccttctttgattatggaggaactaacattattttttctcttctgtgagatgtccatttggccatcatcataccataatgcaggttttgagctggtttttgtatataa

SEQ ID NO: 89379 - DNA, 785 bp, Citrus clementina
  Intron number 1 from transcript clementine0.9_006478m (loc us clementine0.9_005948m.g) derived from phytozome v7.0 (c hr-ID scaffold_12; pos 4626931 to 4627715 reverse strand)
tcatcatcatcatcctcaccagtttactctgatcggtgagtttccctttctgtctacttctcctttcatgaaatatttgttgattcctactttccttttttgattctctgttaaagaaaaaaaaaaacagtcatttttttttcttcttttagagtgttgagattcggttcttagatctgatctgaaattactcgacttacatcagtggtcatgaactcttttgtttttgttcataggagtttgctgtccctctttttgtctctgagaggttcagaatctgcttcatttattagattgctgatcctgcttgatactgtttctaaattaagaggccacattatccgagtagcacttggttgttgtttccttagcgattatatgatggtgtctgtacatatccaaatgactaggagtctttcacttcatgtggaagttgtgatttgattcattcttgtgcccatacgttagccctcgacggtggtgtttagaagctaatctgttgttcatctttactattctcctttgtgttcaagggtattattagttttgatggggtgagtatagaagtgtgcaaagttagaagttctgtttttgtctgtgtacttatccaaatctacacaagtttatagctatgtttgttgttggttggggtttccatctattcatatgcatttatttctccattaatgattgttatttgcttttccttgatgaaaacatttatttttattttttgtttcttctttccagaggtagtcttaaatctccttggtcccgtcggagaa

SEQ ID NO: 89380 - DNA, 684 bp, Citrus clementina; identical to SEQ ID NO: 88609
  Intron number 1 from transcript clementine0.9_034832m (loc us clementine0.9_034832m.g) derived from phytozome v7.0 (c hr-ID scaffold_11; pos 1124773 to 1125456 reverse strand)

SEQ ID NO: 89381 - DNA, 816 bp, Citrus clementina
  Intron number 1 from transcript clementine0.9_017459m (loc us clementine0.9_017459m.g) derived from phytozome v7.0 (c hr-ID scaffold_54; pos 931620 to 932435 reverse strand)
ggcaaaaccctaaagagccgtttacaacaccccaagtaagttttctctctctctctttctttatcctcctctctttctctctcatccgccctctttctataatttgaatatatgggtccttttgtactgttaaaacttccatttttatacctatttttttcttttatttgtttgtgttcttatttacatgcttacatatttggaatgctattttctgacatgaacatgctaagatctatgattttgagtctcagattcgggggaaaaatgtctaatttgtagaaacttttcaattttggaggctatatattgcagatctgccgatgggttttcattggggttctgtttggttacggggaaaatgtgggaaaataggaagtggtttgaatctgaaagataccgtttttctaaccggagtctatttgtttgccatttttgttcatttgggatcattgaagtttccattttgttgtggatccaagaaaatggaaactatattgacatttttggatctccattttggctttcttaaggaaatgcaactttcatgtgggtgaaaactgtttcctttggctgatttttgtagctatggtatttttaaatgctaatgttatgttggatccgagtttgataaatattttcttcttggatttcacttcacattttagaactttatttgatgtcttggctttcaagcctctgttttcttttgcattttattaatatgaggctgacatcttcaatgctagatctgttaagattgtgagaaaatctaatttcttgcaccatattgttgctgtaaatttgtagcttttc

SEQ ID NO: 89382 - DNA, 508 bp, Citrus clementina; identical to SEQ ID NO: 82290
  Intron number 1 from transcript clementine0.9_026598m (loc us clementine0.9_025654m.g) derived from phytozome v7.0 (c hr-ID scaffold_121; pos 290627 to 291134)

SEQ ID NO: 89383 - DNA, 356 bp, Citrus clementina
  Intron number 1 from transcript clementine0.9_007835m (loc us clementine0.9_007835m.g) derived from phytozome v7.0 (c hr-ID scaffold_21; pos 1602337 to 1602692)
gccgctcaggtatatgtataacgttaatcaattaatttatccatgcatatgtaaatgtgatctttcaatctgagattttcttcttgttgatttctctatagttttctcttttattttcaagattaattaatattaatatttgatttttgaaattttcatagattttctttttcaattttgagttttgatctatatatcttatcttatagtatcgttttcctctctctccgtttgtggcatgtccgtattagtcctgtcatcacatgtttaataatgttctaatttgaatttgaactaaatttccgattctttcttttatatgtgttgatttcaacagttacctggaagaactgata

SEQ ID NO: 89384 - DNA, 881 bp, Citrus clementina
  Intron number 1 from transcript clementine0.9_017426m (loc us clementine0.9_017426m.g) derived from phytozome v7.0 (c hr-ID scaffold_60; pos 274665 to 275545 reverse strand)
gtcataaccctatcctcatcgacgaaggcaaaaaagtaggcacatttttagacattataatcacttaattcctttgattttctattttgttcataacccataatttattatcgtttgattttaatgtgtggttgttaaatcattaatctgaatttctgaattgaaactgatttcttttaaaacacctaaaatacagttttaattatctagtttccgtaaagatcttacagcatttacgctttgtttcggtagaatttaactgtatttgttagaattggtttggagaccttgatgtgtgtttcggtgctgaatgttgtttgttgcttgtaagtgcttgtgacaccaacaaaagcatgttgtttaattgaatgaaatcactggaacggtcttctgggttgaaaaagcgcttttacagaaagcacttgttatgtgtctctgaaatggtgtaaatggtgttttattttgtagagaaaattttaacaacgttttctgaaatatgctgaaatcaacaataatatattttgggagtcaaaaagcagttgggagtctgaaaagggaactagatttgtctttttcttgagagacatttgataagtgctagtctagaatgtgctttagtactttggcaaaagtgttttaatttgaaagtcatctgtccaatgtgctttagtgctttcacaaaagtgttttaatttgaaagtcatctgtccaaaaactcctctaaacactgtcgaaatgccttttttggaaaaattttaccgtaattttcttgcggtttatcttcttctttccttaatttgttaatataagccatcgtgcatatctaatgttgacactgacattgaacagagcttttcattggacaagcggagtgggaagaa

SEQ ID NO: 89385 - DNA, 823 bp, Citrus clementina
  Intron number 1 from transcript clementine0.9_006340m (loc us clementine0.9_005737m.g) derived from phytozome v7.0 (c hr-ID scaffold_35; pos 1370206 to 1371028 reverse strand)
acggtgaccacactgctgtttctgctcttgttcaggtttgcgcattgcttcaattttattttcatttttatttttttattgtgctattattgttttattagtcattaaattagtcttcaatattagcagaaaaaacttttatggcacgttatgtgatattcatcaattcgagatgagaatggagcaatgaactattctgaaactccatgaaatacactgttcaattgattagtgtagcttaacttcgtattcatgacgtgtaattaaaatgaataatgtctttaaaatgaatggacatgtaatgactgtagcatacatatttcccctaaatattgttggatgttactcgttcttaccttggatgggaaaaaaaggaagagttttttaggcaattatcatatcatcaatgtattttttctttaaggattgtgaattattggcctggattttaccaagtatctgagcctccgtattattaagaaaaaatatatacaattatgatcctaggaaaggagtgttttatagtcttttgtctattttggaagaggactggttttagtaactaaggattgtcaattatgggtatgtatttggcaaaatatccaagaaaataaataaataagtatatacacacaaaattttgatcttgggaaggatttttctagtttttctgtcttgcacttctataagtttctaattgttatgcttcaatgatctgttgatataatcgttttgtagactaggcaggaattacaagagttgttgttggaatcaggaatcctttgcagcatcttagaggccaagctgtacgtgcattaagaag

SEQ ID NO: 89386 - DNA, 650 bp, Citrus clementina
  Intron number 4 from transcript clementine0.9_029003m (loc us clementine0.9_029003m.g) derived from phytozome v7.0 (c hr-ID scaffold_115; pos 116192 to 116841 reverse strand)
gctctgcttctacgtttgttattcgtcttctgttggtaagaatatttaataaatttatttttatttaatcatttacaatatatttattaattgtaaggtagtaaagacttttgttagttcttgttctaattttattgtgtaagattaaattattgttaggtcagatcattgaattctagtaattaaatttttaaattgattattaatagatcaaatattagagatagttatttcgatgaaagaaaagaagaaatgcaggaactaaatcaaatggcttggtttagtgggttatcaagacaccactttgaaataagatggagaagggatttatattagattctatagctatttacattgaaagagaattatagacactattgattcaaattcaataatagataaatttaacgctcgaaagtataccaaggcacaacttaagtagttgttaaatgtaattgaattgtttttggattcgatgtattttcttatatattaatgaaattttcattaagttttatatttttagttgcgataatagttggacttagaaaaaatttaacccacccaaaatttgttttttgacttcgcccctgattggagcctcattggttctgccacagagattcaagcagctggaatccagttccgga

SEQ ID NO: 89387 - DNA, 711 bp, Citrus clementina
  Intron number 1 from transcript clementine0.9_007945m (loc us clementine0.9_007945m.g) derived from phytozome v7.0 (c hr-ID scaffold_16; pos 1561253 to 1561963 reverse strand)
tgatttcttctcaattctaaagcctctctttttaggtgaattttttcaatctctctttattttttgcgttatcattcattggcccttttgtgttttcattagaactagattgcctggaatctgtactttatttgctatattctatcagtcttatgagattctatggatcatagaatattggttttttttttccccatcttgtctatggtatgtttggttgatgagaaagcgtagagaaaagataagaaataataaatctttaatctttaattagtagatgttgtaaccctaaaaaagatcgatactttttgtaaattgagtttaatccaaattatttgggttatttaaatttcattacttttgcgttttctctgcaacaaagcagtaggttgggttctttgattttgatggatttgattttcgtttttgtttcaggttggtgttgaccttacaatgttaaatcctaattgtttggtgttctctgaattgcttgatgaatctttctgagtttttgtggtggggatttgtgagtgttctgatcatggagataaatatgagctctctttgtggttttgtggattgatagataagtttatatgatatatggcaatatggcagatgaagaagtgtgtgatttgcttttgttgactgttgtctgacgaaattacttacaccccagaagcaagagaagagaaaaataagaaaaatata

SEQ ID NO: 89388 - DNA, 700 bp, Citrus clementina
  Intron number 1 from transcript clementine0.9_005705m (loc us clementine0.9_005705m.g) derived from phytozome v7.0 (c hr-ID scaffold_12; pos 4415085 to 4415784 reverse strand)
ggagagacggatcctagagttggagagacttgcaggtttctgttttttccttaaaaaaataaatcttttggttggattttatgattctaataaatttcgtaatttgaaattaacacatttacaaagatttggagtgggaatttgtcttttttgatagtattagaaaaacaaggattagtgagaatattcttaaaatttcaaaaatttgggaaactcagtgttttcttaggggaaaaaggggaccgcaattgtgtcccaagttctgttatgattgttcaattactgtagtgaaatgaatgtactggaatggttaggtggaacatttatgtttggtttggatctgtggaatcttgaagaaatggaaagttgaaattttgaaattgactgcatattaaggtttgcattatttttacagtttcagggttatgcatttgcagctttttgttgcagtgcacaaatcaatcaaagatctgagaagcctttgaaagttaatattgctgtttgttaaagctgaaaatttttatgggattaagttcttgaatatttcactgaatgtttaatgttggctgtacattgcttgattaaattaatgtttgcaattcagaaggaaaagtgatattacattttttttttttttttgggagaggaaaagtgatattacatcttgatacttaatataacagatacttggccgaggctc

SEQ ID NO: 89389 - DNA, 834 bp, Citrus clementina
  Intron number 2 from transcript clementine0.9_022822m (loc us clementine0.9_022822m.g) derived from phytozome v7.0 (c hr-ID scaffold_8; pos 1488145 to 1488978)
aatttcacatctcccgatactattaaaagaaagtaagctttcctttttattaatatgtattatttatttcagtattcggctttgttctgattcttgagttttttttttgttccaattgctatttctaattcttcttgttatggtttgaattttgttgctattgtgtatgctaacacaatttatgatttgccccttgcattatttcgagttttgttttatacctgaaattagatgccataatgcttaaactgagatgtgtttaggatcaaaacgtcttatacttgatgcttctaggcatctgatgtggtgttctagagactgttattttagttaactacgattttgattaatggatgcgttggggtaaaagacccttatttttctgattattcatcagtaggtagaggctggttatagtattacaccaatggtcaaatattctaaagagtacattgaatcacaaaagtcaaattgatcttgaagatttcaggatgtggttgaataagaacatatgcatccatgtaaattggatatttaaattggagttatctaggatgtgacatttttattgtgtagggaacataggagcatccttctccaaagctaacaatgcagtttagatattccataatctgcaaaatatagggttctgtttaggatcgaatagcagcaagtacgcatcagagcggcatattttgttaagtcccccaacaaccactgcacacccccccccccccccccccggggggctctttttccaaatatttgacttttttccctcttcatttagtagttataatgtgtttctctttgtgcacatgcagtgtggtcgta

SEQ ID NO: 89390 - DNA, 654 bp, Citrus clementina
  Intron number 1 from transcript clementine0.9_030718m (loc us clementine0.9_030718m.g) derived from phytozome v7.0 (c hr-ID scaffold_35; pos 1092369 to 1093022 reverse strand)
actcctctttgtctggctgccaatccagtcttaaggtatcaataataattgttatcatgcagatagaagtttgagaagaacatgtagttctcaaaacactcagtattttagttgcatttcttttgattgttttactgtcactgttcatatctagtttagataatttctgtggtttttgaacaacaggacaatgctataactgtgatattatgaaacattaatgatgagtctactatgttcacttagaaacttggatacattggtgagtatactatgttcagttagaaattaggagacctgaatcataaacatttaaatgggttagagctatgaaaatttttagattattttctcatcttcttgtttctcgctgtgttactttcatacagttttcttagtaacacgttattgagttgggggagatgttgtgatgacgtttgattacactaactcattttgcagatgttggtctgattgggtggatgatgaatctgcaatggaggttgctctgataattgtgtgtgttaaaagctttatggagtttatgaagcatattttcttgcatttgaagtgggtatgtgaaggattttaattggagactatatcttacattgtatgctatttcttgttatcaggagatcctctgtgatacaa

SEQ ID NO: 89391 - DNA, 645 bp, Citrus clementina
  Intron number 1 from transcript clementine0.9_021652m (loc us clementine0.9_021652m.g) derived from phytozome v7.0 (c hr-ID scaffold_12; pos 413590 to 414234)
cgtcgcggcatttgccggccaattttattggctcggtaagttttttcttctttttcttctttattgtttttaatcttgtatatatatatatatatatatatatattaatttattaagtatttaaagtgattcaagatatgtcgataaattttgaattttttaatttaatttgcgattatgaagtaatgcatgattaatttcgaattttaagactatgtagctcttttttttttttcttttcatctgtttggtctggttcctgactcctgagaaattataaggaaaaacaatttttaaacttttaatcatttatcatttacttcaattgtttttctctctctctctctttttacttcttttttttaattattttacaagtcaaatgtatcttttattttccttgaatgattatgtaagcaggatttaattcaagattgatggaaggatttccatattctatattatccgttttattttatatcaaccagtctttgtatatatttgattatggctgggtgtcattttcaattatttattgcaaatatgatcagaactttcttttgctgctcagagttatttattattatactgatgaaatgaatttgggcctttttttgtgtaaatttgtaggtttgagagacgaac

SEQ ID NO: 89392 - DNA, 971 bp, Citrus clementina
  Intron number 3 from transcript clementine0.9_028504m (loc us clementine0.9_028504m.g) derived from phytozome v7.0 (c hr-ID scaffold_16; pos 310898 to 311868)
gccaatataaatatttgtcacgaaaatctggtaaccttcatggtggttgcatcgatgggccctccagaattcttgtttatgactacatgcaaaacggcagtctctctcaaacgtttcttggtacaatataaattttccctctatcttttatattaggatatgtttgagaatgttaacatgttgttacttaattgaactagcatccaacttttccccttcaggatgaatggcttttttccaaatgtaattctcacgctctgatactatgaaaattttttgaaattgttgaatgaaaactgaattagttttctctacttttattcaatcgatacagtgtttatatacatgaagatgtgcaatttttgagtgattatttgaaacccgtggcagcagatcaaatgtccgattgcccacatgattctttgacgggttgatgcttgaattgtggagttgatttcctaacaataatctgtccctatttatttaatgatacgtgtaatgtgtcatatattagttgactctatatatcattcacaattaatatgccactgttttggtacctagcattagatgaggggatacaaacgatacatcttaattatgtaagtataatattactcatttcatcgttgatctatagtcgattagtgatgcaaatcagtcattggactggtgagcaccacttcaagcttccatagaggctctttttcttttcacaaaactatggaaaatggataaatttatctcaatatatgttgtcagtgggagtaaagtttatcagcaaatttatgggctgtaccacaaatgcatgtataatttatatctttagatagtaactattccaaaaaaatattagtgatgcaaattttgtaattataattttacaagtgttgcagtatactcatattgtttattgaattaaccataggtcagtagaaaaatagagttaaatttaactggatagcgaggcg

SEQ ID NO: 89393 - DNA, 650 bp, Citrus clementina
  Intron number 2 from transcript clementine0.9_001393m (loc us clementine0.9_001393m.g) derived from phytozome v7.0 (c hr-ID scaffold_12; pos 3413841 to 3414490)
ctaccatttttaagatttgaagcctcgtaagttctcagatctgaattatcgttggaatgttatgttttttctgttgtattgagatgttcttcagcattctttgtatggtgaatagcttctttagatctgtgtaatgctctgtgcttatgcttaagatatggcagttacagtgttttagttcaagtttagtatatgtgtttcatggtttttaatgtttatgacttatttgaattaggttctgtggatcttacgagcataatagttgcacaaatttctccgcattattgctttatagatttctgaatttgtaatgcttccataaataagaactttttgtcattcctgcaatttcccttttttgcagtattgttaagccatatcagttaattttcaggttccccaactttgctccttatggcttatatagatgcgtaactgtatattgatttttcattcttgctaaggataaaatgtgataatgcttccctttgtagtcatagtggaatttgttactagaatgacaatgccacttttgtaactgttgatactgatcattatggataaactttcactttttactggaactttccgttattttctatttgtagggagtttcgttactaattaatgctactctctctattttcagt

SEQ ID NO: 89394 - DNA, 308 bp, Citrus clementina
  Intron number 1 from transcript clementine0.9_026735m (loc us clementine0.9_026735m.g) derived from phytozome v7.0 (c hr-ID scaffold_91; pos 20108 to 20415 reverse strand)
gcgtactgtttggctcctgtatcaatctcaggtatcttgcgtttattgtttctgatttttcttttggatttgaagtttcaattttattttatatccaaagattaaattttgtgatttctcgattaagaatcggattcacatttggcaacttgacgtgtcgaattttaaagtttgtttttgatctaattttaagtttgaaatactggtggaaatatttttacagaagggaagaattgtttgtatctgatcatttgcttttcggttctgtgaaaggcggatcgcatctcaaggcgcgtgagttgtcctcc

SEQ ID NO: 89395 - DNA, 1061 bp, Citrus clementina
  Intron number 2 from transcript clementine0.9_010272m (loc us clementine0.9_010272m.g) derived from phytozome v7.0 (c hr-ID scaffold_16; pos 4039083 to 4040143 reverse strand)
gaggcccacccaggcctctcaggcgatttttacaggtagaatgcttacttttcctgaatcattcattaattctcctcatatgtagtcattgttttacaattaatttatttaagctgctgttgattaactaatcctagcattaaattcactgttaaattgattttatataatcttttgctagatatttagctttgtaattttcctacttagatgttattattaatattagcactgaatttgatgatgatggtttttgtgcttttgtgcggtatactagtaacagtgagtcttcagcctagctggttggtaccgttaaagctgatcaaactccagtttctttttatttattttatgttcttttgacttttcctaaagctatgggccaagggactggactgaatagcttgttcgatttaacgtattgatttgccccatttcttacgccactttgagctttggcccactgacgctcatcaagttctagattctctgctcggtcttgattgtttttgttattgaacttttgatatatacatatacggataggtacatatatctatatatattatgtagggttaaagatcatttcacactttaaccatagtataggattctaactgatcattggattcaaattcaaaagctttaatttaaatttcgcactttaactaaagtacagaatctctaattaaatcttaactcattatgtatacataatattataaaatttaggatgttaacaggaaaagaaaaagaaaaaagaaaaaagaaaagaaaagaggtttataacatgaaaattgaaatgatggactcttacagttaaagaaataatgattttttggtccaccatcatggaaaaagtcaacattcaacaatcttgtagtgtaaaacagagaaataaaaacatcttttcttgccttgtaaaaacaagaatgatgatgtcatgatgatgatgatgatgtttttgacatataatgctgctgcccaaactcatacttggcttaatttgctctcaacactcaacagggtcttgatccaaggtctacggcaaatttattctc

SEQ ID NO: 89396 - DNA, 518 bp, Citrus clementina
  Intron number 1 from transcript clementine0.9_028720m (loc us clementine0.9_028720m.g) derived from phytozome v7.0 (c hr-ID scaffold_16; pos 1287984 to 1288501)
aaggtctgttcttttttttttatgtgtttgtttgtttggtttttttttttctttttcccgagttcaatagaacgcggcgtttattttggaattgttgtttattgaattttgtatgatttttctgtatgcataaattcagttgcgttgttggatactcggttgtacgttttttttttttttttgtgttcgcagtttcaatttataatttcaatggttctactaattgagattttttgtcctaattttggtgaaatatttgaaaatttgggtttatggggttttgattgtagtcttttttttttgtggatttaattggctgttgaaaacggttagacactattcatcatacgtgattgtgcttttgacttttgattaataaggtaaatttcgatcgatctgctttaatgatgatttgtaattgttgtctctgaaataatatttaaatttgcttatttcttatctcattttttttgttttttgcagttacagtaaccaatcgggctatcacagcactgaaa

SEQ ID NO: 89397 - DNA, 957 bp, Citrus clementina
  Intron number 1 from transcript clementine0.9_012414m (loc us clementine0.9_012414m.g) derived from phytozome v7.0 (c hr-ID scaffold_8; pos 3735407 to 3736363)
ctctcagtttctctggtcacactttttcaaaactggtaagcactagcgatactcaaatttctttttaaacttattcatctagaaaatcacatgacacgcatgtttacgttgctcaatcatctttgatacttttggattctaattttcttggcttttcttcatctaaaattgtgttctaataccggaaaaaataaaaattaatttgtggtttctatgtcagggagaaattattgagaatattgtatatgatcacaaaaaagaaaagtatttggcaatattaaccctattagaatctgttagcctggaaattcattcttctgaagaaaatccagtcgtattaggttctctgcatgtttatgggtcccgaacacttatttttacttggcttggagcgccatgggcaatgtattcgaatacaagtttgcttttcgagtttaacggatcaaagaaaaaaatgaactagtaaatagattctccgtgatcttttaagttatttttcttgttattatttttcttcacctttgttaacggtttctgacacaagcagaatctgtttattcataagcttgtgagtgaatctcagtaatattcggaatgatgagtggataatgtaatttcagcgaacacatatgatatgatgatctctttcttcatcgaaaacagtttagattgctaaataggggcaggggaggcagttggggattgttcttatgatcaaaagtttcgtaagaaatttaaaagaaagttgtgacgtgcagagcatggatttgttttagttctatgtgaactacttgatagatttttttgctttgctcaagtttcacggagttcagatgtatcagaactgtagagtagtgctttagtaccaagttttgctgttctttgttccttcaaatttcagttttgtgtacggtggtgaaaataactgacatgtctaaaattttctatttctagcca

SEQ ID NO: 89398 - DNA, 391 bp, Citrus clementina
  Intron number 3 from transcript clementine0.9_017285m (loc us clementine0.9_014341m.g) derived from phytozome v7.0 (c hr-ID scaffold_16; pos 427280 to 427670 reverse strand)
agcctgagttaaaagcaccccagttcaatcctttagctgcaaaagcagccaccatcagtctgtcgtcctttggacctggagggccattcagttttgattcattttcagacaagtggaagaaccaaaagaaaaagccgtcgaaaccctccaagaaagagtcttcttcaaaggtagaacccacttgcatttggcaaatttaataaacaataatatggcttctgaaaattaaaatgtgaagactgtcgttatttctccctgaatgcggatttcagatttcttctttggcggtctcttgacatgtttatacgttgatgtttcagggaggagactccaatcatgaggctatgagcaatgagtggctgcaaactgggaactgcccaattgctaagtc

SEQ ID NO: 89399 - DNA, 1053 bp, Citrus clementina; identical to SEQ ID NO: 78195
  Intron number 1 from transcript clementine0.9_014641m (loc us clementine0.9_014641m.g) derived from phytozome v7.0 (c hr-ID scaffold_102; pos 656702 to 657754)

SEQ ID NO: 89400 - DNA, 391 bp, Citrus clementina
  Intron number 1 from transcript clementine0.9_027463m (loc us clementine0.9_027463m.g) derived from phytozome v7.0 (c hr-ID scaffold_21; pos 3891973 to 3892363)
caggccgttgattttgaccgtcaatttcctaataagtgagtgcagttcaagattcattttctctttattttaattcgaagataattgatttgagttataatttttatgtgacttgtttatttcatttttgcgagaaattaaaattagctgacactcaagagtagaaagatttgtttcattttttgctgaattgattaaagccctaataactgaattaaatttagcattaatctctctccgtgaaattgcttagaaaatcaaaattgaacattataattgtaatctgtcacaactgaaaactcataatcaaacatcaatatatgtaagcttaataatacgattgattttaatttcaggagtagggattcaaattcaattccaattgaatccc

SEQ ID NO: 89401 - DNA, 636 bp, Citrus clementina
  Intron number 1 from transcript clementine0.9_032440m (loc us clementine0.9_032440m.g) derived from phytozome v7.0 (c hr-ID scaffold_13; pos 1720799 to 1721434)
gctccaatcccctcaaaggtatcaattgacatttacttttcttttatacctgtaccattcaatgatgtgatttactattcgatataaagggcaaatgacattttcatctctattcaaatttaattttatcaatttgggtttttgaaacttttaatatctcatttcctgcatggtgataaaatagtttaaaagagaaaaaaaacttctattgttaaagaataaatgcaacctttttacgtacagattgattataagaaaccactatacatacatattacaattagttaatttctttggtgaagaaacacatttactctttagtactatgttttacatatattttttttttactatttaaaatccatggatgaaatgaaataggaaaaaattatgaagaacccaagtaataaatacaatttataagagaaaataaacatttaaagtttgaaatattattaatttcaaatattttaaaaaatttttagttttttaaactaatatttaatttttaaatatttaattatgaatagaaaaaataaacttttataacttttattttcaccactagctttaacataaaacaaaagaacttgtgctgtatgtataattgcaggtgttactgtgtctctgacttgc

SEQ ID NO: 89402 - DNA, 522 bp, Citrus clementina
  Intron number 1 from transcript clementine0.9_025398m (loc us clementine0.9_025398m.g) derived from phytozome v7.0 (c hr-ID scaffold_52; pos 585589 to 586110)
gtgattccaaattaaacctaggtaataactctcttcttcattaatgtctgagatactttgtttttgagtcgcatatcgttattgttttattccagtccacaggtagctgatggactggaatcactcgctgtcaattgggtgtttgtcaaatattttcgtagttatgcttttaaactgaaaccgaaactcatattgaggcttttactgtagttacaaacataccctcagtttgttctttgttgggtctggattgattagggagcaggttggattaatttagtttatggccaaccttcttatatcatcgttaaaagggtcacgattacttttgtctcacagtataggttttccattccacggaatcttgtcagtcagtgtgtgtagttgtatcttgcttgctgcatcgctagaccgggaattcgcttaagaagaattgcttatctccttgttaattcaggccattttatgctgctgttcgtagttatactgaatattaatgcgtaatctaattgcaaaacagag

SEQ ID NO: 89403 - DNA, 478 bp, Citrus clementina
  Intron number 1 from transcript clementine0.9_009950m (loc us clementine0.9_009950m.g) derived from phytozome v7.0 (c hr-ID scaffold_8; pos 1601512 to 1601989)
ttgctattaagcagcttaatcgtcaaggtttccaggcatgaacccttttcagctctttgaaaaatttgaacattgtatttttatttttttgtttttagtcatgtggggctgtttaatttgaacgaaaaatgaaaatagaattttattatttctgtccaatttcagttaattggtatttgccagttctttaaatgttggatcttgcttttttatgtttctacggttcattttatttttttcgaagaaagcattttagcctttcaagcgttaggaatgggacataattatttctctcaatcacaggttaaacttgtgtagttttatgggaaaaaatttgataaaatatcgatccctatttatgttgaatgtataagtttctggaaaataagtatcaagactgaagtgtaattttggtggtttcgaggttttgcttatggggttcttctgttttgcattctagcatgcaggggcataagga

SEQ ID NO: 89404 - DNA, 884 bp, Citrus clementina
  Intron number 1 from transcript clementine0.9_023832m (loc us clementine0.9_020939m.g) derived from phytozome v7.0 (c hr-ID scaffold_121; pos 240592 to 241475)
ttcaaaagtttcgaatcttcaaagattctagttatgtaagtacctacgacttgagggaacgacaactttaatttatcacattacattacaaaaattcgagactaaaacgattccgagaagaaaaatcaagataaaatagatggcgtttcatcttcttcttgacaaattaaattggtttccattaagcaacctctgcatttgagaattggcattccgagaagctggctacatattattaaagaaataataataataatattgatgaatgaaatacaacccgtaaagggaaatggttcaaaattgacttgaattttgttttactaacagaatacaccactttgttgttggttgtttatgctattcaagaaagaatgaaactgggttgctttgtgtgtaagcgccccagtttggtactgtaatcattggagtgggtagtccataatcaggcctatgaacggacgccgggactagcatatcagtttctcatcacaattcaacaacacaaaaagataaattgactttataaagtgattaaatgtcttgcttcctcaaaataatgacgaaatcattggcatgcgtctaattaatattcttctctactagtatagccttcacctgcagaagctgaaaacttcatctcaattgagaatgcacatgcacattacttgtgttgtcgagtgttgagagcggtgatgctaactgtcataatgttgaatgttctgattcttgatgctcatagatttgaaaaaacaaactattgatgttctatgaaatttcttctcgtcctgaatcttaagtactctgagcaaactattgatgcattcttgataagtggtgtaagtaattgattgtttttcgacatacggatacaggaaaccccgcaa

SEQ ID NO: 89405 - DNA, 893 bp, Citrus clementina
  Intron number 1 from transcript clementine0.9_010003m (loc us clementine0.9_010003m.g) derived from phytozome v7.0 (c hr-ID scaffold_87; pos 254116 to 255008)
acactggtatttttaaaatttttatttcttttctttaatttttattcgttaattttcttctgtagatgttacgttggtgtaaatcgtgagcgagctattaacctttatttaaataagatattatattttatgtcatgttgtattgtattatattatattattatatgataaccatcattaaaggggattgaatatgtttattcgctagttttgcaaggtataaagtttgattatgatggatccatttttccttcaactgctgatgacttttagctgctgattttttttttttgggaatttatcgtatatatttgtttgtaaaaagattattagatttggtccttataaaattctttttttattattatatgcgcacaaagttttttaaaaatcatttggttaggggtttcggtttacagtaactttttttaaaaaataaaaaataatagtaaccccaaaaatagtaaaaaatctaaaaacgacaacttttttataactattttctgtgagattttctccaaattatatttaaaaaatctaattgtatgctaatttctaaaaaataattttggatggcaaatcaagcttcccctgagttttattgttaatatatattttgtcccatctctttatagttttaaaaatggtcaacctcatgttctaaacaaaatacactgaggaatttttgttcaataaataggactgcaaatcaaattctccctgggtcaataagtcatcttttgctctttgggtgatggaaattgtctttagcattgttattttaagtgcactttagatatcattttggcctgccctacaagaataaaatatgctccacatgatcctcttagcactactgctgatttatcaggagcaatatcagttgtctacgg

SEQ ID NO: 89406 - DNA, 600 bp, Citrus clementina
  Intron number 1 from transcript clementine0.9_034049m (loc us clementine0.9_034049m.g) derived from phytozome v7.0 (c hr-ID scaffold_91; pos 437823 to 438422 reverse strand)
attatttgagtcacttatcttcaatcttcagcaaggtgacttcatttattcacccttttttattttaaatttcgtaatcttgataataaatttaatcacccaactcgctttttgtttatgtccatgagcttgtttagatacatgatgtgattccttgaatttgatttgaatacttttactgctgcagagaaggggatttagtggttgttttgtaggctttcttaggtgttttttgttactctaattgttttgtaggctttctcatgtgctttttgttactctatatatagtatataacttgagagtctaagtacaggcttgtgcattgcttggtaaagatgggaaacttgggcctgcaattttgtttcttttcctggaggctgcatcagttgtgctggatttttttgagagaagcaagtgggcttctcttgctgcatttctgttgtcagcatttggttttgctataaacatttatgtttgttatctggaaaaaaccagcacagaaatcaaaccaccagctgagaggcaacttgggatagtggagattgtcttctctgtactccagttgattgctacattgattcactttattctattggc

SEQ ID NO: 89407 - DNA, 528 bp, Citrus clementina
  Intron number 1 from transcript clementine0.9_028598m (loc us clementine0.9_028598m.g) derived from phytozome v7.0 (c hr-ID scaffold_8; pos 1802274 to 1802801)
tcagcctgctcctctgtttcctccttccacaaacggttagttatatatacatatacaaacacacacacacacattgaatttgggtcacggaatttatgaatatgcttttatttttttaagctttttgtttctcaattcctcctgggtttcgtagttcgtatctttcttttaattaataattattttagtcaggttataatttttgttccaagctgtcttctttacatgcaaatgggctcgattcttgcgttgaagactgaacgtaaagtggctcttatctagtggtcgttttctagtaacgtgtttaagatattgttttagccgtttgattgcgtgaagcattttgtttttgcttttctcactgccaggcctcgtctccatccaactgatttgcttcctaattctttcaatctccttctctttgcccttcaacattttatttgaacacttcgagaaattaaagagtctaacgtgggatttttcctttttcatgttcagtagtttgtgggccatattacttaccaagga

SEQ ID NO: 89408 - DNA, 185 bp, Citrus clementina
  Intron number 5 from transcript clementine0.9_015658m (loc us clementine0.9_015658m.g) derived from phytozome v7.0 (c hr-ID scaffold_87; pos 798408 to 798592 reverse strand)
tacaggtaattaaaaaagaaaaatatcaattaatcaaaaatcataagatgtttattcttcttatcagtatcatttgcataatacaagttcttttttttttttcttttttttattgatgaggcataatacaagttactataattaatcttttgattttttattttttttattttttggtgcagtgg

SEQ ID NO: 89409 - DNA, 433 bp, Citrus clementina
  Intron number 2 from transcript clementine0.9_024761m (loc us clementine0.9_024761m.g) derived from phytozome v7.0 (c hr-ID scaffold_8; pos 2635531 to 2635963 reverse strand)
ttgacaccaggtatgacaagaatgttccttagctcgttagcaacatattacgtatatataagtagccttttgtaactttttgccactttgatttgatttgatttcggatcaacacattgattaacaatgcaaaataggagcctctccattagatatcaaaataagtttttgattgagtgcctaattaatttatgacattatcttattgttctttcctatatagtctttatctagtactgacgttctcaaatttttttttatgtgaaaaaatttttaaaccatgcagtttaaaaaagtcagattttaatgcttacggcttgacaggctgagaatgattgtgtatacacactcacctatacatatatagagttacactatgatacactttttgagtacagcaaaaacaagaaagtactggtgcaaggagctaaat

SEQ ID NO: 89410 - DNA, 729 bp, Citrus clementina
  Intron number 1 from transcript clementine0.9_002985m (loc us clementine0.9_002985m.g) derived from phytozome v7.0 (c hr-ID scaffold_104; pos 606584 to 607312 reverse strand)
caggtggtaattaatatatttgatttagtgttttgcaaacgttgttcaagtgcgtttttgtgaattatgagtgcttttgacatttgcatgtaattgacattttaaagtgctttaccggaaaaatcacttgacaggtgcttttaccaaaattgcttaaaagaagactcccagacatatacccttcatatgcaatttccaatagccacttttaacttctatgattaaagtggttttactcaaaaactctattttttttttttatttgacaaatacttatttttgttggtttctgctgaattgcagtagttgatagtgtggtttttgttgatgggattagaaagtaacctgttagagcatcttttatgttgaggagtggattctaatttttataatttgtagaaaatcttagggtggtacttgtggttagttcactctagggttggggaaagatttggtgtatacaagaaagaagtaaagatgttatgtggatgaaaagaaattgaaaaggtttctgagacaataagaagtgtaattttttggatacggggaagcataatcagtgttattaaagcgtgtttactgcaaaatgttgttattgcttgctagttgatttttgtaacttgcgtatcttcattaatgatttttcatgtgattgatgcttcaaatttgttgacaatatggttgttagtatgcgtttctttctctaatttttaatacttctaccagttc

SEQ ID NO: 89411 - DNA, 633 bp, Citrus clementina
  Intron number 1 from transcript clementine0.9_004882m (loc us clementine0.9_004882m.g) derived from phytozome v7.0 (c hr-ID scaffold_11; pos 327308 to 327940 reverse strand)
gccagtttgtccggctttaattctcttaacatcaggtgaaacgttacctttaatttctcatactaatattcaacattgtaaataaaattcacgcagcactcttagttaaattttccagatgataaactacacttttaaattttttcatgcatcaaattctagacttcttgaacttccccacttttgaactcctataaaagaatttttgcagaattaataataaaagctccagaggtttacaatatattttaacaaaattaatggtgttctgtcgttttttaatcaatttcaatctcttactcatataccattagggaaaaaaaaaatctcttccacatataacatattcctgtaattaaagagttattaatttatagggaaattggaaatttccttactcaaatcaatatataccacttattttgactatttttacaatatttaataactctcctggagtcctggtaccatcactttgcaatattatccttatgaaaaaaaataagtggtatatattaatttcaataggaaaactagcaatctcctttatttcaaattttatgcaaatcccttctatttgaagttactgctgctaattttatgtatttggtaggcctgaatcggaacttataa

SEQ ID NO: 89412 - DNA, 1018 bp, Citrus clementina
  Intron number 1 from transcript clementine0.9_034173m (loc us clementine0.9_034173m.g) derived from phytozome v7.0 (c hr-ID scaffold_12; pos 1125712 to 1126729)
tcgttaaaaaagagcctgtggagcctgaagaggttcaagacatatttggtcttgcttttctctacttcatcctttttttcactgaaagataaatactgttcctttctcttaaagtttgaccaacatgcaattgattttgtgttctgtctaagaatattgttgcatgaattaaaatgcaggaaatttgccacagctcatcaaggttgaacgtggcctgcgttatgatatgataggaagagaatatggaatttctcaggtggtgaaaactgaaactcttgatttagttcctacttcctatattccctgtgcgacgccatcagatggtcaaccttttcttgtaagtttttgattaggtttgtactttttctgatcagtatggctgataatgattgctcatgtgacacatcataccgtcaattatcgatcgcaaaatttgttctgccaagacaacattattatattatgctttcctgtggttctgcagaacccctgccacttgtctttcttgtccttatgctttctaaggtccatagcattgtcctttcttttcacgattggttgcatctggcatttatgctggcagtatttgtttgagaaaatgtgcgagcaaaatatctatatttgtttactgggtttctttgtagagttgtcttacaattttttatgatctataattcactaatttttttgagtttgtcggctgtttttgtgatgcctgtattctcaattgtgagtgaatagattgaacagaaaataatgaaatactatatatccaataaagcagtagtacagagaatttgcaaatcatttcatttgttgcctcgagcgttggtatgtaaccaggctttgtatagctacagttccttggtgctggaatccgaatgtacatgcaatttcctctttcaatgcttccagtttactgtgtagatgatactgggtgtgagctaaaccttgtttgtatttcttctgaaccattgaactaattacatttgtctttcctattgcaggagctatcaac

SEQ ID NO: 89413 - DNA, 316 bp, Citrus clementina; identical to SEQ ID NO: 79090
  Intron number 2 from transcript clementine0.9_008456m (loc us clementine0.9_008456m.g) derived from phytozome v7.0 (c hr-ID scaffold_8; pos 3216723 to 3217038 reverse strand)

SEQ ID NO: 89414 - DNA, 978 bp, Citrus clementina
  Intron number 4 from transcript clementine0.9_000969m (loc us clementine0.9_000969m.g) derived from phytozome v7.0 (c hr-ID scaffold_44; pos 1520043 to 1521020)
catgtaagtcctggatatttactagaattgctttgttgattagttttatttggaggctcaatctggtgtccgctaagtattctttctggatttttggtctgtagcagaacattgcgactctatttcattttgtgttatagttgtttaccgagcagttatcaaaagaaattaaaagggataatggctgtgtgaactttaaaaaataatgattgatgagaactagattacaggattgaatgtttattgcatatgttggctccaataattacaggattgaatacgtaccacataaattggatgccattgactttttgtgatggtttgatgaaagaataattgagatatcttatgtttcatagtgacagttaacacttgaacttcattttagtggcataatatgtttcacatttgcactttctagttccatcttcattacatttgtttccccatagattgaaccgcatttctttgtggaaacccttatttggcaagagacctgagctataattatttggaattgttttggtatattacttgtaagaaaatcagtgttaacacccgtcccaccctcatccaaagattttccaagtgacttcctatggtgcttgctggaagtgatgtatgttacttccaatgttctgtaaatgtgactaaatgtctgtttatgattgttaatacatcaatacatgtggatatggtaactctttgaatcacattattcatgatattttgtgttgaattttagtgcttttaccatagcataatatgttttcttggaatacttttttatgtattttgttttcttttcatttcaagtggttctattttttcagttctaaatatgagattggtattggttgtaggttcatgttacatatcacataaaaatgttacaatctattagttggctagtgtatgatgtttctttatattttgtcaacagggagatcacaattctcctggaattataccattggc

SEQ ID NO: 89415 - DNA, 732 bp, Citrus clementina
  Intron number 1 from transcript clementine0.9_005003m (loc us clementine0.9_004807m.g) derived from phytozome v7.0 (c hr-ID scaffold_16; pos 1900796 to 1901527)
tggccttatttcctgcaataacatcttcactccaggtagtttctatagttgtgttatagttcacacgcatgcttctccgtcatcatcattctaaaatttcaactttctgtagttgtttgccgcacttttttccacgtccagtgtaaactcattgttgcttcctaaagaaatgagcagtggaagttatttttgtcaattataagcgtagatcctgcaatcaaggcatctaaagctttgatgtgtgattgtatattagtgatatcctttcattagtattaaaagagagagcaaggttgcttttagcgtggcacatcctcccttttacagaacaaaggaaaattagcttttgctttttcttctttatgatgacaaataattttctcttggtttctttatagaattaacattttgcttttgttagtggagtacctttaatacttgtttctcaaatttttgaatttttacttggaatttttttttttttaatttaaactcagcttttctttttctgatataaaaggttcaatcaagtatcattactattttatttcgtcaaagaaaattcaatcccacgtaccgtacttttaacataaaacaattatgctgaaaggtaggaaaatgcatgagctgatattgctttagaatgattcctgcttatgtgatgcatgttcagctaattttgtcttgtggcctttcttgattgatccaggagagcatactgaagaaatatcc

SEQ ID NO: 89416 - DNA, 469 bp, Citrus clementina; identical to SEQ ID NO: 79536
  Intron number 1 from transcript clementine0.9_006081m (loc us clementine0.9_006081m.g) derived from phytozome v7.0 (c hr-ID scaffold_8; pos 866209 to 866677)

SEQ ID NO: 89417 - DNA, 800 bp, Citrus clementina
  Intron number 1 from transcript clementine0.9_035409m (loc us clementine0.9_035409m.g) derived from phytozome v7.0 (c hr-ID scaffold_88; pos 646674 to 647473 reverse strand)
ctatacatcatctgaagtagaggtatttgttatatttctccattttaatagctcttgtttgaagaaatttgcatttacagatttcataatcataacttttttttaaaacaatttataatcataactcttcatgcagaaattttgtatgtttttgatgaattttgttgaactttaaaattttaaaaagggtaaaagctcatttagtccttatattttaagattagaatccatttagtccccatatttttaaaaatacggggactaaatggacactaatcttaaaatacggagactaaataagcttttacccttttaaaaattcaaaatgtggacacttgtaaaattgatatcccttttctatgtaacttaagttatgacgttttacctccttttctattgtgctttttcgcagtggatttcatgggtaagaaactctattattttgaagcaaagtaggcaataggatgtatgtagtaattattctttgaattttattcaggatcatggatctggaacagcctgatgccagcaactagctatttattcatacaattatatacaaacttattgcacaacgcgggattaacagactttgaatggctgatatatctcaaacatgttgaaatgctcagtcatttgaagtctatttaaatataaatctgaaactctcaatcatttgaaatgtatttaactataaataatctgatttatctaaattgctgtatcttaatactctcttctcttactttttgtcataaattgcttatctgttccttaggatctggtttggcaagcattta

SEQ ID NO: 89418 - DNA, 504 bp, Citrus clementina
  Intron number 4 from transcript clementine0.9_014694m (loc us clementine0.9_014694m.g) derived from phytozome v7.0 (c hr-ID scaffold_39; pos 216448 to 216951 reverse strand)
gaaggtgtgttcttttctttttttttttcctcaaaaactctttcgttctttctatttctttggtgtggtctatttttttttttttccggttcatgcaattttgttcgtgtattctttttaattatcttttgctgccacaatttaattgtgatttaacagcttatcctcttactttagtttggcaatttgggaccaataaaatgccataacttttgaatccttttttgagaaaaacagagtttttttatttttttctctcaccaatctttcaaaaatgacccaggtttttctttatttttttaactttattatataattaaactgttcaattcattaagattctatggtacttggtccaattgaagtcaataaatatttacttcaattctaaatcaaatcccaccaaccccagtccccagatcagaatattattgtaattatcaccataattctttttgtaactttctaggggtggaatcagcggagccagatctaaagaactca

SEQ ID NO: 89419 - DNA, 397 bp, Citrus clementina
  Intron number 3 from transcript clementine0.9_009308m (loc us clementine0.9_009308m.g) derived from phytozome v7.0 (c hr-ID scaffold_79; pos 845357 to 845753)
ccatctccagttttattgtggagattcaaggttttgttgttagtttaatgcagggattttgtttctgaatgttgtttagcttgtgctatgagtggctcaacttaacaagaatttatatctgagtttagattcatgtttatgatgaatatggaaggtattgttctacgagtgtaattgcttttcttcaaaaagtataaaacctaaaagtggtattttgattaagtacaagccagtttgtcacatgattatggtaaatgctgtcttcagttgatttgaagccagtgttttcttcttcaatcgtattcttttcaggtgagatgttttatatatttgctcttatcctaacttacaaatatgtccaggtactgctattcttcatctggggtttcatttgctg

SEQ ID NO: 89420 - DNA, 373 bp, Citrus clementina
  Intron number 1 from transcript clementine0.9_008403m (loc us clementine0.9_008403m.g) derived from phytozome v7.0 (c hr-ID scaffold_8; pos 1674183 to 1674555 reverse strand)
tgtcgaaagaaaagccgggttcctaaaatttaagggtattctacgatcgtcttgtttactttcctgtgttttctttaggggggtgggggggaagtattgcgtttgaatatttcactcgaactatccaagacaaaacctgcagcagcttccaatctcctaatttccattttctgtttcttttttctataaacaatgaactgggtattcttcattttctcattcatgtttgctttatgagaggttggacataggatttgagtttgtcaaatacagttatgcttgatgaaatgcctcaccgaaattaatgttttaattttctctttttttttttgttttaggtcacaagcattttagagacgctaattgaacagta

SEQ ID NO: 89421 - DNA, 611 bp, Citrus clementina
  Intron number 1 from transcript clementine0.9_011275m (loc us clementine0.9_011275m.g) derived from phytozome v7.0 (c hr-ID scaffold_8; pos 1917234 to 1917844)
aattcttgattttgggctctatattaccaaaggaggtaatttttctttcgatgttattgttgccgctgccgttagttttacattctttgtttatgttttgacttacttaattgaattgtgtttttattgtctcgaaatggtggaaatacattcatctggcttcttggtttgttttagcgtattgttcaacatttaaatatattcaacttttgtagtttatttgattgataaaaatttttattttagcgcaattaaatatctcatcacatgtgaatgtggagctttgaattgtatacttatatggaattttgtagcaattgcaaaatctggtttgaaagagtaagaaatttcataggttccataaattacttgtttgatcactgatcgaattggttggttcaataatgactcaaaaatatattatgaggtttttaattattaattggttgatgttgtcgattttccggattttgtatttgattatcaggaagctctgttaactgaagatagtgggttcttttttattaaattttttgcggacgctggcttgctaataattttttttttgggaatattttggttttggttctagatatttcaactgacgggat

SEQ ID NO: 89422 - DNA, 383 bp, Citrus clementina
  Intron number 1 from transcript clementine0.9_003108m (loc us clementine0.9_003107m.g) derived from phytozome v7.0 (c hr-ID scaffold_21; pos 1986000 to 1986382 reverse strand)
gagaaagcatagttggattctccgtgatcttcgttgtgcgttatttagattttgaaaccggatttttttttttattattatttttttggctttgtctgtcaaagggccgtatcaaatttgtcaactctttttatctatctattaatattctctttcccgtgcattggctcgttaaaaatcaaataggttttcttttcaacggacaaagaaaccttagtcagctcagtttttgcatttttttttctgcacatggtataatcatctctcatcagcatttggttttgcacaaaacacaatatacagctgcgaatttaaaccaaacttatctgccctaatttctttatcaagctcccccaaaaccaaggacacactgagtagctaga

SEQ ID NO: 89423 - DNA, 691 bp, Citrus clementina; identical to SEQ ID NO: 89273
  Intron number 2 from transcript clementine0.9_023255m (loc us clementine0.9_021559m.g) derived from phytozome v7.0 (c hr-ID scaffold_39; pos 1060045 to 1060735 reverse strand)

SEQ ID NO: 89424 - DNA, 664 bp, Citrus clementina
  Intron number 1 from transcript clementine0.9_025199m (loc us clementine0.9_025199m.g) derived from phytozome v7.0 (c hr-ID scaffold_99; pos 676818 to 677481)
atctcgccgccgtccttgaatatctcgccgctgaggtatcgcctttctctttctttctctcctctttcttcgctgttagagcataatcgatttccttgtttcagattcttatgcttgtttgttgggttttaaaagatgtttatttatccattttttttaattgtagatctagggtttctgaatttgatatttttatgtgaaaattggctcttatcgtcgtaacatattaaacttgcatcttaactttttaatttttgtgtagagttcagtttttattgtaacgtctggaaattgttaatatttgtgaaattagggtttctgcggatctgcatatatgattttattttattttaactctaattttgcctaattctttttaaaatttttcttttttatggataagtcattattgtattttagttatcgctctctgaagtcagaatattgtgctataatcaaattcctctgcttttattgtgaaattagggtgtctattttgatctgtgttatacataatgtgatagcagaagatgcatattggtgtccttttatttgacatttgatcttgctttaattgttcttgatttgagcattttgttgatgaaaaaaaaatctcaaattttaatcttgtctgattttgtacaggttttggaattagctggaa

SEQ ID NO: 89425 - DNA, 550 bp, Citrus clementina
  Intron number 2 from transcript clementine0.9_017095m (loc us clementine0.9_017095m.g) derived from phytozome v7.0 (c hr-ID scaffold_16; pos 789210 to 789759)
cgctagagaagaaaggtgtcctcgctaagatccgggtacgaatttatccaactaccccttttatcttcttcatttccccttagttatcgcgaataattgatttagaaaaaagtgaagaaattcgaaattagttcagcttctgttttacgtcggatctggtgcaatgcagtaattttgatttttttatttttatttttgtgcgtgttttagatcttatctgcgtcgtgtggttaattttcttaataggaaattgaagagaaattggggcttttgaagttaaagttagatggatttatggctagttggtgttatcttgaagatcataactctaactagattgatggggttatgcccaaaattttaattttttcgcttcaattttcagataattaaagctcatttgaatttttggggttttcttgctgttcggtgaatattgctaattgtagcaaagtctttccctttaattcaatttttgtgcctttttaactgactcaaatcggtctgtttcctaggctgaactcagggccagtgtctttgaggcaattga

SEQ ID NO: 89426 - DNA, 365 bp, Citrus clementina; identical to SEQ ID NO: 82001
  Intron number 1 from transcript clementine0.9_023652m (loc us clementine0.9_023652m.g) derived from phytozome v7.0 (c hr-ID scaffold_121; pos 113052 to 113416)

SEQ ID NO: 89427 - DNA, 1058 bp, Citrus clementina
  Intron number 1 from transcript clementine0.9_027298m (loc us clementine0.9_027298m.g) derived from phytozome v7.0 (c hr-ID scaffold_35; pos 84510 to 85567 reverse strand)
ccctttcttttgaagaagctgctttaatcaaagtaaatgccatcatctgcgcttgcattatttgttatttcttctctatctgttatttcattttctttaacttttctgtgaataacaaaaaaaaaaaaaaagaaaatcatttgcttataggattctggattgggggggtttgttagactggatctttagatgattttataatatggttctgtttagttgccgagaaaatttaaccgatgattaattatcgggttccagtaggttttgtcttaaagtagctaatgaccagacataagtcaggtatctaccttcatatgtggtatttgatacagttacgcgtctgggaaattgatgctgtccatcgttacagatgtgttcatgctatttgagttcgcatctgctccatttgggcaggacaagtttgtttttaattttatagcactttgtgggtctagggtttattgtttgttgtactagatgatgctttgggaacttgtctcgatactagatcataccattgttcgaatttcgtaattatatgtaattgaatcgtgtatatgtgggtaatgcgtggttttaattatatggtgctacaatgaagcggtggtgtcagtagactcagagtctttctccttgttgttcaggtattgagtatggtgtgttgtgtcatacaatttgttacttgctgcattagtctctgattaggcttctgaatgtggtttaattgttgtttgctcctaacaaataggcaaagacactgactggtctagttagttaaacagatccattgactaagacattggaaaaataagaattaacttaaatgtggattgatatgtagggacagctagtttggttaataagtttttcatatttgtcgtctgtttaggatgcctgatgatgctactagctgcgttatccattgatcttgagttgacttgcatttcatgacattttgttgctatctgtgtataatggttttgaatgctttaagagttctgacttatcctttatgatccacagcctaaacagatccacgagatcaaggatttccttct

SEQ ID NO: 89428 - DNA, 348 bp, Citrus clementina
  Intron number 2 from transcript clementine0.9_010201m (loc us clementine0.9_010201m.g) derived from phytozome v7.0 (c hr-ID scaffold_69; pos 323165 to 323512 reverse strand)
tttctcagtggcttgagtcggtagcaagctacaaggtctggttccatctttctctgtcaacgtgcctgtttggtatcatttgattttctgtttccgaggtttttttttttttttttttttgaggggtgaggggagggggagggaagaggatagaaaatgtttggtattgttgtttggaaacaacttacagctagaaaatggatcttgccctctttaagttctgaaagcaatctgcaaccattctattattttcttatttctcctctctatttctggtcctacatcattcatcatttgtatcttcaatagctgttctgaaatttgaattttgtatataattcataggct

SEQ ID NO: 89429 - DNA, 1026 bp, Citrus clementina
  Intron number 1 from transcript clementine0.9_011886m (loc us clementine0.9_011886m.g) derived from phytozome v7.0 (c hr-ID scaffold_21; pos 3684717 to 3685742 reverse strand)
aaagaactcgttttgcttttgcaggtaattgtgcttccctgctatttgtattgcttaaatttatgcttcttggtatagttttaacatttcggtatagttttaacatttatggaattgaaatcaatttcaattgtgcgaaagcaagtaaatgtgaagcaacttcagtgattcgcaatattagtcatcgcaggagatccaaaatttgtagatactgtagaattgtagagcccaaaacttcatcttatcttgcaagagtttgttgttttattttcaaatagacaaaaaaaaaatgatgatgggcagcgaactctagggatcaatgcttgctgaccctgacacccaatgcttgatgtctagcttgcttatttttccaacaatgacactacctttctagtaaatgaaatattattctacatctatgtattggaactttgacaaacttcggttttcctttgttgattcactggtctcacttttattcaattgcccgattatgaaatggtctattggagactagaaatggaaggtttcttgtggaaaaagttttacttgaccaccgattttcattttggtgggtgtcagcgcatgctctggcttgactattctgttatttaggctgttttatctgatcttctcactcacttgatagttagttctctcatgcttccaagctcaaagattaatgcaagagattctctttttcccctctagactataacctatcaaatcattaatgctatagaataacatcttgtgtaggcgggcttatgtctctgaacatttgtccatcggcatttgcaataagcatggccctgatttttcgtctcattattattttcctacccagattgtcccctttaagtagcatattgaaggagagcaacattcttatatatgttttatgatgtttaccaataattacccaccacggggtatttaaattttgaatgtattattctgactcaaaactctatctgtcggtgtagcttcagcttctgaactttgttgagaaggctgttgtggaag

SEQ ID NO: 89430 - DNA, 570 bp, Citrus clementina
  Intron number 3 from transcript clementine0.9_027930m (loc us clementine0.9_027930m.g) derived from phytozome v7.0 (c hr-ID scaffold_21; pos 1295673 to 1296242 reverse strand)
gaggtgggctccgacttgtccaaacaagtaagcgtctcaaatctcaatagataacttttagcatctgtatattgacgttacagcaagcaatcagttagaaaagccattgcgtacaatctgttgctgatgctcaaataattcctttttgtctacagatattgacatcaattgacttgcttcaaattccttatatatacatgctttaactttgttttctaattttcttattggaaaaatacttgacttgtgaataataggtagcaatcttcgtgttggttgcacataattaatttataaaagttctgcatattttattttgtttaaattttctactactggctatattcatgaaaaattcttatcttactgtaaaacttaagagtatttagccacataaacacactaaaaccagactattgagttcaagaacatgcattaaatcaggactttgcgaataaatctcaaatatattcctaaatctgtgcaagtttctgaccataactgaagtactctgtttgtgatacccgttctgcaggttgctacatttatcatctacaaaatcttattgca

SEQ ID NO: 89431 - DNA, 702 bp, Citrus clementina
  Intron number 2 from transcript clementine0.9_013777m (loc us clementine0.9_011768m.g) derived from phytozome v7.0 (c hr-ID scaffold_12; pos 4641832 to 4642533)
gaggttgcggagatagccctgttacaactcctcaggtactactgcttttctttcaggttactgtttataccatatgcattggaatttctgaaatggtttgatagagtttaaaatttttttcattacactgatgtgcagttctattcggcgtcatttttaggagatatgcaagaagtagtagcacatgttggatccaagtacccaaaagcccatttgtatgcagttggatggtctcttggggcaaatattcttattcgttatttgggtcatgtaagataatgatttatccatgctcaatttttggattgaggttcagaattttggatccatgttgcctcttcttgtctttgcataattgctgtgggcatagtgcaccacttgtgtttatgtttgctcatgagatagatcccttctaatgtaatacctattccattcctcaattatctccataaatttgcagccattcttttttctttaatatatcgttgtagatagaggtaatggtttccatgatttaagaattaacagaatgttcttcattattatgcattaaaaggtgctttgatctcaaagggtcctagaagagttggaatgttgtaaactgttctgtctacctggtctatataattgaggctttacttatatttttataatgtgctatttgcaggaatctcacagttgccctctttctggggctgtttc

SEQ ID NO: 89432 - DNA, 642 bp, Citrus clementina
  Intron number 3 from transcript clementine0.9_021265m (loc us clementine0.9_021265m.g) derived from phytozome v7.0 (c hr-ID scaffold_104; pos 300114 to 300755 reverse strand)
ccggaggattattagacagccttcaaggtaatggttttgtggttccagtagataaatgattaatctaaacttcttttgaggcttccatgaaaaatttatatgcatgctctttataaacttttggtctctattttcatcctcattggacataacattgtgagagaaaggtaatagaggtgatgtagacaattattttgctttttcttaaattagcaagtgatgctcacgtctctatgggatagcctagttgttttggtcttttcatagtggttgtacttagtctagggaactgatctcactctcaccaacttggagaggaattaacttaatttatctttgtgcatggtttgaaggggggtgggatggggtagggggtgtggaaacgtaaaacaaaaaatgtaagtgataattctaaccttgatagttctttctgtatgtttcataagatattcattataatttagtctctgtaattgatagtaagttcgaaatatttggaaggaaattttctctgtactggtgcttctatcactgagcagatatctgcctatcgatcattatcttcactctggagtcagtatatgattgatttttctggttctgaattgtaattgacagaagtcacggacctggcaattttgt

SEQ ID NO: 89433 - DNA, 763 bp, Citrus clementina
  Intron number 1 from transcript clementine0.9_023805m (loc us clementine0.9_023805m.g) derived from phytozome v7.0 (c hr-ID scaffold_71; pos 397720 to 398482 reverse strand)
aattgactcgccgtagtcctctcgacttccccatcgtaagctattcgttttaattctacttttcgagattcagcttcttattcatgtatttatttatttgtttaatcttttgatttatttttctaatattgttaatcaagcttgagttttgttgttatgtaatttgattatccctgattcgatttataatcttctgtattggtcactagaattataaacatatagagactgtaatttttgtccaagcgcaccatgtgattgaaacttccagtttttgagattgcttttggctcgttaaaagagcttgcagataaaaactgctcgtctttttttattgtctaggggtttctgatagttgctttcaaaattcttcttttttttaaatttttaatataattaaaatgactacctcaaattgttttttggaaatttttgttagatgtttatacaaaataggcacccaagtgctttaataggaagtttttttgtttgaaatcttatctaaaagtgctttgaatgtgctctttgctttcggttatagagtgcttggtagaggattcaagctttttagcttttgttttgaattaaatgaataattatcaatatgaattgtatttcctagatgtttggttatttgaaaattgtttctagtggatttaattttttgatatgtgtcaattgtaagagctggaggtggtaaatgatatctgtttatctctatgtggcaggagtgggagaaacctaagcctgcccgtagacctga

SEQ ID NO: 89434 - DNA, 694 bp, Citrus clementina
  Intron number 1 from transcript clementine0.9_008345m (loc us clementine0.9_008345m.g) derived from phytozome v7.0 (c hr-ID scaffold_13; pos 1114156 to 1114849 reverse strand)
atcctgcatcttgcttgcgtgcaactagttggaaggtacttggtctctctaatctctactgaaataaacttttctttttctgattaaattcagtctaagtggattgaaaatgaacaaaaaaaaaaaaaaattagtttattgttgagtttcgattgctcttctataacaatccagaacttttttgattgctgataaattgcgattaattttttttaaaacagaagcaataaaatacttagattgattgttaattttagattttgcttttgagtttaaatgatgaataactaagtttaaattttcagttattattacattatttgcaaatattttcaaatttacatcaataatgctatgtagatttggttttaatatgttgattgttaattttttatgttgatgaggtagagttcaaagagggaagcagaaatgttgcaataaaatcacatgtggtggattttgattaatacttttgccaatttttcgtgttttggctagtgaatctgtgctgaaattgtggtgtttttgtgataagagtttttgtattattaattcttatattttgggtttttactaattattatatgcaaaaattgatcaaatctcactcacacaaaatggacccgattgcaatttgacactaatcaatgttcaaacagcattaattcactgaaggaaaatagagattgatcag

SEQ ID NO: 89435 - DNA, 816 bp, Citrus clementina
  Intron number 2 from transcript clementine0.9_028141m (loc us clementine0.9_028141m.g) derived from phytozome v7.0 (c hr-ID scaffold_91; pos 911861 to 912676)
gttaggtgtggtttacttttgttatgattctcagaatttcagcttcttgcctttttttcatcatttaggaaagacatgatcatttagtttgccgatttggatgtattggtactttcagtcgctagtaaacttggcaatatgaagcttgtttctaatctaataggctttgtttcgtcttgtgtgtgcgctatcatgaggcttcgtggttagatatgaattttatattggatgttccacaaatctgtatttagatgcttgtgcaggttgcaatacaattcagagttgttggattaatactagtgaaacttagaaatgcaaaataaagaagtacatctgtttatttgaggcaattatattgattcttttttcttttcttgtttttgtgttttggactgttaaaatgtccctatctggtgctagtatattctgatgatgagttaagagcacactaaaaggtgttattaaaagatcactttagtttactagagacatcaaaatatttttttcttaaaaaatggtatacatgttatgttgtttttgaaatgatagatgaaatttaagttttaataagatgtgaatgaatattcatccaaacagttttaaagctggatgggcaatgtgctgcctgtttatcctctgctttcaataattttgttttgttttgcaggaaataatgcttatattgccctttaattcttaagtgttctgtgctttttgacaatattatctaggaggttatgtgttttgtttactaaaggttttgctcttttggcttttgtagctaatattgtatttggatctgggtcacttattggc

SEQ ID NO: 89436 - DNA, 712 bp, Citrus clementina
  Intron number 1 from transcript clementine0.9_029918m (loc us clementine0.9_029918m.g) derived from phytozome v7.0 (c hr-ID scaffold_70; pos 106438 to 107149)
ccataatcaccacgtcctccatacatcggctgcaggtgaactctcttcctttattttctcgggctttcacatggatagttacgcgtactatattgttttacccgtgaggctgccgctgaattgtttgaattatatagaataatgatgcgtgtaactgtatatactaattagtgtaacatgacccagccaaaaaagaaaaaaaataacttgtcttataataatttttttttatcctataatgatggtggactaactgtagtaaatatatcattattcattactgaattatgtataccgagaaaatagatttcacttttattgtttacgcgcacagatgatcaaatttatacataattatattacacaaatgctctttaagttcacaaaataatttgtataatatcaatgtgaaagtgcttggaatataattgttgttttcttatctaatgaaatcactgaattttgtgaactaaaaaagaattttagtgagcgcattaaattttaaaccactaaacagcatttagaacttataaatatcgcttttctgaattttattcttgaaggccaattggtcatagaattatcttgtttttgaagctatacttattcttctaattaaggtaattttcagttgcttaccggaacaccatgagtttattttactattttctacataggacgttgatttagagtggatctttgtaatcaccaa

SEQ ID NO: 89437 - DNA, 858 bp, Citrus clementina; identical to SEQ ID NO: 88703
  Intron number 1 from transcript clementine0.9_022916m (loc us clementine0.9_022916m.g) derived from phytozome v7.0 (c hr-ID scaffold_16; pos 3619671 to 3620528)

SEQ ID NO: 89438 - DNA, 637 bp, Citrus clementina
  Intron number 2 from transcript clementine0.9_008392m (loc us clementine0.9_008392m.g) derived from phytozome v7.0 (c hr-ID scaffold_12; pos 4339145 to 4339781)
aagaagccagcctcagccctcaagtcctcgaaaatgtaagtcagtcacattgtcttagtagcaaaatgtggtgacgaaacggaaactttattgagttttctagtataagaaaatagatttatgaataatgataagttttattgaaaagtatgaatgaataaaattaggattttgaactatttttataacaagctgaaataacgcgaatttatcaaaataggtaaatccaaaatctaatatgataattaaactattctaatcaaaataaggaaagaaaaacaaatggtattcaaatctgagtttttttttttaaaaaagataaaaatcccagaagaattaggaaaaataagaaagaattttaaagctaaaaaatgaccaggaaagaaacggaatttccagttcgatcacggagcggaacagcttagacagttgtggattttgtttgtctcgtcataagcttcaaaacaatatattatacgccgaaaacagacaactgtaacccaagttagaatctccaaaaaatacactgctcgcaacacgcaacaccctacatcatgtggcagtggcagaggccctttcatttttctagactcagcactaatcagaattaaattaatttttgcatccatgtgtgcag

SEQ ID NO: 89439 - DNA, 655 bp, Citrus clementina
  Intron number 1 from transcript clementine0.9_021115m (loc us clementine0.9_021115m.g) derived from phytozome v7.0 (c hr-ID scaffold_8; pos 3267154 to 3267808 reverse strand)
ctgccattgagcttagcaaagaacttgtaatgaattcttctctgatttttctgctctgttttactttatttcctctgttttaagtgtctttagagatagtcttcactggttttggtttctttttctgctttcttcatgaaagtttctattttcgcgcttctgctactcttcaatggttctgttttgggttttattttcagagttcaattaagaagtttttcttttcttttttaaaaaatttctctgctttctgttttgtttttatttgttctatttctcctctttcttttcatgttctcatattgtttgaggctatcaactagggttcttcttgatagggatttcagttccaagttctgtttatgactttctactcagttcgtatttgttttttagatctaagccaaatgaacttaatggatacttttagcttatctccttgcagaattgctttttatatattagtatttgtttcttcaacaccaataacttttttggttttcatatgcttagttcccactagctgcatttgacatactagcccacgtcacatatgggtaccaatagttcatgtttttaatcatatttatcagttaaatatcattttctaacttttcccccccttcaaaggttgcaagaaatattgatcttgttt

SEQ ID NO: 89440 - DNA, 577 bp, Citrus clementina
  Intron number 3 from transcript clementine0.9_027937m (loc us clementine0.9_027937m.g) derived from phytozome v7.0 (c hr-ID scaffold_103; pos 365299 to 365875)
gataggagacagagaattgcgtggtacgtacgggagattatttatatatattggaaaaattttcaattcaaaattaaatcccaggatggatttatgatttcgtaaatcaatttttacaatgttctaaactgatttacgatataataaatctatctcgaactttaatactagattttaagctttggtatcataagcactatatatctatatatatgtatgtatgtatgtatgtatgtatgtatgtgctatatagaaattatcaggtgagggatttggcactataataaatgcgagatgaatttttacaatattgtaagtttagtagagtgcaggacggattttaaagtctgtttgcaacgttttgaaagtttgtctcgtattttaattgagtgcataatcccacattagaagcccactttatgctatatatgctatagtactttatgctatattgctatagtataaggcttataaaagatatcaagaaaaaatatatgtataattgatctgtttcctttctcatttcttcatgaaatacatagtgacaacggtcaacctacgagggaagtcttacacc

SEQ ID NO: 89441 - DNA, 953 bp, Citrus clementina
  Intron number 1 from transcript clementine0.9_012089m (loc us clementine0.9_012089m.g) derived from phytozome v7.0 (c hr-ID scaffold_39; pos 702551 to 703503 reverse strand)
cttctttgaaacgcgcgtgaatgacatgcttaatagtttgttagatctttgtctttgctgaaatttagttgagcgtaatttttatttgtaagcttgttcagatcttattattagtcaatgagattaaatagatctattgttatctcttgtatgtggttctatgatttttattattttgtcattttgtgttttttgtgtttcattcttttttttttccaaaatttgtcacagattgtctttaaatttgttaattaattagttatatacttgtctagatctattttacacaatatttgatcgggaagtttttgtgagtgttagcgtgactaatcaaatatgctgagtgctacatttagaattttctcaatattcatagtttctcaagtttttgttatgttcagatcacaatcacgcggtcttactgtatggaggattcagatctgtttatgcttctgttgttttcttgtcgtgataagtttgctgttcggatgttgcttttccttacgtcgtaggcaatagtgctacttttaacttgggaggattcagtcataaaattagatagatgatatgtatttgtttcccatatcacaagtgctggtttctagatcatcgtaggttattgttagcacaacaactagacacacctttttgaaattttacattaccttttatattattccccagtcaacatttgagagcttatttgaaaatcgtgataatgtatgtttcaatgattgcttaacgggttcttgttcactccgatattttactccaattaacattcttgataactttttgtaattgctaagaggtcttttgttccgcttataaactattttagcacatttactattgcttgttggtgtgttatgaattgatatgcgtaggtttctacattgtatcaacccaatttttgaatgaaagtttgttgcaattctgcaggaaaagtcaca

SEQ ID NO: 89442 - DNA, 486 bp, Citrus clementina
  Intron number 1 from transcript clementine0.9_032976m (loc us clementine0.9_032976m.g) derived from phytozome v7.0 (c hr-ID scaffold_71; pos 762041 to 762526)
ggaggtgtgaactttacctgttctgttctttcatgtttaaggatttttcatgccaatcatgctgacctcaaggagatgcgatgacataattaattacaattggtgtatcaactaagctattatcttaaatcttccaattctattaatccagtgtttgttgctgtaacttattagttcagcccaagttgaaaggtcgataaatttcagttcttccacgattaaggttttccagcgtggtcttttgattcaaaggtagtattttctgttacatttgtaatcgtcagtttgttgttgcaaacagttgagaatcctggttcttgcatttggtatcatgttatttatgtgccttatttgcagggataaagaagccccaaggttaacagagagtggtttttaatttttggaatgtgtgttaatcacaagattttggattccctcttgtttgagctagtggaacttattttcctatgtttaaatttgcagctg

SEQ ID NO: 89443 - DNA, 364 bp, Citrus clementina
  Intron number 2 from transcript clementine0.9_003534m (loc us clementine0.9_003534m.g) derived from phytozome v7.0 (c hr-ID scaffold_69; pos 256707 to 257070 reverse strand)
tttctcagtggcttgagtcggtagcaagctacaaggtctggttccatctttctctgtcaacgtgcctgtttgtttggtatcatttgattttctgtttccgaggttttttttttttttttttgaggggtggtgggggggagggggaggggagggggagggaagaggatagaaaatgtttggtattgttgtttggaaacaacttacagctagaaaatggatcttgccctctttaagttctgaaagcaatctgcaaccattctattattttcttatttctcctctctatttctggtcctacatcattcatcatttgtatcttcaatagctgttctgaaatttgaattttgtatataattcataggct

SEQ ID NO: 89444 - DNA, 752 bp, Citrus clementina; identical to SEQ ID NO: 77921
  Intron number 2 from transcript clementine0.9_010765m (loc us clementine0.9_010765m.g) derived from phytozome v7.0 (c hr-ID scaffold_79; pos 836263 to 837014 reverse strand)

SEQ ID NO: 89445 - DNA, 563 bp, Citrus clementina
  Intron number 1 from transcript clementine0.9_033161m (loc us clementine0.9_033161m.g) derived from phytozome v7.0 (c hr-ID scaffold_81; pos 870954 to 871516 reverse strand)
ataaccaaagatagctgttccgccttagcaaagaggtgataaatacattatgatttaattttacattaatcttttgtatttattttgttttctgacctttattcacctagaaacaatcttcataaagcatataaaacataaccaacaagtgcgtggatcagatggcatgagactgttctaacttaatcaagatcttcggttcgagacttgaaaatacaattgtgttaaatatttgttgagagattattaccactctagtgttttcagatactagatgaatttaaacaccgaaaaaaaagcatataaaacgtaacttttttttcttttaattttaaaatagaaaatagagttagcgttaaggcatagtccaaatcgagttttgttctcttagctacaaaattcatacacaggtggctaggcgaaaaagaggcagcttgaaattactcggaacttgcaaatacttattttgagaaatctatcagttccatcaatatatgccctcattgtttgaaatttgtgttgatataggttggagggaaaaatcgcaatcgtaaccggaggtg

SEQ ID NO: 89446 - DNA, 1023 bp, Citrus clementina
  Intron number 3 from transcript clementine0.9_032005m (loc us clementine0.9_032005m.g) derived from phytozome v7.0 (c hr-ID scaffold_68; pos 22606 to 23628)
cctaacaaaagcttggacttctttcttttcggttagctattgcgtctggttcttattcttacatattccttacttcaaattttattcatacatttgtttgaactactatttaatacaaacttatatatcaaaaatttatttcaaaatttatttaaactagaatttagcccatattacatttccaaattttattctttaatttatttaaaatagcatttagcatttagtttaagattaaatatcaaaatttcattcaataatttattaaaacttatacataatattaaatattaaaagatgctgcatagataaagatgagaagattctaatctatgagtacatgcctaacaaaagcttggacttctttctttttggttagtgttttgcaattttttcttattcttacatattccttacttcaaattttattcatacatttgtttaaactactatttaatatgaaattatatatcaaaaatttatttaagctagaattcagcttatattacatttccaaattttattcattagtttatttaaaatagcatttagcatttaatttcagattatatatcaaaattattcaattattaatttatcttgaaattgaatatctaatataatattcaataattaacaatataactttaagaaacaatcatactttttaaatagtttttttaacttccttaaattgaatttaatatgatcgggtccaacactaaaacaaacacaaaatataaaataattcaatctaatccaatccaatccaatcttaataactagtccaatccaatcctttgttttgcaacaaacctaatataaaagaatattttgcatttactatttcatttagctattttcaagtttaatgattaacatcatcaaataatcagatttaaaaaaataaaaaaaattaagtcactagatcaaattacatcagattatgtggtctacatttttcttgttttcatgcataatgacatatagtctttttgttgtaaattagatccaaccaagcga

SEQ ID NO: 89447 - DNA, 647 bp, Citrus clementina
  Intron number 2 from transcript clementine0.9_023543m (loc us clementine0.9_023409m.g) derived from phytozome v7.0 (c hr-ID scaffold_88; pos 181991 to 182637 reverse strand)
ggagtgaagtttgtacgggataacgacaaaaataggcaagtgatctaaccgctggcttgttgagtaatttgatgaataatgtgttaaatgataaatatcaaatgttattcgacctcaagccaaatgttccacaatgattgatcacgatcctttggcgttgacaatattcctagataggctaatttgatcttccccgttaaaggtgttccatgtatcagctcattttgatttgtacataattaagctactgcaaagaaaattggtcctcccagatttcgcacattttcaacttggcattttggcttgtatttttaagtttgttcatgatatttcaaattattacttcttatggttgaaaagtattatatgaattagttgaaaacatgattatgaatgctaaacaagattgaggtcactgaaaatatcacttcctttacctgctattaattatgaaccctccaaggaatatctttcttataaatgattttctttaaatccaaaagggaaagaaaatcatagaatttgtctcttcaaagtgtttcttagctataaatctgctcccaatgactgttcttcttcatatctttgtctggcaattgacaggagaatcaggtacgaagctctccagagtgaatcaggcaagaaac

SEQ ID NO: 89448 - DNA, 460 bp, Citrus clementina
  Intron number 1 from transcript clementine0.9_030511m (loc us clementine0.9_030511m.g) derived from phytozome v7.0 (c hr-ID scaffold_84; pos 594229 to 594688)
ctttgtcccaagaaggtatgtggtcacattctttctgccagagcaaaatagtatatatagtagttgatttttaatgtcaatttggttttcttgttatttttttttcttttgaagttattgataagaaaggaaatgaagttccaactccaagaattatagacttgaactcaagatttttaggttagtgccctagtggatcacagcttgtttgagcctatatagttagtatccatagtcaaaacattgcattgtaccagcacttctaggagtttttttttttatttggtctatggttgcttgcttttgcctctaaccccaagtccgtgactactgtatacttgtagtagcgtgtaataactttgtaataataatgtgtatatttattttgttttctgtgggtggggttgtgattttttggtgggtagggttatcggaggagccggtgcagcaagataaggag

SEQ ID NO: 89449 - DNA, 757 bp, Citrus clementina
  Intron number 1 from transcript clementine0.9_026139m (loc us clementine0.9_026085m.g) derived from phytozome v7.0 (c hr-ID scaffold_54; pos 514231 to 514987 reverse strand)
agctgagtgtttgtctcgtcgtccgccgcagttaggtacttttctttatctttacctgtttttcccccccccccccccccccaaatatttctttgcagttactgttgttgctattgaaataaataaatcttgtggtggaattgtttttgaaatgtctctgatgatgtttaactatattaactttcgttctactgagaaaacaattatgcggaatccatatggagacctgaactgaggagactgtttatgtgctttgcttctttttcatttatcagtcttatttttatcgctccgtttcataaatgagactcgtgttattttgtgctttatttttcgtactttttaggctattttttgggcgatatattttgagttttatataaaattttaatgttcccgaaccagtgttgtgtttaatttaagctgtctctgatgatgattttaaaaaaatactttcgttcttccgagatgatacatgcggaaacattttggagacctgaactgaagaggcttacatatacatgtgtgtattcccaatctggtccggtattttaaaatgtgggaaagtccggaaaagctttaaaccatggtttaaaacttaaagctcataaacgtttctctgactttctcgtactttaaaatttcgaattagaatatttctaatatatatataagtttttaaccgaagacactcaagtgatggaacttgttctctgttgcagcattgccgtggatcccgtcatttgaaaagtagaac

SEQ ID NO: 89450 - DNA, 605 bp, Citrus clementina
  Intron number 1 from transcript clementine0.9_025017m (loc us clementine0.9_025017m.g) derived from phytozome v7.0 (c hr-ID scaffold_91; pos 5654 to 6258 reverse strand)
ataataacactcaaaaggtgctcgaagcttctatgctatctctttttcttttttctttttaattgcttttgaactttctgtttctgttgaaattagttgttattttacaagaactcttagtttttcttatacccttttgccttttgagttttcttggttttgtttttgtctggttagcttacaatggtaggaaaaagattataaagaagtaaaatttgacttgtagattttaaacgggattcaggaatagaatgcatttggcattttggcttatttgaattagtttactgtaacgctgcatttggtgtaatgatttttctgggttcaatagtataattgatattaatggttgttatttgacaataaggaggcaaaaaatttgaaagaatgcagaggatatgggcataatttggttgctcaaatagcgagtactttttctttttgtttttggtggggggggggggggggggggggcaaattgtgtgtacttaactaagtgttttttgacatatttgtttggcataattttatattgagttcagcttttggaagagattaaaacattaatctagtgtacactctctcatgaatgattccaggagaaa

SEQ ID NO: 89451 - DNA, 866 bp, Citrus clementina; identical to SEQ ID NO: 88969
  Intron number 2 from transcript clementine0.9_024480m (loc us clementine0.9_024007m.g) derived from phytozome v7.0 (c hr-ID scaffold_8; pos 2078989 to 2079854 reverse strand)

SEQ ID NO: 89452 - DNA, 534 bp, Citrus clementina; identical to SEQ ID NO: 88544
  Intron number 2 from transcript clementine0.9_025363m (loc us clementine0.9_025373m.g) derived from phytozome v7.0 (c hr-ID scaffold_28; pos 1986146 to 1986679)

SEQ ID NO: 89453 - DNA, 520 bp, Citrus clementina
  Intron number 1 from transcript clementine0.9_010943m (loc us clementine0.9_010943m.g) derived from phytozome v7.0 (c hr-ID scaffold_13; pos 2239378 to 2239897)
aataagaagggcacgcctcaaggcaccgttaaagtgtgagtttttattttttatttttttttcagttcatttgggttttggtttttgagtgattttgtgaagtggatatgcataagttttgcgatttggtgaagttaatgaagtgggtcaggtttataatttccaaattccgtaggggttctgtggcagattttgttctcgatcaaattgctaaaatggatgttctttaattcctagatgtgatcttgattgattcaatttgagttcatagactgaatattaatttgttcaatgtgagtgcttgctttcattttagttatgagcttaagtgagctcttcaattttccatgttattgttgaagcaaatgtgtgtgcaagcttgtttcttttttcagttgccgttcttttgggatacattgatctgtgaattggttttctcatttcactatcttattttgttcataatcttattttacggactgcaggccagagtcgttgggtattgttgttggggctgtct

SEQ ID NO: 89454 - DNA, 411 bp, Citrus clementina
  Intron number 1 from transcript clementine0.9_013118m (loc us clementine0.9_013118m.g) derived from phytozome v7.0 (c hr-ID scaffold_16; pos 1770308 to 1770718)
ttcgatccgttcaatacctcgtagatctggtgaattcttgttaattttcctttttttttagtttaaatttgatttcggtaatgtactaatcgaaacatctacagtctttattatgtcattgaggctttaatcatagatttattgatttctgttttagtggctattagattgaatccttttctgttttgatatatttagcttatcttaaagatcgaatttttatgttcatttcttcgatttttttttaattattgttattagtgtgatttgatcattgttaataaattgggaaaatttattctgtattaaagctacgcgctagtttgttgatatgatcatgaatgtcgttatctatataatgtgattgtcttgctgattttatcttgtgtattgtgctgcaggtagcagaag

SEQ ID NO: 89455 - DNA, 806 bp, Citrus clementina
  Intron number 2 from transcript clementine0.9_003158m (loc us clementine0.9_003069m.g) derived from phytozome v7.0 (c hr-ID scaffold_12; pos 4565201 to 4566006)
tggccagcaaatcttgttcaagtttctctatttaggtaatgttttctttaatatttagcaactccggtagtgtattgcattgtgtctttttacatattacttaatgaacccttcattaggaaattatatatatatatatatatatatatatatatatatataaagaataatagctattaagatgctaaagttgcttttttaatgtattaaaaaaaaagaaaaagaaaaagtaagactcctaaaattttttaaattggcatggacttctttaaactttaatcattgttatcgatattagttgtatgtgtgtggttctttcatagtttcttgtgggtaacagttttcaaaaaatatagtctaatgatatatttatgtccttaatgaatgaagaatattattaaaataaagggtatatgtgtgtctattaccaaaatattaaaatgtctacttattttgaaagtatatttaactattatttaacgcatattgtacaatgccataataaattctataaaaataataataataatctggtcgttgcaccatcactgtcagctacgcagttactaaaaaaaaaaaaatttgaccttttttttaccaaaaaagaaaaacacacatacacacacacacacaaaattgactgttaagtagaatctttcaagattctgtctgccctatggggtatcggcctaagcttggccaaaaattgcgcttctaacaatgtgtttcgctggcgtcggtcggctcctattttgggaagctggattacagagctctgcacgagagagagaaacgagccagtggtg

SEQ ID NO: 89456 - DNA, 606 bp, Citrus clementina
  Intron number 1 from transcript clementine0.9_008890m (loc us clementine0.9_008890m.g) derived from phytozome v7.0 (c hr-ID scaffold_71; pos 384478 to 385083)
aaagaaatcccgttgtaagatcttttctttcttttatcttgctcaaaagaaatgatctttgtgctgtaatctgctttgggtagtcttcattttggtcaaatgttcatatgatcaaccttttcatttttccattgcttactcttagcgaagttttgaaattttttctttcgtttttaatatttttacgatgtttgactagtaaaatgaattggatggggcctgcatatacttcatgcagtaggatttacagtatagacaaataaagtgccccaagtgaagggaacttaatgcaaatatgaagctagatctaatgcgaactcaagtgggtttggtaattgaattgttttatcatgatagacccggtgagctgctactggatttcgagttttgtttctaattgatttcattgtgtctgagttcagttgaatgactttgtcatttgaaaatggttgggacttccatttcagttacttgtctgtgattacgctgatagcatgtattctgattgttctgtctccgtaaatttcttgtcatgtaaaatgtgtgccggcaacttgtgttttctcttcttgtttatgtatcctcttcatttggttgaaaatgcag

SEQ ID NO: 89457 - DNA, 458 bp, Citrus clementina
  Intron number 1 from transcript clementine0.9_018172m (loc us clementine0.9_018172m.g) derived from phytozome v7.0 (c hr-ID scaffold_21; pos 1426869 to 1427326)
atactgtaagcttcatttcacgatcttttttattttctttcctgaattttttttttctttttgggtgtttttacttgatgggtcattacgattttgtcataattgtctgtatcctatgaagagacatgttgggtagactcgtagcagtaagaatttgattaaaagaaatcatttttgtgtttgactatttcagatataatatatgtttgtaaattgtaactgatgttcgtaataacagttaaaaaagtgttgatgaacactattttatttgatagttaatgtttaccacccagcaccaacttacatatcttattttacccaaacatacccataatcagcttaaggcataaaaaatcataatcgttattgtgttgttttattagtttcattggaaaaaatagacgttggttgacgtgggcttatgatttctgttcttgtaattatggattagacttttg

SEQ ID NO: 89458 - DNA, 592 bp, Citrus clementina
  Intron number 1 from transcript clementine0.9_009364m (loc us clementine0.9_009364m.g) derived from phytozome v7.0 (c hr-ID scaffold_8; pos 3110863 to 3111454)
gtggtccctccccttccctcgccgccaggattctggtctgttgatgttctctctctctctatccttcttcttcatttctcttcttagctgatcactaaaattgaccaatagaattcagctaaatcttgctgacgatcaatcacatcagttggttaacttttgatcgccggtgagtggattcgctgggaaacgacgaaaatgcccctggatggatttgtgtgtgcttgcggttgcatatttgagtgggattttctcttgacttgggtgacgacgataatgtgattcgtttttatttaatcatttatttcgaatatataataaacaatgggaaaatgggaagtttctggccgagagaagtaagagtaggattgagtgtttactaaaagctaaagcactaatctttgatttgtttgtcgttttatctggaaaccagctgtacttgcgtttctgatgactctctgcttgtttactaactttaacttcatctgctaggggtatttgggtcataagatattcttgagccaccctacgattgcttctgcggtcatctagttttgttgacgtgatgtcaattggtttttgtgtgttcagg

SEQ ID NO: 89459 - DNA, 847 bp, Citrus clementina
  Intron number 1 from transcript clementine0.9_022362m (loc us clementine0.9_019149m.g) derived from phytozome v7.0 (c hr-ID scaffold_56; pos 1127049 to 1127895)
ggattgtggctgtgttgccaagctcagaaccaccggtgagcagccgtttgtcaccgataatggcaactacgttattgatttgtatttgaagaaagacattgacgatttgaaagttgcaagcgacaacattttgcggcttgccggtgttgttgagcacgggatgtttcttgatatggctactactgtgattgtagcaagcgaactcggcgttacaattaggaataaatagtgattttttttaaaatttttaatttttaacgtgtcgagtctaattcccaagtgaatttgggcacattgtcattgttatacaaacacaaaaaagggatttttgggtccattttttaagaaactgatgaattctcctgtattaggaggtacttccaagttttgtttgagacaggtattagaggattttaggcgattctgaagataactgaaggatgagtgaagaatggtgtatcacagttatcattttcttttcaatagttatttccatgttatatttattaacgctttggaattgacttggtcagaattgatacgccctgttcctttttttaagtgttattttggattgcctctttctttccttgtgattgatacttgtcaaattgcaatttatgtttgacaaaaatgagcttggtatctagttctatggtacaatcgaactttgactatggaatctgattggagatgatttttgctgtgtatgtttcatgcgcaattcttatttagtatgcctttgttcactttctgggtgggctatttttggttttggccataaattgtgaattgtatttctgtgttctcaggagcagagtaaaattgcaggggtggggattgtgta

SEQ ID NO: 89460 - DNA, 568 bp, Citrus clementina
  Intron number 2 from transcript clementine0.9_008741m (loc us clementine0.9_008655m.g) derived from phytozome v7.0 (c hr-ID scaffold_69; pos 1030153 to 1030720 reverse strand)
attcatctgacattgtcgaaacctctgcaggcaatgtactatttctttgatatatttgcttttgattttgattttgatttttgaatgaatgattataagctcatttgcaacttaggttttaaaagaacaaagtagcagtttcatttttgaacatatcgcgcatctatgctgataagttttgtgattggaatcccagttaattatgatattctacttatttctttgtccaattttattggatgatggtcgcatcaaagaattaggaaaaatgaaatttcattagtaaaagacttaaaataacttggatgataatttttttattgcattccctgagaatgttatgaagtgaaaactcaacagaatttgcagagataatgctagttcaacagaatagcatgtcattcgaatgtttcattttcttatgctattctttcctgcttgttatttatccctacccttctttcttgttcgatatacacttgcagaagagttatgtttttattaattgttatgtttttcctcagcagaagcagattacaactggaagatatcacacattgcttatcag

SEQ ID NO: 89461 - DNA, 963 bp, Citrus clementina; identical to SEQ ID NO: 80618
  Intron number 1 from transcript clementine0.9_000355m (loc us clementine0.9_000355m.g) derived from phytozome v7.0 (c hr-ID scaffold_12; pos 713568 to 714530 reverse strand)

SEQ ID NO: 89462 - DNA, 493 bp, Citrus clementina
  Intron number 4 from transcript clementine0.9_026989m (loc us clementine0.9_026989m.g) derived from phytozome v7.0 (c hr-ID scaffold_104; pos 148375 to 148867)
tccctttttgggtgctcagtgctcaggtgaacgtaaatgttggttcttatttactttcatcatgtcaaactcaaatgggttttaaactccaaataccatacatgttatgttgtggattcatcatgcaaattgttcaactacaatgtagctatccgttactcgctagtctttttatgtggtttagagccagcatttcaaacatacatgttatattgtggattctttcagtccatgccaaagttttggaattgattatttgttcatacttttggtgcatgaaccaggacaatgctcgaatctttttcttcttacttttcattttatgtcattatatgcaaggattttagatgttaaggccaaaatatggtaaccagtaaagataaaaacaaacatcaaacaataatccacagtagtgttatttgagtaaataattgcatttttatcttcaaacttctatctagttgatacagcaggagtcacaaaagaggacggc

SEQ ID NO: 89463 - DNA, 1047 bp, Citrus clementina
  Intron number 1 from transcript clementine0.9_023338m (loc us clementine0.9_023338m.g) derived from phytozome v7.0 (c hr-ID scaffold_12; pos 4928472 to 4929518 reverse strand)
cctaagggacgaccactttctttgcaggtttgctcgcttaattaattaattttgcatgtttttcatcgatcccttctgaattggacccctgtgtacgtcggtatctcatctctttatttggtttggccttccactttcatcatatatggtccatggtttttcattttcgagttgccaaagaaacaaactttcttttcgtctaattttattttcaaaaggtcacttttggctccttaatgttaaccagcttcatcaccataactgtttttctgtttccaacttcttaagatacaaaagaatatataggcaagagatagttttgcttcttcttttttttcgggtctttagaaataaaagaactaaaaatcttgttttgctgattagtttttataaatatcaattatatagagagagatactttctctagtgcagctgtactcattttttttatgcggatatatttttaagtcatgtaacttaatagcgttaatttttaatattattaaactgcacgtttttatagtacattaaaaataaattatattaagccacttatcttaacagctacaatgtctgtattaaaaaatcgtccgcacgggagtgcatatatatatatatacactttggctgcaattagctcaaaacttctttcggtcactgttatggctctttaatcacgttgtcgtttagtatagcagctttaggtattaaaattaaaatttaataggtaaataattaataatattactgctggctgcttgctgcgggctataaagtgaatatatattaagatacgtatccatggtaaccaacaattaatacgtacgtttaattagttaatctaaacaaaacaggtaatccctttggtttcctatactacataaatataactggctaaagtagacaggtagtaatgcataaaggtaatttaaattaaagtgagcaaaaggaaaaaagaaaaatgatcccgtacgttggcatttggcaaaatcaaaatccgtctgggaaacgcgtttttctttgcagactgtggagcttaaagtccgg

SEQ ID NO: 89464 - DNA, 882 bp, Citrus clementina
  Intron number 1 from transcript clementine0.9_005201m (loc us clementine0.9_005201m.g) derived from phytozome v7.0 (c hr-ID scaffold_21; pos 3662893 to 3663774 reverse strand)
aaaaaactcgttattcgtttagaggtaattgtgtttcactgctatttgtattgcttaaatttatgcttcttggtatagttttaacatatatgggattgaaatcaatttcagttgtgaagcaactccggtggttcccaatattaggcattgtagtagatccaaaattagcttgttaagaagtgtagataccgtagagcccaaaacttcatcttatcttgcaagagtctgttgttttattttgaaagagacaaaagtgatgatgatgggcagcaaactctaggaatcaatgcttgctgacactgacccccaagaatcaatgagtctgaatttgataagtgcacctatcctatcacaaaagcttttgcgttgagtttctaaccaattttcatttgggtaggtgtcagttcatgctctggcttgactgttctgttatttaggttgttttatccgtattttcttcactcacttgatggttagttctctcatgctttcaagctctcaacagtgaatgcgagagattctatttttcccgtccagtctataacctagcaaatcattaatgctgtagaataacatcttgtgtagccgagtttatgtctctgaacattggtccatcggcatttaggttcaataagcatggcactgattttcccccttattattattttcctccacagattatcccctttgagtatttgaattttgaatatattattctgaatcaaaactctatctgtccgtgtagcattttttatatgctttacgatgtttaccaataattacccactatggggtatttgaattttgaatatattattctgaatcaaaactctatctgtccgtgtagctttggcttctgaacttggttgagaaggctcttgt

SEQ ID NO: 89465 - DNA, 722 bp, Citrus clementina
  Intron number 3 from transcript clementine0.9_028440m (loc us clementine0.9_028440m.g) derived from phytozome v7.0 (c hr-ID scaffold_87; pos 452893 to 453614 reverse strand)
ttctgtagttcgagtaagcttcacggtgtgttagagcagcaatataggaacagggttggaaaattacggagctttgaaaggaattcttgatactagtcttgcacatatgctatacatgtgaaaatggagagacttgattttaattaattgaaaagtaaatgtgattcacaagttctgcaagataatttagttggaaaagggagacaacattacaagaacaagagtactgatgaatgactaattaccctaatctgttttcttatccatgcgctcatttaaggggcaataatctgatttagtttatcctgatgcggacataacactagaaaaaatgcagtgttgattaatttttttggttacactcagttactatgagggatttccaagtcaattatggatttgaatgtgaggctaattactgcaatatcatattaatatacatttgagttcaattttatatatcgacaacttgtttgaatgactatctttatgaatggattgagatctacccattacagttttcaatattggtgaaaacttcttcaaatatctatcaaacttgtttgacgagctttgtgtttcacatgatacaatgctagtttcttagtagcttgttatcaatataattatacttttgcaggcaaaggaggccggaagtacatgattttgaatgggtgctgcatggagagacacaatagggaggaaaaccaatttcaaccaaa

SEQ ID NO: 89466 - DNA, 996 bp, Citrus clementina
  Intron number 1 from transcript clementine0.9_021320m (loc us clementine0.9_021320m.g) derived from phytozome v7.0 (c hr-ID scaffold_71; pos 343092 to 344087)
ccactgctaaaagccgccttcaattatctgtgactgtgaccttccccgccctattttttctttctttctatctttcttcttgctatatattcttgattttctgtttcttttgcatgtttcttggcaatgggtatgtgtggtttgtgttattttgatatgaattcctcactttgtgaaatgggtatctgtgaatttccgattttgggtgtattgtttgcttatgtctaagggtaaatcttgcaaagtgaggtctcttaggatgattctttacagtttgtactgatttcaggagtgctatttcacgtggaatctttaataaatgggttcttgccaactactgtttgtgcttttcttcattgtttttccaatgcttttttctttttcagtcaatcttctgttagtaacttcaagaatctgaatgaaattctctcttttgcttgtcatttctgtaatagatatgagacaatatcttggatttgtgtaggagcgaacgtgtattttaaattgcatttagatgtatgattccacagcagtattgtggtattcgagagccatcaccagacactatggtataaggaatgctatattgttattatgaagtaatgcctcaattgcatatttgaaatgcgaatcctggatgaatgacttaagaaattcaagtgaaaataacaaaacgctgcacatatgttgcatatccttaactcttaagcctatgcaccaatagcaagttggtctggattatgtgactctggatctataatttcttttaatcatattgagcctttgctgcagggtaaaggagaagagttttttttttctaaagaaatatgatcttattatttacttttccattccatcttcattatcactgctgtcaggctgatgccgtttgtgatgacatttttactttatctattctaagctgaagctagctatttgagtatcagcatgttcctttgcacgattaagcccataatatgtgtttaacgggccagg

SEQ ID NO: 89467 - DNA, 772 bp, Citrus clementina
  Intron number 1 from transcript clementine0.9_004473m (loc us clementine0.9_004473m.g) derived from phytozome v7.0 (c hr-ID scaffold_16; pos 2769445 to 2770216)
gcgttaaggtagtgcaatttctttttctttttcttttttttttaatttatatttcgttcttgaacaataagtgcttagttagttgaaaattaaaagacatgccttttatgttttgcttttgttttctttgcttcttggttttaattttgtgtttgctttcactgtttgtagtgtatggagtttaagggaggaaatgattgattgtggataaaaacctcatataagcttttactctttgtagtgtttgctttttctttattcaactttattaatgatcttttaatataatatgttcaacgacaatgtactcatcaagacgattttcctttttttctgtgagtttgtgtgtgagtagggggtggggggttaaattcttgaatgaaagattgatcaattatgggaaatgaccatagctgttataacaataattatagagactgagcagaaattttttccgagggcaagtactatgctttacagttggtgcagtgtaagctcacaatgtctagatggtatccatgatatgattacgacatggtggtgcaaggctatccaattgggagtttttttttttaattattattatagaccatgatttgccttttattttttattcctttggtagcttgacattttgaatattgatggtgtactttattctcaatccatgagagtgataagtgaatgacttgaggaattttaattgtatatgatgatatttctcttgtgctcatggaataataggttttagggactttcatcacagaagggg

SEQ ID NO: 89468 - DNA, 553 bp, Citrus clementina
  Intron number 2 from transcript clementine0.9_005710m (loc us clementine0.9_005710m.g) derived from phytozome v7.0 (c hr-ID scaffold_16; pos 1010068 to 1010620 reverse strand)
tccattgcatattgctgcagtcaaagggcatcgtactgattttaaatttatgtttcatctgattttgttaagttttcagtgttggaaaatggaagatatggcatgtgaactgtgaagctacttcctttgtttactttaaagattgttgttgccatgaactagaacattttcttagatatgtgttaatgcaattattaaggtggatactgcaaggctatttcatgataatttcaagatgaatttaaattgagaatctttgatcatggtttcaagggcctctaaaaagaaggcttccttttttttttctttctttttgatgtacttaattagtatgattagctgctatttagcatttaacccaccaagtaccttcttagcaatgacatagagtcaaagttctgtgtgaaatatcatttaagaatgtgatggcatgagatgtcttacatttcatagtaaaatggtgatatttctagttttggtttcgtaaacttcgaagagtctcacactaataattactcatttgttgcagccattgtccaagtgttacttgatc

SEQ ID NO: 89469 - DNA, 593 bp, Citrus clementina
  Intron number 1 from transcript clementine0.9_030495m (loc us clementine0.9_030495m.g) derived from phytozome v7.0 (c hr-ID scaffold_37; pos 1384734 to 1385326)
cgcccctagtacaaagcactttgccttttaaactttagtttatagaatataatatgattttatgataatgatggttggcacacaaagtggaattgtggaaggctggaagttgttgattttgtgaactgtgattcatatttttaaaattataaaataatagaatgtgaaaaacggtgatgatagcatattaagtggaactgtgaaaggtgctgattcatcttcttggaattataaaataatgatggcatgaaagaatgagtgaataaaatagtaaaacaattaatttgaatgttaacttttttaattagcttttaacttgcgattttgtcaaattttttataaaataaatactaaatttttaatgtattttattacagattcaatattaaataaaccaagaaaaactctactttttttttttttaagagagtaagtgaaaatcaatcatccaccaagtctttatctccatgtcaagttaatgctcaagattccagtgagcaacatacttccaagtttcaaagggttgaagttgaagaaactagaaatacttatctggagcgtgatcctggattacgtcatcaaatagggacata

SEQ ID NO: 89470 - DNA, 746 bp, Citrus clementina
  Intron number 2 from transcript clementine0.9_024791m (loc us clementine0.9_024791m.g) derived from phytozome v7.0 (c hr-ID scaffold_21; pos 984067 to 984812)
agacgctttctcctcctttggtgaggtcactgaaggtaagtaaatttacaaccttcccgttagttcaagcctagcagtgttgaatggtcagtgttcgacgaattgtctgaatgaccgaccatagtgattcattatttgtattcttttatgtgaccgcaacgaaggactcaaacaatttgcttattataattaacaattcactggctatgaaatttttagtttcagcttttagaagaaagcaattctaatattgctgctaagctttagtgttatagaagaaaaggacctgtcactagctggactgacatgctttctaaataacagttgcctaattatatgctttactgatttaagtcagtgatacaatcccaactggggttgtggcattctgtttttgatagtgtacagaaatgcaagttccccttgttttggtgggatcattttcttaagtctgtgaagtatatcagatacttttagagaaggaaatggtaggttctgtgtctggtcgaagagaaatctacacgtactcaaaactttgatttcccttgaaaagggttcattcatttacaagtaaattacccaaattggtagtttaaaccccaagttcattttggcattcagctctttagattgtcctttagatgtcatgtgatcaggaagcatgttggattttctatcttgcctacttgatgacaatgatagtgttactaattcctgcaaatgctgtgtttcagtgaagataatat

SEQ ID NO: 89471 - DNA, 940 bp, Citrus clementina
  Intron number 2 from transcript clementine0.9_024850m (loc us clementine0.9_024850m.g) derived from phytozome v7.0 (c hr-ID scaffold_12; pos 2321837 to 2322776 reverse strand)
accagaaacctgtctgtaccagcctttattctttggttggatcaatttttcctttattgttgctgttcttgttttgaattgaaaagtatatcataatatcagatacaagaaacctagagcataaaacaggaaaaggaagttggcagtttgaaggatttatgacttacaggagacaaactacgtgttgcatagattaatgtagaatgtttggttctgtctgaaactgcaaatatggagtagtgtgtaccctaagcttcttgctgaaccgttcgtaataactttcttcttttttcctgctttcctgaaaattgaggataggctgttcagtttgaccgaattgatgccgtttcagctataatcttgtgtctaaaacatgtgcaattctagtaatagaatctagagaccatgtttttttcttgaatcctcattgaaatccaaaaaccaaatgctcagctgcctctttttttatcccagggattggtggacagaggccttcagtgtgcaactccagtaaaaaattggggccctccttttagtagctagtgtgcaataatataaaataatcatatttgattgcctggaggttcatattatgctctgattttcaatttgagttgtttacaagaaatcaagatggagaaacttgtaaaccataattttatgatatctcaacatcttgtcggaacgatctcctgggttttaagttttcttcctgatatcatgccaactggtttacgcttagtgtggatcagtgttttcttttcctatttatgtaataagaaacctgcaactcaattccatatgtatatgaaaccttgaaaccatcttattttccaaaagagaatgaaaatttccaatttagggtgttcataggaaatcttttctcaaactcttactgctgtcaggtcgaagttggaaagcttctgaactgcgcctgaag

SEQ ID NO: 89472 - DNA, 417 bp, Citrus clementina
  Intron number 1 from transcript clementine0.9_024850m (loc us clementine0.9_024850m.g) derived from phytozome v7.0 (c hr-ID scaffold_12; pos 2322928 to 2323344 reverse strand)
tcttctcttgatcgattccatatactctttctcaggtccgttttaattcacatccattttctttcactaacttgagtgttaaatattcttttttgcttttgtttagattcattcatgttttagtgtctgaaatgatattcacataattgttgatccttttacgtttattcttcaaatgggtgttaagtaattcgaccaagttgcaatttttttttttttaccttgtgttgggccttttgagttatataactctagttcctgtaatgtttgtgacaacatttaatgactataaaaaagatttacttttttttttcctgctgtgtgtgaacttgttggggttagtattttgtgtttttttttttttactaatattgttatcccttggtgttatgtgcagcaactgataatatagtaggc

SEQ ID NO: 89473 - DNA, 801 bp, Citrus clementina; identical to SEQ ID NO: 88850
  Intron number 1 from transcript clementine0.9_008795m (loc us clementine0.9_008804m.g) derived from phytozome v7.0 (c hr-ID scaffold_16; pos 512104 to 512904)

SEQ ID NO: 89474 - DNA, 888 bp, Citrus clementina
  Intron number 1 from transcript clementine0.9_027637m (loc us clementine0.9_027637m.g) derived from phytozome v7.0 (c hr-ID scaffold_13; pos 3820211 to 3821098 reverse strand)
ggtaaacgcagctccatttatcgtggagtcaccaggtcggtttttaacattcacttgctctttatatatgtcatttttttggaattatacatgtatgtttagaggtaagtgattgctttgatgggctggtgtattttttgctttgttttgtgaaagaggtgtttaattgatgggggttgtgaaattggaacagatatgctttgttcgattatatggttggcaagttcatgaattcgaagacttgggttctttggtggagttcatgaacgctttgtatgatagaagtgaactgattagttagatgggttgtcttatatggaaaggctaattttgttggctattcatgatttcgtccaatgttatgtttgatataaacctgattgactcagaagcctgtttgtgtaatgttgcctggttttataagtgtttattacggtggttgcagaattaaaggaacctgcacaaggatgtcgaatgattacttatgagattagcaaaagcagcgtgattttaagcttttaaataggaaaaaaatgtagaaacaaaggataaaaggagaaagacttgagagaactactcagtgccaactgtattaggtcagctatgttgtctgccaaatcttgtttgtggatgataaggatgtttgtttctgattaatttggatccccttttcatctctgttagtcttcagctgttagttttctttgattagaaacatctggccatgtcatggcaattaagctgtgtgttattgtcttactttcattacactaagtacatatgttagaaattgcttatcttcttcaactgctgttgatgttaaaatttgtaatcctttgagacattgaataatgctctggtttccatattcataaacatcagacatag

SEQ ID NO: 89475 - DNA, 370 bp, Citrus clementina
  Intron number 1 from transcript clementine0.9_024626m (loc us clementine0.9_024626m.g) derived from phytozome v7.0 (c hr-ID scaffold_57; pos 955151 to 955520)
tcaatttcacccttcaggtctcctctttgttttttatttttatttttattattattactattattattattattattattattattttttttttttgcaattctagggatttttcttgtttttatcaaatgggcatgttccaaataatcatatttatttcagtaatgcaagcttctagattgctgggttggtaaaactatttgtttatttattttaatttctgggttcgaatttattatgctttgattcctgttctaagactggctgtcttttatttttttcttgtcaaaaatcacatttttttttgagtgattgtattgaaattgattgtttgtttgaatggtaattgcctgtagcaagcgtacttcaa

SEQ ID NO: 89476 - DNA, 736 bp, Citrus clementina
  Intron number 1 from transcript clementine0.9_027029m (loc us clementine0.9_027029m.g) derived from phytozome v7.0 (c hr-ID scaffold_52; pos 1473794 to 1474529)
agtttttcctcttaatcttgccccttctcttcagggtaattccctacatttcttctccctctatttacactctcctcattattttttgtagatatgtcattgttctatattaatgtgtacaagatttctatttttgtgggttttgtgtttcttttatgatcttgcttatctactctttcgaatggatgaacaaaatgttattggaggagataagcaactggttcactagggggaaaagtttgttagcttttgattgactcgttgttttgagaacgaagtacctctgtttttattatatacattaaacggaaaaaggcttaagcttttatgaataaaaattcttacttttgttgtgtacttactctttgtgatgagatacttttgctttgattttgttttagaagaaaacctgagatcagtgatgtcaattagcacaagtagaaaatgataatctaatgttttacgtgtctttctttcatagtacatggaaactatgtatgagtgcgtaagagagaaatcatgaaataaataacttggcgatgaccgtgtcgtcatcgacggtcttgtcatcatcggcagtggtactattgagagaagaaagaaaatggcaaggatgaggggactggagtgagagtggataagctgataaattttttaatttctcagcatttcttttattctttctttctattttcctacagcaataacaagatcataattgaacttttgtaaccac

SEQ ID NO: 89477 - DNA, 552 bp, Citrus clementina
  Intron number 1 from transcript clementine0.9_013375m (loc us clementine0.9_013375m.g) derived from phytozome v7.0 (c hr-ID scaffold_84; pos 1071704 to 1072255)
caggtcctcccctttttcttcaaaaaaaaaaaattaaataattaattaaaatctcattcttatttctaacaaaattaatcattaatcattaatttgcgtaggtacgtgtatctgcatttgaatgttgttttataggaagtgcatttctaaaatcactttttataatatttttatctgttagataaacaaaaaagcacttttagcagccaaatggactgttgtaaatttgatttttgtgaaatctggaaattcgatgctttgttaatagaagtatatagtttttttttcgttttttaatatatttgtctcaaggagatattcaatattaaataattttttggctggtggcttttgaaagttatacatgtgttgaccgtcaacagtacttgtaaaaatctaaaagatgcctttatctgttgggactttcaaagctgtgtgggcggcatttttcaaatgccaatgataaaaagagttgctttggtgaagtagatattgatatatttttttaatacttcagattgacccagcaaagtacaagagcattacgtctgg

SEQ ID NO: 89478 - DNA, 698 bp, Citrus clementina
  Intron number 1 from transcript clementine0.9_021264m (loc us clementine0.9_021270m.g) derived from phytozome v7.0 (c hr-ID scaffold_16; pos 770920 to 771617 reverse strand)
atttgagtgatcgtaagtttgccttttgatttaaggctcctttgttttatttatatttttcatttgaatatgttgttgtagtaatacgattaggcaaattctaagataggggatcccatacgattatgcttacatgggctcttttgggggttgttttggaaatctagagaatataagcaagttgtttaattgccaattgtgtagaatttaaagcagtttggaaatgcattgcaagttaattgttaatgattccttcgttttggttgatctggtttttgatctcaaaagcatagagttaatcggttcttgtctcaggctcattaacaaatttcacgtaaagttggttaggtatttcttaattgtcttgtttgagttgtttgtttgttatttttgtaaccttggaagtttgttttcatagtttattttgaaattgttaaagttgcatgttgcgaccttagtgttgttgggtttttcaagctttttgtaaggctgctgcaagtataactggaaaccccttttgttaatctaggttgatgcagcagaaaattttgatttccatgtgatttggactgaatttatttttgggcaaaggaagctatgaaatagagtaaaatttgaagtcttctcattcggaaactttattgcaaatttatggagttcacttaatgatatcagttgtaatgctaggtctttccgtg

SEQ ID NO: 89479 - DNA, 447 bp, Citrus clementina
  Intron number 4 from transcript clementine0.9_002477m (loc us clementine0.9_002477m.g) derived from phytozome v7.0 (c hr-ID scaffold_75; pos 786626 to 787072 reverse strand)
atcttttactgctttccaaagaagaggtaaccaaatcaacaaaaaattttccagcattgtttttgcccgtatacttagaatagtaaatgacgtaagttttagatctcatgttatgttttaaggaaataatcaataaaacacaaacaaggaaactctaactttggttcctagcttatggaaactcaaggaattcatgctttttaatataataacatgatttgacttgagatttttctccttcttttttaatttattattttttaatccaaatataattctaagtaggtggttttgttttttttttgttctttcttcccttttctagatcatgttctcttattttttttcctgcatgtttctaataaaggtactatagcttctggtcttgactgttgggaggtatattgctcatgcagttcaaagaaggttcaacatttccaacaacat

SEQ ID NO: 89480 - DNA, 442 bp, Citrus clementina
  Intron number 3 from transcript clementine0.9_002477m (loc us clementine0.9_002477m.g) derived from phytozome v7.0 (c hr-ID scaffold_75; pos 787174 to 787615 reverse strand)
agctcagatcattcaaaagaaagacgaggaagaaggtatttctcttttgtaacttctgttttgttccccagagcgtttgagaatttaaaaggaggagaattaactttaattgttgtgtttaatgtccttttagcgaaaattggtacataattgtttgaggtagagaattacacttattatcatgtagtagtttttcagttctaaagagagtttgcaattagaaatgaaatgcaatttcaatttcaatttcattgtgttatgttgtttgggtgttgttgccacaaaaattgttggtactatgctgttgaggtgtttttttacattacatttctttcaatttttttcttggtaattattttgagttctatttcattattcttctgggcaatctgagatctagaatctgacccaaaaagctgtgtttggtaattgcagtgcaaga

SEQ ID NO: 89481 - DNA, 492 bp, Citrus clementina
  Intron number 1 from transcript clementine0.9_002477m (loc us clementine0.9_002477m.g) derived from phytozome v7.0 (c hr-ID scaffold_75; pos 787936 to 788427 reverse strand)
cactggttcacgctttggtttcaacaatatctttggtgagtttattttttcttcttactttttttaattgatatctttatttatttaattatttaattttgtattctttaatgtttagtcttttaattttgatctttagttcctcttgtattctttcttacttagttgattgttaaaggaaaagaggaatatataatacactctatctaatgcatagatattgcattaacagtcaaaataaaattagtaaaataacctgagactttaattgtttacgtttaaatataacaaattcagttactaattctacttatcagtttgcgcggctttagctaaaaactgttcatccattagacttgtagaaacttggaattctagtttgatagagatgtttagtcactagtacatttggattttatttctatttaattttcttggttcttcattaaaagactacattttaattttggcagattttatcttttaagaaac

SEQ ID NO: 89482 - DNA, 947 bp, Citrus clementina
  Intron number 1 from transcript clementine0.9_033805m (loc us clementine0.9_033805m.g) derived from phytozome v7.0 (c hr-ID scaffold_52; pos 501621 to 502567)
ggagaaactaaagcaaatagaaggtaaagtttcacgaaaacatgcatctgcttctatgcggggcatatttgagaagtacatgttttaaatttcttttaccatttcctttgattagcctgtttgatgaaaaatttaatcataattcttgcttttaagaaacaagaaattaaaggaatattagataaacattttttggcaactctgttctcaaaataatttgtgaattgaattctaaactctaatgtaaaaaaaaaaaaaaaaattcaaataattagcaatattttttttttcacttgtgtacacttcacgcttggtacaaaatgttttacacagttttattataggaaaagttttacataggttttattatgggaaaaggattcagtattgatgtgaatttttgatgagtaataaattaataattattagataagaaaaatacaaaataaaagaaaaaataaattttaaccattgattttatagcttactgtgtttatggtttctccatttcaacgccagttggaatggttgttgcccgatcaattgtacatattttatgttataaatattgtatcaaatagaaatgttataatttaggatctagattttgttcaaatctgaaaaaattattaagttaatatagtttaatagtgtaatgacattatactattaaatcatatgtcttaataactttttaggctttaataaatctaggattttgaatcagattaataatattgaatcaattgcattctcaaaaattaaaaatgttaaaaatacactcatattttggatttatccgaattttttaaaatattttcagatcacaagtcaaacttaagcacaatttttttttaaaaaaatttctatgactataagcctctcccaaaattatgaaatttgcctgtaatttatttaagttgtatgcttttacaggggaggcagaa

SEQ ID NO: 89483 - DNA, 773 bp, Citrus clementina
  Intron number 2 from transcript clementine0.9_019919m (loc us clementine0.9_017066m.g) derived from phytozome v7.0 (c hr-ID scaffold_12; pos 353992 to 354764)
cacaaacccaacactatctccttctcatctacaaggtatatatcattgcagtcttcgtgtctaccgttttttgttaaatatgtttcctctcttgttcttgaatgaatatgttctactctggtacggcaaaaagggcaaaacatttcatttttattgattatgttattgttacctaatccaagattaatttggttatgcttgttagacttgccgggtttcacgcgcagtgtttacaaaagagaccatgctttaataacacccgagagtcatgtactcagtcccttacccgagtggtacttttgactcgcttttgaatctagtggcagaaagctctgttcttgttttctggtgtagtcattcacatttgattgacaggacaaatacattgggagcatatttaatcacacccgcaatgggttcacattttgtcatgtacctggcaaatatgcaaggtttgttcatcttcagctgtcattttctttttttccttttgttctcagatttgaactttgatgtgatcttcacatctgatgtttatgtgttgctctttagctgtgcctctgtcacagtggtaaaagtgagccgtttcttattttctgcattttcagtcttgggcacatggaaaattccagcatgacctttatagtatgtattgtcatttgtctggcatccatgttttgtgccaagatatcattagaatgacattgcaattggtggcgtacccagaatgcatttacttgcttgctaatataagcctatatactgtgcagaaa

SEQ ID NO: 89484 - DNA, 757 bp, Citrus clementina
  Intron number 1 from transcript clementine0.9_011486m (loc us clementine0.9_011486m.g) derived from phytozome v7.0 (c hr-ID scaffold_16; pos 1496338 to 1497094 reverse strand)
gagaagaaggcgaagtctcctcttcagacgacgaagtattgtgctcttcatccacaaacctaaatgatttgcattttgtcatctttttttagcttaatcttaaacaacaccgttttgtgatgtgtgtactgtttatctttattagttttttttttaaattatcttggttgctgtttatgttgctgagaaaatacgggaaatgataggaactagctcgattcaatctcttttttctgtgttgtaatgatttcatgaacatggatgttagttgtggttagctaattatcagttaatatgtactctctttcggaatctctgacctaggatcagaattgttcttgaatctctcatttatttgatgaagagaaattcagggcttaaaatgttgtcatgtgattttgaatttctatatagcattagtatgttttttttattgtcagttgtatttcatgatatgggatttcctttgttgtgtgtgtaccattagatgcttatacagttgtgttttcaacttgatttttttttttatcttctgaattcgcgttgctagtttaaaaccagatttagcatgcaagattcagttttagtattaattattctgttgttgtaaagtctatattcatactgtttatggaatttttttaattattttcctaccttatttttctcataagaaaaatattgttaaatatttttgatttagtttctaaataagtaatttctgtctcataggaaaatcctggtagctgttctgcac

SEQ ID NO: 89485 - DNA, 401 bp, Citrus clementina
  Intron number 2 from transcript clementine0.9_002013m (loc us clementine0.9_002013m.g) derived from phytozome v7.0 (c hr-ID scaffold_8; pos 1706523 to 1706923 reverse strand)
tagataattacttgagaatttgtgttgaagcaaaggtgatcttgagcttctctttctcaatatctataagttgtttcgataaatattggctgttccaccatgttgattccctgtttttttcttaattaaggcataaaggaaacaagtaataagccctgtagagattagtaccagttaagttcaatattttgttcatttgggttcgatcgcatcttagtgctttgattcaagtataatgatacagacatcttttggttggatgagatgctcgataataattcttactttatgaaaagaaacttaaatatttgctaggatcactttgttattttgtagggaaatctaaggaagacagttaatttgtaggtgaaagcaaggatcattacaactgaagctgacaa

SEQ ID NO: 89486 - DNA, 324 bp, Citrus clementina
  Intron number 1 from transcript clementine0.9_002013m (loc us clementine0.9_002013m.g) derived from phytozome v7.0 (c hr-ID scaffold_8; pos 1706973 to 1707296 reverse strand)
tgttcatcaaccttctcctgttattcccactctctgtatgtgtttattttaatgttaagaaaagaaaaataatttttttttagccattaatgtgttcaaattttgaactttttagcttttgttccggtttttgagacttgaactgtaaatgggatcagttaatgaagctgtttgagcatctaaattttgtaattttattttattttgtaggaaagggtagcaagttttgagtaatatgagtttgaaatgatattgtgtctatgtgtgtttgttgtgttatgatttgcagtggggaagttgccggccagtcaagctagtgccgaa

SEQ ID NO: 89487 - DNA, 541 bp, Citrus clementina
  Intron number 1 from transcript clementine0.9_027511m (loc us clementine0.9_027511m.g) derived from phytozome v7.0 (c hr-ID scaffold_11; pos 3760792 to 3761332)
gtccaggtaacttattatgaattaattttatttttattttttcggtttgctttttccttagatttgtgatttgatttttttagttgatttttttttgtgcaaaattatatattatcaatattttgcctaatactgtcattgagatgatctcttttcgagaatagtcaatgaattttagaggttaattgggccattgaaggatgaataaatagtttattttggaaaattaaatagctgctgaaatagtatgcaatgtttataatgtgctaactttataagctaaatgagactattgaagaaaagaatatgcattagaacttttggttttgacttcttctctgttttccttctattggatcgcatttagtttaaaggcagtttgttgatacatggttatcttgtattttttagaggcttatatacttacttttaataatgttattcttgttaacttgggactactgtaatactgagcaaataatttgtttgagtgcagttaatgtgaatggattaaaagaagagaaaccagatgaagtagtgg

SEQ ID NO: 89488 - DNA, 838 bp, Citrus clementina
  Intron number 2 from transcript clementine0.9_014823m (loc us clementine0.9_009965m.g) derived from phytozome v7.0 (c hr-ID scaffold_12; pos 4039480 to 4040317)
aggtgactcctgtaactaactcaccggttcttttggtaatttcatttattaattttcttttcttctcaacagaaaacgaaacgttttacctgaattttattattctgaataactgtttccagtttggactttatattttaaatgttagttgaacttaatttcaaaatacacgtggcagtaaatagaagctcgcgcttggattaaccgttccaacttaacgatagcgttttgaaaatagaagttgtttctgaaaatagaaacattttaggtgggtcgggtgcagcatggggtccatctctcgccaaaccaatgccttgaactttattcgggtgataaagatttttaaaactcattcttcttattaaagatttattagcagtgcggatagattttggaattatgtttaattataggtaaatttgaaaaattctagtggagtttatgttgctgatgtgaacgctaactctaaagcatgcgcacacaattcataatgatttttttttttttgacttataccacctgttgttcgtttcgatgtgacgatgtgccggcatgacctatgttaccttaaagagtcattttaattttgttcattagaatatgaggtatgtattatgtcatcaattcatcatcctaagaaacttgatttgtgccaacacaaaatgcttttgcttttattgtaaaaaaaaaatattctgaaattatttccgtggcttaacgatggaattgtcatatagaatcaaatgtaatttgcaaaaacaaccgtaaaaggaaaaaaaaaaaattgctgcaataatcatttaagcgacagtgccttgtgttctcttgcagggtccgg

SEQ ID NO: 89489 - DNA, 556 bp, Citrus clementina
  Intron number 2 from transcript clementine0.9_020154m (loc us clementine0.9_020154m.g) derived from phytozome v7.0 (c hr-ID scaffold_12; pos 3015645 to 3016200 reverse strand)
ggttagtgatgaaagattttgcctttgatttttgatatttcttcatagcttctaatcatgtgacgttcaatgttcatgactaaatgtagcgtaaaacttgtatgacctttgttaagagctcacgatgtgaaactggtgcaagctgcaaaatgctgacattcttctaattggctagttagtaacatatgagagatctgcttgtgcagttagtgtaggacgatgacattggtacctgtgtaatgctgtgtatagattaacaaagcaaacggaaagaaacacaatttcatggcaccagcagaaggctaggtatctctgggaaaaaaatgcttgaaacttcaatgaaagtttgatgtaaatacttctctaggagtgtccacgtccaccttaagcaataagcaaattgagttctttagtttattaaatgcctggaaatattgaagtggtttcacttggatagtggagttgcataaaaaatctttttttaactaacttggatgtctgaaagctgttttattgtgcaggcattgtccgaccaaaaagaataagagcagagttc

SEQ ID NO: 89490 - DNA, 645 bp, Citrus clementina
  Intron number 1 from transcript clementine0.9_020154m (loc us clementine0.9_020154m.g) derived from phytozome v7.0 (c hr-ID scaffold_12; pos 3016282 to 3016926 reverse strand)
aaaaaaaaaatcaactttcattttagcgttacccggtaagcagtttatcttacagctgttgctataattttgttgtgatgcagggtttctttgtttgcaatttctgtatttcatttgtgattgtgcctgattggttgctaagaaactgatgaaagctgcaggaaatataagaagagaacaacaacttgtaacaattttatgttaattataaaatcaagatcaacgaagagtcctgctccagattcttttttaagtgttttggaaattagattagatgacgaatactgaatgcaagcactctcttctgttctataaatctgatagttttagaaagtgcttatatttaccattttgtttaatatgaattagatttacagtttttggatcacatgtttgatgctggtaataaactaagttgtggtctttattaaacaacatgttggtgatagcagtttttctttgttattcaacagcagattcgaaatcactacaatcatgggttttcttgaatgaatttcaagtagtggctactttgtagatttgggttgtttgtttctttaaaatggacaggaaaggttcaattgagttgatatttttttggtcatttcagaggattttgcacagggattcaaatctcaaactcat

SEQ ID NO: 89491 - DNA, 628 bp, Citrus clementina
  Intron number 2 from transcript clementine0.9_001473m (loc us clementine0.9_001473m.g) derived from phytozome v7.0 (c hr-ID scaffold_57; pos 1448028 to 1448655 reverse strand)
gaatcacctggtgagttgtggtgaaacgttatcgtttcaaatttcgcttaattctttattgcatatttttttctctaatatttcagtttaatttagaaaagaaagaggacccaaaaagagagagagagagagagggagagactctaccatactcaattccttgctcattctgatttggcctgaatgttggcattgactattatttgttttcatttcgatttaattctcatttagacagtcttttctaacggtcaataatagtttaaggaaaatgataatagggattttgcaataatctttctgcattgttcaagttagtagacaatgaataggatgtttatgtttacctcattttgaaccctgagggcttagttgagtagttgattgattcggtcttgcaatgtgttcccacaaggttttgagtttgattcctaattatgtggcccttagtttcgaatttgagtttgttaggtgggttgatggggcttttgggtatattgtacaaacctgttgattatttatttatttattttatttttgtactattttgttttacagttgttattttatttttgtactattttgttttacagttggtggttaaggacagacatctgttattgttgta

SEQ ID NO: 89492 - DNA, 802 bp, Citrus clementina; identical to SEQ ID NO: 78549
  Intron number 1 from transcript clementine0.9_005489m (loc us clementine0.9_005489m.g) derived from phytozome v7.0 (c hr-ID scaffold_81; pos 42041 to 42842)

SEQ ID NO: 89493 - DNA, 589 bp, Citrus clementina
  Intron number 1 from transcript clementine0.9_006322m (loc us clementine0.9_006318m.g) derived from phytozome v7.0 (c hr-ID scaffold_16; pos 2510319 to 2510907)
ctccagcttttatctgcggagctcaatttagcctggtacggaatcttatgctttctttcaagctgcaaaaggaagattaaaaatatctcaactttagtctttagtatttttttgaaagttgattgaccatagtccttactagctgatcgtgttgtccagttcatgtgggtatgcctttaacttcgtatgctttccttgcgcattagttttcacatcttcttttgatcttttcgtgtgtttttttaattcattctttatttctttctccttgtcgagccactgctgtatggcttgataatttttcattgaattaaggatttaaaggagtttgatttttaggattgcaagcaagtttacgtactgtatcatcacttcttttttattcacaaattttgatttatagtttgtttcttgacattgggtcagcttttgcctgtcaaatttctgtcttgggttcctttttttgttgattgaaaagcttcttgagattgttcaatctttggttttgatttctttacgcttatcgattccttgtttccgtatttttggttcagaacaattttcagctggaaacgatacaaaagtacag

SEQ ID NO: 89494 - DNA, 639 bp, Citrus clementina; identical to SEQ ID NO: 81105
  Intron number 1 from transcript clementine0.9_026789m (loc us clementine0.9_026789m.g) derived from phytozome v7.0 (c hr-ID scaffold_12; pos 2270245 to 2270883 reverse strand)

SEQ ID NO: 89495 - DNA, 494 bp, Citrus clementina; identical to SEQ ID NO: 83126
  Intron number 1 from transcript clementine0.9_014386m (loc us clementine0.9_014386m.g) derived from phytozome v7.0 (c hr-ID scaffold_87; pos 309323 to 309816 reverse strand)

SEQ ID NO: 89496 - DNA, 836 bp, Citrus clementina
  Intron number 1 from transcript clementine0.9_024851m (loc us clementine0.9_024852m.g) derived from phytozome v7.0 (c hr-ID scaffold_57; pos 307625 to 308460)
ctgactctatactcttggtgagttctaaattttgcttgtttcttcttcttactttttaaacaactctgcttcacttagtttcctcaatttacggaaattttgttcaatttgctgcttgatttcctctttattattgtttgagtatgcctttgctatgtgtgttaactgcatggtagttatcataatttcttggttactatttatttaattgtgtttatgttggttaattatattccttgattgatgttagattaagatgatattccttgatattaaataatagttaattggaagatcaaacacgcaaattaatttatgattcattcatgcatcctaaatattgattttcactagggacccacaaaaatcatttcttttatctgggtttgttcccccatcaaacacacaaaaagacaacattatagtcctaagttcatttatatatttggtgtttgtgctttagtcgattaataaagtaatgaatagttagccatttttaaattcattggagggtctagattgtatagacatacgaacccaatacatcacttgtttttaatattaagtaggtgaacgtgactttcactgaaagatggaaaatcttgtctatttgtgcgctcagaattagttcagtatagtgatattgtttcttaattatgcaaatgtgtattttgtattgtgttttgcgtttcatttctgaccaaaacagtggatgtttgttttatttatgcaaatattagcaatattatgatatttatttgaaagatgtcttgtatggctataaaatgtttgattattttaatctataatgataatggtgttttgtttcaccttag

SEQ ID NO: 89497 - DNA, 858 bp, Citrus clementina
  Intron number 1 from transcript clementine0.9_025607m (loc us clementine0.9_025607m.g) derived from phytozome v7.0 (c hr-ID scaffold_91; pos 251950 to 252807 reverse strand)
ggccctgatttctcacggctccctcgatcttaaaggtcctttttctcggggaaaaaaaattcctctctctttatttattctttgaaaattttaattaagggttttaatttgatttgtggggtgtgttcgttgttgattgctggtaaagctcggggcttttatgttttagggtttttttttaaagaatctgtgtttgttagtgcttgagatgtcagcaaaagcactttcaaattgttggaagtgcttttgtactaaattggtaatgtttggttgaagtgctttttcaggataaggacctattggagcagtacttgatgtttgtttttcacgaaacagtagcttaataacttacaaattacttgtgttttctaaggagtgctttcgagctctgaagcactttttagaaaagcactccaaggaaatcgttatcccattgccattggattgagtactctgttgactattaatgaaaactatctcatcctcaactagtgattttgaatgattaaaacgcacttataattgcattttgttctgtgtcagagtcagatcagaaatcatatctttcagacttgtcatgttatgaattagaaattcttgttagttttctttgcttcatgttgaatggtggagaggcaattcggctgctgccctgtaacgtggcttaaagtgacttcaggaaacgaaatcagaactctaaattcatatgtgtgacatgtaatcaatgttatggagtagataaaatgattacatgactaaagagttttggtgctttgcatctttaatgaaatttggtggttttcttcgtaattttcctgtatttcttacattcttgtcatttgaatgctgcaggagatt

SEQ ID NO: 89498 - DNA, 703 bp, Citrus clementina
  Intron number 1 from transcript clementine0.9_013618m (loc us clementine0.9_012507m.g) derived from phytozome v7.0 (c hr-ID scaffold_75; pos 716193 to 716895)
ttggattttgctctctctctatctgctctgcatatgtatgtaattttaaatctcgacttttaagcttattgtttcaatgcacataaataagttatgcctggattaaattctcagtatcaatagcgttttgtttctattctcagctcaatggtttgattacactttgtgcatggaacaatttttggaatctgggcattgaaaattttgttgatttaggtggtttgcttgaaaattcggatgatatgctctctgtgtttctgatgtttgtgtagttgttgatgattagaggtgggtttgttaaaatttctagggatatctaggtggggtttttcctttttggaatttttggattttcttaattgtatttatagatggttgtttgaaactcttgagattcttgcaatgtcaatgggttctctaaaacaatgttatgatattttaagtacaggttttgggaatatttggcttttgatctttgattgagttcaatatgagcttaaactgtattcatatttgggatttgatgcattttttaaaacttcaggtagctcttgtgaatctttggagtattcttaagaggtctatctgggagttgtcataatgccgtctactgataatcagggttcttcctcaccatttcactcatttggtcgctcaatttggagtattaggcgcgaacaggttcattctgtagaagggcatc

SEQ ID NO: 89499 - DNA, 338 bp, Citrus clementina
  Intron number 1 from transcript clementine0.9_007822m (loc us clementine0.9_004846m.g) derived from phytozome v7.0 (c hr-ID scaffold_21; pos 1411593 to 1411930 reverse strand)
aaggtaaagatatgttaaagttacatgtatctgttctacacacaaaataaaaatcatatttacacaacgttttagagcagcgacagaaacaacaataaaactatatggtattaacgtattttttattattttattaacagtaattccacatgatttgatcgtgtttctttttattagtttttaaatttaagttaactgcatatagttttaaccattgattaattaagtggttaaatcgattctatttgtatgatcttatgtagaaagagtatgataaacttagccaaaacatagaacatgcagccaaaagatcttctttatttgatctaacaggagga

SEQ ID NO: 89500 - DNA, 465 bp, Citrus clementina; identical to SEQ ID NO: 88700
  Intron number 1 from transcript clementine0.9_021552m (loc us clementine0.9_021552m.g) derived from phytozome v7.0 (c hr-ID scaffold_16; pos 764233 to 764697 reverse strand)

SEQ ID NO: 89501 - DNA, 588 bp, Citrus clementina
  Intron number 1 from transcript clementine0.9_011625m (loc us clementine0.9_011625m.g) derived from phytozome v7.0 (c hr-ID scaffold_39; pos 1812331 to 1812918)
gtgctctgttcactcgtgattgtaagctctctctatttgactgtaatcattcgttattttttcatactaattaggattttgagcaaatttctgttaagtaatttcacctcgctagggttttggatttttgttggttctggaacttgaatagttctgcacttagtgccctgccctgaaggtggctgcactcattctgagtcatatagtgttaaaattttaattttttgcttaagaattatgaaaattttgctgctctcatgctggcgattatatttgagctgacttatcataggctttgcgtttgctttatggttttttattattactgaatatttgcttgattttcttcttccttgtgtggaattaaattactggtttttctttaattattagcatcaactcttctgtatgtcgtcaattctgtggtcttttgcatggtggggttcatggtgtttcttttttgatcatttattggagattttgaagtatagttgattgtttgtagttgtcttgaatgttgcgtcttattgtattaattttattttgttaacaggttgattgattttcaaacacattctttcctcagaa

SEQ ID NO: 89502 - DNA, 637 bp, Citrus clementina
  Intron number 2 from transcript clementine0.9_025984m (loc us clementine0.9_025984m.g) derived from phytozome v7.0 (c hr-ID scaffold_16; pos 4105208 to 4105844)
tcagaggaaccatcctcggatacaagaggtaatcatcaattgatagtcgctcgtgttagatatcatctcccttttttttttctttttttttttgcttccaaacaaaatgagtcgtcttttacacgtttgctaagaatgaatcaaaagttcaatttcaatcgtgggttttattgctaggaaattgaaatgatggttttagttttaaccaagtaaagcaaaatactgatttgataaatcaatcatgtgtgtgctctattaaaatccaaaagtagcttctttgatgtgttttgtttgatgctctctttaacaacagaaggattaatttgtgttgttatggggggtttgtttcattctacaattaatctaaagcatagatattgactgagtttgtggttttgttttattgggttttaaagcataatgccataatggaagtttttaaatgctagccatagatattttatttgacaagtagctatatagtttgaatgtttttcatgaattccttaaccacccttaatctaagttttataaggacctaggatagcatcggaagaatgaggaatcctgaaaaaaattttttaatgctattaccactttaggtcgaagtccaaccagtacccaaacacttcattga

SEQ ID NO: 89503 - DNA, 404 bp, Citrus clementina
  Intron number 1 from transcript clementine0.9_003703m (loc us clementine0.9_003519m.g) derived from phytozome v7.0 (c hr-ID scaffold_39; pos 650935 to 651338)
tgacctgcgtcgttctgcttcaagtcttgtagctggtgagttcggtttttattttaatctcttccgtaactttctttataatttgctaatgtgtatgcctgtgtcttgttttttttttttttttttcttttcaatcatgttttggttgctaagaaaatgaatgagagaaaaatagaagtagttgtagactttgattagaagaataagaaaaaaagataagaaggtagctatgttgattgtgcgcggatctatactgatgtttctcttggttcttttccttctgttgtatgcaaatacttcgatttacaggatcgttgattttttttttatttttaatttttgatttttcagttaattgaagcatgtgttgtggcccagataaatcagaatctaacaccgaagat

SEQ ID NO: 89504 - DNA, 692 bp, Citrus clementina; identical to SEQ ID NO: 83057
  Intron number 2 from transcript clementine0.9_011832m (loc us clementine0.9_011832m.g) derived from phytozome v7.0 (c hr-ID scaffold_12; pos 4901486 to 4902177)

SEQ ID NO: 89505 - DNA, 894 bp, Citrus clementina
  Intron number 1 from transcript clementine0.9_025548m (loc us clementine0.9_025548m.g) derived from phytozome v7.0 (c hr-ID scaffold_121; pos 225660 to 226553)
ttgtcaagtgcttccccaaagtcgatccctcccaggtcaaatcacacctcccccccccccccccccccctttctcctttttttcatttttcactttttttcaattaattgactgtttgatttactgggaaattctaatttgtaattcaattttttagtcttaacttcctaaaaattgattgaatctgaggaaagattggggattcaattttgtttaatcctcaagcaaatgtttgatggcatttgcctccctaaaagtaggggaaaattggtgtatttctgaattcgatatgcttcctttgaacattggttgtactgggcctgggtttcatcccctaaatctatttgacgcctttcaaaccacaatcactgtgtacaagtagactccataacgcagctttagctttaatttgagcatttgaattctcttttagatagagaacttcaattattcggagatgctctcgttattcctagtgagatggttagctaatagatctttacttccaaaccatgccccatttatggccatataacctcatgaatcctaatggttgctctgtccattacattttcttttccatttttggctttatcgtcttgatttatcgattttgtggatcttatttgtcacttgcagcttgttgagcctgtgctgcatttccccgttagttaccttaataatgtcgttctgtggatttaacttcacaccatgtgacattgacatgttatcattttttgtcttaacatgtggttttgtttagctacaagcaccaaatttcattcgcacattatggaaaaattattctaatcaagttttgtcacgtgatcatgtttgctgcctttgttttgcttgtcgttttctcacacttcttaaccattcaggtgactcctg

SEQ ID NO: 89506 - DNA, 649 bp, Citrus clementina
  Intron number 1 from transcript clementine0.9_032808m (loc us clementine0.9_032808m.g) derived from phytozome v7.0 (c hr-ID scaffold_70; pos 160099 to 160747 reverse strand)
cctttgagaagatagacaaagttagttcttgttatcgcctctttcatatatgttgcttattatcttggatgtttggatttaatttgattctcagatttataacttttttacttgtttttgtcttttttttttgtaataaagccatgatcttgaacatggtaattggtggattcttggggagtctggttagatgaagctctcaagttaatttagagttatcttagagctaaagaaaagttaaacgtagtagtttacgctctgctttggtgttgataacaattatcttccttttaatttgacacaactgcttacatctaatatcttgtaataatggttggaatgatatgatgttatagttgttttatagtgatactttgaaatgatgacgagttgaaagactcggaaaacaatccatcgaggcagtaaggaaatttaccttaatcatgaagtacatactttggtagtctaagatgtgattcactggcaaatatgtttgttaatgtgcgtttagctcatggctgtttggttggagttctaatttcttagatataggcttgctcagcttgttctgtcattttatatgctaatttccaaatgttatgataaatttgcagattggacaaggaacttatagcagtgtatataaagc

SEQ ID NO: 89507 - DNA, 806 bp, Citrus clementina
  Intron number 2 from transcript clementine0.9_016796m (loc us clementine0.9_016796m.g) derived from phytozome v7.0 (c hr-ID scaffold_8; pos 946063 to 946868 reverse strand)
tcttgtgcagtgcttttgctgcttgttttgctgaggtattattattcttatttttgttaattaatcactcccctgagtctctccctaaactttgcttacatgatttttataatgtgtatcaatcgggttaattaccagtttgtttttttgtagtaaagcttaactacacgcgctttgtttggctttttgtgcatttttctttctgtagagtttgattctagtttctgggcttgttatttgagttgttaaaatgaaactgtaggaagaattgtctatattttgattttcagaaaaccacaagatgaaattgtgatttaagtggaaatttgagcagaagtttagtttgcttttttcatgatgttaccaatttaagcttaaatttggctaaaaaaaagtttgtccaatccacgtgtttaatttggtttgaatcgtttttgattctttgaactcgagagtttcacattttaatatatgtacctgcgcgtatccagccttaatcaacttgttttacttatttaatcaactattttaatatttttaacaacatttggtttgatttactgaaataacaaatacccatcacttgaatttggcttgaatttggtatttgacatgagtcacaagtttaattacttcgtagtttgtttgggatcatgctgcttaatgctttgaatgttgcagctgatcaatttatatttgttcttcttcttgttatcgtttttaatgagttctggttgcatttactagttattttgcgaatgggttttgcagctttgtactatccctttggatacagctaaagtaag

SEQ ID NO: 89508 - DNA, 606 bp, Citrus clementina
  Intron number 2 from transcript clementine0.9_003487m (loc us clementine0.9_003487m.g) derived from phytozome v7.0 (c hr-ID scaffold_145; pos 280744 to 281349 reverse strand)
gctgagccaccggtgcataataggcaggttagaaatatcatctggatttgtataatatttggaaatgcattgaatgaattataaacaaaaatgggccaatagtcaaatgtacattaattatgaaaaccatttataggaggttgtgaagcattttaagagagatattaggagcgaagaagttgttagctggatacatgcatgcatgcgtgcatacatacatatatatatagtcgttatctagtgtgggtttctttactttaataaagtgcaggaaccctcattgaaacatttcttttgtgtgtgtgtgtgtgtgtgtgcatacacacatacacaagtgatacactatgtctatagtcattcaatgtttgtagaaactagatcagattaacttgcaaagcttgattgaaagaagaagttaggaaggagggtttgatttcatttgaagtcgttattgcctggacatgcgaataaattttttgaatatttttcactattttattttctaaaataattttttgtgaagtttagtgcattatctccttcagacaatttgcttagcctgtattttcagtctgatcaaactgcaggaaatttgaaggaagagct

SEQ ID NO: 89509 - DNA, 344 bp, Citrus clementina
  Intron number 1 from transcript clementine0.9_005462m (loc us clementine0.9_005462m.g) derived from phytozome v7.0 (c hr-ID scaffold_12; pos 2789851 to 2790194)
cttcagctcttgctgccttgctctcactgaaggtaagaaaaaaaaaccatattacatatcatattccatttcgagttcttcttttttatttctttatttattttgttttgttttattatttattattattattttttttgggctgagaaatcggcagttttgagtttgggactttcattggcagctaaaaggtgatgtttttgaccggggggaaaagaaacaaagttcttaacatgatgttttagtgttgcttttagtattatacaaaagataatcttttagacgagagtcaaattgaggttaaagttgggatattattgatgatataatcatattttccaggc

SEQ ID NO: 89510 - DNA, 495 bp, Citrus clementina
  Intron number 3 from transcript clementine0.9_013941m (loc us clementine0.9_013941m.g) derived from phytozome v7.0 (c hr-ID scaffold_35; pos 2270935 to 2271429 reverse strand)
agcgtgtcaagcttaagttggaaatcaaagttgaggtgtatttgtttttaattttttttattttttctctctgttttctttttgtgcttattgaactcataatacttactaaatattggaattttgagttaaggtgaagttttttgcaaaattatctgataagaaatgatgttttggaaagcacctcaagtgcctttttaattccgaaatttttgtttctattaaagtgtgtatcaattgcttctttggaaggacaatttatatgcttgttttgtttcagaaagctctctcttatctctagtctagctgaacataataaaataagaaaaaaaaattgtttttgattttgattatggtaaatcagttcaaggttgttaaatgtgctcctaagtgcaacatgattgtatcaaggtcggcactagaatataacatgaagaggaaatatttactaatttgaagtatttatgacattttttgtttctcaggtggtggatt

SEQ ID NO: 89511 - DNA, 433 bp, Citrus clementina
  Intron number 1 from transcript clementine0.9_023021m (loc us clementine0.9_023021m.g) derived from phytozome v7.0 (c hr-ID scaffold_8; pos 2267917 to 2268349)
aaggtgcccccaaatccaaaaacaaggtaatgaattcgaatttattagatcccatgctggtttgaactttgttgaacttttaattaagatcttgcggctcgtatacatttgtactgaattcgtgaataagcttgaatttcataaagaaagaactgttttccctttaaaattgaaaaaaaaaaattggagaacaatattatgtttccttttcaaagaatagtttcaattttgattatttaactccccaaccatctggtatcttctcatgtattttattatctaaaaactattagacaagttagtacttgcaacgaatgaataatatagatggtacggcgtcagtaagtaattatattataacataaatggtaataatatggctttgtattatgttacaggaaaattgtacatacgcagtgacaatagaaacgac

SEQ ID NO: 89512 - DNA, 920 bp, Citrus clementina
  Intron number 4 from transcript clementine0.9_001251m (loc us clementine0.9_001251m.g) derived from phytozome v7.0 (c hr-ID scaffold_12; pos 3282779 to 3283698 reverse strand)
gattgcccaggtttgaattgtcagatttggagcaggtaccttaaagttttgtgtgttgaaattgcagcatataccatttcaatgttttctgaagcatgtctcttagttggattgctgaattgtagaaccattgtgagccaatttgaattgaggtatgcatggttagtcggttagcccttagctgagatgagagaggttctgggttgacttattgggcgcatttattctgctggcaatgatcctttttcagcgtggattcattatatatcattattgaaaaagacccttggatgggatgcggctttgcaggaaactttcatcaaagacttgttgtgtcagactcttgaaaatggggatacatatttcaacaatcattttaatagtagtaggagaatgcactgctgtttgctaaatatgtattatattttgagagtggtatgcagatttgatatgaaacttctttggaaagcttgaaaaatatttcttactgcagtttcactacaaacaatcttataatatgatgtgtttgccacattatcaatgcaaaaacatactttgacactttgattttgtacgtgttttgttagaaagtaaagcattgaatgccttatgtcttttaggaaaaaaaaacttgtgttcatgtatacaaagtacacgctgtagcaaaaacctgtcattcaaaaccaaattagctgaacctgattgaatataggttggaagggtgattttttgatgagaatcaaccctcatgtttggtattggtttatagtgagttgtccacattgatctgtacttggatatttggtactaactggttgaagttttaagtcttgcagtcctatattatctcttctttggttgtaactctttattccttctagctcatctctatgattatttgagatactgtgcaggggaac

SEQ ID NO: 89513 - DNA, 477 bp, Citrus clementina; identical to SEQ ID NO: 77773
  Intron number 1 from transcript clementine0.9_000214m (loc us clementine0.9_000214m.g) derived from phytozome v7.0 (c hr-ID scaffold_16; pos 1953166 to 1953642)

SEQ ID NO: 89514 - DNA, 451 bp, Citrus clementina
  Intron number 1 from transcript clementine0.9_002173m (loc us clementine0.9_002173m.g) derived from phytozome v7.0 (c hr-ID scaffold_96; pos 485209 to 485659 reverse strand)
atttggcgtccaacgtgctcgttttctgcaccgttgtatgttttccaaaagctaagagtcatcaaaagatcttttgaatttcaataaaacttcggtttaactttatttatttgattgtgtttttggaatatcaatggggtcaccaaccctcaatacagttgtttcacttgttttgttgatcctattttttgtgttaagtttcttaataactgtttcttcagaatctaatgaagaagccgatgctcttctcaaatggaaagccagccttcaaatccataaccgatctctcctttcttcttggattaaggatacctccaatgtttcatccaaaataagcccatgtgcttggtccggaatcagttgcaatgatgccggaagagtcatcaagatcagcctcccaggtgtcggattaaaaggtaagcttcacgatttctcattctcatcgtttcct

SEQ ID NO: 89515 - DNA, 518 bp, Citrus clementina; identical to SEQ ID NO: 78802
  Intron number 2 from transcript clementine0.9_002637m (loc us clementine0.9_002637m.g) derived from phytozome v7.0 (c hr-ID scaffold_8; pos 3598525 to 3599042 reverse strand)

SEQ ID NO: 89516 - DNA, 365 bp, Citrus clementina
  Intron number 1 from transcript clementine0.9_011577m (loc us clementine0.9_011577m.g) derived from phytozome v7.0 (c hr-ID scaffold_54; pos 1270266 to 1270630 reverse strand)
atttctccagttttgtgaggcagctgaatacatatgtaagttcactcttctttttcttctttttccgcttcgttttgagcaacgtatgctgctgtttgattaagaattgattggatttcaagccccagattggtttttcattagaaaatgatgcctttctttacaatatgatgtgttgaagctcattttgacttgagattggtatgtctctatgtgtaatctttactgtttgtttatgcttgagtctggtatacaacaacaacaacaagaccatgcatattattggcttacggtgaatatttgctgaagctttgaattttatgtgagtagggattcaggaagattgatcctgatcagtgggagtt

SEQ ID NO: 89517 - DNA, 284 bp, Citrus clementina
  Intron number 3 from transcript clementine0.9_016216m (loc us clementine0.9_016216m.g) derived from phytozome v7.0 (c hr-ID scaffold_15; pos 3885446 to 3885729)
ggattccgttggatcagtaccaagatacttctcaagtgtgcacagactttaatcatctattaaatttccttcttattgttttttgtgagtattacgtggttatatgattcgtgtaaagtttgatatgcaaagaaattacttttaagaaatgaatttgttttctatgtgagtgattcaatagtttttgatacaacagactgcagatagcataattttttcttgcagtttgaattattattaacatatcactttatcttcttctttgtagattgattttgcatttg

SEQ ID NO: 89518 - DNA, 215 bp, Citrus clementina
  Intron number 3 from transcript clementine0.9_003184m (loc us clementine0.9_003191m.g) derived from phytozome v7.0 (c hr-ID scaffold_25; pos 3525884 to 3526098 reverse strand)
tgccggacacggtgcctaaaccctcctgaacatttgtatgcttacttcttctttttctaaatattatttacctgtgctttttcttggtctgtttatgtttcctcccccattgtaatattgttttattttatttttcctttgattgcgattagatatatacataacacgaatctatgaactggacttatttattattgacaggccgcaccactgga

SEQ ID NO: 89519 - DNA, 594 bp, Citrus clementina; identical to SEQ ID NO: 80673
  Intron number 2 from transcript clementine0.9_015459m (loc us clementine0.9_015459m.g) derived from phytozome v7.0 (c hr-ID scaffold_25; pos 79301 to 79894 reverse strand)

SEQ ID NO: 89520 - DNA, 574 bp, Citrus clementina
  Intron number 1 from transcript clementine0.9_010548m (loc us clementine0.9_005856m.g) derived from phytozome v7.0 (c hr-ID scaffold_117; pos 454840 to 455413 reverse strand)
tcttgaggaggctgaggtcgttttggggatttcaggtgatacatatttttctttttgttagcaagctttttggttcgatcttcaattctcatttggtaaattggtttgctttgctcggtcaccatagaaaaatatctctctctttttaaaaaataaaaaaataataaaagaaagaaaaagaaggaaatttttttatgtgttctgttttcacttgtttgcttttagtgtttaaagtttatgctgaaatgtttacccgcacatgttgtgagcaaagtcaaaaacaagtgattaagtatttgtataaaccctaaacccaaagaataggaagtgatatgccgaccaaagtaattcataaagagtatgtttgtaacttatatgctttttgcttaaaatatttggtatgcttgcttttacagtttagttagcaactaatgtttactagctacccacttacttgatacttgttgctagtagttccatcatcagaaattggatgtgctcttgttcatttaattgttttttcttgttttggtaaaaatctgacatctggtactatgagtaggtgtcacatcca

SEQ ID NO: 89521 - DNA, 407 bp, Citrus clementina
  Intron number 2 from transcript clementine0.9_010954m (loc us clementine0.9_006400m.g) derived from phytozome v7.0 (c hr-ID scaffold_47; pos 1180155 to 1180561)
gattcttttgtttgctccagcttgtatatttttaccctctcgtttcttcgctttttatttttattatttaatatgactataatttttattttggaagtagcaaaggcaattttgtagacattaactggtagaagatgaaagaacgaaaatgtaggcaactaagagcctgcatgttcgtaatcttacgaaattgaatctctctctttttttttttttttttgattttctggtgcctgcactcatatctgaataaaatttatttaatgtatatctgtaacttcattttgaaaaaagaacaatgtatgtctttgttgttttaagttgaatttcgtttttgtttacccttgttaattaatgttgcaaatgatttcttggtgacaaatctgatgcttttgcagccttaattt

SEQ ID NO: 89522 - DNA, 656 bp, Citrus clementina
  Intron number 2 from transcript clementine0.9_013561m (loc us clementine0.9_012418m.g) derived from phytozome v7.0 (c hr-ID scaffold_47; pos 143909 to 144564)
ctggttctgataagagaattctttttctttgtggggtaagtttttgttttcagaatctcatgaataaaaatatagtggcttatctatagcctccagccattttgatattgttgttgatatttcacaaagaagttaagattaatatgatgtgatatatagttcagaatgttatagttcttttcaagaacttagcaagttcttatttctgacaagaaaccgtatgtgcaaatacatgcaaatttgacacttttatttcaccataatctatagttgtgaagtctcttcacttgccacattgaagcatgtaacttatattttggtcaactattttgctttacaaatctgtatgtgcaacttgtatatttagttttttattctgtgtttaatatatattttgaatgaccctttttatacttgcacaaatgtattcataacagtagtgaaaggcctatgcagatgttcatttaaatatgcctactcaagatgcaaatggtttgtcgaagataacactggttttagaaatttactttcttaaaaatccactaaactttgatctaagtggagaaagctaacataagcatacatgagagaattttctttgcactaagattttgctgagcataattgattccgttgttctgttatttcaggattac

SEQ ID NO: 89523 - DNA, 867 bp, Citrus clementina
  Intron number 1 from transcript clementine0.9_009003m (loc us clementine0.9_009003m.g) derived from phytozome v7.0 (c hr-ID scaffold_25; pos 1004707 to 1005573)
gctgctgagtgctttagccgtgctttggagatcaggttagggttttcacccggatgttatgattttgactattggaaattaaatttgtacttttgaccaaaataaatgcttcattttcttaattactttttagtttaagaaccccggaccgaagttaagtatttggcattatagaagaataacgccaagttaggttattgaatttgaactagcaattgtgcttttgtcgggagacgttagggtttggcagtgattgcacattgatttttatttgctggtgctttatttgtcaattatgctaacatgtgccctgtccaaagcctgagcttttgccgttatgttttgtatgaaagaattcttcccctgatgttgggtagatcttgtcaacaccatctgatgacacttattttgcttatctttttttaataatagatatcagcaagtgtgtgacatcttttgtgaaaaggaatcatttcattttcgtacccttaatatgtgcttctgcttctctcaattgactgattgtgtttttgggagtgtttttgcaaattgctaaaactgtgttttgtgtcaaagtgtttagttgaaatacatatgagtgctttttaagatttgagggggggtgggggaatgcttaaggtgctcagacccaatggttattttgtaatagaggatttttaggtcagaaaaagccttcaaagtgctttcttaagaagcaattgataagggttttgagttaagagcattctgaagcacattctgattttgtttttaaataatcttttggcctctgtgttattgggttccttttcctgatatggtttagtaaaatttaacattctactggtaacattagggtttctcatt

SEQ ID NO: 89524 - DNA, 648 bp, Citrus clementina
  Intron number 1 from transcript clementine0.9_000519m (loc us clementine0.9_000523m.g) derived from phytozome v7.0 (c hr-ID scaffold_15; pos 1956954 to 1957601 reverse strand)
ggcgccattgccggttctctgttcagacacgtgaggtacacaatacatgtttattactcagtaaaaagtaaacagtttaaaatattttatgtggtacagtttaaaacagtgaaaaagaaaaaaaaattcagaagttatggaatttaatcatacacaaaaattagttacacattacttagaatgaaatccattgagatatcgcttagaagtgtattggtggaaataatatggtagtttggtgatgaatcacttgacttagtgtcactagctttactcataggatatttagctttcgagtaattatgcaggggcttagtttgctaaaatcaaaatcacggtctgctactttttggatgtagagttgctaaaaaaatcatgcaactctccgtacaaaagatgagctttttttttttcttttttctgtttaaaagcaattatttgtactgaagaccttttaatttgcagtaggaggagctgaggaactaataattttcccaatcacatgtttatagtataaatacaatgagtaaagcaccaaaatacaatgagtggtggttctttaatttttgcttcagtttgtctatcttgctaatgcagtttaagtcatctgcagttgtgattgggaaaagaggaagtccgtgcttcttg

SEQ ID NO: 89525 - DNA, 553 bp, Citrus clementina
  Intron number 1 from transcript clementine0.9_018426m (loc us clementine0.9_018426m.g) derived from phytozome v7.0 (c hr-ID scaffold_25; pos 1815739 to 1816291 reverse strand)
ttgcctctgggctggagtccactattaatcgtctggtgtgtatatcttttactctttaacttgtaaatcttttttcttttcttttttttataaaaatttattttctatttggtgctatgcgtatagtttctttgattgtgtaatttcagtcgtggcttcttgtttatattgaattacatcagcgtaatgatcaattgagtgatttttccaagaaagctgtagcttggcttactgtgcttttagggacatgtttttactttttaggaagcgctattcgtgattattcagaaagcacaccaagtgttttctgatcttgaaagaaaagcacttgtcttttctcaacttcaattgaacaccgcaggtggacattaattgcttttaactatttaaaagcacttttaaatgtgcctgagaaacggaggacgctatgcttggaaagtaaaaatgattcaagattgataaggctgtttaatcttgtgttgtcataaggttaattgtttatttgctgttggtgacagagcaagtggctggtatctggattatttagtgttat

SEQ ID NO: 89526 - DNA, 949 bp, Citrus clementina
  Intron number 1 from transcript clementine0.9_015702m (loc us clementine0.9_015702m.g) derived from phytozome v7.0 (c hr-ID scaffold_47; pos 927427 to 928375 reverse strand)
aaggccgctttaataagctcgggttgtcatatcaggtttttttttttttttctttcggtttcttatttgtttttaaaatgtgaaattgcaattgggtttttgcttttttggtagttatggcttgattcacgatcaaaatttatttttggtttgtttgtatgtgcatgttatgatggttgtaggagtttacttgtgcgagtctgagtgtagttgtaaattcctttttaagttgcattaccggatcaattcagttgttttagattagtattgggtatgttaatagtacttatgttgatttgctttcaagatgaattagatgcgtgtcttgtgcttttatgggtagaaaacttgaatttggactggattctgttgctatttttcttttccatagaaattaacatgctcgggcttcactatattggatgtattgtgcattgggtagagctggtcggactgtttcctttacatgccttgtgctatttcattgttgtgttgtatgtgagtacggatagcttgcatgagattgtacttttttagtttcattttttcagtacttgtgatgtttgtgggtgcgtttctgttttgccttttctattattcatttactgctatgtttcatttgggattttttttttccattttaattgtcttgaaagatatgcatttaacatgcaagtgcaattgggtatagtaaccttatgttcgtaaaacttaattgattgcactctgttccctttctttctcctttagtatgcaatattctatacttttgttttttgttttcaatttttttggtatatttttttatcacttttgagggttaatagtggagttcttaattgggatatagcatgcatgatttagaacgagattgaatgaaatatgattgttgttttgttaattagatatcctctatttaattacaggatattttccagaactttcgatt

SEQ ID NO: 89527 - DNA, 1028 bp, Citrus clementina
  Intron number 1 from transcript clementine0.9_009746m (loc us clementine0.9_004254m.g) derived from phytozome v7.0 (c hr-ID scaffold_18; pos 615552 to 616579)
tgtaacagcccttttgagaaaatctagttacagaggtttgtttcttcttcttcgtgcttggattgtttcattgctctggtttttatttatttcttggttgttgtaattgatcagttttgaagtggtggattttgaagcttatagatagtttttgcatgtttgattctaaaaaatttattcaactatgtgtgtatttgaatatctggattcatctgtatctgggaatggaatggagagtatggttttagtagcagatacttttgagcttcaagttcatgccttatatacaacttatttgtgactttgtaaatttcactttttgttatttggactagttcgtggtttctgttttcaaatttaggatgcatatcttgtttgaatacgaaaaggaaaatcaaaatctgctttttctagaagagttcaattttctctttacttctacagttcacttccttaatataggttggccgtttatttggtctcaccattcatattcatgttttccagactataattgaacttcagtatgttcttggttaaacctggattttcttttaaattttttaatggttgtcctgtcttcctggagataagactgtcgaatcatccattaaggtcttaaaatatgtgcaatgaaatgaataaaggacacaaaaattaaaaaaagtagcttttcaaactcttttctgaaccaattatggattctctcattttccttgttctgactgaaatgttttttagtattgattccaactcgagcaacagataccagaattccacccaaaaggcaaaaacgcgttattcaggtttaagttgtttacttttggtttataatcatccacttgtctgcttactttctactatgggaactgagtgattcatggtatttttatgatttaatcctgtttggtgatggtccctgtaatgtcttatgttgagttgtgcttcaattctaaagttcatggacatactatgatgggaactgatagtagtttattttttcttttgagcagttacagcggttcccg

SEQ ID NO: 89528 - DNA, 524 bp, Citrus clementina
  Intron number 5 from transcript clementine0.9_002736m (loc us clementine0.9_001896m.g) derived from phytozome v7.0 (c hr-ID scaffold_25; pos 3070537 to 3071060)
cttggacaggtaaaatatttactttgaaatgtcatctatatttcttgggaccagagaaggggctggttgtttgaatggatatccaattgtccaaggacctgaacagatatatatatatatatatttcactattttactagtaggaggatatttgtgcaatttgagatttactgtagatctggcagtatcacatactcaagaatcaagaaatatttactttttggctattatttattgctatggtcaatgcaccatttgatgtaatcattgcatacttttcaaccagtgaacagacaatacggttttggattaccgcctttgtatttttggttgagctatttctgtttagcttaagccttggttgcattaattaaatagctggttaggaatactgatcacctcttgttattctggttgattaatctgtagcgttatccctttctctcacgtttttaatgatgtatgtgcttatgcagtttcttcccaagaagtatttatttactttagcttttcttatgcagcct

SEQ ID NO: 89529 - DNA, 1001 bp, Citrus clementina
  Intron number 1 from transcript clementine0.9_034693m (loc us clementine0.9_034693m.g) derived from phytozome v7.0 (c hr-ID scaffold_118; pos 194996 to 195996 reverse strand)
cgttgcactgcaattacgatcatcctcggcctcaggtaatttcttctcctgcatttttgttatttgctatcaagtgacattcgtaagtatgattgcattaagctgctgctgggaaatttgaggttttgatggctgcccatgctattgtcagaagctgcagttcttttcatcagcctgaacctggacctgtcgccatggataactcgggtttttttttttttttaatcaactacggcatcttttccactgttttgaaactcttaagattaaactttagtaatgttgttttagttatccatgtaatcaggctgaggatacttagcagcctatttaggcaaatgtcagaatttagtttgttcgctgggaactggtgtggactggcaaaggatgatgagatagttttttgagtgagtaaattttgggagcttgagtgtattgggatttgcaattacaatcatcgtctgcctcaggtgatttcttctcctgctctgtcattgtttgttctctaattcaaaagcataaaatatttcaatcaaattgtatgccaggaatatgcaaaagtttctaatattttatttccatctgtttgccttgataactttgctgcatatgtactagttaaagaacaaatcgaaacagagctcagttaaaagtttcttctgccgtcatatttgaaaaatgaaaccatttccaggaagcaatgggcagcaaattcatataaagcatagacaatgatgagcaaaaaggtgattcacaatttcactttttttaatgaaattaattgtttggttggagcggatattgttagaaggccattgagctaacctatgtcactacttgcctagattacagggggtcaaaactcaaaagaggcattgaattttaaaaggcatccaataattcttgtggccatatatcaattcatgtaagttcgaatgtaattattggtgaaggggtttcacttcccgtctctaaataaaaatactgattctttaaggtac

SEQ ID NO: 89530 - DNA, 469 bp, Citrus clementina; identical to SEQ ID NO: 81141
  Intron number 2 from transcript clementine0.9_001101m (loc us clementine0.9_001101m.g) derived from phytozome v7.0 (c hr-ID scaffold_25; pos 1634414 to 1634882 reverse strand)

SEQ ID NO: 89531 - DNA, 770 bp, Citrus clementina
  Intron number 1 from transcript clementine0.9_016541m (loc us clementine0.9_016541m.g) derived from phytozome v7.0 (c hr-ID scaffold_47; pos 451698 to 452467 reverse strand)
tgttggtttgggtgagggttggaagagatttactggtatagatttttatcctgcatttgtctgcacatttgtcgttgctttctactgtttacatttccttattcactttcactggactgctttggcacgtatgaatactgttttctctttccagaaatggagaagtcttgaatatggtgcttccaggatgttttgtgcatttttgaactgacgatttgaaactgatatattttctttattgacttcaaaaactttcagatattagtaccagttacgatttcatttcttttttcggcataaaacagttattgaagtacatttaagaggtttatttcttaaaattcaactactgcacataattcttgtttgcaatttacagaaacaattttcttttttccttaaaaaaaaaaatatgttatctaccagatcctatgatttttggttggattttttttgtttttttacatcattctgtcaattgaatatgatttacaagtttattttaaaccttcttttcttgtagaagtaggaatcatgacaatatgaatctataatcagagaaaccattttgttgattcatatttttatataacttctcaatttttttaaaagttatcaaatagcctttgatgatgaccaaaggtttatattaatacgctatctaattgatttgtttgccagtatgccaggatagtagctacgtggaattctgggtgcaagttttagtttttgacttctgagactttttgaagggagaaagagaggagagg

SEQ ID NO: 89532 - DNA, 446 bp, Citrus clementina
  Intron number 2 from transcript clementine0.9_000275m (loc us clementine0.9_000251m.g) derived from phytozome v7.0 (c hr-ID scaffold_25; pos 2183667 to 2184112 reverse strand)
gaactgtggtattttgcattttcttatttttgttgaaattttcatttaagcatgtgaacagtactttattgtatgatataagctgagttgagctccatggcgcatggtggtactaatgcattcttcatcttgttatggtaatcatcttgggtacatttatctgctctttgtgtggttatatgtgcaccgcgtgatgctttgagctgtttacctgaatttttgtttttctcaataaatcactttttgggattgtaagccattgagttacctctcttcccccgcgctgggggaggttgggttagggaagaggtcattgagttaccagttgttatttccgtctttaacatgcatttcatttctggatagaaatcatagaatcttgacttgaatttttaattctgtgattcatttgtttgccatgtgtcatggatttcaggttggcatat

SEQ ID NO: 89533 - DNA, 390 bp, Citrus clementina
  Intron number 1 from transcript clementine0.9_000275m (loc us clementine0.9_000251m.g) derived from phytozome v7.0 (c hr-ID scaffold_25; pos 2184182 to 2184571 reverse strand)
tgatcgcaagtaagtttttagccaagtcttttgagttattattatctttatttttaatatgctcagtcctcacttctaatgtccgcaaatgtagatcggaagtttaccatattgttaagaatttgaacaagaagaatatttattctttgctcttctggaactggtttcgaaatggaggattttgttttaatatgttatttcccttaggtggggggggggggggggggttggaagtgatcacgcttcagtttagctgagttgtagtagccagatttttctttttcccaaaattttgttgcatcacgggctcttttttttttatagggttttcaatttttgttgtaattttcatgtatttgttttgtttctctttgtggttatatttagggg

SEQ ID NO: 89534 - DNA, 947 bp, Citrus clementina
  Intron number 1 from transcript clementine0.9_014350m (loc us clementine0.9_014350m.g) derived from phytozome v7.0 (c hr-ID scaffold_15; pos 147614 to 148560)
caaaaccatcacaagaaaaggtcattgatcatatttcatcattgttatttttattttcttttgtttaattattaattaattaatcttcttatctatctttcttttgagaacccaatcccgtgtccccaaaatctcaggaaaaagctggtatctttttattgttattgttattgatattattactgttttgatctttttcttttttgcttcttcaaaaaaaaaaatacaaaaacacagatccccacaaaccttcagggagaatcaaaaggacacattagtttttctgatcaatgcatctgacattaagagagagagataagaatattatagagtgtgaaaaaataaataaataaaaaattaatatccaaaataataggcaaagagagagaatctacacagtactactactttttatgttactattttttttttatacaactttttatgttactataattaaaaaaaaaataccaactttactcattccctataacaagctgattaattgatatttgtaagcctttcaaaatcttttttggaactgtaaattgaatgccagcagcagcagatactgacgattacctggttcaaggtacaagactgtaatgcttagaattttatgacctctaatcatggaaactcttgactaataaacaactcctatgcatctatatattctagagactataatttattaaaatttgactacagtttcctagattgtttgtctttttagtctaagttgctaggttcattcttcttatttttttcttatattttccttctggtttctcagccaccaaacaagaatcccctcattttactcaccaactacttttttctttgccaaattctgtgaaatgaaaaggggtagtcttattttctgatctatattcttgcataatgttacagagaaagggtcctggttcaacatcagacagacaact

SEQ ID NO: 89535 - DNA, 613 bp, Citrus clementina
  Intron number 2 from transcript clementine0.9_019109m (loc us clementine0.9_018090m.g) derived from phytozome v7.0 (c hr-ID scaffold_15; pos 3726592 to 3727204 reverse strand)
caacgctagaaataatcaacatcttgttgctcttggtacctttacctttctttctatgcttgtatggcttttattatttttgtgaagtagatttaacttgttagaattgctcggaagtagacgaactttggcgctttttgggggtgattttgtagaaagcactttctgcaaaagttcatgttaagtgcctctatttaaaatttgatttttgttaaagcaatgatcaagagttgtttgatatggtaggtgttatctcatgttcagtttatgataaggctttgcgtttggtttgtatagcacttgtatagttacatgttttatttcatttcattttttgatggaaacgttaatattaggcagaaaagcacatctcagtgattatatatgtctgatgacagattgttaatttgatgcattctgttcattctttcttcactttctaacttctgatcgacattatatagcttagaataccagatttctagtgcagctgtattttatactgtctgatatacatgtatcattccacctgcttatgaattggcaacgagttttctctgatatctgaaccgctgcagattgtggatctggcattggaagaatcaccaagaac

SEQ ID NO: 89536 - DNA, 474 bp, Citrus clementina
  Intron number 2 from transcript clementine0.9_004156m (loc us clementine0.9_004156m.g) derived from phytozome v7.0 (c hr-ID scaffold_117; pos 447507 to 447980)
aagttgattttgaatcttaccttcgggtgagtctttattcattctaatgaggaattaactaacattttgcgtcttcttttggattatatggtgtttggattctagtttctcggtgctaaaatttaatgaatgtggatgctggttgattcaactcgtaaaacatcaccaagttggggagcagtttggtttacatttatgtaataacttagatttttctctcttttttgtttgatgagttatagctttgcaagattggaaaatcaagatgtttctagtgagatacattttggttagagagtctttttgaattttatatgagtgtcacaatgttacacgggtttatttacgttttggatgtttctcatagttggctggtgcggttctggttataatgaaatgaaaggatgtaagctatatgtgggattttgctcattggcaggcatatttgaatttgcaagcccgagcagcatcaaa

SEQ ID NO: 89537 - DNA, 1005 bp, Citrus clementina
  Intron number 1 from transcript clementine0.9_014227m (loc us clementine0.9_014227m.g) derived from phytozome v7.0 (c hr-ID scaffold_15; pos 3412827 to 3413831)
ccaatttgaggtgatattgttttctttaacagccttaatgcatcattttatattttgaaactattggtttttcgttatttgaaggttgtacttatacgtgatcataaattctcatttgggttgtgatattattaattattgatgggtttgtttcattttcgtcctcttaatttctttggttgttgtatgtttttcgctcaatcagtttgaatttgagaaatctttatacatgttgcttgtttccattgaaaagatacataaccaagctctgggtgagctcttctgaattgggaatatatgcgggaaaaatgaagtagtttctgtttctgttgtgcccaaaggatttttgcttgtgttaacggatatgatgtatggctatttcagttgaaagattcataataagttttaatatgccgatcacaatggggtatgtaaagttatttatgtactaagcgctttatttgtaagattgtatctcatgtcatggggttatacctgatttcgacttctgtgctgcagaattaacattttagcttggaattttggttattggatctgtcaaatttatgcataaacttgaaaatactggtaaaggatgcaaagtagctgttgaattggaaatggtgccaattttagggcagtgaaacgagctttgcgttgaaacattggaacatgtaacctggttttgaccgttcattgtgctcaagacatgctttaccaggcactacgatgctcttttttgatcaagtatttgagaattgagaaatgaagctggaccacttcatttatttgtttatttattatttttttgtgtatgtgtgtcaggtggagtttctgttgaaaatgcagctgtttccatctgtattctttcagaattatttagtggaagtttatgcctttctctcatgattttatttctttcatggtgcattttttttctgaactggttatatttatcagtgtacttatgtataacagagtgttggattcattgggctgggaaat

SEQ ID NO: 89538 - DNA, 535 bp, Citrus clementina
  Intron number 1 from transcript clementine0.9_005399m (loc us clementine0.9_005399m.g) derived from phytozome v7.0 (c hr-ID scaffold_15; pos 3151465 to 3151999)
agttcccggtcgccggtgaatctcatctcagtcaggtgactcttcctagatcattcttgaaattcggtctggaatctttgacttattccttccttgtctaataattttcatttaaagaattctcagccgttgatggagattctgtgacgtctcctgtttgttttcgtatttgatcgaagtaatgattattatctggcattcggcatttaattgaattttttgtgcttttttcttttttcaaattaacgattgtgatgttttaattgtttacttttttaaaagtaaacaaatgattccaaattgtcccatagtctcttgttcttataaaagcaacaaacaagcgcttttgtatcttacttcctctgccgaataacaatagtttataaatccttgtcgttgttttattctattctgttcaagctttttcatttcacggtaacagtttctaatattaatctcatcaaaatcagttataaataaatatttcgttgatacattttttatttttttggtctggtcggtcggttggagtaga

SEQ ID NO: 89539 - DNA, 739 bp, Citrus clementina
  Intron number 1 from transcript clementine0.9_024779m (loc us clementine0.9_024779m.g) derived from phytozome v7.0 (c hr-ID scaffold_132; pos 309029 to 309767)
gcaagaagcaaaagggcaaatcgagcaacaaatcggtatgcattatgcttcttcctctcagcttttttctttctgtttttttttttttgaagttttgaagttgtaataagctattttagggatgccgttaaattcatacgatcactagacccaactatcaactaggttggttcaatgaagagatttttctttttccttcaatttaagttaggtttgtcttataattgcagaacggaaggatatggaggagcagtcagttaagggaagatttataatgacattaatcgattctgtgccctagttagtttcatctgctttgtaatgaactatgtcacattagtttgtagactcaatctttagaacaataaggtgctgtacatttgaacaagtgatgatgaagtcacctattcttttgatacctactttgactaatggctttaaatgcatttatttggaaaatctttttatggaagttccttagaaaaagccgtaaaagcaaataacattcacatatttagtgaaatgaagtccttgtctgccaaattgtctggccaaaactatgttgtttgttttcttttgctacccatgtgcccgcatttggtgagaatgaatgttcttgtcgaaccagattgatgtaacacttgcatttccattgctgagttgcgtgcagatctatttataagttaggtcacttggatgtgtaggttggaggaggctcttgaaactctgtgccttttag

SEQ ID NO: 89540 - DNA, 955 bp, Citrus clementina
  Intron number 1 from transcript clementine0.9_027202m (loc us clementine0.9_027202m.g) derived from phytozome v7.0 (c hr-ID scaffold_18; pos 288114 to 289068)
aatcaatctctcaacaggtaccataccaccgtccttatttcttagtgtttctttagcttctgggttgtgttttcttattccgtatctataaatttctcttacaatcttcaagtagcaagaaatttaatcaattttatgcatttgatttcccatatctgtaaaggaattgcatgttctaagtgtctccacattgtgtgtgtcttatgttcttgtagttgcaattacttaagaatgtgggttgccggtgatttctagaaaagtcagcagtgagatctgtgcagagagattcatatatccatggttccttttgagaacttttgaacggattgattgtatgaatcttatagaatagatggtctctgagcaaaacaatttccttaatgtgcgacatattggaattcaagatcatttctgaaagcttgaaagcgaacatctaattaaggttccatttggtatcaagatgttgtagcttaaaagctcagccgatgggaaatggaagttttagttgtgaaataaaagcttgcattgttgcgtaaacgtaactttaaaatcttgagaaataataattttgaaaaaaataaaaagattaatataggttttcatcaaaacactgttgtggtaaaattatcttcgcttctaaatgacaattgaaagtgtttaccaataaacttatagttgtagattaaacagctgccagacaataatgccgaatggagcctaaattccggtccatccattagttttgttgaccctccttttcctccacacgtgtcttttcctgcaccatatagtatttttgtcgaaactatccaaatggggatgccttttgtgttgccattttgattgtgattcgatgctaacattcatcttgttagtttgcaaagaaaaagaatttaattcttattgtccactgtcctcaggtgaaaagccttcatcagtcattggatagacgaat

SEQ ID NO: 89541 - DNA, 933 bp, Citrus clementina
  Intron number 2 from transcript clementine0.9_003279m (loc us clementine0.9_002903m.g) derived from phytozome v7.0 (c hr-ID scaffold_15; pos 18461 to 19393)
ttgctgctgttgatttgtcatgtaagattttgttaattgcttttttactgttattatataatcatctttatagttttactcattcagttacttgagtcaattagatgaacattatgatgctaattgtttgaactgaaagtaattttgacttaatagaagctgaatcttggatctccttgtgtttcttagatttgtttttactatttctgttgctagtatatgttcgaatgaaaggtattgttaggtttttttaaattgtagaaacatgtatggaatgtgaatttcataagtagcagtaaattgctctgcattggaagatttctatgtattacaatttcattgataaaatcatagtgagaatgtattaattgtttgcagctgatatcaattggaattcagtttgattagggatcctcgttcctttgtaatttgcattttttttcttcttatgttaattttatgttgatgatgctactcattgttgcctctccttttgcgcttaattatatctagcctagcctaagctctttatcatgaacaacatgataatgactagtatgtatttttgatactcttgataatatggggaaaaaattatgccaaataacatagaatgaatatgaatattgagctcgttcacataacaattcatgataaacttaataagaaatgacagtgttgatcttttacttgataaatctgatttaataacgtaacttttaattagaaatcgtggtgattgattctcactttacatactttacttggagcttatacttcatttaaaatatgattattcttttttgttagaacagtaacatatgtttactttttttagtgtgcatgtgtaacattgtgttcgcatataatattttaatgatcttgtatttatctgcagcttcagaagaatttttagaactcactagaagtgca

SEQ ID NO: 89542 - DNA, 932 bp, Citrus clementina
  Intron number 1 from transcript clementine0.9_014256m (loc us clementine0.9_011566m.g) derived from phytozome v7.0 (c hr-ID scaffold_15; pos 2695991 to 2696922)
cctatctcaacacttgttttgcacacaccggcgaggtattaatatgataaaacaacgtcacttttttcctgtaggttttgattcttaattcactcaatccgtggatttgtttatttctttgtttttgttcgtttattcatattttatttctaataaccaaaagaatcttcggttggtaattttttccataataccttttaattttttttggtccagattgccccggaacggcttcctttttttttttttttggttttaggggtttataatagctgttattttattcataatagctattattttataagatatccatgatgattttgcagtgttactggaaatcataacagtaggttaaatatgttaaaataataatgtcattgattgcttgaaattggaatgtttgagactttgagcttcagttgatgtgtttttacatttcctcatggttgaaaaagcattagttggtaactataaagcttcaaggtattgtgcctgattgtcaattaagtgctataagaactagcaatctgcaacttgaatataaagatggtttaattttgattgatatgtatggttgcttggtttgatgtaaatcaaatgtcgtgatgctttaattcttccttttttcaagaaaaaaaaaattattctcccgtgtgaatttgattggaaaaactgaatttaagaaagtcagattttgaaactgtatcattagttactatttatgcataaaaagttcaatctagtttgaaactgtatcattaattatttgagttatgtagaactatttatgcatattttatttatcacgtggacacagcttagataaatcaatgggtgggaggggggtgtcttatgccatatttcctatcactgaaaaaatggttatttttgcaggttgtcgctgtaaaagtaattcgtaataagcaaac

SEQ ID NO: 89543 - DNA, 982 bp, Citrus clementina
  Intron number 1 from transcript clementine0.9_016115m (loc us clementine0.9_006003m.g) derived from phytozome v7.0 (c hr-ID scaffold_25; pos 2614387 to 2615368)
atcgtgttgccgttaagaaaattgagaagaataaggtacttttagcttatttttatgaattgggtttctgttatttggttgtttttgggttgactccattagatttttttagcttttatttattgatgggaatttttcgattgaattaaagattggatattttgtgggttttgactggatgctgaagatcctaattcgggtggtttcatttcaggacttgaaggttgcttttgcttttcatagtagattctccacttcgtgcatctgggtttttattttttttagatatttaatttgcctttccttgaatatcaagccataaactcatgttattctcagttgaccgacgttcttatagttgcttaccttgattaaaaggattgtaatattctgctcattgccaatgatgggtctgttctctttattattgcaatcctgaacatatatggctgcgtcattgaggaactgaaattaacctagtaagaaattaacacttctaaaatggattaacgttgggctttttgttgctttgactttaggttttggtgaataatttccataaattcaattgttctaggccatttgttccatagaaatgataaattgtaaatcagattactatgccatctatttgaggtaggcctgttggggcggattatgtggattgactatatagcctacaatgtcagactccatttctgttaatatgtggctttggtattttttttacccttacatttctcatggatccgtttgtcaaaactcaaaagatatttcttttccttttgagttaggtgatctttggttcaatgtttgtgattgttatgcacacagatagaaataatcatctatagttagattcggtggtgctgtaattcatttagatgggattagcactgtttggtttatttatttatttattttttacattaaagataatattttggaaacttgtaaaacaaatccttgtctctggtggcag

SEQ ID NO: 89544 - DNA, 862 bp, Citrus clementina
  Intron number 2 from transcript clementine0.9_021827m (loc us clementine0.9_021086m.g) derived from phytozome v7.0 (c hr-ID scaffold_15; pos 2226336 to 2227197)
tgctaaagtttccatttaaagttgagattttccatgtaggttaccctggaactcccatggctatgtagaaatttggctcagcatttgtagacttatgggtgttgttatgaactggaactagtatgtcagcatattgataattagtatgttttaaatgtattatagaagatatctcatgctattgtttgtgttgtcgttggttttgttgttacaggtgactaagtgagtcacaagttttcattgctttcgtggaaatttgcagaacatgtttgggggttgagattgggattgtaaacttttcagttatgaactatctaaattctgaagatcttcccaaaaaaataaaataaaattctaaagatgaagaaaccttctagagtggtacaagaggtgtggggttatttatattaaaaaaagagtactaaggattaagaaatttgctttaggaagttttttaggttttccttgtggctgctccaaacactttgtggtgctttgtcatggatccatattctatttattctatttactgctggttttccatccaaggtatcagttgatattgcactttaaatgtttgaagagtgctgcttagccctgctaagatgtaagatctggcaagtgggtcttctattgtctatggtaccagtagctttagtagctatatattgttggggtttgatgtctgttaaatgtttttgcctgtgatgatagctaatgattaatgcaatttttttataatcattttaatactttgagactgcacaaatgctatggataatagaggttttggttctgtttatttgaatttgacaacaacttacgtttggctttcccttttagatcactgacttgttggtca

SEQ ID NO: 89545 - DNA, 436 bp, Citrus clementina
  Intron number 2 from transcript clementine0.9_007259m (loc us clementine0.9_007259m.g) derived from phytozome v7.0 (c hr-ID scaffold_18; pos 3374742 to 3375177)
tttcgatacgattctatcaagaaacacttttatcagtacgtttatgtttatgcagtttttcctatttattatcgcctgctatgtattgcatttttaaaatttttgtaaagcgagcctatgtgcatgtttgatttgcaattcagatacacttctttagctctgaaagcaaatgatgaagaagaaaaattttaaaaataaaaaatgattatttttgctgattctgttcgagactctatgtaagattggatactaatttttgaagagttttctaaatcagagaccgaatgtgtgtaatgattcagattctagttcaggttgcaaaattgtgtaattgtaaatttggaaattgaggagaagagaaggaagatgatataatggaatttaaattgtattagtgatttatggcattgaagttagtgttgttttgattttaggc

SEQ ID NO: 89546 - DNA, 1010 bp, Citrus clementina
  Intron number 1 from transcript clementine0.9_033508m (loc us clementine0.9_033508m.g) derived from phytozome v7.0 (c hr-ID scaffold_25; pos 812796 to 813805)
ctttattcgcaacaggagtgagaaagaaataatatgtaggtgattttgttgaacctgagttaattaaacctgaaaatgggttctttgtatcttgaattttttttttgtgcatgttgatttcaacaaccgtgggttttgattttcctcattttgagctaatcaaagtgtaatgatagaaaactttagcctttatgtaaattttgatttaaaaattagtgggtttatcactgttatgaagttgttctgcactgagcaaaggaatgaaaagagaaaaaaaaaatcttttctcaatattttttcttgacttatccttgttttgaattcttttgcgtcatcatcgtccgtaattgattaatttgcagttggaaactagagagactcgaacaaaatcgtagcttatatggcatctcctagttgtagagatatagtggttttattttaaattactttggcatgttttcagcacctattagaatttttgataattccgtgcttgttccacaatttttttcctttttttcttggccactcctactgcattctcttttttggtttattttaagctgtggtagctggtgaaaagattgattatattttatgacaattcatcagctgcctgtacccatcggttctcattcattttatttaataatttattatttttgcgggaagggtgttttaataattttaacagtcaactaacggtcaacttaactggtaattaacaacgagggaagtatgtgtaattgcattaatacattctatcaaagtgttaatacttcaaacctcagggaaggtccttaaaaattacccgaaaaaaaaaaaagaaaacttacccatcgtttttggagttagaatctcttgaaagccccaaagttaaaggtaggctacggaaagagttgactttcgtagcgatggaggagaggaagcattttgtgttagttcatggagcttgccttggagcctggtgttgtacaaagtcgtgacccttctgaaacttgcctgtcacc

SEQ ID NO: 89547 - DNA, 827 bp, Citrus clementina
  Intron number 3 from transcript clementine0.9_019315m (loc us clementine0.9_012982m.g) derived from phytozome v7.0 (c hr-ID scaffold_15; pos 3715797 to 3716623 reverse strand)
ggcaggccgggtaagaaattggagaaatcctaattggattgaaatttacaatgtttaggaatattttaattgatttgcatttgactttaatttggttgtatattgagactcttattgttttgggttttgcttgtttgaattgtattcctagtttacgttaggtttcctagtgatattaagataagttgtagttagtataaataagtgtcttgtttagattttacaagctgactttttgttatcattatttctttgggaaaaactctgttgtattcttgttatttctatcttaggaatattcaaatgtatcctctatccatcaccatacatcttttatccttttctgcattagtttcagtttggtatttttattcagtttgtctgcagtactgttgtttctgctgaagcaaaagggaaaaaaaaaactttttggtcaataaagttgaccaatactgttaaactgcttctccaagaagcagttgattacttaaaagcaacttttacaaaagcataagcaccttagtatatttcttctttatgcattctaacttgaatgatacaagaaagtgttacttccattgaagggttggaaccttaaacattaagtcatccctactgtgaaaggatatttttgtcttaaaaccaccatttgacaatgcagggttcctatttccaaaataaactctccttttgcctaatattgttctgagcttttgtccaccataaagtaaatttactagttgctgttctctattatacaacttctgtgccaattgataactttgattgtaggcctttgcaggcggcaccaacattagaaaagttat

SEQ ID NO: 89548 - DNA, 689 bp, Citrus clementina
  Intron number 1 from transcript clementine0.9_010767m (loc us clementine0.9_010466m.g) derived from phytozome v7.0 (c hr-ID scaffold_15; pos 423597 to 424285 reverse strand)
atttgcttctcacaattcaatctctcgattctaacgtcagttacagtaagattccttgatacccttttgaatacctgcccttaatttttatgaagtgattataaagtcagaaactttatatcttttgcaatacccagttttttttttttcgcttattcgtttaattctagtgtgctttcggtgttgtttcagctaattataaactgttcttcttttttctttttttctttttttgctttgtttcccagtttgtttgagtactttattgatttatctgttgtgattatggtcaaatttgtatatatccttctttgtagattatatgagcttgatgtttactcaatttctgtatctttttgagtgtggatattttttagtgaagaattgagcttctaatttgaaacttttattaatcattggcttgtgatttgttgattttgatataaccatcataatttgttgtgttgggacactggattgtggattgggattgattcaatgcaactatgtctaatttatgttgtattatttttgttagaatttgcccatttaaactttattaaagtaacttctttgaacatagttattttcaccattttggtcattctatatttgttcatggcctcttcattctcgctttttcttttctcacaggtgctatagtcgcattcacagtgaccttttaaatt

SEQ ID NO: 89549 - DNA, 602 bp, Citrus clementina
  Intron number 3 from transcript clementine0.9_022641m (loc us clementine0.9_022668m.g) derived from phytozome v7.0 (c hr-ID scaffold_25; pos 235616 to 236217 reverse strand)
tgaccgggatcacggacaaaggtgttgttcagctggtatgtgattgttatctttcagaaaaccaaatattgtcagaaagattggttttgttgggttgtctaaattcctgtcctgaaagtgatctgttctgatgcataaccggagatagcaaaaagatacgaaataacttgaagaaatgcaaacatgaattttaacagttagatattggccattctagagcttgataacctcagatagatttcaaatgaacctaatgactttaacaattggtgattcgtttattgatcgtttgtcctgtcgtatggtattatgcattttatggtttccatggactaaatccacggtaattttgaggtgtttctcaagcttgaaactgatgatgccttcaatgatttggtgtcagattgtattgaatttggattcaaatcatttccatgccaagttagttgaataaagagatgtctttgttgctttcattaattaaactaatctcgttcaatacttgcgagtaattttcgtggaagccttgcttagatcattttcagatttaccccttttcttccacagatatcaagagctagttctttgcaacacctgaatat

SEQ ID NO: 89550 - DNA, 584 bp, Citrus clementina; identical to SEQ ID NO: 83809
  Intron number 2 from transcript clementine0.9_022641m (loc us clementine0.9_022668m.g) derived from phytozome v7.0 (c hr-ID scaffold_25; pos 236284 to 236867 reverse strand)

SEQ ID NO: 89551 - DNA, 792 bp, Citrus clementina
  Intron number 2 from transcript clementine0.9_010501m (loc us clementine0.9_010487m.g) derived from phytozome v7.0 (c hr-ID scaffold_128; pos 68761 to 69552 reverse strand)
gacgttgtctttcattgccgaattgattttgacaggtttgttgttttggcctaattatgattttattttaggtgatatgttaatgcatgaccggcttaatgatgcttctcatttaccaattgaatttaatgatgtggaaaagttgttttattttctatgctgagttctattgttactaaatctcctcctgatagaattcgtaattggtttctttaatattgttaaattggagggcagttcctcgtgctactattccatagagatgtagtttttaagagagtgaagcttatcatggaaaagtttgaccatcttaagagagagagagagagaaggctgaggctcaattaaccaggtagcccagcaatgcaaatgttatcgattctgtagttcaattatgcagcatctcaaaattgtgaaatgtatatttaaacttgagcgtcaaacttaattcatggatcacaatcgaccaatagcttcaattgctcatatgcttgcaccaacgaaatatattcatggaggggtagacttgggcatgtagatagcggtttagtggtaaggtactgtactgttgaagatttctttttatgttagttttcaccaaggacttcttatgtgttcttattagattgataggaaattatcttgaagcataattttctatgttcttgcccattcccccgacccctccttctcaaccatgcttcttcagtttctagttagatttatattcaatgagctttgttttgatttttcataggctattctcttgcagttctgtttctactggagcta

SEQ ID NO: 89552 - DNA, 497 bp, Citrus clementina
  Intron number 1 from transcript clementine0.9_009331m (loc us clementine0.9_009195m.g) derived from phytozome v7.0 (c hr-ID scaffold_47; pos 773477 to 773973 reverse strand)
ggcttccagacccattgttccacgacaagctagaggtatatttgattgcgttcatttttctttcttgtgggttctttccaattctttttgaattcccattttctaaaacccaatagatgattctcgggaacaatactttccgttgatactttcaatctgctttttatttgatacacatttgttccttttctgttttgggcaatttgtttcgatgcaatgggagatttgatcctcgtagtaacgtttgatatgtgtttaaatgatgagaaagctcgaataaaagaaaaagaaaatctatttcctctttctattgaataaaatcatgaatcttttctgttctttaggttttttttttgggggggggggggggggtcgatcagtttattttcttagcattctttgagactcgttatcaaatttcttagcataatgatatcaattggtttcttataggtgaggcagttgtaggaggagtagcaattaagcagcagaagaaa

SEQ ID NO: 89553 - DNA, 642 bp, Citrus clementina
  Intron number 3 from transcript clementine0.9_014892m (loc us clementine0.9_008531m.g) derived from phytozome v7.0 (c hr-ID scaffold_128; pos 413523 to 414164)
ttccaaggttagtaacaagtaggatacattctttatgcatacatcaatgtcgcgtttaagttgattatgattcttgtactgaaatagatatttcatctttcatgaattgttcttttttattgcttttgtgcatattcgtaaactgagagttataagaaactaacgtcttaaacaagaatgcatgtaggttattcgtagaggacatattcacttcacactcatgttgatggtggtatgtattaatgtcaagctgatgcttgagtgcaaggcatcctgcggcagaatgcaaactgaagaatggattagtttaaaattattaaaatttaattgtattgcaagagcaaagactttgatgtatggtcaaaagaagttaaaaggactttcatggtgaattggcaagagtggagtctgtctcactttataagtggctacttttggttccgtatctttgagtgtatagaaaaggtctaaaactgtgtgatttaataatgtatagatgtttctactattttcgtttttacactgcttgtataagtttgccattcaagattgatttgtgtggctcagcttgtcattcaccttgttacttaaatatgtttccttgtaggcacaagattgcttcatttgcaaaaaaggtggtca

SEQ ID NO: 89554 - DNA, 392 bp, Citrus clementina
  Intron number 2 from transcript clementine0.9_019237m (loc us clementine0.9_014118m.g) derived from phytozome v7.0 (c hr-ID scaffold_74; pos 436424 to 436815 reverse strand)
tcattgctgaattctttgaagctgacccgtgtgctgtaagcttcttttatttatggatataatgaattccaacattaagaatttatttattgttatacaaaactctttttatgcaaactgatgtatcagttatatggttcttattatcttatttactttgagctttgtgcttttcactcttccgcctttactttcatgtcatgtcggtttgtacaagatgagtttgtgcatctaatatttttcattattattgttatatatattatatattttgtttttacttatgtttgagttgagattttgttgctttaaattgaattttgcataatgtttcttcttgctttctgtttgatgatgctgtattggtttgacaggaaaattttgaaactcag

SEQ ID NO: 89555 - DNA, 645 bp, Citrus clementina
  Intron number 1 from transcript clementine0.9_001574m (loc us clementine0.9_001573m.g) derived from phytozome v7.0 (c hr-ID scaffold_15; pos 2877821 to 2878465)
tctggtgggactgtggatcctacgcctgctgcgaggtacctaattgcttctttgtttcttgcactcattcgcagcttcctgatctcaatttagggttttgtttgggttaaattttttgtgggtttttgaaattagggttttggtttgggtttttatttggtaatgtgcatgtcaatttgcggagtttgtcttaggattctcgatgattgtgtttttgggatgcttgcttagacagtggaagcaaatttttgtatgtcaaaatttaaaaaatcacaaactttattctgcttacttattaataaatggaagttaatgaaaatgaaattaagtcaatgttacggtcctggaatgcttattctcgataatacatgcgggcatttactatctggatatcttgaactgtgtaaataatttttaattttcatattttggtttgttgggtacgtgtttttgggctttgcatgttgttctttgcaggatggtggttgttgtgaatcttgtttggttgctttgaaagtgaaagaaattaggtgctcaaatgtgagggttttaacttttttgcatgctataaatcgtctgaagaagttctaacttataatgcatttttcagttctgctggtgcatcttctcctgctgctccagcca

SEQ ID NO: 89556 - DNA, 809 bp, Citrus clementina
  Intron number 2 from transcript clementine0.9_001574m (loc us clementine0.9_001573m.g) derived from phytozome v7.0 (c hr-ID scaffold_15; pos 2878646 to 2879454)
cttttaagccttcaaattggttcggaaagcccaaggtgaacatgcattagtaatattaaatctgtttctgtgaatcatgaccttcttaggagctttaaatgacatgggcctctggtaagctgtatgagctatcggagttgttgtttccttttccttcggcaggaatttagatataaactgtagatttgatgaaatctgatgcaggagtttctatgctgattattgcatgtgtaataaaataattagtccttgaggcaatagctctccttccaggatcatatttcaacaaagtgttttatctgtacgtttgttcaagcttaatatgcaagttaagtctcaaaaaaaaatgtggatattttatcttcttgtgaatcctccatgactttttaccatttctttcctccaacacattgatcttatttactgacatgatttggttcaaagaatgatcattctactgtcttatatccatttttttaaaagaaagcttataaaaacaacttgaacaagtgaatgggaataactttggcggtttcacatgtcattccctctttgtaatttttcatagctggtggaaaatatacaatatctcattctttgatatattatttctgctttctatcgtatccatgtcaagtgtaaaggattaaataagaagaatataaaattttcatctacttcaattcaaattgtatactctttcgattttgcaatgacagagacctaatacaataatcagggtatctgacatatgcttttcaaaattttgtgcagctggccagttcattggcttgtgcccaaagaggctg

SEQ ID NO: 89557 - DNA, 1005 bp, Citrus clementina
  Intron number 1 from transcript clementine0.9_007562m (loc us clementine0.9_005375m.g) derived from phytozome v7.0 (c hr-ID scaffold_47; pos 74342 to 75346)
ttaatctttggcttaagagagaagatttacaacctgtaaagttcttttattccttttctttttctttatacgtatatactttttatttatttataaaatgctataacatgctgcttgaaatcttcagtgttacctcatcctatttgtttttactataattatgagcatatgttttttgaatttgtgacttttattttattttaattcttgttttgcttaattaaatggtccggaagtatttatttctcagtaattaatgatttttcaatttccttaacaactttaagcttcatctaagtttaaaagaatttactaatccagaaatgagagttatttttgtttttttaaatatccattcgtatttcttaaaataaatctttagttcactgagcttcagtattttcagtatgattaattccgctgtctctatttttccaatctcttaacattcttgtttgactcatgcattggctctttttttttttttttcccttcagaaaaaatctacgtcctctttagttgtttgctcttggatacttgattaatgagctcctaatatttgatggagtggggtcatttgtttttgtgacttggaattctacttgaccttggaattgtcagaaatacacttaaattgatattattttttattagcaattctttttttaatattatctcccctaaatatatgctaaaatgaacaatatattccaagtttaatccaaacagtaaattcaaactatatgaatttttgggtatattatatttaaacatttgatgttctttaaaattagaatttcaatctaagtcaaggtttgtgtgtttagatgcaaacaaagcttatctgtgagaatgtggtcatcgctttgattaatcaattagcagcactttctcattcaaattgatctgttgaggagaaaatatttatgttatcaaattaatttatggatgtgacgaattggatttataggttttctcattcaagctccgtggagcatataacat

SEQ ID NO: 89558 - DNA, 812 bp, Citrus clementina
  Intron number 1 from transcript clementine0.9_001623m (loc us clementine0.9_001623m.g) derived from phytozome v7.0 (c hr-ID scaffold_128; pos 191063 to 191874)
cgcttcctccggcttcgttcgccgtcgtcagcaaggtagggttgtacatgcgcttccacattgtgcatgaaaagctgtttgtaattcaatcttcatttgggcatggtaagaggcgtcacaggctctgaaactgttcagtcttctcttgtacaatggctgttcgtaattttcactgatgggttattaatatgttatgtacgtatttcattttagattttctgttcggttcggttcgggtttgcgtttcgaaccagttgctttgaattctccaatccgaaccggttgtaaccaaaaccacaatccgaacaattccaatcgaaacccaatttacccaatatgtattgaaaatgattaaattttttatcggctcggatcatggggttgattttggattatctttttcccaacccggttcggatcgggttgatcagaaccggatccgagcccgagtttgccgacccatagtagaggaagagagagtgcgagattggtactgctaacgtctttttccttcactttccctttgctgctctttactcaaaaaagttacaaaaccttttattctgaatggtttcttttcttcttcctttcccctctattatttttgaggtttagtttccttatttctttattttgcatggttgttgttgttgttgttattattattattattattatttataataaaatgtttacctcattgattcgaaacacattgttagtgttaataaattttgttttatattttttttaatgacgttaatttttgtcttacagattgtgctttcaaggcgaactctgtgaaaacagtc

SEQ ID NO: 89559 - DNA, 725 bp, Citrus clementina
  Intron number 1 from transcript clementine0.9_000762m (loc us clementine0.9_000762m.g) derived from phytozome v7.0 (c hr-ID scaffold_18; pos 3540840 to 3541564 reverse strand)
ggattttcgtgccctcatttctccatcttcgatctgtaagtatttattttaaaaatatgatacaattttttttggttatttttgaatctgtggttttcttttttcatttttttttaattttattttgggagtgtgaatctcgggttggatagtgttttgtgttttcgaatttctagggttttgtttggacaaccggggatctttgcggcggcggatttgatttttgaggctttgtagttggaaattttcctggggtttttcgtttttctttttgatgtttgttcggtgagaaaatgtgcgaaatgggggaatggtttcacatcttcaaatttgtattcctgttttttttttttaatttattggggacgtaaacgacactataataagctaatcattactgaatattcaagtactgtagtagaatctatatgctgcatgaggattatagttggggcttctttggtgcttgaggctcacaaatttatgtagctaaggttttgaaattttgaaaccattgtgacactaggatatgctaagccctatgttacccattataatcttagtttgataaaatcatattttgttggaaagcatatcaacaggcagcgggatttgagatttttcttttcgtccttgtttccaaagctatcggcataacatgacctgacatagtgcatctgctgttctcaggttcagtggtttcttctttctagtatctgcttttt

SEQ ID NO: 89560 - DNA, 625 bp, Citrus clementina
  Intron number 1 from transcript clementine0.9_003614m (loc us clementine0.9_003617m.g) derived from phytozome v7.0 (c hr-ID scaffold_15; pos 2536105 to 2536729)
agagtgaagaattaggtctctccacaactcaataggtatgttttcttcattttcctttgtttaaaaatatttttttttttgctgcacctctccatataacaaataataactctttcagcaatcatgccccttagattgttatatatctttagttgaaaagtttgggcgaattaatgataaacaacaggatgcatacatttatacatttctgtttctttttggttttggatccacataaatgtctttattttcatgtaattgggatcaattagaatggtatacttgggttaagcatatgtactaaaagttactacaagcaaaatccttgtcgataaaataggattccttcgatatttatttatttcgatagaggagagagaaagagagctgtacatgagccttctttgtacttgaacacaaaaatcatctcttgccctacatatatatagtttgtttaaatgcacagattttccttgttcttccttactactgtactctctctctctctctctatatatatatgtccttcaattcactggacttaacaaatatatttatgtatgcttagtcttcttgtattttgttggcagatcaataactttgcagcaataaatatacagtatag

SEQ ID NO: 89561 - DNA, 831 bp, Citrus clementina
  Intron number 2 from transcript clementine0.9_000293m (loc us clementine0.9_000293m.g) derived from phytozome v7.0 (c hr-ID scaffold_74; pos 1183174 to 1184004)
caggagaaccaaatagcagggtatgtaaccttgatctcgtaatgctcttttttggtatttgaacagtttgccttaccacatacctgtcacatgtccatatgcatattacaataaagaaactcctttaataaagtataaaaaaggatttgacgtagaattcctccaaatttattttgatatcttttgcatctaaaaattataacttaatgatggctgcaaactcatgcggagctggcactgtgctcatgatacaactgatggaagaccagtttatcatcctcaccctctgcaaaaatgttagatggtctcaaacccatatcttctgtctatcctgaaggtatacaaaccatatgaagcgttgggcactagcacaggatgcaagttgtaagacggaagtcttattttagtcattcagaaaaatccttttggttgcatacgaatcattaagcattcttcatgtcatgcttgcttagctttgacaacttttctgtcatcattaatatattaattttttttaaccagctaatttaatacattttcttgaaaacaacagcgatttgtacaacataatgtttcaatctttatatgacaatatcttcagaggcatatctttgaatcagatatggttttcaattctctctattacctacaacatatttcacaaaaaggctaatttattgcctatatgcaacagattgttgttgactacatgagaaatgaattagaaacgtactatggataacaaatagtacactgtccaagatttgagccttgctctgtcaatttataatatttgcatttgaacatattctcatcctgtccctgcagacc

SEQ ID NO: 89562 - DNA, 648 bp, Citrus clementina
  Intron number 1 from transcript clementine0.9_017842m (loc us clementine0.9_014130m.g) derived from phytozome v7.0 (c hr-ID scaffold_47; pos 1174676 to 1175323)
gaatccactgacaagatcatcgctgagtacatgttcgtttcttgttcttctcttacactcaactctgtttcttattacactcattagtaattacacatgtgtctataagcttgttttttattcgtctgtgcttgttgctgcgtgtgctttaatgggtgtgttttgtttttgagtgttcttgttttgatctacaactaaggggcggtgcaacatctttcatacacacagttttgtttgatgttttctcttatgacgttttaatataaatgatccaccactggttctataacatctgtgtttcgttgattctttttggaattttttttgctttgttatatttgctaagagagtggtagaagaaagaacaatcatctcattcaaagccaaatagttgtcgcggtgtgcttttgtttttattatttcctgtgacaaaatatgaaagtttttgttttccattttatttttactttcataaattagcaacaatagaaagaggggctctgtgtttttacttcttgatttttgtctatgtgacgagtcaacggttttgttccgcagattttcatcttaatacttgtgtatggttgatatgtatgctgattttgtaattttgttttcaacttcttaaataggatcggtggatctggc

SEQ ID NO: 89563 - DNA, 781 bp, Citrus clementina
  Intron number 1 from transcript clementine0.9_013647m (loc us clementine0.9_013647m.g) derived from phytozome v7.0 (c hr-ID scaffold_47; pos 918859 to 919639)
gattacaccatcgccggaatattccttattttcaggtgaatgagatatctttattttttaaatttaaaaataagattgctttacacaatatttagtgattctaaatgaagaaattttgagttttgtaaagtaactgaggatcgtgtaacttgagtgttattgtttcttcgttctagagattgaaaattttcaagtgcttaatctttattcaaattccgaattcattattgcctgatatattatttctgttgaaacgtattcgattgtgatgacaatagtattctttttggagtaattttgacggcttcaaatgcacttttgaattttgtgtcagttctctagtgtttgggtgaactacacataaatgctttctcactttctgacatttaatgaaaacttcaagcattttttcagagaaataattgagaagtgctactctaaacggtatctgtttttggagtaaaaaaacacttcattggtgatcttttagtatatatataaataaataaatgtatattattgtaagttctgtacataatgttaaagattggaaactagttgtttgttggtcatgcttcgtcttacatgttatgattttctgatattcctttgcattcttagcgacccaacagagcagtattcctttattggagaatcttaacttctagcctgtcccagctagattgttttcaatcatctaaaaagtgtataggggatgtgaacggtaattttaaagctttttgcagggcgaaaaggtgaactagctctttgctaaagagcc

SEQ ID NO: 89564 - DNA, 378 bp, Citrus clementina
  Intron number 3 from transcript clementine0.9_010186m (loc us clementine0.9_010186m.g) derived from phytozome v7.0 (c hr-ID scaffold_47; pos 12454 to 12831)
gtgtaagttattccttcttgttgatgcatgtgctacttcccgcagatttgcttttgagaaaatacaaaaacaaagaaactaatttagtattgttaatttaattccatcctcatattcttcatttttattctatttggttgttgaatagctttttagatcaaacatttaagcaggaagtctgctttgttggccatatatgtatgcaaataaaaagtttatcttaaatggtttagaatatgagaaatacatctatttgcatgggtgttgtatgttgtgatagtctaatattattcattcaccttgatgtgtgcattttccatttgttgtgtagtgttacaactttatgtaatgcctttcagattgcattggggttgctaa

SEQ ID NO: 89565 - DNA, 594 bp, Citrus clementina
  Intron number 1 from transcript clementine0.9_002562m (loc us clementine0.9_002545m.g) derived from phytozome v7.0 (c hr-ID scaffold_18; pos 260534 to 261127)
aagtggtaaatcgcttaaacgttatccacatttgcaaagaaaatgcagtaatgtcggaggaatttcggttttgaaaattaggggaattttatattttggaactataatagtaaaaaaatagcttgaaaaaaatttattggtttgaacagttttcttttacaccatttcaaggattagggttgtttcagctttatatgctgcctttgcttgtgtttctacctataattaaagttattgggttaattttgtctttacgaaaatttggtttacgtgattaagaatttgctcatgggttgctgagttaacttttggcttctgtgatatttatttggataatataagagaaacttttgtgagatggatatttatttcatactgtatcattgttcgtcacttttgaaaaactgtttagacttcctgttcttgagggctcgatttgaagttgtttgatttagtatcttcactgagattgcaaaatattcatcacttaactggaacattagagatgtttggttcttttattgatttgcatttgtaatttactgggaacttgccatatgcaggagttggaacaatcaaaattagggcaatcag

SEQ ID NO: 89566 - DNA, 862 bp, Citrus clementina
  Intron number 2 from transcript clementine0.9_002280m (loc us clementine0.9_002280m.g) derived from phytozome v7.0 (c hr-ID scaffold_74; pos 67759 to 68620)
atttgttgctcgacgctgaacgaattgtagttgaggtgtgcgcttagtttcttcagttactgagggttcaattttgaatctttgtatttaattatacatttaggtgaattatgaatatttgattgcttgttgattcttggtaattaaataatagttaaatgaggtttgaggacctgtctagaaattgttatacagattgtgggagtaatgatgagtggtcaaatcctttttatgagccaaatggcattgtgagaaatcctttttagcttaacgagacaacgatgatacttgttaaaggttattggaatctttgtctctgtcgtgtgaatattttgttttattttacacgtgtttggtgtaatcaatcctgacagagcatgaattaaactgtatgtttatggtaggaacatataaaaattgcctttccatacaaatacatcaagtgagtggttggatttcactaagaatttgttacgatataaattaagggattatatactaaatccaatgcaaattgtggaggtaacgcgtgatatcttttatgagccaaatggcaatgcgtgtccttttaagcttaatgagacagcgtgtgttgcattatataaggttatcagaatccttttctcgctcatggtaattgttctttttttttttcatattacacttggttagcctaatcaatgtttactgattatggagaaaactgtatgtaaatgttaggaacatataaaaactgtttaatctataagtacagtgagtagttggattttgctaagtatttgttacagtttaattacttgattgttcttttaaattatatgcataaggtgttaacttacttttggattatgttttcagggat

SEQ ID NO: 89567 - DNA, 523 bp, Citrus clementina
  Intron number 1 from transcript clementine0.9_033783m (loc us clementine0.9_033783m.g) derived from phytozome v7.0 (c hr-ID scaffold_72; pos 708781 to 709303)
ggcactgcttaagaaaaaatatgtagaagatactgagactcaataatatattagtgattttctacattatcggatgatggatgataaatctatgtctgagcaaatctatgaatatcacgtattagttaataatcttaaaagggtggaaatatttcttcataacgatttgtgactggttgtttgattgaaaaactactagaatcatgggaagattatatcaaaacctcaaagcataagaaaaagcaagtgagttttaaagatgctattatacatgttaggattgaggagaagaatagaattagagatgtatttgataaagcaaagaaatttcgttctaatgcaaatctaataaagaacactcctcaacttaataaaaagcagagcaatcctattaacagacaccctaataaccccaaaaggctcattgctaagaagaaacgtaattgttttgtttgtggaaaaattagccattatgctaatcaatgtagacacaaagctcagcgaaagggagacaacaaaaacc

SEQ ID NO: 89568 - DNA, 665 bp, Citrus clementina
  Intron number 1 from transcript clementine0.9_017080m (loc us clementine0.9_017105m.g) derived from phytozome v7.0 (c hr-ID scaffold_47; pos 483277 to 483941 reverse strand)
ggttctggtgggagtaactggtccttccttcagtaaaattcttcggcttttttttttttttttggttgtttgtgccttagtgtgcttttgtttttcgattcttcggttttgttcattgtatgtgctttttggctatatattgctagttcaactgaaacagattgacccaccattgttttttgttccatttttgactgctcggattattagccaacaacacaagacctatgcattgcgctgggcggaaatcaaaatgcaaagtgcatttacttgattttgaggttgtcaagctcaaattgaagattatcaatttttggatttctgattttaattgatcattgacaactctaaggatgaatagatttaaaaatgtcttatgataggctatctctaagcaaactgattttagttagtatatatgttttcacatcacaattatcgtaagaataaatcatgaaacggggccttgtgtgaggctaatgtttagtatgcttcttctcatttttaaatatttattctgtgaataatttggtgtgtgcatctcctaattatttcatttcagttccacaatcatgtggtaaataaaatggtcaactattctatattaactggaattgtgtgtcattgcaggtatttagctcttcttgccaaatatcctgtggcaa

SEQ ID NO: 89569 - DNA, 791 bp, Citrus clementina
  Intron number 1 from transcript clementine0.9_013052m (loc us clementine0.9_013052m.g) derived from phytozome v7.0 (c hr-ID scaffold_25; pos 3402116 to 3402906)
atcaagttttgaggtatattagaattcggctattagctctgtttcattatcatgttttgaatcaaatgtcaaaaaggattagaaaattaagctgattcatataattcttttaaatcaagcttgttttttgataaaaattgttgtttgcgttggtgtaatttagttttctggattggaattgaggtgggaatgtgggaattctgtcggttacatgattttttttttagtgtttgatcgtattgcatggtgtgtgtttgtttgaattctgtttttgttttgtccttctgttgctgtgtttcgtgagcttgatttgatggtgctgagatggggatgaaagaaagttgaggttttgcattgtgatgtgtgttatttttattttatatatgtatagagagagagaaagagagaagaagaagaagaagatcatcaatctgtgaaaggggttgtttaagttggtacctttttgttttatcacaagttgaaaggatggggagttttagggtttcagattgtgttcgtttttgtttgtttgctatggattctaattgtggatatgaagtatggctgaaatccgattcagttgcaagcagaggataaatctatgttggttttgaattatttcaacggtgttttctgtttaggttttttaatgaattcagattttattttgggtttggctatgcattcaattatgattaagtgattgttgttgtcatgttagtattaaatgtagctggggcgatcacatactctattcatttctgtatctagggtttggttgccaaagaata

SEQ ID NO: 89570 - DNA, 739 bp, Citrus clementina
  Intron number 1 from transcript clementine0.9_001768m (loc us clementine0.9_001768m.g) derived from phytozome v7.0 (c hr-ID scaffold_25; pos 220673 to 221411)
ctcctaacagatcggagcctctcaaaagctcttcggtatttgattttgaattttatttttctggaaagtcttttcagaaaatgcatgtcaaagtcgtcgataatgctcatctgtaaacctttttcagaatttcatgtcaaagtcgtcgataatgctcatctgttaacctttttcagtattttcttctttcgttacgtgttgtagctgatatttgaaagacttatatctgcattcgttcttagcggatgatttgacctaattatgatttttttggcgcttgatactggacaatttggtgcattacgtggagaatactgaaaattgtcgttgaatttactttattttgggatttcagaatgcatctgtggatgatttaacggaaattgcataaatgaaatgtagaaaaaaattataaatggaatgaaaaaaaacagaagaacgtgcattgacttttaaacataggtgatctctatttgagtttaatacttttatctgctaattttttactactgaatgatttgttgattattgtatgataagcaatactttacattgcaatgcaagcggaaaattctgttttttgctatgtcttcttttggttttgtattatgatttcattttctgtaaacttttggttcttgaagttgttctatagtgttgtttacccttttagcagctctttcaaccttttgttcaatcatttgatctgttgaattcttacagttgacaaaaacagaaa

SEQ ID NO: 89571 - DNA, 797 bp, Citrus clementina
  Intron number 3 from transcript clementine0.9_018821m (loc us clementine0.9_018821m.g) derived from phytozome v7.0 (c hr-ID scaffold_95; pos 264821 to 265617)
agggggcttggtggaagagaggtactgttagagttctttagtgcatatttcattttttttttcatttttgtgtaattcaatcactttcatagtcaagtggttcagtaattaagtctgtcaggtttaaactttaaagtacagacaatattaatgactgacttttctgatggttgtgcactcctttactggcaatacaatacaattttttttccctgtaacccagttttatggcttctgcaatagtaatttcaggtgggtataattttgtgaaattaattcattattttatctataactcattgcaggacttagggcaacaatcagcatgcatgtttatcttccatttataacatttttgccctctcaatgttctacacttattccctcattattttttgagttcactgtcagaataaaatcattagatgatgtcagctaagaatggatagggacccttccagatctgggctctctcaagctttttcttaggccatgtgcttatcattgttcttgtatggccaagatttgttcttttattgttgtttattttctttgtatttgctcggataagatctcttacatcatgtatgaatagaggctaaattggaaatgaatggctgaaaactaataattttgttaatttctatttatgaatgcatatattctttataattgctatgttcattaactgtttcatctactcagttgttatttcatcctcataggtttgttttttcttttatgctacaagggataattattcatttgaattctcatattacagaggcgattgcgtg

SEQ ID NO: 89572 - DNA, 859 bp, Citrus clementina
  Intron number 1 from transcript clementine0.9_027268m (loc us clementine0.9_027268m.g) derived from phytozome v7.0 (c hr-ID scaffold_132; pos 306175 to 307033)
tacattttatcgcccgaaatcttccattttttcacgtaagtccttcttctcccccgtttaagcatcttagatctagtggaattgattatattttttttaattatatttgttgaagcgatttaaatctttttttttttttctttttgattcggtcgtgataaggtgattgctgagttttcagcttaagataaaagcttgtttcgaaattcatcaaaattagggtgtgataatcctttgattactactcttttcattttgttcaacggttgaatcgtaaaattagggttcatagtcctcacgttaatatatttttgaatgtagaaaaattagggctagacttgtgagaagttcttgtgatttaggctattcagaaaaaattgacttgttgcaagcctgggatgtagacgacagatgtagaattttattttattttcaatgggatcacaatttttttttttttttgaattggaaattgtacttattggatcattttggagtacagtatcattttgttgaaacttcaatgtacacgcacgtaattgagatcagaattcggtagtttttattaaattgtatcctttatactgaggcttgcatgaaaggggcgtctctttctcagccttgtacagatagcagttctttaccatttttcttgatatatcttattgggttatatatacttttttttttttttgggggatgctgttctatgtgccccacccccccctccaaaaaaaaaaaaaggatcacatgcttgccttttcagttagaaagagcatgattaattggtttgttagagagattcaggaatttgctttggccagacaatatttattggtatcttactctttattgtaga

SEQ ID NO: 89573 - DNA, 765 bp, Citrus clementina
  Intron number 1 from transcript clementine0.9_018510m (loc us clementine0.9_017349m.g) derived from phytozome v7.0 (c hr-ID scaffold_18; pos 427312 to 428076)
tggttcagcgacgcttctcctgctcataaatcttggtacactgttattatgttgctgatattgattaagtttcgtaattaagatggtaattagtgtcagattatccagtatttgcaatttcttcaaattgtttatgcatgaggagcaattgaattgttagtgcgatgtgggggatggctttatgaattgagcccaaggcatggagttgcggacctcagtgacgcatagagaagaattagggtttgcttgtttacatattttgcacgtgtaatggcagtactgttatgggtggtcattttacacttatacagcgtacactttagctgtgcattcaaagtagaagcacatcagtccccaaacatatactcaatcagggtggtttttctagactgatatttgctcaattgtcgtcttttagacaacttttgccagaatttgtgtgaactatagcttagacaattaaactgtaaatagattattaacaaagaatcttccatggattcttaatgtatctaagttcgaaaattttgaattggagaaatacaagtaaagttattagcttggggatgaatttattacagggttttgttgtctgatcagagagagagagagagagctgaggaatatattatgccctttttttgtttttcctttggttcttttgagaagagaggtgagagaggtaaatgcataaataaatgtttatgttacctgatttcatgacaaatgctttctttatgatagatttcaagcgcttggacaaat

SEQ ID NO: 89574 - DNA, 681 bp, Citrus clementina
  Intron number 3 from transcript clementine0.9_018510m (loc us clementine0.9_017349m.g) derived from phytozome v7.0 (c hr-ID scaffold_18; pos 428565 to 429245)
aagttgaggatctcttttacaaggtttgtgtttaaagcttctgtggatttttatattggttcttgtttaatgtaaggtttgatggttttgagtggctagtcaataaactcctttatctatatatatatagagagagtagttttctggtcagggattttaaagtgtgggaaagtccaggaaagctttaaaaccacacggctttaaaggcctacagttttaagcctttaaaaccatgcagttttaaaggtttcccgcactttcccgcactttaaaattcctgactggaacatttctctctctctctctctctctctctatatatatatatatattgaactttggaagtaatcaatgtaacttaacatggctgcagtcattagcctcattgtccgtgcagtctaatgagcaattgttgaaaattacatggctgtcctttagggctttgaacttggaaagcctgttagttcaccgttttctttgctgttaggttgattgttatttaactttgttatttttctaaaccattttgcaatgctcatttcttcggtgcaaactttggactctaattttggtgggtatatttaacatggttgtaagtagatgtataactgcatcatagatattgaatataattttctggttttttttttctaacaatatattcttttcattgtttttagt

SEQ ID NO: 89575 - DNA, 744 bp, Citrus clementina
  Intron number 2 from transcript clementine0.9_006211m (loc us clementine0.9_006211m.g) derived from phytozome v7.0 (c hr-ID scaffold_117; pos 136043 to 136786 reverse strand)
aggatcacagccaaaagtacgcaatactcttttcatatgtcaatttattaaatttttttgaagtaatttgctgagatttcgagctaattgatatctgagaatccacccccccccccccaaaaaaaaaaagcgattttgggttttttttctttggtttagtgcattctttaaatcgattttgtagatacagttttgaagattttatatgaggtcttaattccttttaatattttttaacaatttgataagtttagagtgtatgtgatatgcttgaggaacaaatagctttataaacatgaattttctctacaaagatgggtgagagtagtagatttaacattctagatgtcctatttctgtcatattgtggacgaccaatttgttgacatatatgtagatttgatattggttaagctcatgaatacccttttgtaggatgtagatattgttatccttgagtgcgcagaaaagatgacaagtttcggcttctgagaatatctgtagctatttgattcacaacttcacattctttttgtgtggtacagaagttgagaaatgctttggtgctgtggttttcaatcacaaatgaaagatataaaaagttgtgcaatggtgtattaaagtactaaattgggagtagattaattcattgttttacttgtgatgtttatctttgtggcagtcttacaaattctatttctattttcagtaggtccaaaaggaaaaggaccatatccagcttag

SEQ ID NO: 89576 - DNA, 530 bp, Citrus clementina
  Intron number 1 from transcript clementine0.9_020798m (loc us clementine0.9_020798m.g) derived from phytozome v7.0 (c hr-ID scaffold_47; pos 330621 to 331150)
caagaacgccgcaagctcgccgctcacctccgactgtgagttcgtaataaatttttaggcattattttggcttgaattaaaattatcgaaaaagaaatctcactggctgtgtttgttcatttattagtacaataatgtttctttttaatagtctaatttcgtttctagaatttattagctcttttcaattttatcaagtttagagttaatatcacagagttgtttcaaattgtttatcaaaaatatgaaagtttgatgttaaaagacaaagacaatacagtgaagaaaattatttcagtagtgaataattgattcttttaggggaaaaataaccaaaaaaacttataagatgtttataaaagatatggattttaatttggtaaattactatatctgtatctttatgattgatttactatttatcataatgaacctaaacctgtactctcttatttacaatcttatgtttttgttgtgctggtttcaattttgcagcaactaagataccaaaattttgtacggtcgttagt

SEQ ID NO: 89577 - DNA, 472 bp, Citrus clementina
  Intron number 6 from transcript clementine0.9_020798m (loc us clementine0.9_020798m.g) derived from phytozome v7.0 (c hr-ID scaffold_47; pos 331990 to 332461)
tttactttgctgaagacaggtttgtgttatcaaaactctcatttttatgtgaagatgataatattcttgacttgtgttaatcttttatatggagaatatatagattctcaataaagataagagtgcttgaatgatttttactttaacttctgaattgttatgtggtgatcccctcccccttttgttcttaattttaatactgagttggaatacctgagtcatggaatatttttcaatgaaatattgttacactgcgtttgttgtaaagtctggagtatttttcgatgttttgagttgtctggtacaattagtggtcccattttagcttgaatttgctacaatatgttaaacaatctgtagatccttgcaatatattatttgaagttggaatgaatatttggattgcttttaccctgtacttattgtattttgtgcagggaagaggcaaaagaaataaaatctcaatctggac

SEQ ID NO: 89578 - DNA, 457 bp, Citrus clementina
  Intron number 2 from transcript clementine0.9_005573m (loc us clementine0.9_005573m.g) derived from phytozome v7.0 (c hr-ID scaffold_25; pos 620972 to 621428)
ataaagtaacttctcttatcttcttttttcttatttcattttaatgttcttcttcttcttcttcttttcttctcttttttttttttttttgttttttccccttatcttctagataatcttgatgttttttcaagtactttatagtgggaatctacttttggttatcaagtttaatttgagcagaaatggctccatttatattttgagaagtttggaatttgttgttcttttatatataatattcttgcagagtgtgtaatgtgctagtgtaccaaaggacctattttgcacttttgacacatatctggcttgagtcctttcacttgtctcaagaaacgaattatttctctcctttgagtctctttactttgttcatttcagcttgatttgtattcgtttatttatttatttatttattttcctcctgaatatacaatacaaaaaaacaaaggagaaa

SEQ ID NO: 89579 - DNA, 810 bp, Citrus clementina
  Intron number 1 from transcript clementine0.9_034514m (loc us clementine0.9_034514m.g) derived from phytozome v7.0 (c hr-ID scaffold_15; pos 1468028 to 1468837)
tgcaattacaacagaggtttcttggaaaaagtattttatccggtctagagtcttgaacaaaggctctttgtttttttttttttttttggtaatatatgtagagctagtgtgtgattatatgatgctatttccatttaatttttgcagatttaactccaagaattgtggaagctccatcgttcatacagacatgttcgaaggctattatccttgtttgtacattccttaactgatccacttgttgcattttgattatgtacttttgttataaatagttctgcttgtttgattacgtaaattgccttgccaccataaaacatgcaaacttcataggaaacttgaacctttttgcaaagggcaaagaaattacaatctttcgttgtccaatcaagtcacagtctttagttcattgtcaaatcacaatctttggctctggggactctcaaccttgcatgtgcttatgtacttattagaaagaagttatttttacgaaattaaggctcaattagcctactacatcttcatttcttttgctaaactctttatgcttagaactgagttttctatccacttttttgtcctttagcctcttgtatcctgaaagaaataatctgtggtcttagtaaatgtaattttcaaaaaaatctatttataacgactagaagaaagcctgatcgggcatatattttttcaaacttcaattacatgtcgctttattttcttacggctgtttgctgtctgcttgaaatttaatggcaacaatatctactctgctcttttttttccccctgtagttggctagtgcgggtt

SEQ ID NO: 89580 - DNA, 600 bp, Citrus clementina
  Intron number 3 from transcript clementine0.9_024341m (loc us clementine0.9_019959m.g) derived from phytozome v7.0 (c hr-ID scaffold_25; pos 147780 to 148379 reverse strand)
acttgttagcattggactctatatcaggtacacaaaatttatctagataatatttctgttagtagtgtcatgaagttttctgatattttctgctttttatttgattgacattgtcataaaaactttctggtaccagatattaaaacatgcattttaagtcagggatggatgattcagtttgtctgataaacagatgggcctttctatggttttgaattgtgatatgtttataattttttctcaaagatatatcatgtgaacgctttcttttaactgcatttcatgcctaatcattcacaaaatttgttttatagcagctatcttagtttggcgtaccaaaagtactgttgcatcttcttgtcactccctactttacctcaaaatatgttttaaatttttaatgcaccaatgacacattggtatgaataaatcttgggtgttactgtggcatgtaaaaacatctttccttttttggtggattgtgatcctcatttattaaaatagtattttttttatctgttcattctgttaaccgattattccttacctgatttaaatgttcctatattttaattaggcagcggacgagctgataacagc

SEQ ID NO: 89581 - DNA, 795 bp, Citrus clementina
  Intron number 2 from transcript clementine0.9_024341m (loc us clementine0.9_019959m.g) derived from phytozome v7.0 (c hr-ID scaffold_25; pos 148383 to 149177 reverse strand)
actggaaattggcaagttttccttacctttggttctgagtttgtcttgagtgcttttgctgatattgatattagtttgatagatatgttcattaaacataaacaatcatctgtgtggattctttatgcctagaggttcacccgtaggccgtagcttgcaaaacttgaaaacagccaaatattgacaaagtttgtattatcatatttcatttctcaattccttcattgatctgttggagaacgctggataattggaagtaaagggttttcacattgggcacactgggcttttaattagagcattgctttccagttcactgaaactaacaacaaagcagagaactccgtcttctaaaacaagcatgaataattccttcttctggttaaggatattgtcgcttatcattgtctggtttagctttgataatataacccttccctttgctttgaattaaacatgcgcgtatttcaaaagcaattatttttccaagacggtaatgacaccccccctggtacaaccaattaccaaatgaggaagtttaggatggtgaggacgagcccttttctacatacaattaccagatgaaaattgctttattgtactggggtgttgtatcaattttaggtgttttcttcttgataaattcttgcttatttatttatttttttaatgtaaatctccatttcctgatgtttggtttaagacttgtgccttctatatgtttgatgtggagttaagtcaaccttatgttttctgatactactttggtgctgcaggttggtcttgtatccgatt

SEQ ID NO: 89582 - DNA, 686 bp, Citrus clementina
  Intron number 2 from transcript clementine0.9_010065m (loc us clementine0.9_010065m.g) derived from phytozome v7.0 (c hr-ID scaffold_18; pos 2370191 to 2370876)
ggtcattcttgcgattgtggccgcgttttttcaaggttggcatcgtcttgtctatatatattttattcattctatgatatatcctttttattttttatttttttgagaagatatttagttgctcctctccttcttaggttatttttgactgattggaccttaatctcgatcatttttaattaacagtacagtgttactgttcattggccgttgaacacggttcccaacccaaagatcagttttcgaatcccttttaatttgctggctgcagcccaaaacccaaaacaaaggtgtttaattttgtaatatgtaataatcaactgtgcctctatgtgtgtcttgaatgattagctctccacttacgattactaatttttttttcctttctattttccctttttcctttttaactcagtcaatcctttttcaaagcgtttcttttataatcattttttcatgtttcttgatgtattaatgacttgatctcttccttctattgtattagatgctcatttttatcgataacgacacctagatgcagcccttttgaaaatttctttgttccacttttgtggtgcatggaatcataagcttttcaaattaaatgtgcgcaacgatctaattaattaattttatttattttttggttcttctctatagagttgagagtttcattgaacaccaag

SEQ ID NO: 89583 - DNA, 484 bp, Citrus clementina; identical to SEQ ID NO: 80900
  Intron number 3 from transcript clementine0.9_022461m (loc us clementine0.9_021578m.g) derived from phytozome v7.0 (c hr-ID scaffold_117; pos 349765 to 350248)

SEQ ID NO: 89584 - DNA, 650 bp, Citrus clementina
  Intron number 2 from transcript clementine0.9_017956m (loc us clementine0.9_017978m.g) derived from phytozome v7.0 (c hr-ID scaffold_25; pos 2208012 to 2208661)
attttaaggttgtgcaattttgttttatttttttacctcttaagaagatttaattgtttgctcacgagaaattaatgaacatgccagtttggtaggtttagaggtttagatataaactcaatttctttctgtaatcttaaacaaatgcaaagaaagttgatgaactaacttttcatgtaatcacaaaagatgtgctgaatgctctcgctttagatattgagtgaacattgtagattctgtcattgctattattaccctgacaattctgggcatatgatgtgttagaaaaggtgggggccggggggaagaaaagaggtgactgcgctgtgtgtgtttgtatttgaaagtgatagttgatcatggaatgaagtaatcagcttctaagtttcaaaatttctccagctaatcacaaaggaagaaatttccaggcattgtcaaaaaatagatatgtgaaatagaaaaaggaaaaaaggaaattcttttttcttagaggaactcaaatgctgcagttttatcaaaatgatttatgatgctcccttactaatttattgcggcttatcattgtttaatcatttgttgcagtcattgattcttaatctttcatatttgaactctgtgtagcgtgactataactcggatatactttaaag

SEQ ID NO: 89585 - DNA, 901 bp, Citrus clementina
  Intron number 4 from transcript clementine0.9_017956m (loc us clementine0.9_017978m.g) derived from phytozome v7.0 (c hr-ID scaffold_25; pos 2208982 to 2209882)
gatcaacaggtaatagttacttttattttggcaactgcgaaattggtaaggctgagaatcccattgcaagggcatgattatatcaacctgcaaaagtatgcattttaagtaggcaacttagtccggaagatgagaaattacaagaaccttcttaggtcgcgatctctattttcttattgttttcctgaggagagaatggaatgtgcaatatcggtggttgtgctttgcctatttctttgtattaatgagtgtattaatgagaggctaacaacttgagtgcattggccgttgagatacatcgtttccttggtttaggttgagggggaaccacttttgaattgcatgatttattatgcatgagtaatgggtagttgaagcagtggccatatactgcttgtaaatcaagatgcagaatcttgcatgataagataatacatacctggcctcctcatgtgagaattaatttgttaagtctgtgagcactcagaaattgtatgacttaaaaattttataatatagttgccttacaaaatgatgtgcataactctttctcaatcccgcttcccatgcctatctgtttatgaatatagttatggactatgggcatacccttcttccttgaagcagtaggtttaaacgtcagattttgtaaccagatggtccccacttatcttggagtcccatcagctttattaatacttttgtactttgtttttatgtagtgcttataattaaagcatcttcgatttgtaaaaattttgttggcccataattcttcatatgatctcttgctattgatttttttcttttagtatggtttgtttgaactatcaatttgttagtatcacttgctaaaaccctgtcctaaattctgcaagttcagctatcttccctagaatta

SEQ ID NO: 89586 - DNA, 747 bp, Citrus clementina
  Intron number 2 from transcript clementine0.9_016845m (loc us clementine0.9_015366m.g) derived from phytozome v7.0 (c hr-ID scaffold_47; pos 1515683 to 1516429 reverse strand)
ggaacagattgacattggaaactcaggaaactctggtatggttcctccttctctttctttcttttattttttattttttatttttcagttaaattccaatattagcttaaattctgcctatcaggacatactgatcgagtactattagatgagatcaatgtgggttcttctgactttcttctttcataccaattctgtttacagttttttgagcctacttgttcactctatctgcatgcttattgcatcaggattctgcttgaaagttcgggatctccatccttcatgttctgatttgtgcatcagaaatacgtctatttgtgccccttaggagtaaatgaaaacaagaccaattttagtcttcttaaaacaatttccaatgtttaaattaaatgttgaaggtaaagatggagacttttctaacgcaaaccttactttcgaaaaaatacatccagtttgattactggtttgggcttacaggtgggggtggctgctcactaaccggacatgctctagtacttcggttttatcatacatatgccacaaataccatgcccaaggaaaatcctaatgttaggaaggatttgatgaacttttattacatgtaattacctgcatttaggtgaaatttggaattttcgttgcattaacttttttttcttttagatatatgttggctttaggcactgcttttgccttgactaagattttgccttcccaggtgcagaaagtaaaagtgggaaggat

SEQ ID NO: 89587 - DNA, 486 bp, Citrus clementina
  Intron number 1 from transcript clementine0.9_016845m (loc us clementine0.9_015366m.g) derived from phytozome v7.0 (c hr-ID scaffold_47; pos 1516403 to 1516888 reverse strand)
aagcggtaagtgtacagattttcatatcttttgcgagaatacagtaataagcagattgaagaacatgtagttcctgatctgtcattggagattactaatgcttttgattagtatcagctacactatcaacttagtaatgcacacacatgaattgtgtctgtttaattatatacttttaatggaatcactcttgtgatggttggacagttttatgtgcttactgcatcaggtgtcgttattttctaggtgcatgtagcacgcaatgaagtcagatctaaccgactttgttggtgattgaccttcattgtattttcacattgctttttcccaagcataaacataacatatatattttgtcatttatgatgctaatggatctctgacaacatttcaattttggcatctattttgaattctcaatcgatctgctttcttttacgcaattctgcaggttcaggtggaacagattgacattggaaactcagg

SEQ ID NO: 89588 - DNA, 588 bp, Citrus clementina
  Intron number 1 from transcript clementine0.9_013215m (loc us clementine0.9_010295m.g) derived from phytozome v7.0 (c hr-ID scaffold_95; pos 832846 to 833433)
aatcccaaacagcccgcacgtgccgaacaagcgaggtaccccgctccccgacaaaaatataaatttattgctcttgcgttggttttgtggttttttattcattaacccaaaatcagccgaaaacacagatcattcaaatggagcattatttttaagcacttaaactgtatttctttcaacaattacattgtttcaacctttgcttcttaatcagcattgtgtatttttttcaatcctaatacagttcaagaaacctttcccaaaaaaaaaaaaaaaaaaaaaaaaacgacctagtttgtttgatttctcttgttcagatttaagaaacatatatatctatgcaaaaagtttatgttgcatctttcttgaagaagcgcttggaacagtgctgttattttcagctatctggctgaaattcgctctgaagaataatcgtgaaagatagctagtggacattttcagttatgccaaaaattagaggcgttttaattataaagagctactataagaattagtgcccacatatacttgttattacttaataccagcaaatgcactacatgtatatgttcaggtaatcctttgaag

SEQ ID NO: 89589 - DNA, 390 bp, Citrus clementina
  Intron number 3 from transcript clementine0.9_013215m (loc us clementine0.9_010295m.g) derived from phytozome v7.0 (c hr-ID scaffold_95; pos 833808 to 834197)
ccaatgcacgtctccacgctgttaaagctcaaacactcgtacttagcgggtccttacatcttggctcaacccatttattttctgtaatgattaggaaatattggatcacttagcacattatattgttgagtgctgagaatagaaatatctgtttctgttcaactaatatacttacggatgaagaattaattagccaaaacaagcactgccaataatatgtaagcctgagggagatttatgatgagtacataaaacaaaatttcttgccatatatcattttgcattagatgtaggcttatatacagttttgtttgctttcagattaatgcattgagttcagtattaatgtttgtagtgggaaggatcagctgctgccgagtcaggaggaag

SEQ ID NO: 89590 - DNA, 666 bp, Citrus clementina
  Intron number 1 from transcript clementine0.9_019721m (loc us clementine0.9_019721m.g) derived from phytozome v7.0 (c hr-ID scaffold_18; pos 3386177 to 3386842)
gaacgccatagctgaaaagctccaagggagatcaggtacctacccaactctacttaaattatatattttgcataaaaaaatatatagtgcgacaaacataaataatatttttatatttctagggttttgattcattgttctgaatgtgtaactctaaaagtttattaatgattataacgaaataaaactttatatttagaacaatgatagagccacaaacattttgtacaattaagtatgtacaaattgatgtggtatgagcaaattggataaataaaaccattacagacccatataattaattagttaaaaaataacgattaacattttttagccaaccacttcatgccacatcaatttgtccacactagtttgtgaaaaaaatttttgtagctctattactcttgcaatacttatgattaaggttctcatgtatcaaaatttattcagctccaaacacccgtatttcataaatttgaactacgattagctttctgcgcctcatcattttttaaatccataattttcaaagatacggatgtaaatgaagaaatgatgatatatatgtatatatataaaataataaaagtgtagctatacgaaggtaactattataaactgatgagttttgcaaatatgatcatcagggaaaagttgtaggttaag

SEQ ID NO: 89591 - DNA, 626 bp, Citrus clementina
  Intron number 1 from transcript clementine0.9_021482m (loc us clementine0.9_019999m.g) derived from phytozome v7.0 (c hr-ID scaffold_15; pos 2665801 to 2666426 reverse strand)
ccgctatcgtcaccaccgtcggctgctctctcgatgtatgtcatcttctttctctcatgcttgtatttggtttagcaattaggggttttacgtatagattattatggtttttttgtgtagggttttctaattagatggtgtaatttattgtgatattgcttctgggcgattgggttttatttatttatttttgtacgatttcatctgggtttgtctcaattttacaaatttctggtgctttcaattgattttcattttgcaatgtgggttttttaaaatttcgtcctttccttagttttcaattgttttatgtattttgattgaattggtttgcaatgattgggattccattgctcatgtcgttttgtcctctatttgcccaacataattctgataagtagcgagtgacatctgaattctagctattcagatgtcagtttcggacctgagggtatccaattgtgttgtgatggtaaaagtgggcattgatagaaaaccctactcataattctgctaagttttatgtattttgattcagtgacatcatttgttattctcataatttcccttctttatgttaaaattttgcagataatatctccttttaatctgtgcttgcacccaac

SEQ ID NO: 89592 - DNA, 624 bp, Citrus clementina
  Intron number 1 from transcript clementine0.9_022313m (loc us clementine0.9_022313m.g) derived from phytozome v7.0 (c hr-ID scaffold_15; pos 4252068 to 4252691 reverse strand)
ctaaattggtcagttttcatcttaacacatctgaatttcttatctttgacttcttttattattgttctttgatgagattcgctgctgggtctgtcttaatttgttagattcttgtgtggattgcggtttatgtctgttttgttgatatttgcgtgggtttgacccaattctatgaattttgataagattgtgcgcgtttctttttttcaatctgttgatttaggtttgcgttttgtttttgtttcctatttaattttgttggattattctcatatgggtttgttttaattctcaattttctggttttgagctttgtgtatttctaatgcggttgatgtatgtttgcttttagatgaaatctccttctttttttttgctttaaatgatattgatgtaaaccgcggacggccatgctatgaaaatgattatgatcggtataatatgaatatgtttgctgtaatcttttatgagtttcaatactagttaattttggatttgcttcattgataacgatgaattgatgaggatttcatttttgtgatttccgtattaggcctttgtttaacacgttgttgttgttttgacatttatttgtgatttatatactttaggtgctgcttggag

SEQ ID NO: 89593 - DNA, 447 bp, Citrus clementina
  Intron number 1 from transcript clementine0.9_011529m (loc us clementine0.9_011529m.g) derived from phytozome v7.0 (c hr-ID scaffold_15; pos 3802008 to 3802454)
ggattttgttgatcggtggttttgaatctgaattccgttgatttgggtttgttccttcaaaaaaattattcactttttagttttgtttttcgaagtattgatttgcgaaacgacccttttcttggcttagtttgtaaatctatatttttttaatttactgggcaggcatgctctgtcttaattatagtctatgtattttttaaaattcttgttcaatttcgatccttttttttcccccctttttgatgcgttcttttggttggtttgttctctggatctcgactgtttttttcatctctgagtatcaaaattttaatccttttctttcacatgtaaaaaatttcatattttgttaactgaactgatattgcttgcggatttactcacaattgcttgcttttttgttttgcagctcacaagggggtgtattatacttgattactgaca

SEQ ID NO: 89594 - DNA, 862 bp, Citrus clementina
  Intron number 3 from transcript clementine0.9_012961m (loc us clementine0.9_012969m.g) derived from phytozome v7.0 (c hr-ID scaffold_95; pos 130577 to 131438)
aggtaattattactttcctcactcacatctaaagaaggctggatgagattctttggaagccaaaagtttacattgagtgcaaatcttcccttttcttccaagtaatcataattacaatgttggtaacaacaaccatatatggccttaaaacctactcaggaatttattgatgaggtaattattactttcctcactcacatctaaagaaggctggatgagattctttggaagccaaaagtttacattgagtgcaaatcttcccttttcttccaagtaatcataattacaatgttggtaacaacaaccatatatggccttaaaatggatgccgtcaattttccatggcttcttatttttccttcaagttacctaattttattttcaaaatacctatgcaatgtgatagagatcacgttgcggtctaaacaaatttttagaatgacctttaatttaagatagtttaattcaaactgtatctcacttctttgtttcaaatataatgtggatgagcttgcactgatcataccgtgcacatgttttcttgtttttgtttttgatcattgaagttattatgatggttgtttcttaacttgagcttatgagtcaagcagaataagcgtcatctaaattattagctttcagaatgttggttaatcctctgttattcgcaatcgcgtcctttatacctgttataaatatgctttagaaaccatgtgatggtttggattattttcctttgttttcctagtagtgtcttccactatgtaagcatatttgctttggcattcatcattgtttgctctcatgggacagatttttactctcaggtacgcttccttgcatctattcaacatcggaatct

SEQ ID NO: 89595 - DNA, 502 bp, Citrus clementina
  Intron number 1 from transcript clementine0.9_033673m (loc us clementine0.9_033673m.g) derived from phytozome v7.0 (c hr-ID scaffold_15; pos 4318159 to 4318660 reverse strand)
aagttgttgagagtgctgctaaaactggcgctgaggtttgatttaactttctctctttctgttgattcttcaattttcagcggtacccagttcctttttttttttccttgtattttgcaatgcattttcagcttatgagctgttaatattattgcaattatttatgattttgttttctttattattttcacgagttaccagtttgtttataatctgtgcctttttttgttcaatgcattctcattactagttaacgaaagataggaaggcgccagttttgttgatttattgtacacatttctttgctttgagatgagtgttcataaaatgcattttgggttgttctggcaagtaaatattgactttatttatggctactgctaaatttgctataataaaatacgttctatgtaaccatatgcttattttcctgggtaatgatcccctttctgctgttgccaattaaaagtgacctctgaccactttttctttccaggttgtg

SEQ ID NO: 89596 - DNA, 659 bp, Citrus clementina
  Intron number 4 from transcript clementine0.9_018317m (loc us clementine0.9_018326m.g) derived from phytozome v7.0 (c hr-ID scaffold_15; pos 4235021 to 4235679)
tccggagctcctggctctctaattttggattaggggtgagtatttttagttattaagcatttagcaaagattgtgttcgtagcttttgagaagtaggaaaaatacatgctcacacctttcgaggagtttctttctcatttaaaatatatgtatgcctgagattcatagcttctatgttctacattatagctgtttgtggtaatatggttcagtttttcacattgcagataaaaggaaatgctgctctacgaattttctcaaaactataatttttgtgttatgattccttgtactttcttggttgaccattgcagttaggactggctatagttataatccatcttctctttgcattagcaagacaaagccatatgatgtacatgacttttgattcgcttctacgtgattcccatcccttgttgttatcatctcgaaaataaagaaacattcctgttgattttgcttaaatcataggcatgtctttgtaaatacaggcagctccttattgatttttgctagggctgtgaaatagttctcatggctgttattatttgtcttgttggataagtgtgggaccctctattgtaagtgttttgagttcatgatttgatatgattttgacaggtttctgttggttacttccttgcggatcttggaat

SEQ ID NO: 89597 - DNA, 691 bp, Citrus clementina
  Intron number 2 from transcript clementine0.9_000130m (loc us clementine0.9_000130m.g) derived from phytozome v7.0 (c hr-ID scaffold_25; pos 3088658 to 3089348)
aggtagcccttaccattcgttgtgtttttaaggcagatattgtgtttgttctgccttctttgtagaaggattctggttcttggattttaaaatccttattttgattatcagtagttatagatcacaatgggttttaattgaattttttcccacttggcttttttgctagcatcaggggattccaaatagtatttgatatcagacattcgcatcattttcagagaactcgttagattcttaaaaactgaaaaattagacattttaaatgttaatcatttggcacacatatgacaaaccttgattaggtagatgtaaataattttttattcatgcatgcagggttgaccttgtgcagttaaaaaaatagatgtggtcaatttcaccattagacattgggaaacaggatttgtaaacgagttatggttttggagtggattgtggtaggctttcatatatgcattttgacgcaggccttccatgtggactaggttatttaaactgttggaataatcctccctttttcattctatttggtttctcatgaggtagatgagatgaatcttgttattccttgtatgccttattccttcttcctcccttggaattctagtatattattttctgcttcatgcatgatttacttcttgttcaagcaggacgatcacaagtttaagcaagccttgaaaattag

SEQ ID NO: 89598 - DNA, 927 bp, Citrus clementina
  Intron number 1 from transcript clementine0.9_013712m (loc us clementine0.9_012170m.g) derived from phytozome v7.0 (c hr-ID scaffold_117; pos 482013 to 482939 reverse strand)
ggaaggtcacgcctgctaccaagcagattgatcatgtgagtgcctttcaatgatttcctttgcaaatgattctgtatatgaacaattctgaggttcgctttattttggaagatatgtggtttgcattatgaatttgttttggaaatgattggttgtttttctatgttctttggataagagaggtccaaagcattatttgctattgtaattttgaagaatatgtttcgtgggatgaattataggcaccaaatggttcaggattcgtgttcttgtttagttgttacaaattctatcatctgggcttttgaggacattagatcacaaacattgaattattgataccaaaatgtgatgttcatattttggttacagcaccatgcttttttaggaagtgaacgtagacgtagaccttcaccttgatctctcctctcttatttcaagcatgaccatcgttatctatccatattcttattgtataaatacaaagtcactaaatgacctgtgtgttaggcgtgccactgctcagctttgatctgaactagttcaattgggaagggagaaacttttagtgtcttaagatttgtagattttttagcttcagagagtcgtgattctaaaacagcttgcagaattgtcatctgtagcattatgatatatgagcatcacaattgagaaagttatgttatggaggacgattttttaagggtgagtgggagacttagtagtccttgctttctctttattgttgtgtcttcttttaaagtgggttaatttctgtttttttttcgtattctaagtttattttttcttttttttttcccaagagatattggttgtatcgccatcataattgctccttacttttgcttttcttctttctgtatgtgtgtaggatctaccgcggaccttcccaggtcacccgtggct

SEQ ID NO: 89599 - DNA, 851 bp, Citrus clementina
  Intron number 1 from transcript clementine0.9_004764m (loc us clementine0.9_004764m.g) derived from phytozome v7.0 (c hr-ID scaffold_18; pos 3728332 to 3729182)
ggtatgcgagtttttatgctttgaattagtttttcgtttgttgaacttaattttgcaattagaataatctatggtggatgttgagtagagtatgtttattaatacgatatgtttctgatgcgtatagagaagactcgtggagttcagttttgaagaaattaaaagaatctttatggtggatgttgaatcgtaggcagcataattaatttgtaaatatctttacgtctgagcagatttgttgaatgtaacaatgatattgatgccagggttttttattttatacaatctgttgtatgatatctttttgctaatattgatagtatgagtgattttatgacaaacataatgtgtaacctgatctgttgtgacatcacaagagaagaagcaacattgttttggctatggctcaaccaagtacatgaaatttacacaaatattgatgtttaaacagtgttcaatatccattaccttagatgtatagtacgtgatttatataattgtattccttttgtattttctttattttatgggtttgtataatcttgtgcagaaactattctagttttgttcttcttgagctgttacgaaagtgaatatgagaaccttttattgttgaatgtcttgtttattttttgtgatacttgaaatttgtttgaaatgtgagaaatggaaaaggaggaaactgagtggaaagaaaagggtagtggtctaccaataccttattctttccctatagggctttttgtagcattgttaaatctatttttcgatgttagcgtaatttcaaattataagatactgaattctaaattgaagggagaaagtgggactaattgagaccaagagggaga

SEQ ID NO: 89600 - DNA, 550 bp, Citrus clementina
  Intron number 1 from transcript clementine0.9_011482m (loc us clementine0.9_006018m.g) derived from phytozome v7.0 (c hr-ID scaffold_47; pos 904559 to 905108)
gagtaagtctaatttcctcaacattttcttaatatagacccttgtgctgttctattattatcatgtcttaatggttcctgattctgatacaaggacttgcgtaaacatctgcgtttcttggctccctgggataaatacaacagtccataattcatactagattgtgactgaatttgactcgacatagttagttaaaaatattgttcgtctgtatattccttccttggaaatgaagattcgccggctaaatggtctgtggctcagtcaaaatatttgagctttaagcttttaatattaactggggaaataagtcttttcaagtggcatatgctaacttatttggtttgtcctttcttctttgtattttttggcctgtcaatgtgtttattttcttccaaagtcatgaccaagatccattggatgtttagaaacttcaattatttttcaagcaaaatattggaagctatgacataagttcttcacgttctgacttaccctccatctaatgttgcaagattgtgcaaaggtggcgagctattggatagaatac

SEQ ID NO: 89601 - DNA, 465 bp, Citrus clementina
  Intron number 3 from transcript clementine0.9_011482m (loc us clementine0.9_006018m.g) derived from phytozome v7.0 (c hr-ID scaffold_47; pos 905285 to 905749)
tccaaggtgtggtccaccgtgatctcaagccagaggtaattaactcatgcagataatcatttataactttttgataattcagaaattcaaataattttggattaccttccctgtatgtcagtttgattgtaaaaatatatatctagtaaaattaaagttactttgaacaaagctaacaaggattattttagagttaatatgcactgctgtgcttccagtgctttcttttctgggtctcgctatgtgtttcttagatactgcttgtgttttcctatggcacacttaatattcttgaccaattgctggatgcagttattgaggacttcgttttagtttcacatttctttttctttttaatttcaatccaagtttatttactctcacattgtgatttcctcttcttattgtattatgttattttctgttatagaattttctttttacttctaaggaagagaattcatc

SEQ ID NO: 89602 - DNA, 505 bp, Citrus clementina
  Intron number 1 from transcript clementine0.9_023958m (loc us clementine0.9_019399m.g) derived from phytozome v7.0 (c hr-ID scaffold_15; pos 2918868 to 2919372 reverse strand)
gaaggagatctcggtgaattctcgggcaacttttggtacggcagttggatcttagtttgtctttcttttttctgtttggcaggttagaaaatggaggaaaagtaattatgacgtgtaatgatggtagtaaattcgcataacgctagagaaaaaaaacgtaaattcggcaggttttcttccattactactagtacgtggcgttgcatggtcctttttagatctgcttttcatcttttaatttctcattatccacatgtttaaattaactttaaattttgcaaataaacctcaaatttttatctataattattttaaataacaacccagtagttttggatagaaaatagttaccagatttgtcatgcgttacatgaggcggtgtcccccattaaaatatgaagtagctagcgagagagtgcattgtaattttgagaataaagcgggtgattttgtgatggattgactaacaggagaggtaaagaaggtgttaacgggagagacaggg

SEQ ID NO: 89603 - DNA, 564 bp, Citrus clementina; identical to SEQ ID NO: 81519
  Intron number 1 from transcript clementine0.9_010586m (loc us clementine0.9_010574m.g) derived from phytozome v7.0 (c hr-ID scaffold_25; pos 71226 to 71789)

SEQ ID NO: 89604 - DNA, 889 bp, Citrus clementina
  Intron number 1 from transcript clementine0.9_018800m (loc us clementine0.9_018136m.g) derived from phytozome v7.0 (c hr-ID scaffold_47; pos 1543549 to 1544437)
ttgcttctctctgagaaaaccccatttccattcttgtaagctccctctctttctttttcccattaataaatactcgtcacatgttaatcttacacattttgcatttcccattacttcattgaataattgcgtgcgtgatgcattcattcatttgtcaaaggtgacgcatttttaaaagcattagcatggccctcgttcgcgccctctctctctctgtattcttcagttcttactgttctgtttcttatctgttcattaacttcgcattaatttcgtttatgggttttttttaaatatatttgggcttttgctttctgggattttgtatttgaggcaaaatctataatgttttcctatttccgtagaaaaggttaaaggtgcctctacttttgtcctttctcagtttttattctgtacaatgcttggccgcatttacctaaagtttgctttcttttgttgttcatgtgttgattttttatgaagcttgagcattgctctattcactgctgaccattcattttgaataataaaaataaaataaattctgggtttaaactaccgcccgtcttctgaatttttttcctttttttttttttctttctttcggggggacacttctaatcctcttgcagtgcttgttgggttttatttttggaagagcactttcttaatggtggttcattcctttatttattttcttcgtttttgttgcctataaaagaatggggcataaaactatttttacggagtaagaaaaataatagacttgagacatttgattattataattattattataattattagtggccttttatgcatattttatgctgacaaaatgcatttgattgcagattcatcttttctctcaactataacagaggtactt

SEQ ID NO: 89605 - DNA, 405 bp, Citrus clementina
  Intron number 3 from transcript clementine0.9_018800m (loc us clementine0.9_018136m.g) derived from phytozome v7.0 (c hr-ID scaffold_47; pos 1544827 to 1545231)
ttcttgctgtggcagtttgaaggtctgttatgttgtatgtgtaattgattcttcaggttaaatttcactgtagtacaggttgttagaaggtatcatgcttgtttgtgttgttataagctctttgtttactgtctttgatgctttgattaaaactgcatgcagtttaatcaagtcaataagtagtataattaaatagatggttgttccgtgtcttaacttggaaacttagaattccatgaaactcagatatttttttttttaccccggattattcattttctattttatgtttaagctccaactgttgtaggagattgtaataataccatagcccttatcttggttcttttgcgcttgtaattttcttggtttcaattagttctaatgagattgactgttttcagt

SEQ ID NO: 89606 - DNA, 405 bp, Citrus clementina
  Intron number 1 from transcript clementine0.9_015168m (loc us clementine0.9_015168m.g) derived from phytozome v7.0 (c hr-ID scaffold_15; pos 3328395 to 3328799)
ctcccagttgaagaaccacacatttcaattcacaggtgaattctaagtccctttctttcttttttttttttctttgcagatctctctttctttcattttcactttaatcttttgtttttcatttctgtttataaatgtttgcaatgattgttatctgttaacaaactttcaacggttatctattatcgatgtatgataatacattaataattcatgggaaaatcatttttttttttaatttataatgatgatttgaggttgatatgttgttaacttggtttgattaaatgtgttgtcaatcttttttatgtcatttgggattgagattatttgggttgtgggcttttaataaagtttttgtttttttcagtggaattatttttcgtgattttcatttgtggaaga

SEQ ID NO: 89607 - DNA, 420 bp, Citrus clementina
  Intron number 2 from transcript clementine0.9_015168m (loc us clementine0.9_015168m.g) derived from phytozome v7.0 (c hr-ID scaffold_15; pos 3328828 to 3329247)
aacccaacaaatagttcccctacttccttttttgggtatgttttcttccgagctgagggacatcagatgcaatttgctgttatattgataattttgattactccgatgatctcatacacccacttgcagttttgaaacgtttttcacgttggaattgccacgtttcactggtgtctttttcatttttgctggtatagatagtatttgttaattttattcatgtgcaaggtttgtagatattattaggattaatcctgttgatatttgtgcactttctcttctgttttttttttatatcagagtttacatcgaggtgtaaatggtttagtccttagaattacttttgctgagctgagttgcttttctttttctttgtggatgatattttccaggcttctctgtgaatatagtcctttttga

SEQ ID NO: 89608 - DNA, 639 bp, Citrus clementina
  Intron number 2 from transcript clementine0.9_014063m (loc us clementine0.9_014021m.g) derived from phytozome v7.0 (c hr-ID scaffold_25; pos 368427 to 369065)
aaggtttattgaaatttaccgcttttattgaattattaattctgtagattatatggtggttattgtttaacttttgaatgattttttttttcactctttgtgaatgttttggcttgtttttatatttgggttttgatcattacttttagattcttttgacaaattgcttttgttatatatggtgttcataaattgatcagaggttatcatatacttgagaactgtattgttagcactgatgttgacttgagtttgtgttgttaatgtctttgccttataccatggtctcttttcacatctgattcgctttaatgcttgagaaaaatttgtgatttcctgttcagttctgtcctaagtttctttatttgttccaattcttacatttgcatgtggattttatggccaacatcttgtatgtattgttttgttcataaaataaaagtagatgcaaattgaaggtttaaatttaagaaatcatatgttaatctggcatgtgtgttggacaccatatgttggtatgtgaagattagttacgttgatattttgtacgtttttgtgttttaatttgatggtgatttttctcttgcttcttttcatgttttaggagcggtccacagggcgatcgcgtggatttggcta

SEQ ID NO: 89609 - DNA, 669 bp, Citrus clementina
  Intron number 1 from transcript clementine0.9_000241m (loc us clementine0.9_000241m.g) derived from phytozome v7.0 (c hr-ID scaffold_15; pos 3104493 to 3105161)
aagcaaaatcaagagaacagcgcttgaattttgaggtgtatagttgtttcctctgttcatatatgttgttattgatatgtttctacttggttttattttgtctaactgctgagaaaatctaggaaatgaaaaatggttttgggttctggattttacattgtttggattatgataacgctaggatttaaaatggcagaggctcggttattattttagttatgaacctgacattttctctctttcactctgttttctcggcaactaaatgcaaggtggtcgaatttcctttcgttttcctgtacatgatcacttttccttattaaagttccatcgacaaaggtttaaatttcaatgggtttgttttgtgtacatgaagagttcttaccatgtgagtttatttagttgcgtctggttgccagtgtttttgttgtttgaaaaatgaatttgatttgttctttttgccgttagttcattgagtggaaaatctaaggcagttttttcgggtgccgtctgttaattgagtggaaaatcaaaggcagttttttctactaatttactgagtaaacagacagaacttcgtcatgctttcatggtttctcgtatgctgaaagatattatgcatgtacaaagtgtcttaatcaatttgtgaatcttttgaaggcgataaaa

SEQ ID NO: 89610 - DNA, 484 bp, Citrus clementina
  Intron number 2 from transcript clementine0.9_000241m (loc us clementine0.9_000241m.g) derived from phytozome v7.0 (c hr-ID scaffold_15; pos 3105469 to 3105952)
gagagaccagctttgctccctttgaggtggctgtttttaccgttttattttttctctctcttctctttgctttcttgaatttgacatatgcctttaatatttagaatgttttacccaagataaaatgttctgaaagttgatatttttagcttcaagatacttgcgaaattagttagatattaaatattacgagcatattttctctggttgtcattttgggtacataatcagctagaaagctgaatccattactgttgttttattttcctagatatgatatgtataatttggttttgatcttaaatgaaaatgtgtttgaatattcattgcattgctgacttgggtattccaaagcatagcagaatatgcaaatgcatatacaagacttaatttccccgtttctttgttgactttctgatggttaactgataccattgtctttctaattgtacgacacgcaaaatgactgcatcttctcttgcag

SEQ ID NO: 89611 - DNA, 511 bp, Citrus clementina
  Intron number 2 from transcript clementine0.9_028273m (loc us clementine0.9_028273m.g) derived from phytozome v7.0 (c hr-ID scaffold_153; pos 115834 to 116344)
gtaagttggctgagggagtggattcgacttttgaggttcgtaactcatcatgttaattgagatggcggtttcttatataacatttcataaagttactcataaattgctttccttgttctaaatcatcattgcttttgttgttattcgatttctcttcacttctcgcacttatatgtatatatgacgcatgcaaacatttttcttttaattgagcatagatgacggaaaattatatatattctctctttattcatataaaaaagtgtttgaacctcggaccttttgtattacttcaacagattttactccggacgcacaagcatcataatatttcaaactgtgtgtaccatgagcgaaaaacatgcctaactcttccatcataattaaacaaaatcaaagtatatccattttttccttgcaaaacaagtattgctgcatttttctttatttcaaggtttaatttctgtttcgattgcttcatatgtaggagaagccattacaggaagaggaa

SEQ ID NO: 89612 - DNA, 669 bp, Citrus clementina
  Intron number 1 from transcript clementine0.9_010212m (loc us clementine0.9_010212m.g) derived from phytozome v7.0 (c hr-ID scaffold_25; pos 2892130 to 2892798)
tccggacttctggatcatcccgacctgctccaaaagtattgtttttaaacatttcactgtctaaagtttgtccatttcgatttaggttcgttgaagtttttgaaattttgatttgacttttgatacgaggtaggaatttaactacaacaagctagattacacattagatatgctataaaaatctaaattttatggttttcttgcttgactattatctggtaatttaacatgaaattaatggcgcacttgtaagtgctgtgtaatagatttttttttttttgagcaatgtgtctcttccatctacatttgaagatcatttccaattcagacattgcttttacaaaagcatagatcaagtcttcctcaacttcaaaattgattttgacagctaactagaataaatatttaaaaaaaaaagaacgttttggctggtatatcattttggccaaactgctttgtaaaagaaacagatagtaagtagttcttcaaagaaagaactcaaagtagtaactgatttacagaatattttttgtccttccagttaaaatcacaaaaacaaaaagaattagattttttttatgccaccgaaagcactattgtataaagataggtttttggggaattttgaaactctcttgcttatatcaagtaactgtttgtattataggc

SEQ ID NO: 89613 - DNA, 751 bp, Citrus clementina
  Intron number 1 from transcript clementine0.9_027675m (loc us clementine0.9_027675m.g) derived from phytozome v7.0 (c hr-ID scaffold_117; pos 65453 to 66203 reverse strand)
tgtagatttgagactttcacatacaagattttcaggtaagattccagattcaatagaaaatggagtccaatctgaagaacttgcagattctggtggttcagcatatccatcttcaacaacatcccataaattttgagagaggaaaaaggtttccatttgattactccaatattcataatgtaccccttcaaatattggaacttgactgggagcatatgaaaataatgtgggtagggtatttgatgtcattttgagggtgttttggaaaagctctgatactaaatttgttgggtgcaagcggaagtgcagaaaatctttttatttaagaacagagtattttgctggaaatttctgaaacttgcttaattcattttttcgtttatctcttgcttttcatacaaccagagttctatatttatatgcattatagacaactctagagattacattaatcatgctttacatttccaaagctacattgcaaacatcaattctatcctttacttcatgttgaaaaacaaaccaaataacccttcaaacttcttgctcaatttactagattactaattatatctcaacattctttaacaatttctgagacaaatttttctgaacaaaactcttattcgttgttgattgctttggtcagaaaatctgctggttgctcattagtgctgataaactccatattaacttctcctttgtttactaaacagaacttactcaaaaaattttggctcataaccaatta

SEQ ID NO: 89614 - DNA, 561 bp, Citrus clementina; identical to SEQ ID NO: 81122
  Intron number 2 from transcript clementine0.9_020104m (loc us clementine0.9_020104m.g) derived from phytozome v7.0 (c hr-ID scaffold_117; pos 437089 to 437649)

SEQ ID NO: 89615 - DNA, 834 bp, Citrus clementina
  Intron number 3 from transcript clementine0.9_005881m (loc us clementine0.9_005881m.g) derived from phytozome v7.0 (c hr-ID scaffold_25; pos 3475917 to 3476750)
cgagaaggtgagtgcatgtcatgcctgaacttgtttaccttttcctgcaactctccttatttctttcttgtcatgtgtgagccatgcccactgtgtgcggatacaagctactttcagatgcggatacaagctactttcagattattagtattctcacaacctttaatgcaatgttttactggcaacttgacccacccactgctgaattttctttctaggcttttcttgggaaatagcattcggtttcatgaccatgggttggagctaaaaccaaagataaaaattaattaaattcagcgcacctagttgtttttcatgtctctttaacctaatgataagttttgaaatataacacaatcatgagctcgttgctgaggcatagctaatattagctacctgtgtctcattaacctacaagccttgtgaaacaacgtatactagattatttgattgaataaaattgtaactcttttagccatgacatgcaattcgttcgtgtgaacttctaatctcatctactcatatttgacatctagcataaatgcaaacataaatcagtgtagagtgatgaaagactcgggattatgcaatcccagcaaactctcttttcctgttctgaatttggcaataatcctcatcataaggcatacgatacatgcaagagctttcctgcagatatgcaggatctacacgctttggcagtttagctcccacaactttgtacttgtaaattgataggttttatatagtaatcataatccaaatgttgaaaaaaatctcatttgattcctgtctacagggtagtgaaccacttataacagtcgaggcactgca

SEQ ID NO: 89616 - DNA, 701 bp, Citrus clementina
  Intron number 2 from transcript clementine0.9_035671m (loc us clementine0.9_035671m.g) derived from phytozome v7.0 (c hr-ID scaffold_25; pos 2261516 to 2262216)
ctattgccccgcagtaacttcactttttacggtaatatattgtttttttttactaaaaaaaaagaaaagaaaataagactgatgcatatatatataatgtactgaacgagtccaaaattttagacttatataaatggccaaaaaaattatgaagccatacaatttaatagtgtaatgacttaataacttttttagtcattatactattaaaccatatatcttaatagttttttcggacttcacaaatctagaaatttagattgaaaaacatacatatgtacatgcaggtgctctcaatttttttttttaatacaaacacgttattaaaccatataattttatagttaatggaacaatgtctctattgaatcgcatggtttaacagtggattgaaaatgattatattacaccatacggcttaatagcgtgtacatatgaaaaaaaaaagaagatgccgcataagagaaaaattatatatatatattagaaatattccaattcaaattatgaattcgttaaaatcccaaaaaactgttaaactatatagattaatagtaaaataagttaatacgactaaaccatatcactttttagtaatgtgaggatcctggaccaaattttacatatatagacgtagaaatttacttaatttcttgatcttggcagaatttgactcgaatttcaagttactaaataagcaa

SEQ ID NO: 89617 - DNA, 1049 bp, Citrus clementina
  Intron number 1 from transcript clementine0.9_003236m (loc us clementine0.9_003236m.g) derived from phytozome v7.0 (c hr-ID scaffold_15; pos 1418304 to 1419352)
tcttctattgttgtacagaaagggcattgcgggaggtaagaatgctttgattaatagttgttcaagaatttaattcattcagctgattgatttgtgttgacattttattctctatctgcataactttcttctattgttgtacagaaaaggcattgacggaggtaagaatgctttgattaatagtttgtcaagaatctagtttattatgctgattgattcgtgatgacattttactttctatgagtgaactctgacaatatcatacattagaaaattttggattttgtgctcagacggttgtgaggatagaaaattggaatgattctacaaaatttactgtgaatattttttttcttattcttagttttgattattgatattttgaatcgccaaagaagccttgttattgaaagtttaatttacattagctgtatacggataaagcttgctttcttgtcatgataaatagagatgatgtgcatgttatcgggcgtatatcctatctttattctcattttaaaaagtgcaatgtccgatcaccatacaatccatgcttgattagatgacttgcaagtctgtataaaaattggttctcaaaacatctcctaaatggattgctttgtttttgagaaatgagagctactcttgaggtgcaagatttatttaaattccgctctcataggtttccaactatgatattttattatttttttctcattccattttttttgttgtttttcctaattatttatagtggatgagttccaatgaacttggaaaatcctaagtgtgctctagaacagctataaaaggaaccagtacggatgtgaaattgttgtactaaagtgagctgttgtctattgtactatgttcagctcttgaacctctgataatttaagtttgattattgtgatcctactatgtcaacaattgcattgtttttaagtttcaatatattgttatcggaatagttctcaatactaggtgtaatttgaaatgatcgttgctgactttcttttgcatctaatgcagccatattggcagacgag

SEQ ID NO: 89618 - DNA, 846 bp, Citrus clementina
  Intron number 2 from transcript clementine0.9_012607m (loc us clementine0.9_012607m.g) derived from phytozome v7.0 (c hr-ID scaffold_25; pos 1157993 to 1158838)
cagctgcctacccagttctacacggctctggtaatctaattcacttactcctcctccttagctaatcctatttacatatcttgtcaattttcaaaataaaatccatcctaactagctacatctatctatccctatgattattgacacttcatcatacatgcttcatagaactttttaaattcaaatctaggttctccaaattaattaaacagataaagagaaattaatgtattaactagttcatcaaatgaaaaaattttaggattcggatcctttcttaattttatttttcctctaatctttcgaatccagtttaaaaaaaatattagcttagttataaatttttttaatcagatattatcacatcgaaatttaaaattcagttttaatcggtccaaaattttaatgttttactactagtaaattcactttcacgctctttcaaaaacaaaaaaaaaaaattcactttcacatcatcatattggaggataaatataataatatattattcacctgtcaacttcaagagttcgattgaatcattttatatgaggattttacacatgagtaggcctactttagcctttaggctgaattcgcttttgggtccaattgccgatcaatggcctctctgagtactgttcattaattgttactttctcaatgaaactttttttcccccaattttattttattttattttaaatttcttctttctcatttaattttgacccaaatattttgtatcacataagagaattaactagttgaattgacacccgcattcactatttctgcatttctttgacagctctacaccataagtactgtagtgttagtgctgca

SEQ ID NO: 89619 - DNA, 466 bp, Citrus clementina
  Intron number 3 from transcript clementine0.9_017460m (loc us clementine0.9_017460m.g) derived from phytozome v7.0 (c hr-ID scaffold_15; pos 3809081 to 3809546 reverse strand)
gaattgtgagtcagatttgacttatcttgtgcttaacattgagtagaatgttgtgcaaccatgctttagcaaatggtctttcttgtctcttgtttattgttaagagaacaatgttgtgaattttagtgtaaatacagttgttctgtagcatttgatttacattgatgttctacatccttttttttttaaaaaaaatgtaactttgggttggaatagagaaaaaagaaaatgtaataggcacttaattctatcaataaggtcgcagaaatgtatggctacctttatctgaataatctcaggaattgacaagcccaagttccactgggatctgctggaatcttttcaattcatttcctggtgactgccatttgccttgagtctgagtgtgagtgtttggagtggatgaggcatctctcttagtttcccgactcctgaggctgatacatgctattctctttttgcagac

SEQ ID NO: 89620 - DNA, 929 bp, Citrus clementina
  Intron number 2 from transcript clementine0.9_023964m (loc us clementine0.9_021379m.g) derived from phytozome v7.0 (c hr-ID scaffold_15; pos 3191444 to 3192372)
gggttcttttcgagcaaattctggctgcagagtatgtatatcaccatgtaattgtttcattaatttttctgttttaatttagttcacttaaattttgccaggctgtgattacctaggttttagtttatgtttcgtttaggcagaggtatatattgacttgagttgttatgaaaaattgaaactcagtgaagtcattacaatatcaattcatcaattatcaaactcaatttggatttgtgatctaagtaaccttgaagcctcatttgtagcagttgacacaataaacaagcaagttttggatctactaaatcgtggcttctagttgtataattatcttaatttagtatggacggaggatatgaggtgtgagcatctaggaaaggagcttaggattaaacatcttggaaaggttgagactattcccttctttcatttgccggaaacaaatattttttgggctcatccagacaaaaccattcgaaaggaacttctgtctgaactgaattaactttcgatgtcaacttgaatgtatttgaggagatggctatgacagatctgattgcatttcctgttattggaacttagtgctatgcttgacgtgtcttgtttgtcatctgtaatctcatttatcctgtaactgaaataatatggaggagttgaatatttgatgtgctttcctagatgttattaacctttaaaatcttttatcctattggttgtttaataaccaaataaactcttaataaagtatcaagatttagatgtctaatatctctgtaggacctaaagttcaagcatattgtaatttgatgtgatagtggtaataggtggttaagattgcagaataattaatcccttttaaccttttcttttctctaaaatatcttatggcaggggaaattccttaaaggatccagcatccaaggctt

SEQ ID NO: 89621 - DNA, 817 bp, Citrus clementina
  Intron number 1 from transcript clementine0.9_000688m (loc us clementine0.9_000688m.g) derived from phytozome v7.0 (c hr-ID scaffold_25; pos 3412134 to 3412950)
aaggctccaatttgcctaaacaagtcctcgctcaggtattcgttgttatccatacgccaatccagtccgacgccgtttttgaatttaaatcatcttgtattccctgagctatctattcgctaaacttgttacggattatgagtcagattcagtttttggcataattagggcccgcgctggtcataaattttgttatttacatttcaagttaaatttaggttggtataataataagaatgttgaacttgataggaagatctttggtgaattttgaatttgatgtaaagaatgaggataaaagattttaacttgaccgaacatttggtatctgatgattttgaagatattaatagttgtagttgcttttatcagtcagaagagtttatgtgtgagtaaagataatggtcgtaagtattttaaggaagtgtgtaggaatttgttgttagtagtttgtcagtgtattgaatcaagtggaaaactatgttgtttctgttgtagcaattgccacagcaactttatgtcgatgcataatcctttgtagttaagttgattggggttgacaatctgcttctagatgtttggtggctaacgtttatcttagagttttttgatgctgtcacactgtaacagaataggaagcacttgcataagataaaaaaatgcatgtgtgtgtgcgtatagggatttagttacttggagtttcttctaactttggggctgtacttagttttttgcttttgtgaggtgccttatcttggcaacttaattgtttgtcactcagttggtggtctacatgtggcttttgttgaatgcaggt

SEQ ID NO: 89622 - DNA, 269 bp, Citrus clementina
  Intron number 2 from transcript clementine0.9_000242m (loc us clementine0.9_000242m.g) derived from phytozome v7.0 (c hr-ID scaffold_47; pos 554674 to 554942 reverse strand)
acggtaagagctttgggttttggattaaattttgacgttttgaaagtttttgggctttttgtttttgttcttaccggattttggacttctaggtagggagggggattatttcctcatcttcaagttactttgaattgaattttcttgttttggttgttgtgtcactgaaactaattttttagtgtgttaagggtttcatcttggtccatttttcaatttggtatgtttatatatgatttcactcttgttttctgcagaggaagggcagg

SEQ ID NO: 89623 - DNA, 972 bp, Citrus clementina
  Intron number 1 from transcript clementine0.9_014742m (loc us clementine0.9_014795m.g) derived from phytozome v7.0 (c hr-ID scaffold_25; pos 2368330 to 2369301 reverse strand)
cccatcgaactcatcttccctcttgaaatcagaaggtaccttcgcgcgatcatcatccatccaaatccttcttgttatttgcttgattgaactcaattttgttctcatttgatgtacgtatgtttactattttctgctttttttttttttgggcgaatcgtcagccttaattttgtacatttctttagcctagggtttgtttaatgatcattctacatttcatcacaatttagttaattaaattagggttttggtagttcagatcgttgaattgagctttcaagtgtgtaaacttttatttatcttgtaaattagtagacttttgacattgttgttaacgagaaatcaaaattttgaatttattttttttcgttttcttttgatctcatataagtgatcataatcgcaagcctttggatatctcacgatactgaaaatgtgttctatttatccaaatcccatttattcagctggtattagtgtattttttctgcttacatatccattttttaactcgtaagtgcagcttggttctgatttgtggtttttaatgttcagtgatagtgtggctggaatcaaataatggaatatttgaagactagaaattggaagttcttacactttttccagagtttcaatgattataccttttgatatttaggaatctaggtggacagtgcatagaatacatagattgaaatgttggaaaaatgttaaagtatggattgagatacaatcctgattttataatcttatcatgcttatcaacttggtggagttagcaaatatcaactgcatgtagatttctttgaatatacagtgggttaatttttgtgcaggcgtttctcaaaattgttatgtataatcattttattactgtttgcaaagataattgagtattgattggggacaaatttgttaatttagtgtttagaccactcatatatatgtttgtatcatgtaggataggga

SEQ ID NO: 89624 - DNA, 541 bp, Citrus clementina
  Intron number 1 from transcript clementine0.9_020401m (loc us clementine0.9_020401m.g) derived from phytozome v7.0 (c hr-ID scaffold_47; pos 889056 to 889596)
ataagcttagaagtattctttcttgcaactctaaggtataattaaattaattcatgtatagccctctgtgtctttattgttatgttattatgtgcatgagaattcattaactctttatattcaataaaacttttttttcccctctttttacaagtaggcgattgtttctgaagataagattttcaggagaaactagatttaatttcatcacatgatcatttttctaattatttatttattttttcttcaaaatactgtatgaatgagtacagatagtaaaatcttggatagataaatcatacatgtctccaaatcgatgctttttagctttgaatgttcaaactgtaagtacagtatctgaaaaagaaaaagagggaaaaaaacaaaagaaaaatcattcctagtttctagggttactgtgtatttgggaaagtaagcaagcttttttattatttcggtatttctttttttttttaaatttaattttgattttttatttttaacagctagacaaggcttcactccttgcaagggtggttca

SEQ ID NO: 89625 - DNA, 933 bp, Citrus clementina
  Intron number 2 from transcript clementine0.9_021379m (loc us clementine0.9_021379m.g) derived from phytozome v7.0 (c hr-ID scaffold_15; pos 3191440 to 3192372)
gttcgggttcttttcgagcaaattctggctgcagagtatgtatatcaccatgtaattgtttcattaatttttctgttttaatttagttcacttaaattttgccaggctgtgattacctaggttttagtttatgtttcgtttaggcagaggtatatattgacttgagttgttatgaaaaattgaaactcagtgaagtcattacaatatcaattcatcaattatcaaactcaatttggatttgtgatctaagtaaccttgaagcctcatttgtagcagttgacacaataaacaagcaagttttggatctactaaatcgtggcttctagttgtataattatcttaatttagtatggacggaggatatgaggtgtgagcatctaggaaaggagcttaggattaaacatcttggaaaggttgagactattcccttctttcatttgccggaaacaaatattttttgggctcatccagacaaaaccattcgaaaggaacttctgtctgaactgaattaactttcgatgtcaacttgaatgtatttgaggagatggctatgacagatctgattgcatttcctgttattggaacttagtgctatgcttgacgtgtcttgtttgtcatctgtaatctcatttatcctgtaactgaaataatatggaggagttgaatatttgatgtgctttcctagatgttattaacctttaaaatcttttatcctattggttgtttaataaccaaataaactcttaataaagtatcaagatttagatgtctaatatctctgtaggacctaaagttcaagcatattgtaatttgatgtgatagtggtaataggtggttaagattgcagaataattaatcccttttaaccttttcttttctctaaaatatcttatggcaggggaaattccttaaaggatccagcatccaaggctt

SEQ ID NO: 89626 - DNA, 773 bp, Citrus clementina
  Intron number 2 from transcript clementine0.9_027618m (loc us clementine0.9_027618m.g) derived from phytozome v7.0 (c hr-ID scaffold_47; pos 1469856 to 1470628 reverse strand)
aaaggtgccatgtatcatgaagctctattctgggcaaagaattgttcaacactctctcttttctgttttgccgttttgaatcgaaattttcttacttatcactgcacagtctttcttcagcacggatatctgcacattctaagatatgaatttgacctgtgcactactgtttagcacttataacggttatagccccggattggaaagcttgttttatatacgtataaaagcatctttttaattgcgttgaatttgaaatctacaagaagaagttggaacttggaaataaacgaacctattatcgccgcctttgaggatctgtttgcttttttgactttggaagagtatttttggtgcggatagcatagcttttgtaataaaagcacaagatttgatataatatatgagatatatttggcttcatgaatcataatatggtttatcgatatagcaagcttctattaaaatagatgaaagaaagaaaattttagcttctgtatcgtttattatatacttaggcttacacaattttattttatttttcttttttagttgtgtcctcatcagctcttctgtttattgaagaatatacagtatcttccgctcatatcaatcttgagcaagaaggaaaaaaaaataaaaattaagtgattgattccagcctttttatgtatattttatatatatcacaaaaaagatcaaggtaaagagtactaatttctgattctatatatgcaggagtgaaaagtgtagaagtgaaccgaaagcaaagc

SEQ ID NO: 89627 - DNA, 655 bp, Citrus clementina
  Intron number 1 from transcript clementine0.9_021994m (loc us clementine0.9_017390m.g) derived from phytozome v7.0 (c hr-ID scaffold_47; pos 1046215 to 1046869)
gcgttgagccgacgctttgctcctttttttttcaggtacttatcttctgtttttaattacagatcagaaatattaattgtgatttttacgctcgtgttttgtacaattttttaattatttattttataattagaattgtagagagtgccgaatttcaggaatgaatgtttgatatgactctgtcgaatttgtttattctttttgttttcgtttggaatttcaaaattgtagatctgcatgtttggtttggttcctagttcttaaaaatagtcattattaaaaaaatattgtgagttgccttgcatggcaggttagaataatttgcatttaattaattactactctcatgttaaaaaaaataattactactttttctctattttatacaaaatcaattttcgtatttttggtcttcttttggatattactttgtggactgagtacttcatcttctgcgaaaataatcgcataatcgtggtttggttgtacttcagattgaaattaaatcacgtttgttgtttgagatatgtttttcattttcgaaacatgcataattgttgatcgtttttatgataatgtttggtgatatacttattccatctttctttcctgatttacaggtttacttgctattctcttctctagaagaattgca

SEQ ID NO: 89628 - DNA, 927 bp, Citrus clementina
  Intron number 2 from transcript clementine0.9_021994m (loc us clementine0.9_017390m.g) derived from phytozome v7.0 (c hr-ID scaffold_47; pos 1047051 to 1047977)
ctcgaccatcatcatataccattgccaaggcaagctcaaaactgtcgatgttttaagcgtatgatgagaatttaataagattaagaaacccatttacgggaggatctctaacagtgttttagattttcaaagaggatttctaacgttactttgacaatcagaggcttgtttggctccgacactatagaattatcgcaacctgttgcttttgtatcactatcttcatgatttctttctacttgtgggttagggttatattatgggattttggcaatcagatctcatgtatgtatgcagaagttctctgatgccctattaagttattatgctacttcatagcattttatgtgaaggagcttcattagatgaaattttgaaatggtgctcacctacagcataacatcacataagaattagtgcggacgagttctctgtacccgttcataatgcatattatgtagtttcaatctcaatagtgattgatggctggtggtttagacatgaagcttatgatggatcctcttcctatgttcggactttcttcggggcgagatttctgttactgttctagttcatggcctgtttgcaaaggagcttccttcgcttaacttcagaactggagctctcacccatagcatagcaacaatctataagcagtgggttaaatcttttactcccatctaccaaccattaactcagtttggtggtaattgggcttgcttgagctttatgcctaactggattctactctacttgataccagtttctttcacattttctgggaattctgatatctgatttgattttgaaaatggtgaattattttgttttcttgtcataagctgacttctttttctaaggctcggttctcttttcccgcttcttttatcagtcttttcgcagaaccaggaactttccctggcagca

SEQ ID NO: 89629 - DNA, 747 bp, Citrus clementina
  Intron number 4 from transcript clementine0.9_014908m (loc us clementine0.9_014908m.g) derived from phytozome v7.0 (c hr-ID scaffold_47; pos 1476288 to 1477034 reverse strand)
ggttagtgaaatatacttcttctaacaatcttgagaattttgctttgataatttccagataaacaagtcatttctatcaacttgttgtatttatggttgcaccaatagccttaaaacgttctggatatttccttatatgattattggaaggtacaaaagtttataatccctttctgattattggaggatgccagtgtaatcttcttggacttgttgctactattgctctggactgcagttatcagaaaagagataattataaaatcttaataaggggcaataatgtctgcatagtcaaaggcataatctaattattaaaagaaatctaacctctgttaattatttttatttatttatattttttggccagcaatgactggttcacatgatactccttttgtttccattgaaaccttaattccatcatattgcagaattctgaaattgtgattgcctagttagtttatgtacagtgtctcatttgttggctttggccactccttggattttagatactaaacgtgaagttattggtcataaatcgccagtaaataaaaatgttcaacatctccattttaaaagggagagttatcgacaatcatgaaaaagaaaaattgatttctagtgacaaacctattgctattatttgttgtataacggaaaatttgctatagaagtttctcaaagttttaagtgtaagtaattctctcaggtactgttaatatacaccccagtctgctgccacta

SEQ ID NO: 89630 - DNA, 588 bp, Citrus clementina
  Intron number 1 from transcript clementine0.9_005743m (loc us clementine0.9_005743m.g) derived from phytozome v7.0 (c hr-ID scaffold_149; pos 68594 to 69181 reverse strand)
aattgactttggattatcagtattctttaaaccaggtatagaacaactgttgttgttctgtaaaactaaataattgcacctttttttttttcaatgtcttttccatttgccatttttaagttgttaatttgctttacctgcaatcaattttgtattgcctgtaccatattagaaaggcatttattatgcaagccttacgcaaaacacataaagtcattttcacattgcattttatgtccaaatttgcatgatttggacatgaaattgattcccaaacttaatgagggagataataataagctccaaatagacagttaccgtaacagtttcccgcttattgaatgagcaatgttgaaaagaggaaagacaatgaatttttaggtgctcatctagttggttttaaccatgggtttcttttattattgcttcatatccaggatttactgcttgcattagctttctattactcctatgattttacttcattaccttcttatttggctagtcatagatctacaagaagttttgactcttccataatttggttaaggactggtgatttccttgatacaggtgaaaagtttagcg

SEQ ID NO: 89631 - DNA, 849 bp, Citrus clementina
  Intron number 1 from transcript clementine0.9_011776m (loc us clementine0.9_011776m.g) derived from phytozome v7.0 (c hr-ID scaffold_25; pos 1471932 to 1472780)
tagttctactgaagcgtatcatctcgttcttcttggtatgtttttcaaaaaccttcaacttcagttctttttttgtgtgttctggcctgtttcttctttgaatcttggtcatggcttgtgagtgattttgttgcgattctctgttgttttttcttttcttttttttgggggggggggtgtgttctgcgattttctttcttgaatcttgtgtgaatgtgttatattgctgagaaactacaattgaaacgtaaagaaaaagaattagtgaggttcaattttgtgatttctgtgcatttcaatattttaagcgaaattaaattccagatatcgagaatttaatttgctttccttaatttgtctgtttcgtttgtttgtttctcgccacttatcttggattcttgcatgctaagaaatcttcaaaaattaagttgcttttcaggcaattaaaaataacagtaacaaagataactgtgaaaatcccgggtttgctaatcttctcttctcaactcaaaagaaaattactctgtttggtaatcaagatagaatttctcggcatttttagtcatccatgcttcatagttattcactttttgatgggtcggggttagtcaatgtgattcttagttcttggttttatcaattttgttggctagtcaagtgggatgatttcttgaaccgttctccgtatttgcttgttgggtgtttgtagccattaactcttctgttttattttttttatttatttaaattaggtgctagatgatggtaggcttgggtgatggattggatcttacattcctgaatccctactgaatttctcacctaaaatattttgtaattgtaggtata

SEQ ID NO: 89632 - DNA, 858 bp, Citrus clementina
  Intron number 1 from transcript clementine0.9_033229m (loc us clementine0.9_033229m.g) derived from phytozome v7.0 (c hr-ID scaffold_15; pos 3393331 to 3394188 reverse strand)
ttctttcctctgttttcaaggttagttgctgtttgcttttagtaatctattttacatatgtcattcttccaacattattagtttgcttcaaaaaactgctggaaacttccatttatgacacatgagaaccacccctcccctcttttaggattattggaatattatatgtgtaagcatgggtattaggaatttctttctaaaatttattgtaccatttttgtgtaatggaataaaatgtattacattaggatttgattccatagattgtgatggacatactagttaatttcgttattatttccttttttttttattttaaacgatgcgttgtccctgttaatagtttttgggtgagcactcactgaggacaatataagtgccctattttgattttaattatgaattaaattatttaaaatatggtattcagccccttaaagaaactgggcttatattgtactcagtgtagcatcgcagtctatcaatttcatttttcttttagctacaaagggtattatccaaagcagctgtaaccaagacatctgactgagattattgacaattaatggtctgcaatataagttttcttttatataaatgtactgtctaatatgactttgctctgctcaattagtaatgaggtgaggggctatggaccttttggttgttgatcttaggtaaattttttacatatcatgtctgttttatttgcatcttttgtatatgaacttgttctaccaaagtttgaatggtgagtgattgaactcaggaagcaaacaatctttccttgttaatgttttgactatccgaaaaatttggacaggtgtgaaaacccttaattactgcttgggtaaccaa

SEQ ID NO: 89633 - DNA, 668 bp, Citrus clementina
  Intron number 4 from transcript clementine0.9_022042m (loc us clementine0.9_022042m.g) derived from phytozome v7.0 (c hr-ID scaffold_25; pos 3171812 to 3172479)
gttttggcagcggaacccttcaaggtcacttactggtgagtacttgtttgcatatcataattgtaaattctctctagaaaatgaagttgtttggttactatgaaaattttcatagttgtgagaaatgatattgcagccagagttagaaaaaagatactttaatatataatatactcttcctgtcatctaaacctggtactgtcattttatttggttttttcaatattttgtttcaaaagaaacacaactaaatgctacaagatggctcatcttgtcatagttaagcaaaacatgaagttacttctttttttttttttaatgcaaactcagatcaatatgtcaatgtagttacatacattaaaacaagaaaaaactccatagcttaagaggttagctgagaatccatgtagcagctgatatatttttatttaaaagtctatctcagttgttgaatgttgcctatgcataaaatttgtggttttgtttatattttttgctcacatttagatattttggataatgtttcttcacctaacgaggaaaaaaaaatgtttgacttttagcattcactagacaatttaattctttaaaatggagaagcactggccagtactaacatgacaactgcttgaagcaggctggggaagaacgtttttctctagagctgg

SEQ ID NO: 89634 - DNA, 495 bp, Citrus clementina
  Intron number 3 from transcript clementine0.9_008613m (loc us clementine0.9_004074m.g) derived from phytozome v7.0 (c hr-ID scaffold_15; pos 3710143 to 3710637 reverse strand)
ctctgcccaaaagtattttctttgctttcttctttttagttgaattcctagagtttatatgatttaattcacagatgtttatcctttagaactaaagtaagtgtattatcgttaatgtgatattcacatttttattattacctgtgcatgtggttgagggtaattcataagagaagagtgttttatagatgatcactgcaagcttgcttaaagtctcatgctgtggatgttacggggctttttgctatatgtttctcaaatgaaatgattttaaaaatttaaaaaaaaaatcttgtgaagaatcttaaatgatttctactttacttgctttaattttcttccttaaaatgtctatacaagttttggtattttgtttgaatgcttctcttgtaggatactagttcattgaaggtatgctttcgatgctttcatttgatttataaattaatgcaaatgttagctatcatattagtaattattcttttcatcagtgta

SEQ ID NO: 89635 - DNA, 971 bp, Citrus clementina
  Intron number 1 from transcript clementine0.9_015172m (loc us clementine0.9_013067m.g) derived from phytozome v7.0 (c hr-ID scaffold_25; pos 189974 to 190944 reverse strand)
aaccacaaaagtccaaactcaagaaacagccccacgtaagttcatattaatgctatatttctactttcacttttttaattttcttaaaacttaaatttgttcacagttgattatcttcatccggctataaacgttcttctttcatcttcaacttgccctaatttcacatcatcatcatttttattattttaattacattgcaaatttcttatttactgcggaattttgccttcttaactgtttgattttagtttaatatttcaacttgacgactttattgccttatgtaactacattacataagctgtaatatacacgaccagccggtcatttgggaaaagtgcacttcattttctttgaaatagcaatgtgcttgaagtgtcttagacgtgtgattgtgccatgtgcttcaaatggcctacggccatggagcttgtaacttgttgctagatgcaatgagcggtagtagtaatgttgttaaaatttgagcaattacaatattagtgctttattttgatgtgatcaattgtcagagaggtctcatctatgaaggaggacaacaatattgagagctaagtgttgggtgattgagatagtacacgataagcctccattctaagggttcaagaatgaggagatggataactggctcacctagtagagaaattcttattaggcgataaaagtagaaactagaattttttttttttttggctggattaagtatgaaagagttagaatatgtaatgagctgaagatttgacccttggcttgatgtgaatgaatctgatgtgatgtacaagaaacatgaatcactattttggatgctgtgggtgatctctttacttaagttttgaaatcattttattccagttatgctaattatatttagggcccgtctcaatttattgtttctataaatggacacatatggattaactaacatcttggtggtggacagactaaaacgc

SEQ ID NO: 89636 - DNA, 426 bp, Citrus clementina
  Intron number 1 from transcript clementine0.9_032980m (loc us clementine0.9_032980m.g) derived from phytozome v7.0 (c hr-ID scaffold_18; pos 1085924 to 1086349 reverse strand)
caacagtttataaaattttgtttcccgtaagtactgtgatgggttttgtttggtttgtgagaaaagtgaggaaattttaagaaaataatgtttttttgtttttagggtttatgttggttttgatgatgagtacaagtttgtttggttgctgagaaagtgaagataagaaaaaaaagttttttgttgtttgaattttgattttcaagaaaaactaattaaaatttctaatttttagattgacagcttttattttctcttgatcccagtaatgaaagtagttgctatgttaaattcatttaaaattattttcctgcctttatgcgactctttttttttggaaaaaaaaaggggtcaatgatttggcttttatttgtagttaattcggtgtgtgttgctaattttgtggcgcataggttgttgtggcat

SEQ ID NO: 89637 - DNA, 307 bp, Citrus clementina
  Intron number 3 from transcript clementine0.9_015721m (loc us clementine0.9_015744m.g) derived from phytozome v7.0 (c hr-ID scaffold_149; pos 202066 to 202372 reverse strand)
gaaaacttggtcagcctgaacttggaccaattgaggttagatattaatgactgtatgattcataaatatcaactgccaattaatagtgaaattaagcataaacacagcagtcgcaactcactaacatatgctaaattagcttccattcttctacgtagtaggtgctttttcaatacgatgctttccttaaatagcttcattatatggaagtacttccaaacatattgtcagttatctttctgtgtttgattcgtctggttggagtatgtttaatttactttttatcttgttttttgcttgcagtttt

SEQ ID NO: 89638 - DNA, 174 bp, Citrus clementina
  Intron number 2 from transcript clementine0.9_016428m (loc us clementine0.9_016428m.g) derived from phytozome v7.0 (c hr-ID scaffold_25; pos 1737477 to 1737650)
ttgcccaaggttgtgcttacttctgctggcggtaggtgagttattaatgtagcatcttctgttttaacttcatttgttctttgattagcaatttcttttcttttcttttttcctttttaaatgtttctgttattgaattgatggcagtgaagctgagctatatctgtttggagg

SEQ ID NO: 89639 - DNA, 940 bp, Citrus clementina
  Intron number 1 from transcript clementine0.9_024635m (loc us clementine0.9_024635m.g) derived from phytozome v7.0 (c hr-ID scaffold_47; pos 356086 to 357025)
agaagccttcagcttgttcgacaaggacggcgacggtctgattttctctcttcataatctctttgcttttagctttggattttcttatagatctattttttttccctctattcacgaagctgttgatttttggaacgtttttgattaattacagctctgatctctcatattttcaattgattttcgatgtgtgatgtgattttgttgattctctaattgatgttcgattaattggattatataattgactgaacattaggctgatgcgtttcgtatttaaaaagctgcacattgtttttgtgggctttgtttgttatgctttaatattgttttgtacatgaaagcagtcgattccgaatcagacccgtggatgttcaagctctatcgtagtgttctttcattattaaatgaaaaatccttctgattcactttgcctagaacaagttcttattctgatcgaatgatgcttgccaaccgcacaacataatgggctttacattaaattctgtaatacttattgaatctgcttcttactaaatttctggatagttcggcacattctaattcaattatgttttgggatttgcgtcctttatgctcgttttgagaatttgctacttgtattgttttatctattgtgcttgttacgttttattgtctgctgttatgcttagtgttgtttttagactgattgggtatacttatcgtttgccaaaatctagtcagaacacttgtctcatgttgacactgtattgtattttgataaatcagcaatgtttagcaagttatgttgcctagctgtcagcaacttcaccaccgagagctgtactgcttagcatttttgttttacgtgagtatctaaaaattctgacagctttgtcgtggttcatataatattggatttgcaggttgcattaccaccaaggagcttggcactgtt

SEQ ID NO: 89640 - DNA, 622 bp, Citrus clementina; identical to SEQ ID NO: 81509
  Intron number 2 from transcript clementine0.9_003359m (loc us clementine0.9_003359m.g) derived from phytozome v7.0 (c hr-ID scaffold_25; pos 1701894 to 1702515)

SEQ ID NO: 89641 - DNA, 503 bp, Citrus clementina; identical to SEQ ID NO: 81510
  Intron number 3 from transcript clementine0.9_003359m (loc us clementine0.9_003359m.g) derived from phytozome v7.0 (c hr-ID scaffold_25; pos 1702660 to 1703162)

SEQ ID NO: 89642 - DNA, 493 bp, Citrus clementina; identical to SEQ ID NO: 79235
  Intron number 2 from transcript clementine0.9_022471m (loc us clementine0.9_022471m.g) derived from phytozome v7.0 (c hr-ID scaffold_25; pos 2902402 to 2902894)

SEQ ID NO: 89643 - DNA, 526 bp, Citrus clementina
  Intron number 1 from transcript clementine0.9_007510m (loc us clementine0.9_007518m.g) derived from phytozome v7.0 (c hr-ID scaffold_15; pos 4172142 to 4172667)
cctccagtccagatagataaggacttacagtcgtatggagccttcattttttatctccaagttgataccttttccatttttttggtatattttcttcttattctattttctttaggagggtttgcttttgtggacaacttgggcttcttttgattgatggggaagtatcaaagatccgatttttattgtatttgaacgctgtttattttggttatttttgggtatctgggaatttttagttgtttttcggtattttctcggtaaaatttagagttttgaattgatctgctggtgggtatttgctagattgtgattttaaattagcagctgaaagatcagtgcttgatgctgttgaaatctggaagtttgtttcaccagtttcttatttttttgttgtgattttggagatatagatgctgaaaaatggaattttttggaattgatttgctgatggtttttgtatagattttgattaatatcacaccttgaaggcttttggagttggctagttgcagaggtgtttgtt

SEQ ID NO: 89644 - DNA, 500 bp, Citrus clementina
  Intron number 1 from transcript clementine0.9_018687m (loc us clementine0.9_018687m.g) derived from phytozome v7.0 (c hr-ID scaffold_47; pos 362411 to 362910 reverse strand)
ttttgaggaattttacccactcaactcagtcgtaggtaggtgaaaatgctggttcttatattttgataaattattagttttgtatgataattataagggtgtccacccgtgattgatggtagcttacattctgtttggtttctacagaaaccaagtatttaacagtctttttaacaatcagaccgtatgatatgctcccaatgttattttcagtttgcattttaatcaagtttgtcaactttttagcgagtttctttgcttttattttggctagtctatcgtggtgcatctctctgttttatgagttgcaagtacccttccaatgttagctaattttctttgattcctgagaaaaaatgatgttggttgttaatatttagtctagttcagtcaagacaaatgatcaaatgatattgttacctccttgttagttctaatctgaaagttcaatttaatatcttttaggtgctttcggcattctgcttacaaattttttatca

SEQ ID NO: 89645 - DNA, 239 bp, Citrus clementina
  Intron number 1 from transcript clementine0.9_022098m (loc us clementine0.9_017989m.g) derived from phytozome v7.0 (c hr-ID scaffold_47; pos 855625 to 855863 reverse strand)
ccggtatcagaggtaattaacatttattcctctaaaaatttcaacttaatttttttcttttctcgatgttgttttaattgctctttttttttttttttctattttcttattttaattgatttgttttttgattaactaaattaatttgaatgtgtataccatggtggggttggatcaattctacattatgcacagtataattttttggcccttcaggtagtgtgaagagtccactggaa

SEQ ID NO: 89646 - DNA, 865 bp, Citrus clementina
  Intron number 1 from transcript clementine0.9_021196m (loc us clementine0.9_019708m.g) derived from phytozome v7.0 (c hr-ID scaffold_25; pos 2830132 to 2830996)
gaaaagaaatccactgtcaagcttcaggactccaggtctctctatctctctctctctcttcaaaagatttcatttgtttttcttttaataaatttaaatacgaattaggttattattagggttttagtgatttctgaatcttagggttttttgataaaattgaccggtcccttccggaattttgacatccgtgctatgaaatttgaattggattgttaagaacttttgtttcctgcaaaatgagtatattcattttgttgatcttaacgctggtgcaaagacttgttgaagtattggattgctattagtttgaagtagtttatggttgttccattgttcgattcatgttatgcgctcttgcttttggaaaaataagcaatactgagatgccctgttgattgcatccatcaactgttaatgggtacaaatgtagaattatatgagttgatttttgggtgtaattttatgattgatataaatctataaacaagtctatgcttgctttggtattttgtatgagattgtagctaagatatatctgcttcattgtatcttaaatttctggaaattgatactgaattgcgaacataaagcacctttaaattttcattgaggggaggaaaatctttttctctgatggtgatacaaaaccacatcctatgaagatgtctaaccctaacctttccaccaatgctttcttttattgatattggaatatattgttggttagatgttgcttaaactgtacattttgaaatgttattatgtgcatatttgcctgagattgggcttttctttaccataaccgttttgcctcttctataatacagatcagtgaggaagattgtcagcttggataatcata

SEQ ID NO: 89647 - DNA, 1042 bp, Citrus clementina
  Intron number 1 from transcript clementine0.9_029973m (loc us clementine0.9_029973m.g) derived from phytozome v7.0 (c hr-ID scaffold_15; pos 3197025 to 3198066)
gggcttggcctgcccaagctttattgccaaccctagtaccaaatatcaataattaaaaattacctttcttgacgactgatgtcaaatattgttttaaagtcaatatgactcatattaagccttttaaagtactttactttatttttaccgtattatttattttaaagtatcatcatttaaatgaaaaaggtgatttgtttctctatttttttaaaaaaattgaaataggatatttggcgaataaatgtttagttgggcattttgatagaaaagttctctcattttaaatttttagggcctaacattcttcagttatacatctgataagaagaataagagattattcactgttggcgactatgtaattgtattatttaaagcacgttttgggattttttcctgaattttttaagacagagacttttcccccccacttttcttgttcataattctcaatattttttgacaaactaacgatgtaatgtagtgtttttttaatgatttcaatatttcatcttgaaagggaagttgacaaatttagaagtgttgttaattaatttttatttcttttgtccacattttgaatagaaagaatattcttgaaattttattatgtttttccctttttttgggttatgattagtattttacttgactaaagtttcagaagaatcagaactcagctaaactccaatcaataaaaatgtaaaaatttaaaattctatattaagatgtctttcttttcataaatatttgcagtgagcaaaatcaaccaatttaatttcatggcgaaaatgagtttccattctctaatgatcctagcaacatttttacacattttgatgctaagttgggcgtgtttgatcccagcatcacaagtcacaactgatcaagaagctcttctttaactcaaaggtcacatatctttggaccctcaccattttttggcacaccactggaactggtcaggctccaaaaacacctcagccgcctcagtatgcaactaggttggcgtcacttgtggcgtaccccaccgcagagt

SEQ ID NO: 89648 - DNA, 993 bp, Citrus clementina
  Intron number 2 from transcript clementine0.9_020455m (loc us clementine0.9_020309m.g) derived from phytozome v7.0 (c hr-ID scaffold_25; pos 3116640 to 3117632)
cgcaggctgattctcctcgcaaaaagtaagggctaaatcgctgaactcgttaaaataacatttgcgtggcaaatatttttaattgattcattttatttaatgttctgtttaatgatctgagaggttttagtttttttaagtaatgaattagaggtacttgatgttctttgttgaccaagtcttatgagattatgggtgtgaaatgtattcagcttaggaggttgtagtttatttgaactttgatgccttgatggtctgtttggttctggaagtgtgagattcttagcttctgttcaacaaaaggaaaaaatattatgtcaagccgcagatgtcagatgttttaactcttaatcttagttgaatgatcttttgtgcgggtgaatacctcaagtgcatattgttattgttattgttatgcagtatctttataggaggatgtcatttcattataagggtacaaaaagtatactgtactgaggatatggtaacagctttgaaacagctttgaagctatataaggataagttcatttgcctaagagttcttaaattttatttttttcaatttgtgtttaatatttgctaggttgtgcttttggaccaggaaaaatttcttgctttttgggtcaattaaattgactttcatccattctcattatgtttgtgaaaagatgacaggagcatttatttgatttgtgaagtttattatgcaatgtcacttttgttattggctatgagagaaacatgaaaaatttaaggaatgcgatgaacagggcaataagagatactttttgagattacatatcatattatattttaggttagtttgagtgtcttccgtgcactattgattgatgctttctttgaatgagtttcttttatgctatattatattgttaagctctttcggtatgttcctgtccttctgcttttgatgtttaataaactggatgcattagggatttgcggtccccttcccctgtgagggaacttt

SEQ ID NO: 89649 - DNA, 802 bp, Citrus clementina
  Intron number 1 from transcript clementine0.9_000457m (loc us clementine0.9_000457m.g) derived from phytozome v7.0 (c hr-ID scaffold_15; pos 4482450 to 4483251)
gtctggctttgaatttcgagctctgaattgtgacggtactttctcttcaactaattgacgtccgtttggtttccgataaaatgtggccagagagagagaataaattatcaaattttgactgtatttagtagagcctagagttttttaataccgttggtttcttaaatattggtagcgttcgactttcagtgtcagtttgagtggaattgctaaattttgataaatctgggttcttgatgctgctagtaatgagatttttattgttttgtgtggtagtttttttttttttaagttcatataaatagtcggtagctgtaatgctgagagttgttcttctaaagttctttgatattaaaactgaactcatgctaaggaaatgtgacgcacaatttcatattcaactatttttattctatttattttgacaccgaacagcacattagcatacagtgatgataaattttctgggataatattgcataattaaccgaaagagctggagattttgataggataacatatgtaggattcttccatgtttagcagcagggcaaactgcagtgaagaggaaaaaaaaatcagtcttattttatttattttctaattttaagttctgttgtcaatgattctctgtttcctatattgtgctggtgaaaattttggttgtgtcagtctattaattaaatgaacttttgatgtgattgcggggaatcatgtagagattaaactccttcatgttgtagattcttgactctcaactccaacttctatttgtagaaagtaagagtgtattcattagttc

SEQ ID NO: 89650 - DNA, 508 bp, Citrus clementina
  Intron number 1 from transcript clementine0.9_016337m (loc us clementine0.9_014377m.g) derived from phytozome v7.0 (c hr-ID scaffold_72; pos 1140530 to 1141037 reverse strand)
tgattcgagcttattttctcgagaaaattaaagaggtaagtgggtttgcttcaaacaactcaaattacttcaaaagtttgaattttttttttagttctgttgatcttctcattcttttttttttttttttttattctctctccatgaggagtcttcacatatatttattagctgaaatggacagaccctttacgtgttgttttaattctctctctcttcataataatctagtttggtccagtatggtctattttctgccataaaaaatatttttttgtttttattttttgaaataattttatttattttacacgaaccagattttcccaaacaaatgattgattatatgtgtaagttatgttaatttgacgtagtttttgaactttcaagttgaaattttgcatccccttttagtatttttaaagttattattattttttttattttttggggtttattgggagatggtttaaatttaatgcacaactacccttcttcacatgcagat

SEQ ID NO: 89651 - DNA, 387 bp, Citrus clementina
  Intron number 2 from transcript clementine0.9_008477m (loc us clementine0.9_004275m.g) derived from phytozome v7.0 (c hr-ID scaffold_117; pos 369862 to 370248)
tatcatagaggatcctatcactatctatcatattggtattttctagctctattattagatttattactctattttgttattaccatcattaatatagctgttagattcttctgtgatttggttctgcattttggaattttttctatgcgaactacattgtaaagtctaggttgtgattatagatattgatttatggtttcatatttgcttagtcgttaatatttgtgctagtttaaagtcgttctaacaatgctgctacaggctgattctcttttattgtttatatagtgttccatcctaggtgaccagggtaataaagtggaatgattttgaggggaattcaaatttacaaaaattttaattttgtttgttctcctaaggtgagga

SEQ ID NO: 89652 - DNA, 832 bp, Citrus clementina
  Intron number 1 from transcript clementine0.9_001948m (loc us clementine0.9_001948m.g) derived from phytozome v7.0 (c hr-ID scaffold_25; pos 3377809 to 3378640)
agcagcattttgactcctgttcaagttcaacgacggtaagctcattttttttttttttttttgatttcagaatcacgctctttttggttgctgacgagagtcctaaaacccactttgtgttttacttcgatttgagtttccaagttctgacaacggactgaaaagaattttgcattttgcttgcttgcttgctgcgtgttttggtttgcgcgcattaaaataagatttgctgcaactgttatatttttaagttgcccagactctcgcgaagtttccttttcttctcttctttttcacgtttgtttgtcgatgaatttggttttggcggtctaatccaaattctttttctgagcaaatttttatttttagtaaaagaatttagattgatttattatcatcatcatcatcatcgctttttgtgtggttttaattgtcgtatttttaattttagctgtaattctcttgcttgctcatggactggagaactactactatttatgatttgacgccttcactgcacattcattccagctttattccattacgactgtcggcaacttcattttatttttatttttatttgaactacattaaaaggttatagcaaatggaggctttaaattttgcgatttgagattttacataattgactcgacgaagcaaacacttggctggcagtgcctctagtgataagctttcattctaaacaaatcagttatttagtgcttttagtaatcgtgagggtgcattcagttttttccttcgatgacatggggttaatttgattcttcacacaggccgtgactggtattgggtaaaagaattaagaagt

SEQ ID NO: 89653 - DNA, 768 bp, Citrus clementina
  Intron number 1 from transcript clementine0.9_008223m (loc us clementine0.9_008223m.g) derived from phytozome v7.0 (c hr-ID scaffold_15; pos 2789602 to 2790369 reverse strand)
ctctccctcttaacccactctcacttatttcttctgtaagtctcaacttgttttttcctcacttgtttcttgcaaattctttgtgttttgatgctacctagccagttatctcatcttcagttgtagtagctgaagaataacgacaaagggtttttttttttttttctttttttaatccaaaggtactggataagataattcaatgagaagaagaagaagaagaagaaaacgagggaaagaaacaatttttttggattaatttttataggctaactctaaacaactttcttttttctccccaaaaaaaatctttttttgtttaaatttttgctttgtaaaaaatttctccttttggttatacaaacaattaaaagtttcgatcttttttaaatttctctttgcttcacataactgctgatattgtaatgtttttcaaaaattttctttggtgtcttttttagctcaataaatcagttctgatctgggaaagtttgtatttttttcacaatgaactataaattaataagagcaaaggtcaaatattgatagtaataatttatacttctttgtactaccaaactacaagctgtgctacaagtttagttttaaaatgatagctaatagtacagttaattagacattgattgtgaaagttaaatggataagagagtaaaaaaaataaaagaagaatttcgtctgatttattgttgtgtttttttttcccccttaacaggaatcgactccgcgaagctttaatcttcttcaaag

SEQ ID NO: 89654 - DNA, 587 bp, Citrus clementina
  Intron number 3 from transcript clementine0.9_025872m (loc us clementine0.9_025872m.g) derived from phytozome v7.0 (c hr-ID scaffold_15; pos 4114916 to 4115502 reverse strand)
tcttcacattgattcaaaaaggtataatgacgttgctaaactcagtttgtttgttttgcttgggttttgatctaatgtttgttcaatcgtttgttatttgaattattctcacatgactgaagcacaaataaatagaaaaatcttcaacatgttcccctactggtttgttggcaatttatttcaaggactattaaacttatttgtaaattagtattgtttttaattggcattttatcacatttctgaatgtatactgaacgctgtattccaacatccttcaataaatttaaaattgatgtcaatgtttccttgggccaactctggtttctcttgcttgtattctctcttgctgtgtgcacacatggtgttttatattctctagaatatttttaagccaacctaggttgagacttatcttgcttatcaaactcatacagttgcttatgcctcaatcagcatcataacaaggggtaggagcatcaaacttatgagcggatatatcaataatacagtgctctttcaaatatgcttgggagagcgttatctaactaacagtttgattttgtatttgcttattccttgtgtag

SEQ ID NO: 89655 - DNA, 445 bp, Citrus clementina
  Intron number 4 from transcript clementine0.9_006457m (loc us clementine0.9_006457m.g) derived from phytozome v7.0 (c hr-ID scaffold_95; pos 356951 to 357395 reverse strand)
aacttggcatagacaggtccattatagcaagtgagttgtgtctgtttttacatgagctaattttgtttatttatttctagttaacattagaactcggcttgtagctgaagaatttgagcttctatattttaggtgattaagctgtattatttaattgtaaaaaaagtgtagaagtcccaaaaatcaaaatggctggatcaattttctttgtaaaaatttgattttagcgatatgtagtgtaattgcataggtatttcttgccaattgtatcaacttatgtcctagggattgtgcctaccaatcacagaagtttgtagacaatgaaattcagaaaatatgctcttgtgatttttgtgtatgtttgctttcgggtgtgacttctgtttttgtgtgtggaaaacattttgcagcacacctagaagaactggagcaacttctgaaggga

SEQ ID NO: 89656 - DNA, 1027 bp, Citrus clementina
  Intron number 3 from transcript clementine0.9_021230m (loc us clementine0.9_021230m.g) derived from phytozome v7.0 (c hr-ID scaffold_15; pos 4136910 to 4137936)
gagaatattgaaaaggtagggatgctttgtttgtttcataagtgatttgttgggttttctacaggatagatgtatcagtagtttgttctcacttgcttttagacgctgcgttcattctttcttttccttttgccttttacagttattgaatattttacaagtgttcctatttgtgttagaaatagttaaaagtgaagctggggggaagattgcaaaataattgttttgaaaatgtcatgggagaaaaacaaagaaactcaaaattaaagaaaaataagttacaaattggaaaatggattgctgagagcctgatgcagttacaatttcactttatatctatctgcagctcattaatactttcattttaaggtctgattggtagcaagtcgttagttctctttttagattctctattgaagcaggctgttaggcatgccaaacaatttggcttctccttcctcaatgtctaagaaaagtaacatgtacacatgtgattgcattcgagaaggtgagaggtgttgttaaatgtgtttttttcttgatgaggttttaggaatagtatcatgaatttggaaatttcatttccctaatttgtatcttatagcacctcacttgaatcatatttattatgccacgaaggttttttttgtgcttttgagaattatgctctatgcataatatatgtataaccagttaataacttatttgcacgatttaatctctgtgtagtttaagttgcatagcagataatgttccgacaaaaagatcgataactgcacacttctaggataaaattctatgttgggaaagttgactaactccattttttttcttttttatgtaaaatgcaaatatcctcttattgaatcaaaataatgtggggtacattctgttgacttatacggactatttggacctcaatgccttttcatcccttgtttgtcagttttgtggtatagtcgtcactgactcatccttgagttttgatgcaggttttagataggggggaaaagattgagctgctggt

SEQ ID NO: 89657 - DNA, 416 bp, Citrus clementina
  Intron number 2 from transcript clementine0.9_011849m (loc us clementine0.9_011849m.g) derived from phytozome v7.0 (c hr-ID scaffold_18; pos 3322968 to 3323383)
ctaatttgccccataacactgaggtctggctcaaggtaatttccacttccaatcttagtttatgtttgcagttgtggtgttgtttctgtgccagccagtttagtttagtttgtaaaatctcttctgggttcaaacccggatcacccatgtgagggagaagatttaatttcctgttgtaaataaataaataaagcattagggtgttgttgcttttaatccagaactgttgtggaatgtaaccattggccgtaaagtataagccagcgggtggttttttttttttttttttataaaatcttttaactacttcactgagtttttgattaatattagaggaattttagtggagtttcggatgacttctggaacctgtggcgtgtttgaaagaatttgctacgtgctgttattgcagcgtg

SEQ ID NO: 89658 - DNA, 417 bp, Citrus clementina
  Intron number 2 from transcript clementine0.9_025222m (loc us clementine0.9_023739m.g) derived from phytozome v7.0 (c hr-ID scaffold_15; pos 3842405 to 3842821)
acgcgttttaaattcggttcctttaaagccatcaggtgagtcttttaattgcattcggccttttatagtttaaattgatagatcctttcaacaatccatccctcttctagggatttttcttgatttatttttgaatttttattacaagagagcagttgaaaggtaagaattgtagcttgttacaattttttatttttatttttaatttctagttattatcattatgtttttcttttttaagattttggattgaacaagtgaacaagattttgatttatcactatgtgggtcatatgtaggctaattaagataaaagtaacatgaattgggtgttgggtatgaaacttgtttggtgattttggatttgctttgttggcaaagaagtctcatttaatatttttttgacgaatttcaggt

SEQ ID NO: 89659 - DNA, 579 bp, Citrus clementina
  Intron number 2 from transcript clementine0.9_009689m (loc us clementine0.9_006152m.g) derived from phytozome v7.0 (c hr-ID scaffold_95; pos 592809 to 593387)
gattggctgctattgctgccaattgtaggtaagaatctttatttatcattgttattattattgtttttgaattttttgttgttactatttgtttttgatgagttcttttatttgattggtggtgagttttggagagttcactgataggcttgtttcactttagcctatttgaaagttagcttgtgatagacttgtgataagttatctaatgaatgcttagtctgatggttcttccatttttgatgttttactgctaatgtatatcgatcctgaaatttgtaaggagatacagaaatgttgccgatatagtttttattactgagcatgcttggctacttaatttaattgttgcagtgtcttttataattaaaaaacgatatcaatggctaagtggacaactttcgttctgtcaatcaattttctatactgtctgtttagatggtctattgtgatgtaattttcctcagtatgttggctggaggtgaatacttggcaattggcatggactatgttcctaacttttctttgtttttgctgttcttaggtatcttagggagcttgacttgcaagaaattgaag

SEQ ID NO: 89660 - DNA, 1051 bp, Citrus clementina
  Intron number 1 from transcript clementine0.9_006087m (loc us clementine0.9_006087m.g) derived from phytozome v7.0 (c hr-ID scaffold_18; pos 3785353 to 3786403)
tcctgcttctcttttcttccttggttctctcttgggtaattcttgcttgcttttgcacagtttttattcattttcttttggcttacgtgtaaagtaaaatcaaaactgagaaacaaatgaaagtgacgtgctgtaattaaaactaaaggcgtcctttgctcttctttcattctctttttatcatgtatttatgacattttcgtgattgatcaaagtaatatactaaaaataaatgagtaaaatcgaatgaatgcaaaaggagaatatataataacttcattaaaaaaaattagtttttttttctctccaaataatatatttgagatggtctaaattagtcaagtgcttcctcttataaaaaactaacactcttttaagtaagaatcataagaatttattttttaagaatatatagttgtcaatatatatatatatatatacatgtatgttattaatataattttaatctccacaaactagaaaaataatttctacataggagaaggtaagtacaatactcagactataaaatcatcacatgtatatataatattaaatgtgcacatttcataattttattgttggttcaatgttcaacagaggcataaaagaatttcactgccaatgagtaaaatttccgtacatcaaaagtatacaatgaaagaatagaatcattacttatatacataactttttctattatttaatatttatttaattaaaatttattaattcttttttattaataatatatgagataaggtatgttgcgataatcggtactcaattctttataatcttctgtagtacatacatttataataatacatgattaaaatttaattttatattcttatttaataaccatcaactatacatttcaaaagttaactcaacgttcgagccaaaatgattttttaattctgacttagcacatattcaactcagtagaaagtcaaattagcactaaatcctaattcactgataatgacttttattcatttttattaacttgctcaggctctgcctttttcggacgcgtagctgacaa

SEQ ID NO: 89661 - DNA, 997 bp, Citrus clementina
  Intron number 1 from transcript clementine0.9_029508m (loc us clementine0.9_029508m.g) derived from phytozome v7.0 (c hr-ID scaffold_15; pos 4329882 to 4330878 reverse strand)
gaccaagctctggtctaagtttgatccttctaccggtaatttttttttttcaagataatttttcgatctccaaagcttgattgtgttttagttttcttcttacttaacacaattggataattttgctgaaattggtggaaaacagagagaaaaaaaattaaattttgttgctaaataattaagtggagaagaaagattaatttcatttgaggattgttgagacctcctttttggctactttatttgtttgtagtcatagataaaatgttgttactttaatataaatgttaacagtatatatattagttgcagggatttgagagagtctgtagaaagttaattttttcactaaaaagtacatgctgaagatgtggtatttcttgttagctgttatgtattattcatttgggacgtgatatgttacgaatttgaatttagttacttaccaggtttcgctctaagtgaagtctcttgttgcttatctttttgtattgggtaatgtatgttagtgatcatctaaacacacttgtgatagtcagtagatgctttggggttagtatgaggaacaagttcactttcatcatgcaagatactagatattatttgatgtctgtgaaaactttaatagagtgggcttatattatcttggtggataccctattttgaactttcgtgttattgggtattcatgtgtatggctcgtgcacccttcctatagcactttggggagacagtgtttatggtcagaagatggtaatcagcctgttaaactcctttgagcatgtacttccaatatctaattatgttctccaaatggaacttgataagtccgctgatgcttttctgtgttatttatttttgtgctttttgttttcaaattttttaaatatttgttatgcaggttttgcagatttagatttcaataattgaagttggttaatcatgttattcttgcgaaacaggtcgaactgtgtctttagatccaaattcaagtgtt

SEQ ID NO: 89662 - DNA, 869 bp, Citrus clementina
  Intron number 1 from transcript clementine0.9_021358m (loc us clementine0.9_020538m.g) derived from phytozome v7.0 (c hr-ID scaffold_72; pos 241383 to 242251)
attttgcaggtgaggattagataagataatcattgactttttgtttttaatttttgattaacatatacatgctttagcttgtgtctcttcttttattcttaaggaagatttagcatctgggtttttaatttcattggttatctcggtttctatttttagttttaaggtgggttattagtttttataatttaccaatcatgtgattaaatgggtttgtttaattttttgatcatcgcttgtttctgaggtggattctgctgtgttataattgtattattgatgtttggatcagatcataattcaaattttgatctttggatggttttagaaagtgtattgctctctattgcttttgaattttgatatatttaattgtttcttagctagttttgatcagttttatctgctgttgagcctattgtggcgctaaattctgctagcgagtgtaacctttttcctggaaaagttggatttttttagatacttcatggagagtttgagaaagttaaagaagttattatcaaaatattcgaatttctgtgtttgttctttcaaatttggcatgtgactcaattgttttcacgaggataaaatatggattcaatgatactataaaaaatgtggataggatcattgcattttaatcttaagctatggttcaatccttattaaggacaggggaagtattagtgtaatttcttatgcatcagagctgttgaaatccgagggtgagagcagttcttgttgacagacgttgtaaactcgtacttcattatgattgttttttgtccatctttttgtggttgtatgactaatgaaatgtgtttatgttttctcatgcaggtgcttagacattgatttcaattttc

SEQ ID NO: 89663 - DNA, 647 bp, Citrus clementina
  Intron number 1 from transcript clementine0.9_028398m (loc us clementine0.9_028398m.g) derived from phytozome v7.0 (c hr-ID scaffold_15; pos 3655440 to 3656086 reverse strand)
aacggtgcgttttttgcacctttaaaaggctcttcgtacgtgcacaacaacacacacgctcttcccagctcctcccactcgcgtatgcctcctttcactgcaacaaaaacccagcagcttcctcattctctagacaccattctccctcgctctcggctctgtacttcctcattctcgctggacctgttttgccacacactctcggctccgatgaccctcattctcggtggctctatttccctcactgtctcgattccgatctgcctcaatctctccctcaatctctcgatctcagtttcatcactctctctaccccaacacaaccgaattaacggagcttgttaaggttagtgttcaatttattgctttaatttgtaattaattgaaaattaattattttgccccatttcggccacttggattttgaatggttattgttgagggtatagtgattttgggttgtattgatattagctttggattttgaacgaattgatttatttttcctatttcggtcatctaggaaaatcaaaacacattgcatgtattatataaatgcatcaagatttgtaaagaaaaagaatttaaataaattatcgttgttactttcagatctggtcgtatatacgtagttgacacacaaaaaa

SEQ ID NO: 89664 - DNA, 959 bp, Citrus clementina
  Intron number 1 from transcript clementine0.9_018508m (loc us clementine0.9_017349m.g) derived from phytozome v7.0 (c hr-ID scaffold_18; pos 427312 to 428270)
tggttcagcgacgcttctcctgctcataaatcttggtacactgttattatgttgctgatattgattaagtttcgtaattaagatggtaattagtgtcagattatccagtatttgcaatttcttcaaattgtttatgcatgaggagcaattgaattgttagtgcgatgtgggggatggctttatgaattgagcccaaggcatggagttgcggacctcagtgacgcatagagaagaattagggtttgcttgtttacatattttgcacgtgtaatggcagtactgttatgggtggtcattttacacttatacagcgtacactttagctgtgcattcaaagtagaagcacatcagtccccaaacatatactcaatcagggtggtttttctagactgatatttgctcaattgtcgtcttttagacaacttttgccagaatttgtgtgaactatagcttagacaattaaactgtaaatagattattaacaaagaatcttccatggattcttaatgtatctaagttcgaaaattttgaattggagaaatacaagtaaagttattagcttggggatgaatttattacagggttttgttgtctgatcagagagagagagagagagctgaggaatatattatgccctttttttgtttttcctttggttcttttgagaagagaggtgagagaggtaaatgcataaataaatgtttatgttacctgatttcatgacaaatgctttctttatgatagatttcaagcgcttggacaaatatgagctttgcaatcatacatagggatatagagagggagtgggagaatcagggtggacttgtgggtttttttatttattattggagattcttgctcactctctggagatctatacatctgcaaaaattcatgggaggatgaggagaccaaattaaatttcaattttattatagctttggagcatcctggagcaa

SEQ ID NO: 89665 - DNA, 206 bp, Citrus clementina
  Intron number 1 from transcript clementine0.9_014574m (loc us clementine0.9_012947m.g) derived from phytozome v7.0 (c hr-ID scaffold_15; pos 4283987 to 4284192 reverse strand)
cctcgggacctcgctgttcttcttgaagttgacgggtaccctcttttgtttttccattatttgattatgagacactgtgataaatggtttttaattgcaagaatatagaagcatgcttgtttactatacattatgcatataataatattattgtttctgcttacaatttctgttcttcaatcattttttttccagagtccttgtgg

SEQ ID NO: 89666 - DNA, 853 bp, Citrus clementina
  Intron number 1 from transcript clementine0.9_015192m (loc us clementine0.9_015168m.g) derived from phytozome v7.0 (c hr-ID scaffold_15; pos 3328395 to 3329247)
ctcccagttgaagaaccacacatttcaattcacaggtgaattctaagtccctttctttcttttttttttttctttgcagatctctctttctttcattttcactttaatcttttgtttttcatttctgtttataaatgtttgcaatgattgttatctgttaacaaactttcaacggttatctattatcgatgtatgataatacattaataattcatgggaaaatcatttttttttttaatttataatgatgatttgaggttgatatgttgttaacttggtttgattaaatgtgttgtcaatcttttttatgtcatttgggattgagattatttgggttgtgggcttttaataaagtttttgtttttttcagtggaattatttttcgtgattttcatttgtggaagagttacaaatcacccttcattttcttggcaacccaacaaatagttcccctacttccttttttgggtatgttttcttccgagctgagggacatcagatgcaatttgctgttatattgataattttgattactccgatgatctcatacacccacttgcagttttgaaacgtttttcacgttggaattgccacgtttcactggtgtctttttcatttttgctggtatagatagtatttgttaattttattcatgtgcaaggtttgtagatattattaggattaatcctgttgatatttgtgcactttctcttctgttttttttttatatcagagtttacatcgaggtgtaaatggtttagtccttagaattacttttgctgagctgagttgcttttctttttctttgtggatgatattttccaggcttctctgtgaatatagtcctttttga

SEQ ID NO: 89667 - DNA, 758 bp, Citrus clementina
  Intron number 1 from transcript clementine0.9_010899m (loc us clementine0.9_010899m.g) derived from phytozome v7.0 (c hr-ID scaffold_47; pos 1152975 to 1153732)
gccaaaggtatgtatattaataacatttaaacctactattttttcccttgaattttaactgctttcttttcattgtcttctggggttgctattgtagattttcaatccacatttgccatgaaaataaatgaagtgtctagttgattagtcattagctgtttaagtaaaactgggtgttttctcaatttctttttagctacttgggattgaggttttgcggcttttaatctctagagctgccgtggaatcgaaactctgtttctagctatcaactatgagggggtgtgtgggtgagtgttaaatattggctgccaactacaaatttggatgtttaccaaacactttaaattgggatactaaatcccgcctggactataattataaaattaagcggggatattggctcatggccttggccatccgtctcttacatgccagcttttaagggtgatttctactcatgggtttgttttaagctgaactataagttttcaaacatgccataattcttgtgctttttaatctcaagagctgccatggagtgggctcagtagctcgtaggagttgttaaatatcagttgctaacataaaatatatgtggctgtttaatcaaaaccatgctttcaacattaagcacgagcgtagtagttacaaacattataatattgttttggtgccttatacaattgggaattgagatgtgtagttttgattccattgattggtttggtgatggtgatttgtagatattgtgaggg

SEQ ID NO: 89668 - DNA, 672 bp, Citrus clementina
  Intron number 1 from transcript clementine0.9_004069m (loc us clementine0.9_004069m.g) derived from phytozome v7.0 (c hr-ID scaffold_128; pos 418374 to 419045)
atgtaagcctcaattataaatttttctctttgtttattaatgttgcttgtattttattaaatgtaactggtaaaacttttcgggggtggtacaagaggtctggggttccgaccctgctttcaaggtcgtgtacttgggagggaagggagttggcttgccatcaagccattgaaaaaggaaaaaaaattgaatttattgttcagttattgaagttcatttcgtatcttatgcttttcagatattggttggaattgaagatcggatgatgatgccatttaaatttgattagtcattgagaatttattaccatgttgtttgttgcttgggaacttgcatttaaaaggatttaattcataataagtagcaggagctttttacgataagatgcgttaaactaataattgctaaaaaggataggaaagttcgatgaatgtacggcaatgtaatctgtctacttatgtgtgcattcgtgtctgattgctgcgctgtaagatgctcatttaaataaatgctcgtatgtagttagcaataattggtgtatttattgcccgtttgatctggttgtcccgaaaattaaactgcattattattccaatttatgccttatataccgttttcttcatttgatgtttaccagattggaggggagtttctgatacaagctaacactca

SEQ ID NO: 89669 - DNA, 776 bp, Citrus clementina
  Intron number 1 from transcript clementine0.9_008488m (loc us clementine0.9_004254m.g) derived from phytozome v7.0 (c hr-ID scaffold_18; pos 615552 to 616327)
tgtaacagcccttttgagaaaatctagttacagaggtttgtttcttcttcttcgtgcttggattgtttcattgctctggtttttatttatttcttggttgttgtaattgatcagttttgaagtggtggattttgaagcttatagatagtttttgcatgtttgattctaaaaaatttattcaactatgtgtgtatttgaatatctggattcatctgtatctgggaatggaatggagagtatggttttagtagcagatacttttgagcttcaagttcatgccttatatacaacttatttgtgactttgtaaatttcactttttgttatttggactagttcgtggtttctgttttcaaatttaggatgcatatcttgtttgaatacgaaaaggaaaatcaaaatctgctttttctagaagagttcaattttctctttacttctacagttcacttccttaatataggttggccgtttatttggtctcaccattcatattcatgttttccagactataattgaacttcagtatgttcttggttaaacctggattttcttttaaattttttaatggttgtcctgtcttcctggagataagactgtcgaatcatccattaaggtcttaaaatatgtgcaatgaaatgaataaaggacacaaaaattaaaaaaagtagcttttcaaactcttttctgaaccaattatggattctctcattttccttgttctgactgaaatgttttttagtattgattccaactcgagcaacagataccagaatt

SEQ ID NO: 89670 - DNA, 487 bp, Citrus clementina
  Intron number 2 from transcript clementine0.9_031825m (loc us clementine0.9_031825m.g) derived from phytozome v7.0 (c hr-ID scaffold_117; pos 60614 to 61100)
ctgtttctttgcaagatagtgagttactggttcctctactgtagtcctttgaattttgtaaataaaaatggattttgttattattttttgctttcaagttcttttcttttttatggggtttatcgtcagttatggtgtatgcaatgtgtagctcaccaaattcttttgttgtttacgccgaatcagtatttgatgggttttaattctcattcaattgcttattcataaactgtgtccaaaatgaattttttatcttaaaaaaaaagatttttccttttttggataatattaccaaatgaatttgtatatgaagaaaatttctttttggaaagagagcttatcaaattataggctcatcgatataatcacaatcataagcaatgattagattttgtcttcagtatatcagtttgtttctcattgctgatttctagctgcaattttgattttaggtttagctggaaaacctctggccaacgatcattcc

SEQ ID NO: 89671 - DNA, 1014 bp, Citrus clementina
  Intron number 2 from transcript clementine0.9_029064m (loc us clementine0.9_029064m.g) derived from phytozome v7.0 (c hr-ID scaffold_18; pos 3862633 to 3863646)
aagttcttgttgaagctcaaagaccgcgttgataggtaaatttttttttcccccatttttcagcagctccaagcgccttggctagtcaagaatgtgattcaggaagggcaaggtcaaacaacaatataatacaattttttttaacaaaaataataagtagcagaatttgaactttattgcaaaagaagagaataagttgcaaagaaatcttaatttttgtacggaatgaaggaaatatgaaagtaagcgtatataactcgtggtgggcagaagtgaatcggattttaaaaaaaaaagtagtcaatttgattcaattttttcagtttcagtccggttattttcaaaaattgatttttttttaagcgttataatcgactactaaatattggtttggttattgattcaaaattttagaattgaaaaaaaagttgaactttttggtaattttaagaaattaaacatttgtcatattattattggtgcacatattaataaaataaaaatataaataaacatatggaaaattttaaaaaaataaaaataaaaccaaaccgattggttttggtttttgaattcgcttaaaatcaaagccgaatcgatccgaattttttagttcgaaccaaaccgatgccacctctaagcataatgaaattaaatatattgaaagcaagcgagacgttgtgtataatgagatgttttcctttgatattatttaaattttgaaaacttagaattgatttttgtgataaataaacatatttctttaaattttgctcctgtatcagggagatttaaatcatccactttgtaaataaggaaagaaagtgttaagtaactcaattaatgaattgttggttaataaataaacttaactattagaagatctttaatctaattttttaaaagctcgcccatcttgggcattaatttgatccaccccagcaattgatattcatataacttgtttacccaaaagtttgtaggtgtttggtaaatatcactagcggtaagtaa

SEQ ID NO: 89672 - DNA, 679 bp, Citrus clementina
  Intron number 3 from transcript clementine0.9_012169m (loc us clementine0.9_012169m.g) derived from phytozome v7.0 (c hr-ID scaffold_47; pos 848903 to 849581 reverse strand)
ggtaccacaggtagctgatgctttgttttctgagtaaatctaccttttttcatagtcttttctcttaggtttctggtctataatgggttcgtctggcatgttcttttaattgcccggctactagattttgtgaaaaacgttgttagttaaatatttgttcagtaattccatgtttaaaatggttgtttaaattttggcttatttcatctagatttcatggtaagtttctgaagattgtgcttgatgatactgttcaattattaatgaaaaaaacttcttcttagtgctgctctttctttagttttactttggaagttaactacaactttgcctttgtttgagcataaccatgatgttcaaattttaaaagatatggacaatcaaaatggagaatttgcttttgaattttcaccagtatatcagtcattaatgaagtgcattcgcctcataaatcattttgttattttttgttcattcatggtgatgtgatcaagttttcagtgttctctttaatttgttacagcatatttgtttaataccttcatttaatattttgagtacactggttcatgtttttaagttgtttatgtgctatattcaaagaatgctaccctccaaaatcagctaaatggcatactgagctattttatgattaaactacagctagcagacgcaaaag

SEQ ID NO: 89673 - DNA, 508 bp, Citrus clementina
  Intron number 2 from transcript clementine0.9_016419m (loc us clementine0.9_016377m.g) derived from phytozome v7.0 (c hr-ID scaffold_25; pos 1940845 to 1941352)
ctattttaaccatttctcgcttggaggtttgcttctttccgcttctgctacttcttctgtaggtgatgtgattccacttccaaggttttaattcatgttactgaacacaaaacatgaataaaaaaatcaataataataattaagcagacagatttttggagatagactgccaaacaaaatttctgtacaataatcaaatctagtttatgtagattcacttctgccaagctcgattctccaaattgtataagttgttgatgtttatccattttaaggctctatgaacaccgtctttcatattctggttggcacccaaattgatattcaagctcttattaatatgtttgttttatttagatggatgcaagttgaatcaaagacttcttttcttggtcattaatcttacttaattatattcttactggatatgtatcctagtgctctaactgctcgataaaacgttgtcaatcaccagaatactttttgcctcagggtctgagagggcttt

SEQ ID NO: 89674 - DNA, 428 bp, Citrus clementina
  Intron number 1 from transcript clementine0.9_015513m (loc us clementine0.9_015513m.g) derived from phytozome v7.0 (c hr-ID scaffold_15; pos 2295727 to 2296154)
aggaagctcaaaaggttccattcgttgctgataaggtatctgcaaaccaagcccatgttttattttgttttattttactctttattttatgaaatgggtttttttttttctgttcttgaagaattagttataattagcattagggtgataattgtttcttgtgtcagcattcgtaaccttaaaccatcagacttgttacattgaattgaatgtcaaacttgtgaagagtgtatatagttaattttgggatgttaaatgttgtattacaaaagttcaaccgtgtaatgttagagtagaatatatatctgcttgtgtttgatttcggtttgatgatgatgttgttcaagaagttgtgtatgaatctcatgcattcttagcggtgatttatcacaggaaccactgtctgcattagcatctgaatatcaatc

SEQ ID NO: 89675 - DNA, 426 bp, Citrus clementina
  Intron number 2 from transcript clementine0.9_035146m (loc us clementine0.9_035146m.g) derived from phytozome v7.0 (c hr-ID scaffold_74; pos 273319 to 273744)
tcatcattcttggttagtcatgggacctatgaagatcttttcttttcttatcttaagttcttttaatcggtgtcacgaatgctgagaaaaaaaaaagtttgcttctaacatcagccgcaacatgcttgacacaaatttatgaagagcatttgcagttctaggaacattattacctcacagttcctctcatgttgagttggaaccttgtcacattactcgtttatggtatttttaatttgagtcatttgctcaatgctcagtctgtataaatgttcaaattcctcattttttttttgaaagcgttacaaggtggatatcctcaggttgaattgttaaggttttttaaatgtctgtctgctgaactttggataactgttatcctttgaacatctgtttatgccattttccaattttattgacagagac

SEQ ID NO: 89676 - DNA, 601 bp, Citrus clementina
  Intron number 1 from transcript clementine0.9_005650m (loc us clementine0.9_005650m.g) derived from phytozome v7.0 (c hr-ID scaffold_25; pos 1385963 to 1386563)
atcacagcgactctaaacctcaggtacttctactcgtcgactcccgtacaagtattcgaattccttaatttgataatctattaaaaccttgtaagtttactttcaaaatttgttagtaaaattcttcggtcaagcgtgcgatttgatgagggtttctttagttagggctagattctgattttgttccattggctagtgattattatttatttttttcttttcctttgatttgagatacttaaggaactaatgctctaattagaagtccattactcctttaaagttagggttttagaaagcactgaatgaaattatggattatgcttgctagtaacatgcaagttcaaattagcatatggcataaggaatttagatgtgtttgctttgtgtaagattatgctgtgtaggcttctactagcttcttacactggtgattatgttatcatgcttaaatttatttacaatatttaatatcctcagaggtcgtgttagtgagatgtgcaagtattcatcttttgaccaccttatttaaatgcaagcacctaataattgtctattaatttctttttctgcttgttaatctcactgatttgcatgcagc

SEQ ID NO: 89677 - DNA, 494 bp, Citrus clementina
  Intron number 2 from transcript clementine0.9_019675m (loc us clementine0.9_019675m.g) derived from phytozome v7.0 (c hr-ID scaffold_15; pos 38862 to 39355)
gcgcgtaagtatccttactgattattctttgaattttcagaatccttccaagtaattgatgaaaagttatattccaaatttttttcatgcaactctcttttgtcatgcctttaacaactagcttttccggctatgcctgttttatgttggcatgatggtttcaatgtgtcaatcctctctgtgtggctggttggaatcttttgaaggttgagtaaaatagaaagaagtaatttgcattctgttaaagatgttgatgtttgtcttcttgaaaacactaccgagctttttgctaaggcagagtttctgaaattcatttttgtcacttgttcaacataagtttgatgaagtgaattcccgcctgagcaatgagttttattcactgccgtgactatctaatgtttttccaatatgcaaattttgtttatatgatgtgtggtactgtacattttgtttgtgcttatgaaatttgctcttgtaggctatatttgagagat

SEQ ID NO: 89678 - DNA, 1034 bp, Citrus clementina
  Intron number 1 from transcript clementine0.9_015973m (loc us clementine0.9_015973m.g) derived from phytozome v7.0 (c hr-ID scaffold_25; pos 1648283 to 1649316)
ggttccccagttgcctttacaaagatttccttgaggtaatcaatatgcaccattcttatttctctgtgtgtatgtatatatttaattttttacccttaatttccttttgcgtcttttgttatctgtacaattaaatgctgttttttctttttaagttcataacaccatgtgtctttattttgagaattgctctttgcatgacttgaaatcacaatttttgtttttaatttttttatggcataattgactaccatgactagctaacagcaccagttaggtagagcttgcacaattgctcagaccgagttaaatcgataattgaagcttttgtttatctaagctaggttatcattgtttttgtaaacatctcgttcatcttttgttttgttcccttcaagcccacccattaggcgcattacttgatggtgcatatatgagcatggcttcaacaggatgtacaagcgaaatagcacatatttacaaaccaatttgagtcgtatttcttggttacgattctgataagatcaaagtacgtacatcaagaagaaagtaattgagatgtgaaagggcagtgcaataagttactcaactacagtggcccttgatgttggaagcttagagatgggtgaaaaagattagccattctaagcagttcgtcggtcaatttagtgtttcgtatttttgtaattctagaatcgcttccgcaactgggtgaggaccggtagtgtggtgataacaacaataaatgattttagctcaactactaggcaccccacaactagtgcggaacatgatcctcttttgatatgagtattattgagtttttaataattttatcatgtgtcttttagtagtaagatttaacttcttttatttttttatttattaataaccaatcaataattaatttatttactcaaaatatgatcaaatcataaaagaatcttgatcctagtcataactataatgtagttcaacgatacgccagggagcaatgaccattattaatgtgttggagattgcaatgacaggtg

SEQ ID NO: 89679 - DNA, 168 bp, Citrus clementina
  Intron number 1 from transcript clementine0.9_023768m (loc us clementine0.9_023768m.g) derived from phytozome v7.0 (c hr-ID scaffold_132; pos 319463 to 319630)
aagaagctaccaggcgcctgtctgagattagagaagtaatttgattgatttgtttcttcgtcgatctattattcatgtatatgtttctttgtttcttgaaatataattaagaaaatattttgattttcatcaggagcttgaaactttggctgatccattgagaaagga

SEQ ID NO: 89680 - DNA, 524 bp, Citrus clementina
  Intron number 2 from transcript clementine0.9_023768m (loc us clementine0.9_023768m.g) derived from phytozome v7.0 (c hr-ID scaffold_132; pos 319672 to 320195)
agttaaagccactgggtctcacctgccaaagaaaggtgaaaattttacagcttatttttctttatataacattgtttgcatcacgacaattattattaattgaacaattccattaattgtgattcaagattcaagtataccataaaaaagttagaatatgctgttaatttgtttttgtttatgtttatgggtggagttttatgttgtctatctcattaaaggcctcttaaaatcagaaaattcacagtttccttgtataattttactatcataacttgtctcttcttcaatatttattatttaaccaagcaaaacattgtccatatatagtatatttaattatttaatagctaaaattcaaattttacaatgtatagatgtccgcacttgagagtgtttatgtaaatgtattagtgtggttatttttttattctttaattagctgttgacccaatttttatttttattttctcttatcattgtatataggagagggaatacaaagaagctcttgaagcttttaa

SEQ ID NO: 89681 - DNA, 717 bp, Citrus clementina
  Intron number 1 from transcript clementine0.9_016798m (loc us clementine0.9_016798m.g) derived from phytozome v7.0 (c hr-ID scaffold_95; pos 136601 to 137317)
gttaccctccgggctcccaaggtaacggcatcgttatcatagactggctgcttctgtgtatgtcatatgttcgtataaatgagtgagtgaattatgctaaagccgtgaactgtgatttgaaatttatcccttgtggggctgttatattattgaagtaactagaaatgggtggttaacaatagcctctattctgaaggtaggcgacaggaatggggattttaatgggggctcattttgtctgttgtgcagcagaagcattgaattcaatgatcacttatgttttacttttggttcttggctgttaatttttcgtaatttttatatgatatagcaaaatgggtagtattaggatttaattcggcaaagaataggcttaggggtgaatttttactttttgttttgatgaaggttgagcggttttctcttgttaatttgactcaagaacagaaataggggactacaataaagcgaatgtagaccttagccagaattgggacattgatttgcagccgatgagtcataggaaatcttttataatattgggtttcattttgttgtcgtttctcaaaaatctttgtttttctaggccgtgatttcatgtatcttatggaaaatgaatgaaaattatttcactgaaacataattaattttatttttattttttttgttttggtggtggcagggaattcaacagagggttccccaggtgcaagcatt

SEQ ID NO: 89682 - DNA, 658 bp, Citrus clementina
  Intron number 1 from transcript clementine0.9_035456m (loc us clementine0.9_035456m.g) derived from phytozome v7.0 (c hr-ID scaffold_15; pos 3136106 to 3136763)
gatcctggatcaacctccgattcttctcccaagtaaaaactcacctatctctcccgctcgctgttgataatatatacatatacttgtgattgtgtatgtgaataataatctattggatttgaaaatgaggagatgaaatggatgtgaaattgtacttgaagagtaactgaaatgaagattctactgtgtctgttactgatatctgctgatttttagttgtaactgtttgcattctagtgttttctcttgcattcatttctattagatttaaagttgtgataggatgggcatgcagcgtgctatgtggagcatgagtatggagtgtttgcattctaacttgaaacgacagtttatataaggggtaaaagaaccattttataggatgaaaatattatctgattttaaatgttctttgtgcttgcaaaattagaatttccatttccatttccctggcattgcatctgcatctgcagctgcattggtataacaaaactctcaacacaaatctactaggtgatatttttatatatttaataattcaaattagatgtgaaaaaaagtttatgggcatttttattgaatgtgtatttgcttacgtgaagatacatttcgtttttgttcagattgtctttctaatctgttatatatcatggcagga

SEQ ID NO: 89683 - DNA, 815 bp, Citrus clementina
  Intron number 1 from transcript clementine0.9_014876m (loc us clementine0.9_014876m.g) derived from phytozome v7.0 (c hr-ID scaffold_153; pos 141448 to 142262)
aaagaaattcgaaattatcgataaagaggatttgagttagtcccattcacatctttttattctatttttaaatcttttttagctattttaaatttttaattggtatgagatattgctttggtgaattataattatatttggtgaagaaatttggtacgtgaagaataatattttttttaaattattattcttgatttataaatgtactgtttgatcgctgagaaaatgtaggatgaataattattgagttcctttgtttctaatgttttattttatgttgtttactcataaatgtatttgaaaaacattcataaaattttgagaaatttctaataatttcagtccaagtttctgaaatggttaaattttaaaaaatttggtaagttttgagcaatgcaaaacctgctatttaaaaaaatatatatgtattgtgaaagtgtaataaagggcagtaaaggagaggcatggaattcttaaaagatcatcctttgaattgttgttatacaatttgattgcagtatctcacatggttgtgcaattaggtggataggggatgtttaagagctagagatgttagtggtgtgtttggttgcagagaaatgttttggtgaaaaaaagaaaagaaagtgattagttcaaagtttttcattttcattttccttattataatagaatcggaaattgggcgcgttgtttggttgtgaggaatgtaactttatgttccttagttcacctgtagatgttttttgcctaattggactgcttttgtatttgcttcaggtcctgtgacaattgcagatcgaacagcagaagaa

SEQ ID NO: 89684 - DNA, 862 bp, Citrus clementina
  Intron number 1 from transcript clementine0.9_010466m (loc us clementine0.9_010466m.g) derived from phytozome v7.0 (c hr-ID scaffold_15; pos 423414 to 424275 reverse strand)
cacaattcaatctctcgattctaacgtcagttacagtaagattccttgatacccttttgaatacctgcccttaatttttatgaagtgattataaagtcagaaactttatatcttttgcaatacccagttttttttttttcgcttattcgtttaattctagtgtgctttcggtgttgtttcagctaattataaactgttcttcttttttctttttttctttttttgctttgtttcccagtttgtttgagtactttattgatttatctgttgtgattatggtcaaatttgtatatatccttctttgtagattatatgagcttgatgtttactcaatttctgtatctttttgagtgtggatattttttagtgaagaattgagcttctaatttgaaacttttattaatcattggcttgtgatttgttgattttgatataaccatcataatttgttgtgttgggacactggattgtggattgggattgattcaatgcaactatgtctaatttatgttgtattatttttgttagaatttgcccatttaaactttattaaagtaacttctttgaacatagttattttcaccattttggtcattctatatttgttcatggcctcttcattctcgctttttcttttctcacaggtgctatagtcgcattcacagtgaccttttaaattcagttacatgttcttaagaatatccagttgacaattgtatttgcatcaaagtataagttcctaggaaacttgagttgctgctgatggttgcgacttttaatttatgacgataatgatattgagcatcttccctaattcatttatccagggatcagggatcaggtagaaagcagccgagttgtt

SEQ ID NO: 89685 - DNA, 817 bp, Citrus clementina
  Intron number 3 from transcript clementine0.9_023469m (loc us clementine0.9_023469m.g) derived from phytozome v7.0 (c hr-ID scaffold_15; pos 4405474 to 4406290 reverse strand)
aggtatccatattggattttaacctgttctgcagcagctccatttttgttcactctgttttttacctttcttatcactattttgggtagccaaaaggcatatattaaccctaccttttaatggtgatgacatctctagaagtttgcaacctaattccgtggtctttagtgtttgatgtaggagaatgcagtaaaattgttcatattggcacaaaactgttatgatgttcttcaaatcggtgtagtttattagaaattgttttagcatatggacataaccgggacacaaaaccagtatgcaagtattattgacttctttttttaggatttttggattgtcatcgctcacaatttggctcaacgggagaaataaactgatatttggaatcagagtttttcacaaattttatctttcattatatgcatctgatatttggaggtaatatttccaaaattaaatagaatgttccaggcagcaatatctgtgtttattgtgaagatggtatatgagtgaactgtggttccctttttcttattaaactacacttatttgtaggtctgctcacacacacacacacatattctgaatggaggaatgcaataattagtgctaaatcaggcaactgataagatctcttagtttactaaaactatagctatgtaaagttgaattgtaaatcagaacatcttgagacagatcttatcactacattttttgtttgctagtttgctttgaacttaatagtactctttagcacttgctgtagtttgtctgttcatgcatctcaaggatttgagtccgttatgctaacaggttt

SEQ ID NO: 89686 - DNA, 494 bp, Citrus clementina
  Intron number 1 from transcript clementine0.9_015496m (loc us clementine0.9_015496m.g) derived from phytozome v7.0 (c hr-ID scaffold_47; pos 1511161 to 1511654)
ttctccgtcagagaattatcttcttgggatcccaggttatatttgttgtacttagttttactttcaccaatgggttttttttattgttgtatttgaataggtttcaaatatatgaattagtgtgtttatagattaatgttagatttttgaagtgggtttgcttgtaatttgttctatgttccatttttatcttttagagatatgagaagctaggttctaattgttttccccctatatgaatgaaagttttgatattttttttttttttttgggttcatttattacagaagctggatgcaagttattctcattgttttatgaaattttttgactatgtgattttgattttgaagattacaaggtggtttgttagtgctagacgatgtttgtttaatgcataattcgtagtcagagctgggaaatggttagggaattttttttttcttttttcaatccattaattcagtgagtttcaattgattttgggcaggttg

SEQ ID NO: 89687 - DNA, 460 bp, Citrus clementina
  Intron number 1 from transcript clementine0.9_015920m (loc us clementine0.9_014512m.g) derived from phytozome v7.0 (c hr-ID scaffold_25; pos 3202618 to 3203077)
tttccgccttgttccttgtcttgcggatcctggtacgtgtttatttttatttttttattgtaagctatgtttggttcccaggaaaagctgaaggaaagttgaaatggtaaaaaaattacttttttaaggtgtaagttattaggtcgttgtgtcttgagattctaaattagaaaagaaaaaaaattgaatctttctggtgtaattcgtttcgatttttgtttctgttttgattgaagtgcataggattctagctttttctttgcttcctgataaatagtgaaggaaattggaattggtaacactatctaagtttttaataactaaattcaacttccaagtggataaaaattgatttttaacttgtgtagtagtttatttttatttttgttttcttctaataaccagtttcgaattgttggttatagctcggagatcatcattgggtttaaaagcggcatta

SEQ ID NO: 89688 - DNA, 943 bp, Citrus clementina
  Intron number 2 from transcript clementine0.9_015920m (loc us clementine0.9_014512m.g) derived from phytozome v7.0 (c hr-ID scaffold_25; pos 3203154 to 3204096)
aaccgtatgtattaattcctgaaatagtcgtttctttcttcctgtagatttattttgaaattcagtttctttgcattgctttgacaagaatgcttgttagttcttttacttctgtgtacttaaatttggaattttattgttaacatagactggatttggatttgtgcttttacatctgactgaactgttggggctttaaggacttagttaaggggattgaggtttaagattaatagtcaaactgaggaagtttgaaaccaaccaccaactcatattgtggatgggcattatttcatttacaaactgactgagatggtactgatatataaaaagctattattaagttgggatgtattagacgcggggaaggccctaaatatgctaaaatgtgaagcttaaatggtgatgaactctctaataagtgctcacttcaatcttgcaatctaagagctgtaaacagagaaaaaatcttagagggctgcaggcagttgtttcaatttaaattcaaagatctatgtgtagcagaaaatattgtccgctgacattaaagcatgccactctattagatgcactgatgaaatgttgttttgtccatctttgttcatgcatattgcatggcgtctacttctttcaacgatgtttgaactttgtttaaaattttaagcatatcattattgaaaggttgactgatatagtcaaatggtttatcgaacgtgtttctggagaggactagctaggccttgtgtcttctgttaggaattcatttaataaatttcaattggcttttagtgagggtgttaatatatgttccgaaacgtattcaaaccctactagtctttcagatttctttagcatataattttacgataacttcagcgttaattaatatttcaactaccattttacaggtatatcacattttatttgcttttgtttgttgcaa

SEQ ID NO: 89689 - DNA, 924 bp, Citrus clementina
  Intron number 1 from transcript clementine0.9_016132m (loc us clementine0.9_016132m.g) derived from phytozome v7.0 (c hr-ID scaffold_47; pos 1053646 to 1054569 reverse strand)
ttattaactctgtaattttgcaggtacttttagttacaaggtttttttttaatttattgcttcgtgccgttatggttagtaatttgacgtgttaaatgcttcatagtcaagattgtgagtcttccattggggtttatatgtgttgctatcagttttaaaatttgtggaccattatgtataaccattgtaagtatactgtgttagaattagaaagattggacttttttttccctttttgtgttgaaagacaaactacctatgcttacatcaaatttcaaatttgtaatggtgagtttttagattacatttggactcgaggctgatgatgacctactgtaaagaaaccccgacattagaagaaaatgattttctgtgattggattgttgtttaggtgtataagtccttgagcagaatgtagtgtatgccgatttaagaccacatgtggttaggttttcagttacacttgtggattggtcattttactggatctccacttggaggtatgagacattcaacgctgtgaaagtggtgagaaacttatgcttggagttttggtacagcaagaagatgcatacaaacaggaatgatatgcatgtaattgcacttcaaaataactaggctctgaaatgcatggcatatttaaccagtgtatttagaagtttacttaccaaatgggaataagctgtttcatgcaatgaaatctaagtccatggagaggagccaagtcttctcaatccaattgacagatcggaatcagtaaatcttatgctggacaattgtatgtgcaaaagcaatttactatcttactttcattagtttatttctgaacctgccagtccatgattgcattgatttattagaatcactccactgggtcagattcttgtataatccttaacaggatcttgataactttatccagg

SEQ ID NO: 89690 - DNA, 952 bp, Citrus clementina
  Intron number 1 from transcript clementine0.9_006995m (loc us clementine0.9_006995m.g) derived from phytozome v7.0 (c hr-ID scaffold_117; pos 291727 to 292678)
cttaacgaaaattgagattccttaaacaagtcttggtaagtaaaagaactaatgactttgatgttgatagagatgttattatttttaactaatacgaacgaggtcctgcttctgtgctcatcatgcatgacttaattttattgaaaacgtgttcatgatgaatcagtgaaagttgtttgatttgagattcccttttgttttttgtttctgttggttccttgaataattcttgcatgtgatgcgaagtttagaaatattgaattttggttccaaatgggtagtggctaatggctttcttgtggaaggaatgtcaatgttcctttgctttgctttgcttctggttgatgtttgattcccatttctggagatcagttaaaattacagatgttttgctttccagctgttgaatctttgtatttgcgagctggggtttttctccctttggagattatgactggttatgcaaataatttacattctagtattgtgatagttcattaataaattagcccgttcctttttccatgtagcaacaggccctttgttttttgtaagaatactggcgctgatgatctgatcaccgaaatgagccctatttttattgttatttttccaaaaaaaacttttatatgttggatagctatgaaaactactccaccattgttcattacgattgtgaatgctatgtcatttgttgaatctttgtaggcaagagttatcattaatattgactggaatttggcttatggttgatgttgtttctattctaaatggacaagaagtcctccgttgtgtccactgatttataattttatgatttttatatgaaatttcctctgtattttgaaaattattcctttattgtatgcttgttactaggatttcactttcactgatctagtggctcttcattccagattgttggttatcgttgtgctgtggaaatcctcca

SEQ ID NO: 89691 - DNA, 960 bp, Citrus clementina
  Intron number 1 from transcript clementine0.9_002253m (loc us clementine0.9_002251m.g) derived from phytozome v7.0 (c hr-ID scaffold_15; pos 3303354 to 3304313 reverse strand)
cccaaacagatcaaagtttggtttcaaaaccgcaggtgaatgcaacctctctcttttttgtttcaagtttcgttttgttcatttttccatcacatatgggttcatttgttacttgatgtggtttttcagccaatgtgtttgtggaaaaatttatctctggttcttacagggactttggtggttttatttttcatcaacttcctttgtccttttaacctgggttctgtcctttgtgtttttcttgaagaaactagtttctgatgagtttgttgatttctttttttctttttggtgaaagtcttcactatttttctttgtgagaatgatctcctcttggatatatttaataggtttattatgccctatggtatcatttagaagagtgaaagttactgtcttttcagtttttttattcttttatttttatttgttctttcttgttttgaagctgtaaatcttccatgagaaatgacgtgtgatctgatgttggcttttgagagtgatgcttttatgttcttctgtcccgtttcatgccttctcatttctttcacatttaaaagtctggaagaagaatttagctcagaaattcgatttcttttcagcactcgcacagtctttatgatgtgctttttaccactttgagtattcttgaaattaaatgaagataatgatagctagttaatagtttttttttttaatttctcgcttttgcttagattcaaggaaaaaaaatgaaaaattttcagttgtatattagcttagcataacttagtagattttaccccggttacttgacatatcggggtcgttgatttttatataaaactgtcatcatatgttatagctgttcaagttttgtatgtctggccaaaagttcgcatttttttttaatgatgtttctctgaagatatttgtgcctgcttgagcagtcctctgaataactctttcctttgacaatag

SEQ ID NO: 89692 - DNA, 680 bp, Citrus clementina
  Intron number 2 from transcript clementine0.9_006060m (loc us clementine0.9_006060m.g) derived from phytozome v7.0 (c hr-ID scaffold_95; pos 56218 to 56897 reverse strand)
taggtcgtagctactttgtttgccctatcaagaaggtatagatagcctttgtcctttaattatttgtagtggttggtagccgctttgtttttgatctgtagtctactgattttagtgcaacttaagggtattcacattctccatacagttttttgtttgactcgagtaatgccgatgctttaaactcgctcaaaggcaataattttaagctccgagccactgtttgagtttacccaaatgaaatagagggatcgagtctctatatgattcccttcgtgaatttatgtcttttatgagcatttcttctatccttgcagttggtgatgccattcttcagatggctacagatgggtttttgtctctgccctggttgtcattcttatcttttgggaatttaatgttgtagtcattagttagcattttccagttccagctgacttttgtaacttgaagtatctgtttatatttcaaattgcagtttaccttattcattttattggcataataggaaattagttttaaaggtcacatttcaatcgtcgatcgaatgctttaactgtggagtacttggtgtagataacatatgttatagaacatgcagtgtatatatggatgtcgctggattctgatctaagtattgtgaatttgacttagggacttggagcttgtccattctttca

SEQ ID NO: 89693 - DNA, 851 bp, Citrus clementina
  Intron number 1 from transcript clementine0.9_007079m (loc us clementine0.9_007080m.g) derived from phytozome v7.0 (c hr-ID scaffold_25; pos 1120763 to 1121613)
ttctattggttcggcagatactttacttgtttcgagtgagtcagagtctcgtacgctcaatttctcccttacctatcattttaaggattaccaaagctgaattttttttgctttttttttttttttttgttatttgagtattcaatggaagggtgttgataattgttttgatagaattatggggtgtcatgtgatttgcttttctattaattctaggccaccaatagtcatattatatttggaatatctgggaattgggcatttctttcaggtgatattttactctctggttggtcagtcattcaggattgccttcaattctttgattcatttgatggaagaaaacttatttttggtattttaattccaagctgatcatatggctttgataattcttttacatgttgatgcaaaatgattaatgattgaaggatgtcttgcaatctcacgtctccatgtgttcgtcttttaacctccatatcaccttcaaatattatttatttactattttctcttcatctgcatggatataccactgtagccttggttcttttctattttaggatttaggatttaaatttcagataaaaaacacttcatgttctgttttctgctctgcaatgattctgaatatggtctcccccaaattcgtctcactgattgatgtattctccttttatctgttaatgtgtgtgaacttcaaaaaatccatgatattatatgtagattttcttaaagttgtcggtgatgcagcaaatacacactggcatttctttttccctttctttggtgcctaattgagtgactttgtggcagggagaggtttgccatcctgctagcaaataatttct

SEQ ID NO: 89694 - DNA, 602 bp, Citrus clementina
  Intron number 3 from transcript clementine0.9_007079m (loc us clementine0.9_007080m.g) derived from phytozome v7.0 (c hr-ID scaffold_25; pos 1121959 to 1122560)
agttgaagtagaccagaaaggcaaaaaggtgataggtaaggttgcctacctgcaagcactcatcatgagtatgttttgtgattgctactgggaagtttgcacttagtaattacaattgattgctcagtgtgtaaagtacttcatggtgacatatcaaaaggatacagaatgaaattgaaaagtaatagaatgctgatagtactgatgattgattgcattttttattaagtcttcaacttttgtcaattagatctcttcatcctcattggtcaaattttgctccacaagttatgggcaagaacacaagttatttctgtccttattttataattttatggtgagtctggattatgaacttatgcctttgactaacaagtaacatctgcctgcgttttgaatgaaatcctcattaatgactgttagccgtaaaaatgaatggccttcgtataaactttgtttgttaattgagcatgcattatgcataagatcaacttaagagaccaactttgtatataactgggcactgatttcaatttgattcagacatttctaattttatattttctttctacttagtctcatcaatgtttatgttttagaaa

SEQ ID NO: 89695 - DNA, 995 bp, Citrus clementina
  Intron number 2 from transcript clementine0.9_031413m (loc us clementine0.9_031413m.g) derived from phytozome v7.0 (c hr-ID scaffold_77; pos 2866 to 3860)
atcatcaaacctcagcaagtgcttcggtgagcgccatgaattttaaacccttcttttcccttaaatatttaattgagcaatcataaggatagaaattcttgtataaattatatctagaaatggatgtggcaatacactaatagttagttaaaatataaaattttaatatatatagttaataaagtgaattcatgtgaaaatcaatccaacagtaatttggtaaggcagtaatttgtttaagagtttgtatttctatcagtttcattaactgaaataaatggctcattctcttttttttttttttaatcaacgattgcatttgacaaattattctagcagaacagttgttgtttgctgatggtcattttcgtatgcaatttgtcatttgccgaattaggatccttgtaacttgaggtcacctaattacgttcttaaagttcttatgccacgacttcagtagtatcattgtgttgtagaaattcattagttgttattatattctctaaaaaggttcatattagaccatctctcttttctatctaatctccaaagtatgtggcgggtttattacatcctacctcccatttcaggtctaaggggagtccattttatcggactccgatgtaattttgacacttattcaattttgacaaaattttcctttgatttgaaaaaaaaaaacataaatgaaatcattatttatggcaaacaatacaacgaaataaaaacaattatttttcttttctaatagatattagtactggaaatcttatatttcaatttcgaatatcataactaacgataattgttaaaaaaaattaagtatccgtgcttttttatttttcaattgtctcaaaccagttcacattgtatcccacgtgagcgaacaaaaactcttggtagaaaggagcataaatgaaatatcattagcaatttcacggggtggctggaatttactgtgtacgcaggcttttacaggcaaagtgacgggtgtc

SEQ ID NO: 89696 - DNA, 899 bp, Citrus clementina
  Intron number 2 from transcript clementine0.9_010680m (loc us clementine0.9_010680m.g) derived from phytozome v7.0 (c hr-ID scaffold_15; pos 2370244 to 2371142 reverse strand)
cttctgcaaatccattcatatctttaataataaatgtaagtatatttggtattcttgtagtaagtataagcaagtttgtctttctttggtttgtaattgtgactgatcaacagactactagtgtttgtttacaaagaattcaagtcccagtttgtttgttcttgtgagatttgattttttttttttttttttttttttgaggtctgaaatttccatgatttgagattgttaagtttagaatcacaactgcctaaatcattagcttttgtttgtaggatggctgttgaaatttgaatgcatctcatccaactcaatgctaacattgcttaagaatataaggtcatgcagacataaatataatcattttgttgcatatatatttgttgaaactgtgtacattttagctcttcatctaaactaaatggctacacggaagcttttctggtgtttatgcagacataagtaacaatgttgatgttttgtccgagattttgtatcttgaagaatcttattatctatgtttttactatttatgtaatattaatattctttttgtcattattataaagaattgatttttttgtagctaaagagagatttcataccataaaagaaataaaatatattatttttcataattttttttcttttttgtatgtcttacctgattaatttgcattgcatcaaagaaatattactcatcttgttaaatttgagatgtcatgatattttgtttgatgtctctctttcagtgtttcttttttgttctttatggtaaatgtctccaattatctgtgttatgtaacaatgtggcacatttgttgattttctggtagggatgacgttccattaatggggtttatttattattttctttttttaatcatgttgcagtctgc

SEQ ID NO: 89697 - DNA, 507 bp, Citrus clementina
  Intron number 1 from transcript clementine0.9_010680m (loc us clementine0.9_010680m.g) derived from phytozome v7.0 (c hr-ID scaffold_15; pos 2371184 to 2371690 reverse strand)
tcgttctttgcaccactctctctctcttgttacaggcaattttactctttgcaaatttgattttagtcaattttctttagtttttaaacttatatatcgaaaaattatgactgcgttatgaattggctagggttttattttatatagaaggatgtgtcataataattttagatttttgcctcagtttgcgttattaatcttctacgaacggctgcatttggatttatttattttttatttttgtgtagttgtaaaatgttgatttattgaatcactcttgtaattggtgttactgctgcagctattgttttcattgtttgttttgttgttactgctactagtttttgtgccttatcggtaaatgaatttggcatttttcatttttctttgggtaagattgcagatattatgctttctacataaatgcattttggggtcctttgctgacccgctgatggtcatacaattgcaggataaaaaggcactgaattcgactgaacgtttggt

SEQ ID NO: 89698 - DNA, 747 bp, Citrus clementina
  Intron number 2 from transcript clementine0.9_002732m (loc us clementine0.9_001103m.g) derived from phytozome v7.0 (c hr-ID scaffold_74; pos 1121138 to 1121884)
ctctacaggtagtcaaattgttgcttgaatcattattatctgtgcctttcaaacgtgaatttcacattgggagcttcttgtctatcttatatagttctggctgatgtgatggaagttccatgactaaaattctggcaatgttcaacaccaattagtttgctagagtctaaatgtgattcagtataaatagagaagcaaatgtgtcaggaattgtagcatggatcaaatccatacagctaggctttttttttaaaaaaaaattagttacaagtttcatctgtattaagatataatctgacttaggtgattcagattttatccatgtaggttatgcttctctttagatttatgttttatcatttatttatagttttacaacctcattcatcatttcattcatgctgctttaaaagaggtctcaggcactgatgaagctgaatatgtaatattactaacaatatgtcagtatttttaatttttttaagataagttaattattactagggagaaggtgaattttgaaaaggaggcatttgagtggaacaaataaaatgagtaaattttgatttacgcacaaagtgacctcagaaacatgggaaaaagtttgtagtcctttgtaaaatttcattgcttactcttctattcacaactttatttagtgacttttttattatatctttgaagcttgacctgatctcatgaacttttctaggaagttgcttcacggctgggacttctggaacattc

SEQ ID NO: 89699 - DNA, 722 bp, Citrus clementina
  Intron number 3 from transcript clementine0.9_018714m (loc us clementine0.9_018714m.g) derived from phytozome v7.0 (c hr-ID scaffold_25; pos 2934022 to 2934743 reverse strand)
gatttgctggtagtatttttacttggttgttttgttaagtttgattgtttatgtttgatattaaacgttattcatgggcatattttattactcaatatgagcatattttgtatctcttctttggattgtaattagcttccatagattctacactgaaacatatcttttgttactattttatatgaacattcaattatacagttattaattttgtccaagtcctctgttttcactgaatgaccattttgtatgttatttgtacctgtctaaacttctacaaaataattttcaatagtttttgaagaatttagttgatagaatccaatttttcctggaattcatggtttgtacttaggaaacattggtatatggcgtacaaactttaatagtcttctgcatgtgagtagaggatcacacatgcaattttgcaccattgagagccagaatatgtctatctctaggtgttccttttttgccactatcaccacatggtattgtgtatttaagtagagcaatacaaggtgaaagtagggtaaaaggaatgcacacaccagatcaaaagggccgagaaaataaatgaaacaacaaacttcaacttattatggtcattaattttatagtccattaattcattgttatttacagaaccaaattttacccattgacactgatttctgtttgttctgtgatgcttgaggttaaaatactctgtcacttgcatc

SEQ ID NO: 89700 - DNA, 870 bp, Citrus clementina
  Intron number 1 from transcript clementine0.9_020713m (loc us clementine0.9_017978m.g) derived from phytozome v7.0 (c hr-ID scaffold_25; pos 2207792 to 2208661)
gaaataccaaaacgaaactaactttcagtattcaggtatatattttccttattttattatttttattgaactgcaatcttcactgttattttttcttgatagttgtttgtatcgtgttttcgtagggattgaagagtctaaacttgttgaaaattgcacattgagtagtagttgtgagatttttcccctccaattcgttgagttaagatccttagttatgattttaaggttgtgcaattttgttttatttttttacctcttaagaagatttaattgtttgctcacgagaaattaatgaacatgccagtttggtaggtttagaggtttagatataaactcaatttctttctgtaatcttaaacaaatgcaaagaaagttgatgaactaacttttcatgtaatcacaaaagatgtgctgaatgctctcgctttagatattgagtgaacattgtagattctgtcattgctattattaccctgacaattctgggcatatgatgtgttagaaaaggtgggggccggggggaagaaaagaggtgactgcgctgtgtgtgtttgtatttgaaagtgatagttgatcatggaatgaagtaatcagcttctaagtttcaaaatttctccagctaatcacaaaggaagaaatttccaggcattgtcaaaaaatagatatgtgaaatagaaaaaggaaaaaaggaaattcttttttcttagaggaactcaaatgctgcagttttatcaaaatgatttatgatgctcccttactaatttattgcggcttatcattgtttaatcatttgttgcagtcattgattcttaatctttcatatttgaactctgtgtagcgtgactataactcggatatactttaaag

SEQ ID NO: 89701 - DNA, 444 bp, Citrus clementina
  Intron number 1 from transcript clementine0.9_008433m (loc us clementine0.9_008433m.g) derived from phytozome v7.0 (c hr-ID scaffold_47; pos 150634 to 151077 reverse strand)
ttctaaccaatcattctccaacaacttgctcgacggtatgtcactttattattattattcttcttctcattcatctcttgtaattttttttttaaatcttttacgtttgattcctcgattgctagctttatttttggaaattgaatcttacttgaatgttcgaacaaacaaaaactaagatagaataaaatgaaatatggtactggtatggtcatgatgttgtgtcattttgctggctaacagtgttactgttaattacaatgcgctaaaaaatatgctactgttgttatgttattcggtttcattttgaaattgaagtcttttattttactcaattattattagagattttgtggactttctaattattttttttattttttatttttggttcatatgtaataactagatactgtagcttcgctcattgagagggcgcaaatc

SEQ ID NO: 89702 - DNA, 909 bp, Citrus clementina
  Intron number 2 from transcript clementine0.9_030806m (loc us clementine0.9_030806m.g) derived from phytozome v7.0 (c hr-ID scaffold_118; pos 489372 to 490280 reverse strand)
agtgctttcacgtctcatcgacgctaatttatacggtcagtattattaactttaacgtttcaagctaacacatatgattcacatataaaccaattctcaagttatactgtccatgtaaagcttatcaaaccaacttttttcttttaaaacctcaaggctagctaactctaaaccataactcataattaacatgtgtttttgacaactctgatatagaggccttctctggtgaaaatgtccgcatgaaattctgtatggacgaggagtttacaacgttataaaagttatttacaacattataaaagtagacagcctgcacctgagaattttactctgaagcatatttttcaaattctatgcacatgaacattaatcaaataaattcttagtgcccattctttaataaaaattctattactttgatgcccattaatcaaataaatatttcagataaataatatgattatttttttgtttaaaagaaaattcctcataagacaaccaacttactgaactccgatagaaaatattgtgggggtcaaaattcttcggagatgaacccattaattatcacgcaatggttaagaactcttgacggtatcgagcagaaagacctgttcttcctgactatccaacactgcattaatttaatcgattatcccgttgtgttagcaattttatcgaatgcacatttagttgttttaatatacacaattaaataatgtgctccgcttaaccaaatccctgtttctactgttgactgcttggttatactttagttttattatcttcatttatatatgtctatttatgatgctcgcattatatagagatcaaatacatcgccactactctgactttgttcatgaatcagacgtagctttggatttattgaagcttcatccaacg

SEQ ID NO: 89703 - DNA, 948 bp, Citrus clementina
  Intron number 1 from transcript clementine0.9_034084m (loc us clementine0.9_034084m.g) derived from phytozome v7.0 (c hr-ID scaffold_118; pos 316654 to 317601)
cgcacaactaatttctcattgctgaagcaactggggtctttgataccgctcaagggtaatttgtaattatatcttcatttaaaaaaaaaattaaatgcatgtcattttcgtatgtaaatataatgtatcaaaataaattccatacgatcgattttttaattttagttatgttatgcatttttcgtaaactatagattgatgccctacttttagatgatgtaaaacgatttttctttgaagtgtgattgaaaaggctctgccaattgtttttatttggatgtccaaaaaaatgtctccggaaaaaggagtttgtaaattcagagaaaagttaaaaaagaaaaaatcagacgatcgaaaaacagagcaaaggaaaaaaaatcataaaaaaaagttaatgtgcctttagtattatttttcaaatgattttgtatttattttttaataaagaaataattaatttttaattgctaacactttaattaaaatgtactgatttactgaaaataattttaaattaatttatgtaatttattttttaatttttagcacaatatatttaataaatttaaacacaagaaaaatgaaaattgtaatgacatgaaaattgtaaaacacaatatggatgttctcagcattcctttgttaaagtagaaaatgggttgtatgactaagatgtgttattttttgagtaattagtgattttttataagatccaaataaattaattgtattatctcactaatcaattaatgaatgccacatcctttagaatatttttttgagttaaaaaatttaggatggataccactgctcaattaaaatttagaaattcattttacgttgcatgtagcaaaagtagcacattttggagaatcaattttgacaataaccacttaatttaaataaattgaaggtatccaaacactcttggaatttggacaaaagagc

SEQ ID NO: 89704 - DNA, 778 bp, Citrus clementina
  Intron number 1 from transcript clementine0.9_029122m (loc us clementine0.9_029122m.g) derived from phytozome v7.0 (c hr-ID scaffold_47; pos 1636399 to 1637176)
tcatcggcttcattccacttgtaatattttcttcattcccttttctttttaccattagaaaactgctttacttcttcttcttctttgtttcacatcaaagcatgcttcgtttatttaatctaatgacactgctttgtatgccttttgttttgtagcaagttaacaatttgcttgtgctcgctagaaaattgtttaaatgactcaatataatccacacagcaataatataacaatagctatttttaaatccagatcaacgacaagcaaccacaactatatggttaaacaagttaaatcaagctcgtttagctataataagcaatcaactttagaactttagcttgactttcataggtgagaataccaagcaggtctattttgactaggctaagatcaacaaattaataaactttgattaattattggcgaagaattaatcaatattacttggaagatattaagaaactttgttcaccttttctgtcactggtccaaataatttatgaagtactttttttagcctttttttttttttttggaaaggtagtactttttgagcttgaacaagcattattataactgatcttagtttgctccatattttccatgctaccgctgtttacataaaacggattttgggagaatagcatatatttcatcaataatcaattgagactgtttaagattagcctacaaaatgatatctaatgtggacaataccattaaattttgagcagtttgattttgcctgtgcaatagagactctgtggacaagctc

SEQ ID NO: 89705 - DNA, 779 bp, Citrus clementina
  Intron number 2 from transcript clementine0.9_031275m (loc us clementine0.9_031275m.g) derived from phytozome v7.0 (c hr-ID scaffold_15; pos 3322618 to 3323396)
ccgactctactctcaggagtgctcctctgtttaaggtaatcaatcagttttattgtatttttgacattgattaagacaataagctcctattttgattaagtccatgcaatatttatattctgtacgagcacagtattttttatttatggctttctttttttgtatttctgggttatgttgtggtgtgcttgtgttagatcaaactagttaacactgcttttcattttagttacggcaattttcatttgatctatacgacgggagaaatgtcattcgtgcttgtgttgggcacatatatatcagttttcttgtgcgattctcaagtgctttctttcacttgtgggattcacaggtgttttctttatcttgcgcgattctaaagagttttctttatacattttatcttgattattgtgtttttgtgtcatgttaggatgctggtcttaggcttttgaatactattgatagcaataatcagaatgttggatccaggtgtttaggtggcaagagaacctcgtttgtagttcacaatctctaactacttctctatgttttgggatattgatctaaagtgcatctgcatatcaacgtcttgcaaatattagttgctacccatactggccaatgtgagacgttctgtgtgcacaacccataaatttacgttgagaaaaatcctatgtgaagagatcctttggttattgactgtaatgatcttaccttctctgtttccttttcattttgttgttacagacacaaaatttaagattgggtgaaaaatc

SEQ ID NO: 89706 - DNA, 826 bp, Citrus clementina
  Intron number 1 from transcript clementine0.9_016687m (loc us clementine0.9_016687m.g) derived from phytozome v7.0 (c hr-ID scaffold_149; pos 112651 to 113476 reverse strand)
atctcaattttgggatcacaacgccttttcaaacagtaagtaaatatatatatataattatttttaggtgaaggtgccctcattttttttttaatgtggaattgctcttaagccataagatttatttagtttattttttaatgaattatgaagctgtgcgattaaataatattaaaaattaactcttttaaaccgtacaggttaaaagtatatccacatgaaaaaaatgagggtgtccgcactttatctctaactatattaaagttaagaataagctaaaagaaaaaaaaaaatttcaatatactacagaataaaatacactgcattaaagtctgtttattttgtcttttagcttatccctaactttaatatggtgtgtgtatttgaattctcctttactttccaggactgaactgactatatatttaaaattgaattatatatctttatttatctaaaaactatcaattttcacagtatcacaaaactcaacttagtactgaaaaacaaagtttacaatgtttacagtacattattcttatctataataattgctaatcatgtattcaggtgaattttgattagaagctcagatcttggggaaatcattctagaaaaaatttgtgaactccttgtacagggatgaaactaatcagtaaatggatgagcggataatgcccccattaattagtccttttaattccattgtaacgctactaattattgcttaatttgacttttatcataggaaaattaaaaccagaatgaatgaaggagttttgaaataattgaatattggtgcagggttccgaagggtccacttgac

SEQ ID NO: 89707 - DNA, 219 bp, Citrus clementina
  Intron number 2 from transcript clementine0.9_023544m (loc us clementine0.9_023076m.g) derived from phytozome v7.0 (c hr-ID scaffold_47; pos 1035776 to 1035994)
aaatccataacatcagcatacatcaattaggtgaagttgtattattgtccaattattgctattagataattacctcggatttggcagttaatttccaattttgttttctgtatgacaaccagatgttcttctgcaataactcttagtatcattctctttggcacatgctttctgcaagatgaatattctcattgataagtgtttcttttttcagctcag

SEQ ID NO: 89708 - DNA, 607 bp, Citrus clementina
  Intron number 3 from transcript clementine0.9_020124m (loc us clementine0.9_020124m.g) derived from phytozome v7.0 (c hr-ID scaffold_47; pos 1604656 to 1605262 reverse strand)
ttgcctcaccaggtaggatgttctatttactgcttataatactgagaggcagtttatctaattgcttagatcagtgtattttggaggataattgtgtcaattttaggtattttctagcttcatacaaattgactcaaccgattgatattaaaataattctagtaggatgacgcagaaagtttcttgtcatatttttaagtttgatggttacaagatttatatggagattctaacattaggagtataagtcttctgcaatcttgtttaaatcctttattaatttggtagtaatggctttaacttgtggcaaaataaaggtttgaattttttccctttgatttgacactctttcctttcttttcaacagggttgtgtttagtcttctaggaatagttgttgttcctattagtccatgtctaacatatttttgcaccatgtaaatttgttttcctgtatttcttgtccagtgtgttagtctgagatgttttctttttttaagaatgaataatacttcaatcttctttcaattgccttctcagaaatggggttttttgttgtttctgtttcttagatgtttgatattattgtgacgaggcaggtctcataa

SEQ ID NO: 89709 - DNA, 379 bp, Citrus clementina
  Intron number 1 from transcript clementine0.9_020124m (loc us clementine0.9_020124m.g) derived from phytozome v7.0 (c hr-ID scaffold_47; pos 1605809 to 1606187 reverse strand)
gcttactgcggctgcgccttcgcttctttgctttggtaagctttttatttctccacgaattcaaatttttttttatataaatattatgcattattgcaacatcaatttatctctcttcgttatttatttatttatttaaatttaaagctttcgtttttgttgttattattattattattattattattatctgttcttttgtatgagctattcgtgaattaagctctgtaactgtattatatgattgaaaacgaacaatactgtggctgggattgaaattgtgttaatgaaaattttacttaaaacttatttggccttaaaataaagtgaacttaattacttataaattctatctttgtagcttgttagaagaccagac

SEQ ID NO: 89710 - DNA, 838 bp, Citrus clementina
  Intron number 1 from transcript clementine0.9_009388m (loc us clementine0.9_008707m.g) derived from phytozome v7.0 (c hr-ID scaffold_15; pos 2601706 to 2602543 reverse strand)
ggtattctcgaaatcccttttttttttcccatttttgccacttggctgtctctctaagttaagctcgtgctcgttgaaaataaggcggctactgggacaaataaaaatttgtaaactttttaacttgttctttgtttggttgctgagaaagttggggaaaaggaaggaaaaaaagttggaatttaatgcctactccttaagttttgtctgctgttgttttcaaatgggtgcagatgatttcagcttttgttttttgtctttttctgaaagattttttttttcttttgatttggtctcccacattttgttggtgggtgctgaataaattataaatacacggcaatactttttagggtgtctgaatgtaatttttatggattttttccccctaaactctggttttcaatttgaacttcaagctaaagtatggcagattgagcttgcacttttgttggaagctccaataattgaggaagcgaaagtgaaagagaataaatccttgaatctcagtcttttactaaaagaaaattccagtttgtgggtgctgtaaaattgaaaattggcgcacttatttttctggttgttcttttaaatttcagtttcatggaacttttaatgttgtaaattttaattctgtgcagcattttatcttgttggatgcagggaatattaacctattaagctttgtttttctatttctgatctgttaccattattcctgctaagtgtgcagctcttcttccctatgtttcttttatttaatgacacctaatcatcaagcttcgtgacttttggcatttttctatttcagctatcctgaatatcatcgcttgcttcc

SEQ ID NO: 89711 - DNA, 777 bp, Citrus clementina
  Intron number 1 from transcript clementine0.9_032444m (loc us clementine0.9_032444m.g) derived from phytozome v7.0 (c hr-ID scaffold_47; pos 759972 to 760748 reverse strand)
acctgttgcaggagtacgaggtataattagaaataagagccttgaatttaatcgtatttttcattcacaagttatagtttaatggtcttttgtgggtttgtaaatatgtatgcggaacttagaagccacccttttgctatggcaaaattacctttagtgtggtatcattcctccccacaagtgtatttttggtatgtaatactttttaataaaatgaaagtggatgtcgcctttattagtgtgaatttcttagctataattgctcggatgaaaattttgagttagttttctcctttactaaatgggagtaaatattgatttttattggaacatattttctagtcatacatgatagtcctttgagttatgttattttcacataaatttaaactcatatcgaccctaattgtaatatcggtacctactttgttagaatagaaattattatgagatacatgatatcactcttattatatttttcatgaaaattatttttatgcatttataaaaattgtgtttcattataaaatatattatctaattaaatgatgagatcatgcaagcaaattcttcttcttaattctgtgactaagaaaattcatttaggcagaattaatatttataacttatcataggacatcaaaacgaagtctagatgctatctcaacaactttcctggatgttgatgagccattttcagcgcagaaattttactgctttttattaccttttcttacccttagctcgtttttcagttggttgctttggagtctatat

SEQ ID NO: 89712 - DNA, 473 bp, Citrus clementina
  Intron number 1 from transcript clementine0.9_004401m (loc us clementine0.9_004405m.g) derived from phytozome v7.0 (c hr-ID scaffold_25; pos 2175235 to 2175707 reverse strand)
aaaactccggtcttctccgccccgttttcaggtgatttcaatcatttccggtttctgctaattctttctgaaatcaaacggaaaacggaattgaacaatcaactcacccaattcttctattttgtattatgtatgtggttcttcattgactcagctgccggacggttgtgtgtttaccacgtgatcttattttaacaacgcatattgtattgattgattgattattagtcaatgacagaacctataggaaattactgtaagattagagtctggagttatttgtttaggggttgttctgtttagtttaatgaaactatattctaccttgatcttgtttgttgatagcagaaagtgatatccagtaactttttagcctgtgcagatgtcggtttaagaatgtcatttattcgattttgttcgtgaacttgtcatgaacaggtttctggatatcgactctgcagcgtggtctggac

SEQ ID NO: 89713 - DNA, 553 bp, Citrus clementina
  Intron number 3 from transcript clementine0.9_022232m (loc us clementine0.9_019700m.g) derived from phytozome v7.0 (c hr-ID scaffold_47; pos 384994 to 385546 reverse strand)
aaaggtttgcttttagatcatttacttgtatgcaatttgtgtaatgcagtggcactgtttttagctatatatatggaaaagacagctttaaaggcatgatatttgaggctaggtccaggacttaggcttgtagctatgatgagggaatagaaagtgctaagttaatatgcaatcagtatgtttcatccttcagtttgcaaagcaacaaaaacattaagattaaatgtgtctataatatgcctaacaactaactcttgaattttattcaatctttatgcagtattaggtattcaattatatagtagcaacattttgtgaaacttataacattctttccagatgtagtaacaaactataagtattgtgatcatgtggagaagaaaatagaagataagagaaagaatatcaaaattttttagatagttaagattttccttccaaggttgctcctccttacatggcattttaatgctctcttacttattcaagtattaatgttatttatcatatcataacaatttcatcctgtgtttgttgttgactgtcagtgtat

SEQ ID NO: 89714 - DNA, 659 bp, Citrus clementina
  Intron number 2 from transcript clementine0.9_022232m (loc us clementine0.9_019700m.g) derived from phytozome v7.0 (c hr-ID scaffold_47; pos 385595 to 386253 reverse strand)
gaagaatccattccgttcatcgtcactccggcgtacttacctttatcttatactgtgtcgattgtatagatttagtttagattttaaatccctaatagtgaaatcgagaattttagcttgtaatttggtcttttgattatgtgattttagtgagagagagagagagagtgtgtgtgtgtgtgtgtgagtgtgagatgagggtgatgctcagatttgtttgaagtaagacaattatacacagtagctcatatggtgttgggctgatatgattgtggatgtttgctagaagatacaaatctaaagtttggggctgactttgtatgactaggagagaatctaaaggttcataaaaatgtggaaataaatgtacaactgagttatctggagagaaggaagggggtttcctttgtagtcatctatgtagacacaacctctctttctgtggaaagtgcagaagactgtttgatgttttttgatgtcttcttatggatggtgtctttcttgtggtttaatgggctgtaggtaaacccgtccttgtgtacctatttcaaactgtatattggtgcatgtaaacccatccttgtgtacctatttcaaactgtatcttggagcatatattgacatttttcaattgcaggctgttgcaggattagcagcag

SEQ ID NO: 89715 - DNA, 784 bp, Citrus clementina
  Intron number 1 from transcript clementine0.9_008174m (loc us clementine0.9_008174m.g) derived from phytozome v7.0 (c hr-ID scaffold_15; pos 3760472 to 3761255 reverse strand)
atctcatctccgaggaatctgggtattaagagaaggtcagatttattatttaatctctttttcacctgttgcttgcatgaattaactaaaaacaaactggattattattattatttatttattattaaagtattactttacccagggggcttattaaatgttgctatgatgccggctgtatttagagaaataatgaaatttgttgtattttcataaaatcatgtatatatgaggatctgcagcaattagggtttggtattaagcacaagaacagttgttagagagggggcggggtgtgatttcaggtgagattgctctcctagtcaaaatttgaacaccaaaagtgaataacatatctatcttgatgatgtgtttttatcaacctgaaaaaggtaatctaactgttgtcacaataagattcacatactttgctttcatgttgttttcagaaaatacttttcctttttcttctctaactagcctggaaagataaccatgtattggtcgatttgttcttccaaatatgccaacctttcctctttcttcaagagaaaaatatagagaacttcggctaaaaattaaagtgaaaaggtgatgaatatatgcctcatgcatcctcatgctgatgttattactgttattgttatttttctgaaattaatttctgtttgtgagaaaattgaagaaacatacatggtcgaatgttccaattatttacagagttattttatactgttattataacacaggaagagccaggcgaagaaggtggtttgtattccgg

SEQ ID NO: 89716 - DNA, 640 bp, Citrus clementina; identical to SEQ ID NO: 80565
  Intron number 1 from transcript clementine0.9_018646m (loc us clementine0.9_018646m.g) derived from phytozome v7.0 (c hr-ID scaffold_77; pos 210188 to 210827)

SEQ ID NO: 89717 - DNA, 965 bp, Citrus clementina; identical to SEQ ID NO: 83423
  Intron number 1 from transcript clementine0.9_016996m (loc us clementine0.9_016996m.g) derived from phytozome v7.0 (c hr-ID scaffold_74; pos 768492 to 769456 reverse strand)

SEQ ID NO: 89718 - DNA, 330 bp, Citrus clementina
  Intron number 2 from transcript clementine0.9_020339m (loc us clementine0.9_020339m.g) derived from phytozome v7.0 (c hr-ID scaffold_15; pos 3481463 to 3481792)
tcactgtcgatttaaacaaaccccttgtcttccaggtagagttgcattgtgatgttccgaacatttgtgggttttttctcttctttttttatttttctttttatatatacttacttatctaatgtacaatcaattatgaaaggaccaatatgtgaagctctcttgcagttcagtgttacacattgaaactgcttgttctttttgtttgatttcgtagctcttgattagattaattacaagttcatttcaatggtatttcgatttgtgttgtttcttttaacctttggagaatttgacacaggtcggtcatcttggagaagcttatcagga

SEQ ID NO: 89719 - DNA, 520 bp, Citrus clementina
  Intron number 1 from transcript clementine0.9_002968m (loc us clementine0.9_002968m.g) derived from phytozome v7.0 (c hr-ID scaffold_15; pos 4285326 to 4285845)
agatcgattccgtctaccaatcccgcactgaaaaggtatatatatatatatatacattcttttttccttattcttgttttgtcatctgggtttgtaatgcattgagttcagtctatcaaaaattgctactttttctcatgtctttgcgaaagattgtttctttgtatctggggttttctcagcttcaagttcatgctgattgttgctgttagcttttaaaagatgaatctttatcttggcaatgcgttatgcacaactgggttgtctagattttattttcaatgtattggagtagtttgatttcaattcttctgttttgagtggaaagctggcaacgggcaaaggttatcttcttatgggaatctcttagtgtggttgaattagtttgagttcaatcggtatccgaaattattcctttttacttatatgttctcagttcttgttgaagtaacgaagtcatttcttttccatgtttatcaatgtagggaatcagaaagctctgctgtgagctgttggattt

SEQ ID NO: 89720 - DNA, 424 bp, Citrus clementina
  Intron number 1 from transcript clementine0.9_021247m (loc us clementine0.9_021247m.g) derived from phytozome v7.0 (c hr-ID scaffold_15; pos 4132421 to 4132844)
ccggcaggggtccggttcccgtcgacggcgaccaggttatctaatcaaatttttaaatttttttctcaatttttattaagaaaaacaaaggcacttattactttacttcttcgtatagtagtataataatgtttttggagctcttctatggaagccgttaataattgctgaaatgctttctagagaaggagttttttatgtgctttcccaaaacccgattttgaagaagctatcatttattgtctatttgaatcaatgaagatccaaacaaaaaacgatttgggttatttactcacacagccgaaacccaatattaatttttgttcatacttaatttgttgacccttacggctttccttacctcggtatacatagacgtaattatattggcactttgaatctgaaaaggttgcaatacactact

SEQ ID NO: 89721 - DNA, 547 bp, Citrus clementina
  Intron number 1 from transcript clementine0.9_020036m (loc us clementine0.9_013559m.g) derived from phytozome v7.0 (c hr-ID scaffold_95; pos 522518 to 523064)
caggtcctttcaattacagatctgtctcttttgacgtcgttttgaccttattttgatcgttttagtgtttagagttggtctgagattagatctgtgtaaattgcagtatttacgtgttatatagatttgtttgctaaacttctccttagattggatcggcgatttttttttttcaattttcttttacaatcatgatcatttttttatggttggatctacaactttttgcttctttttttttttttgaaatatttattatgttaatagtaaaagtgtttcttttctgctttgtaaaatcctctgcatagttgatactttgcttcttagtataaccaagaaatgaacaaacatctaacgccatagctcatgtacctatgctcctgtttgatgtaacagtgttcatttcttggttttctggttattgcatattatgtctctggacaattatgtgtcctattaattataatgtgcaggaggatataaactaacattgagattgttgtttatttcagattgatcctgttaagtacaaaagcatatcatctgg

SEQ ID NO: 89722 - DNA, 611 bp, Citrus clementina
  Intron number 1 from transcript clementine0.9_010595m (loc us clementine0.9_010595m.g) derived from phytozome v7.0 (c hr-ID scaffold_25; pos 2983858 to 2984468 reverse strand)
gatcatcatcatcatcatcggttttgcaggtttggtctctctgtttcgttgctgagaaagcgtagtgatcactgaaacttttacattttatttcaactttgttctatataggtttcctttttttaattaaaaaaaaaaattatatggagctaatcaacatttgatcagtatagttgaattgttagtattaaataatcttaaataaattttccagtcctggatcttgcaaaaaaaactatatcaagctaagtctttagcttttcactcacctcagttgacgtagtccaaaaatatttaggtgcaagagtgttcgtctgctaagaaagtttttagaggaagatatttttattacttgtgacacttttaggaacctgtcaaacaacttcttgtttggtgggactaaagaatagaagacaagtttttgagacattcttgaattgtttaatatttttccttagtttctcagcttccaagcagagggttctttaaccggtaatttatagtcttaacgttttataatgtttgagtttttcctatatgctagttttgatttatattgctagatgtgaaccgcaggggaccgcgaccactaattcatcatcacataaaca

SEQ ID NO: 89723 - DNA, 369 bp, Citrus clementina
  Intron number 2 from transcript clementine0.9_001050m (loc us clementine0.9_001050m.g) derived from phytozome v7.0 (c hr-ID scaffold_15; pos 3221329 to 3221697)
caattatttgcgtcttgttgataatctgttgacaggtagcaccaaactatcagagcctttgattcaatgttccatcgatgatgttcgatgcacagaattaatatgataaatctctctcaaagccacagttctttttatattctattacaattttaaaagaatcaacttatatacaatttggggctgtaattgctgcataaaattttctataattattgaaatcaatcgctactccgtttgaagaagcttgattttcaacttgactaaactttgcccatgtttctagttgtagtgccttttgaatatacataaagcatttaaattcatacttgagcttggttttgcacattatggcaggggaaataccac

SEQ ID NO: 89724 - DNA, 457 bp, Citrus clementina
  Intron number 1 from transcript clementine0.9_016594m (loc us clementine0.9_016541m.g) derived from phytozome v7.0 (c hr-ID scaffold_47; pos 452809 to 453265 reverse strand)
aaaaataaaaaaaatcgaagcatttcttcttaaaggtacgtgccgatttcgtgtcttttgattcatttaatctctcgttcgattgtttatatcacaatacgattccataaaattttgtcatattttcactttcaataataatgacgtcatcgtttccggcttttctgttccgtttggtcgctgagaaatagcggaaattaaaacgaaatttagaaattattttttcgtaccggataaattcagtttttagctgatcatttaaatgaagaagaagaacaaattagaattgaaaattttcgtaaattttgcgtttctgttagattaaatgatagctgaagcatagctttgattctgactttgaattgtatcattgtttttgctttttattttgtaaattgatgttagcagttgctgtttaacagttgggtttcttgttgacgaccagcaactagtaaca

SEQ ID NO: 89725 - DNA, 796 bp, Citrus clementina
  Intron number 2 from transcript clementine0.9_033346m (loc us clementine0.9_033346m.g) derived from phytozome v7.0 (c hr-ID scaffold_95; pos 65223 to 66018)
gccatactagatcagaaacttgctattgtgcatcagttactgatctattgagagacaaacaggtcaccgttcaagcatttctagtgtctcttaatcatatgtattgcatttcttcaaaccaaatataatgtttttgttgtttacactgaatttgatcatggtaggctgaaggaaaataagttagtattaacttctttacacttattagagtcagccatatcttaatgcaaagcaaaattaacagcaccacaattgtaaggccatcatggactaagcgattattacttgatgaaagcttgttttctaaaaaactctagtatttaagttgaatacatccttctagttttgtcagaattgatttttggcactgttaagtcgaatgtgttacatgttacttccaaacatggcattcacattatcgttatttttcttttttttaagcattggtttatgaattcgaaagctcaaaagaaggttataataaactctctctatataaaataaggttgaaagcttatgcatgttgggttttagaggaaaatcttctattttacgtgagtaacacacatttactggtttctcaatcttttgcttcagatgtcaaatatagtactttcaacattttaattaaatggtgcattgatttctacttaagtagatctaaagaatattcgacatatcaagataagttgccatctagcttggcactagacatcattgtcttttgttgccttagagcaattaggaagtataaaactataaagttataattatttcctatgcagggaagaggcaa

SEQ ID NO: 89726 - DNA, 806 bp, Citrus clementina; identical to SEQ ID NO: 80091
  Intron number 2 from transcript clementine0.9_010517m (loc us clementine0.9_010487m.g) derived from phytozome v7.0 (c hr-ID scaffold_128; pos 68747 to 69552 reverse strand)

SEQ ID NO: 89727 - DNA, 1018 bp, Citrus clementina
  Intron number 2 from transcript clementine0.9_020634m (loc us clementine0.9_020634m.g) derived from phytozome v7.0 (c hr-ID scaffold_47; pos 340063 to 341080)
cgtttgttatttggggagctaaaacaaaattcagggtatgcttctctttgttagaagggtaaaaatttctatttgaataaggatttctagaaaaatgtttagtgtttaccaaatgctttagcgcactcaaaattaagctgggctctcaagttgaataaagtttttgtatattgaattttgaattcaatattgggtgatattattattccctgactcatttaagagttttatatcccatcattatggtgattgacttgactttaccatcttagttgctatggttcatcaaccactcaataatgtcaagttaattgctatagcattgggatacagaagttgtaataagttgagacactagtgaatatttgatcttaacatggtatttcaatgaaatcaaatcccttttaaataaatacagtttgctggtcttacaagttaactttttggtgatattgaggttcggggggtgttaggtaacatgttaatgcacgtaaacattgtaaaaatatctgttggaagttttttctatgaacctttttccaatatttaagttcactttatacttgttgctcctgggatgaacagctttagtatcagttgcttttctttcaccaaagaaagaaagagaactcagtgcctctgcaagactaaaattcaaatttttgtgatggtttgctgttgtatcttaattggcgatctttcatttgtgcatctctgaacatgcttgtcacatgagtttacagttttatcgggtggagtaacatgacctgaaattggaaaaccgatgcgggtcttctgtaattttcttataacaacaggctttatttatcttttatgttttgtttgtttctttttcacccaaataatactaggagaaaatgaaactttctggtaaaaattagcatataaatgtatgaatttaggtgtttcacataaaaatgatattatattatattatgatacatgtcctagtttcatatttttctcgcggttctgcagctggagaataatcagatag

SEQ ID NO: 89728 - DNA, 919 bp, Citrus clementina
  Intron number 1 from transcript clementine0.9_031858m (loc us clementine0.9_031858m.g) derived from phytozome v7.0 (c hr-ID scaffold_15; pos 3085313 to 3086231)
gacagtctggtctggctccatttgaggtagattctcgggtttataatagttaattacttgttgtgatatcagtttttactttctttaatgtcatatcttgtctccctatttattatcatgtttgatatacctccctgtcaacgtgaatggggaacagtgttgcgtataagggtatatccttatgtacaatggagagaaaccaaatggctccaatatttctttcaaatagaatttacttgtcagtctgaaaaaaatagcatctactctcgtccttcctcatctctttggtgaatgaattttgcttagttttaattttagtcgttctacctagttgcttgaaattttttgaaagatggatttgcacttcaaatgtgtatttttttttttatagtttttcatttaaattgaattttcagcatcaatcccatgtcatatttacttaccagcatttaaacatcattcaaatatatcactagcatgctctccggatgatctctctgtttccgtttctgaagtaaaagatgcatatccaaccaagcaggaaagaaggagttgttttgggtgtataaaatcaattagtccttgtattttgatatttattaggcagtatctctgtctttggattgacagtatttgcaaaatagtgttgaaccttgcagggaaaattgggacagataaaactgattatatgaatttcatagtgtttatacttgcactaatgcttgccctgagtgaggaagctacctgcattctattgttcctcaattaaaattttgtctgtcgatctgtttgtttgttatcaattgttttactttgcagtcatgattatttgaagactgcgatgtccatttccagaatttcttaatttctttgttttacggcagattttgtccctgattattgaggctctttgttggtg

SEQ ID NO: 89729 - DNA, 306 bp, Citrus clementina
  Intron number 5 from transcript clementine0.9_007799m (loc us clementine0.9_006044m.g) derived from phytozome v7.0 (c hr-ID scaffold_25; pos 3145283 to 3145588)
gacaacacagtgaatttgtcaacacccttgtctaggtaagaacttccaattgttttgcactttctctagtacgtgttattgagcaaaatgactcccactgcctgtgcaagaaaagggggaaacaaaagtgagaatttagtggtttatgatcacaggagataatttttccatttttaacttttgattgttattaatttcatgaacacattgatttagtatctacaacaatcatttttccaatatatcttatgttagtttctgtaactcctactccgttttattcatattcggctatcttctaggcct

SEQ ID NO: 89730 - DNA, 858 bp, Citrus clementina
  Intron number 1 from transcript clementine0.9_009321m (loc us clementine0.9_009321m.g) derived from phytozome v7.0 (c hr-ID scaffold_15; pos 2760682 to 2761539)
aatacagtgcccacaagttagttcctttccttctctttctctctgtattattattattgttattccatatttccttatttttttcatttctgggtgtccttggtttcaatccataacgttggttacacttacttgttcaagtattttaatctgaatattcatgattcaagaaaaaaatattaaaaaaatatcttttgacaattttagtgctacagatgtttgagctagcttctgggttttgcttccctctccagattttgtagtagtgttcctttttgtctaaatattctaattctgcaaaaaaaaataggcgttcagcagctcatcattggacaactgtagcatgtgcagcttaagatataacatgtcaattctcaaatgtttattactgggcctgaaacctcagtttcaaccctcttccaacttaaagtcagctcaattttagcttatgctgtacagacacacaatgaatattccttgctagatcctctattctacacgtagtctgggaatgtggtaggtacggtaacctggtgtattttgagttatttagctgcttctgaaattgcattttggttggctctgatggtaactaagaggccaattcctctgagaagttcatttatcggttgaaaaaacttaatccaagattgttgcagaaatgatgggtcattctttgccctcgtttgctgcattgtgcaatgttcttctccccccccccccccccccccccccaatttgttgctaaagcttgcaattctgtattttgttgatctatattttgtttgtatcttaactaaagtcacttgtgtttcaaatgcagttaccacccagttccgattgtattctctcaagcaa

SEQ ID NO: 89731 - DNA, 959 bp, Citrus clementina
  Intron number 1 from transcript clementine0.9_029639m (loc us clementine0.9_029639m.g) derived from phytozome v7.0 (c hr-ID scaffold_47; pos 543607 to 544565 reverse strand)
tgcgttatgacttatgcgcgtgacactcagaaaaatattaaaacctatgcatttgaggtaatgtttagctttttaaaccttgcatcattttttttaaatataaatttaaacatttagtttcctaacgtttcaagtaaactaaagcccagctttagtcatatatagtttctaccagcggtagtgctatatgcacatgaacaagttgaagatacagtcagtagagaaatttcaagtactatacataaaataaaaatgttctaactcttctttaagtatccagacatctattccctaatcatttaaaatcaaaactgaaacgataactataagatgatataaatattttaattcctctttaattatgccacttgttagcaataaatactgcgtttatttgtcagtaatcggaatggtctagaatcggaataaacttgaatcggaatagggaatgacaattagaataaattatttacttaagctataaaaatcataatcggacttaactgaattgttttaaattattaaaatacccttaattaattataataataactattattatcattgttgttgttgttatattaattaattatatttctttttttatcataataataatattgttaattgttcttattattattattattattattattattattactattattattaattattgttaatatattgattaattatattcatatgttcttagtgtattaattaattataatttatcattaataataataataaaattaataataatcaaaataaaagatcatcattagcaaaataataatccatttcaaaaataataatcatcataatcagattcatcatcatcagcaaaataatccatttccaaaaaaaaaataataataataatcctcaaattaatccattttccaaataatcatcctcaaataatgtaaggataatgtattttggag

SEQ ID NO: 89732 - DNA, 865 bp, Citrus clementina
  Intron number 1 from transcript clementine0.9_031933m (loc us clementine0.9_031933m.g) derived from phytozome v7.0 (c hr-ID scaffold_15; pos 2312635 to 2313499 reverse strand)
ttgatacagatccagatacccaagtacgtcatttcaatagatttctcttcaatttattctcgtcatttcaattccaattttaggataatcgaagtcactttcaccacaaatccaaccaccctcaaacaaaattaattctacatagaattaaaatccacctcctcgtgggatcgacactcgtcaccattaatatattctacaatagattcgtgcacttgcgagttcaataaaatttgcacaacacttatccccaattttttgttcttcatctgttttttcaattctcctttcaccaacatttgaacttgggtcctcatgcatcgtaccaaatcggcacttctcctcattcgttaatttcttccatttttcaacaattgtcgccctacaaacttttttgatcccttcttgcatgaccttttttgcttcatgcttactgtacacaacattttagttcagctaattacgtcaacaaaatagatagttataataagaactttattcaaagcaataattttatacttacaaaaagtgtatccacgctctctaaccaggtcctccccttttgccttctgtggactccattttataattgtatgctatagtttaaatcccgaaatagaccacacataaatgtagtatcaaggctggacccagaacaatgggtaaattcttagcaaattattgagcgcccatctttagtattcctagcaaagagtgtagagctcaaaacaagcaaacaacacctaaaaccaaacaagaaaaatttagggtacccatagaaaaataacacttaaaaatcaaacctcaaaaaatcaaccacaaaatacaaaaaaattaaaaaaatagaagggttacgcttttgact

SEQ ID NO: 89733 - DNA, 658 bp, Citrus clementina
  Intron number 5 from transcript clementine0.9_011931m (loc us clementine0.9_009909m.g) derived from phytozome v7.0 (c hr-ID scaffold_132; pos 3162 to 3819)
aaaaatttgggcaccgaaaggtatatttatctgctaatgataccttcaataagggaaatgacattacattttggccggacacgtattccattacacaatttatatttcagcaatgcccgcatacccaccttcttttactttttcttgtcgaggggaccagaactgaaccgaaaacaactcctcttctattaaatgttttgtaacctttaatatatatttttgtgctgatagttaaagatgattgaacgtaacgaatggatgatagtactttcaagtgttacacaataatgaccgacgatagatttcgatggtcaacactaaattcaaataaatgaaccctgattataaaattccattttataattatggatagagatagatgcatttttttttttatatatattagtgacaataaatatattttttatatgagttgacaaaggtcttgtcttttagtaggagtagatttctgggttattttcaattgacctctagattatactataagtgtgagtaatttccaataaacttcagattataatatacctatagattgtaataacaaattccgaaaaaaaatatgaatgaataaaaaaggtttcctattttattttaatgtaagcattagtcatatcttttttagggcaaaactgcacgg

SEQ ID NO: 89734 - DNA, 948 bp, Citrus clementina
  Intron number 2 from transcript clementine0.9_002643m (loc us clementine0.9_001078m.g) derived from phytozome v7.0 (c hr-ID scaffold_18; pos 866701 to 867648 reverse strand)
ctgatcaaggtcatctcttccatcctacttaaacatataattacattcatagatgtcgtagctgttcttgtgtgtgttatttatgatagtttttcttattgttttttgtattatgtcttcgagtataacttttatttggtcctctcttggcacaattattatgatttgatggatatggtttgggtcaaaactcctgaattagtgactggttgagtttatttgtttgagtagcagttttgcggctagattttgtgcggttccaaattcgtggtcacctctcatctctgatcagagggttacagtaaagatagaaaccttatgctacttcaatcgcatgtgctgaggtttctgtagtcaaggagattttatgctgctgttaaatgagctaatttgcattcaccgtcttttcccccttaatgaatttttgatgaattatggtggctagagtataccaatttatttctgtaaaaccctacaagatttttaaggccggacaccatggtagatacagtacatcttatgtcatactcatttatatgcagtagctctatgtccctttttatgcgtacgtattctatacaagtcccctcccaatgagggacccctcattggaaaattaatatatatatatataatataatatatatatatatatatatatatatatatgttgattatattaggctggattattaattactttttcattcttcattacttggaaaattatgggttaatatttcctctttttccattcttcaatttcgttgcagtgctgcatactttatgtgtttgacattttctggaattaatgttagttcttgaattgttaaaattggaggaaactagtaacgaaatggagggtttcactattctgaggtttttattttttaatttgtggaaatattggcaggagctcattcatccaagggcctcaacacatttgaa

SEQ ID NO: 89735 - DNA, 823 bp, Citrus clementina
  Intron number 2 from transcript clementine0.9_015659m (loc us clementine0.9_015659m.g) derived from phytozome v7.0 (c hr-ID scaffold_25; pos 130036 to 130858)
cactaaatgtaagttatcttgccataaattttcccgtttctacaaaatcttattcttggattctcatttatttcacctgcaattcatgctgcacaatgtctccgcacatgtaatgtagctaactagctattgtatgcggcggctaaaaagcaccgagtcactagatgtattcagatgctcaaaaagctattaattgatatgctgtttcttgctcaagtattagttccttagtatgtgatctttgacatgtaccatatttggcttgaagaattttgctccatcagattctgcttgctcactactctttcctcactctatggccatgtagtttagaccgggctgttgccaactatcaagccttacatgttatcttatgtggtctatcgattgcattagttttatttgatattgactattgggtggtgcatgagtcttggtgttgaatccctctcgtatcaaagaaaatgctatataatagttaattcataataatggatgctcattgcctgtttatgctggcttcttgtctatctgtttagccataatgtatgtatttgcctctgctaacgatgtctttcttgaggaacaaaaaatagatgggaaactaatggatatgcaccattttctaattccattctgaaagctatttagttgcagttaaatgctgttttatctgaaatgttttgtcagtaaatttcatgtattccatgcttaatgctatcttcaatttttgggcaaaaaccattgctcacaagaatgctgtagaatgtcagatattttgaaattaattgggagtgcttttcaaccttttttgtttaagggg

SEQ ID NO: 89736 - DNA, 475 bp, Citrus clementina; identical to SEQ ID NO: 80832
  Intron number 3 from transcript clementine0.9_019392m (loc us clementine0.9_019392m.g) derived from phytozome v7.0 (c hr-ID scaffold_15; pos 1569564 to 1570038 reverse strand)

SEQ ID NO: 89737 - DNA, 841 bp, Citrus clementina
  Intron number 1 from transcript clementine0.9_024602m (loc us clementine0.9_024602m.g) derived from phytozome v7.0 (c hr-ID scaffold_132; pos 263074 to 263914 reverse strand)
agttgaacaactttgttcgctccctgcgtgagcaggtgaaactcttgctcttgttcttggatgtgcatgttgggttgttacttgttgattaagatacttgattgtgtatcttaggatacacgttaagcaacaagactctcgacccaagaaaaaggggcaaaaaaaatgcatgacaaaaataatatttgttcttattttgattttggtcatgtacgatttatattaactagatttttcatataatttttaaatttttgttgaaaagagtctttctcaacgtgtgtactttaacgaatattttttaataaatattgttgtgtaggtgtctcagtgtcattttgagatattttttatagtgattttatggtgttaattataacatgcatatatttgtaaggacgatgtataacaaatttgatttttttttttttttatattgttaatgtatctgttgaagccttgatgatcatattgcatgtcctttttatgcggtcattaagtttgtaattggacttctgatgcttatcaagtacaagctatatagtttctcttgattctgatcatctgtttgggtgatgatgatttgtataagtcatggttaatgtagttcatctgaagaggaaaactaataaaactaactatgattttgtaagtgatatttcttgcatttgaaacttggatagaagaaatctcttggattaattactttctttcagcggtaaaagttaagtactgtttgtaaagcataaatcaatcctatacactgtcaaagaatcatcattctcattatttcttgctgcttgtagggtatactggaccataatttcgataccttaagcag

SEQ ID NO: 89738 - DNA, 608 bp, Citrus clementina
  Intron number 2 from transcript clementine0.9_001909m (loc us clementine0.9_001909m.g) derived from phytozome v7.0 (c hr-ID scaffold_15; pos 2982342 to 2982949)
gtgttgtttatttcccgcaaggccacagtgagcaggttggtatttttgaatgaagaaagtatcgcaaagtctctgcttctaatcttgaggaatacgaagttgttttgccatgcatctgttttgtaatttaaacttcgaaatgattaataattgttcatcgtggagtgagagcatgatggttgaatatttctgatgtgagcattcacataaaaccatatcttttaattttatgctgtcgaggtcatgatgttactttacccatttctacttactcttagtatatctttgccccggtgcaattttttttttttttttttggggtaacatcttctgctcttgttcctgaaattggttctggtattttgatcttgtcccctcttctgcccctagtgcctgtttctggcacaggattgttgcatatagattatttaatctgaaggtcaccagggagttatttcatttaagtttttcgctgcttctcttttatggttttgaatcatccataggaatcagatatgctatcctgtaatcaaccttgcttcttctcatttatatctctttttaccaatcttctatgtaggtagctgcatcaaccaacaaggaagtgg

SEQ ID NO: 89739 - DNA, 369 bp, Citrus clementina
  Intron number 2 from transcript clementine0.9_032575m (loc us clementine0.9_032575m.g) derived from phytozome v7.0 (c hr-ID scaffold_15; pos 3207646 to 3208014)
caattatttgggtcttgttgataatctgttgacaggtagcaccaaactatcagagcctttgattcaatgttccatcgatgatgtttgatgcacagaattaatatgatgaatctctctcaaagccacagttctttttatattctgttacaattttaaaagaatcaacttatatacaatttggggctgtaattgctgcataaaattttctataattattgaaatcaatcgctactccgtttgaagaagcttgattttcaacttgactaaactttgcccatgtttctagttgtagtgccttttgaatatacataaagcatttaaattcatacttgagcttggttttgcacattatggcaggggaaataccac

SEQ ID NO: 89740 - DNA, 963 bp, Citrus clementina
  Intron number 1 from transcript clementine0.9_020194m (loc us clementine0.9_020211m.g) derived from phytozome v7.0 (c hr-ID scaffold_15; pos 3279215 to 3280177 reverse strand)
cgctgccgcgtcgtcgggggaaggtgcgattgccggtgaggaatggggtctagtcgggagagaattttgggtggttttgggtttggattggggcttaagaatggtttgtggtggcgcgaaaattgacgagggttttcggagagtcggcggggccatcttggcactgcttgaccagacggtggtggtcgtgttggtgggtttgtcctcatcggagggtggaggtaggtctccgtacagcccgcctagcatttcgcaacgtggcttttgatggaaaatcccggggaatttgaattccgaaattagattttggagaattaaaaggctgattttgttttgttgtttgggttgtcggatgagattcgagctgaggtagaagaagatactactacctacgaataagaagagacgaaaaaagaagaagggactggcgaaaacaacgaatactgtaaagttttcagtaaataaagttgccaattactccattagtagccaaatttaaatataattaaaaatagtggagattatatcaaattatttttttatgttaaaaaatttaagatagttatatatgtaaacgttcctttactttttctcgaaatattaatgtcaaataaatttttattatttcattgctaaacaacctgcttttcaatttaattaccgacatactgacatatactcaaattttaaaaaatacatattttttttcacaaaacaatttgcacacccattttcttttttccccaaaatcaatttataagcgtctctttaaaagaaaagaatcacactgtaccattaaaaccctagcccactaagctgtgtgagactgagagccccatttactttgctggctgcaccattttctaaagaaatcgagcacccgaacaaaacccggttttttttaaaaaaaaatttccaaaacactctcaatttcactctaatttcttctatcttcagtccact

SEQ ID NO: 89741 - DNA, 933 bp, Citrus clementina
  Intron number 2 from transcript clementine0.9_013553m (loc us clementine0.9_013553m.g) derived from phytozome v7.0 (c hr-ID scaffold_25; pos 1895569 to 1896501)
atcattgcaagtattttgtctttcaggtattatatcacatctttagtagcattttataagaggggttttttaatgggattaaactgtgtgaatctgctaaataacttcattttttttactgttttatttccaatgcagatttatagaatatttcttgacataaatttttagtgagaataggaaatgtattagcttgcttatgattggactttgtttagctgataatttataagtttatgtagaaaacttgtttgcttaatgttagatgggtatttaagaaattgaagcaatcaacttggaactatgttgttgattgttatatttgtaattttggtattttgatactccttcaaatggaaatccagcatcaaaatctagtattggttgcttcttcttgacgtaatttactttcagtcctttagttgaaatttgtttgcttttgataacttcaatgaagggaaaaattgacaatctattagtcctgccaaaaatgtgctataaaggtgtatatcctgcagttctcgaccaagtgatgcttatacctcgagcattcttctgattcagcctgttgttcaatcacagaggggattatcatgtcaaggtccttttgtgatgttgtttgaaatatgtccctctgtcccctcttgtgctttccgtgatgggagtttaatctacactgcaggtaggtaagagctgtgctgcctgctagtacctgatggttacaagaaccctcattcctctcttgtgttagaactaatgattgtcagactatgctgaatggagtttgatttagtggcatggaaactgtgtttttttacaatactgtagatgactctcaagcgttttattgtgtttgatatttggtctgatagtgataaattttaattctatgttttagttgctgcgagggctgaagtatcttcactcagcaaa

SEQ ID NO: 89742 - DNA, 513 bp, Citrus clementina
  Intron number 1 from transcript clementine0.9_003808m (loc us clementine0.9_003808m.g) derived from phytozome v7.0 (c hr-ID scaffold_95; pos 852827 to 853339)
ctcctctcctcctctttctacccggtacgcctgtcattgtttgttgtatttttactgctctttggattttactacagttgatgaagtacaaaaattgtctagaataagaggacaggtgtcaggtttttagtctgccatttagacattgtcacgactcacgcgtgtttggaggttggggcaaacggaaagctgctgtgaaattaaaaacttatgaaaaagcaataacagtaattttattcacggtacatattttgtatctcaattgtatttatcgtgtgctcattgataagaaccataaagctagtacattagttataaaataaagtcaaaaaaaagaaactagtttcattaccaacgttattatatatgtaaaaatattgaagaaaatttaagaaatttagaaattgtttaaatccttctggtagtatggtccccctttttttttttgggtccgtaataagagatatgaattttgtagggattgacggtgttggagtaggacttacaaggcag

SEQ ID NO: 89743 - DNA, 515 bp, Citrus clementina
  Intron number 1 from transcript clementine0.9_036055m (loc us clementine0.9_036055m.g) derived from phytozome v7.0 (c hr-ID scaffold_77; pos 1109061 to 1109575 reverse strand)
gatattgtcaagtccattctcctttgcaactcctcgtaagaagttgatttacacttgcatgtgctacgtactattcattcttctttttccccattaaagatatgtttattcccaaaaataaaaaatgtgtgattttgcttttatcatgcataattgaatgtgacattcaactaccatatatatatatatagtgtgtgtgtgtgcgcgcgcgctcgcacacatgagtttttacttttgtaaactctatggtacaagaggagctttgattaggaaaggaggacagatgactcttaatcaggggtgacctaacaagccttacccctccgaaacgagctaatatggacgcatttattgtgcttaactactaataaccttgatagttggggaaatatattatttttacttaaaatgtttctatttcaattgtcaagattttatgtatttgagctagcacagtataattatttctctaataataaatttatttaacatataggtggacgaagacattgagc

SEQ ID NO: 89744 - DNA, 796 bp, Citrus clementina
  Intron number 1 from transcript clementine0.9_029053m (loc us clementine0.9_029053m.g) derived from phytozome v7.0 (c hr-ID scaffold_118; pos 47902 to 48697 reverse strand)
tgacttccttcgctgctaaagagataatacaacaggtgatcgaagttacaccccccatattataaatacttctaatgattttaattggttttgtttttatcggaaacattaactttgctttattttatttatttaggcattttaaattttaaaatttgaattgaattcaattaaaatgtgatgtagctagtaaccactttttttatttcatttatattctcaataactacccatattttggtaacttactgtaacccccgtatctaagaaatgattaaaacccacaattttaactccacataaatattccatgttgagctaagtttttgcataacattcaagtttgttaaatagtcattaatttaatgtttagtaaaaacttatctctgaaaattttcataattttcttacattctttgagtttggtgagtgacttcatataatttcttttcaatttaaattttaatttggtttctgatatagtctctttactgaatttatatcttttatgattcttggattttgggctccaactttttaggatttgatagtcacattttatggcatgcttagattgattttcatgatttgagtactcgttaagtgactgagaatttgacaaaagtttgaaaggaaatccgtttcacgattcttatgtggaaggttcgtaaaatcatgaaatttggataggattcgctagcaatatgtacaagactcttcatgaagtttcataatttttcgttcggtctggggtggtacaggtgaaacttgtggttggtgttaaagaagaagtgaa

SEQ ID NO: 89745 - DNA, 955 bp, Citrus clementina
  Intron number 1 from transcript clementine0.9_030456m (loc us clementine0.9_030456m.g) derived from phytozome v7.0 (c hr-ID scaffold_74; pos 924051 to 925005)
accacaaaattcttggatcacttccaccgtttcacgtgaatagtaccgtatacgtgaatagtattgtatatgtgtacagtaccgtatatgtgaatagtaccccttacgtgaacagttcctgactctaaaaaatacaaccaatagctctgataccactgttaggattggagggtgaagtaagaccgcagctaaaatgaaattagaaggaaaataaagaacaagtacaatagaggacaccaaaaattacgtggttcggcttttagcctacatccacgggcgaagacagaaggaaatattttactagtgaaaaagagttacaagtattgtagtattttagctcacttcccaaaaaccccaatacacccaaactctctcaatcactgtaacaagaacttataaatgcaagctcttgaactctctctcaactccctaaattgctttctaaatggaatgcatttgcccattctcttcgtttctatttatagagaaagctttggcactattcatcaattctatattattttttaccttctttttcttctttcaaatgttaaagccgtgtgcttctttttctttcaaacttgctgcaaaattcttcgtcttctttgaacaaaattgttgttgatcatctagatggctgctttagaccatctaaatggccactttatttgacagcatcttatggaggaagtaaattttaatattattaagttacttacatcttttgattaatgtcgtgtcatttattgcatcattttattcattttgatctcgtttgaccaaaatattgattacgccaatattattttgatacaaatttattttgcattccaattaatgaatactttcagcaatcgtaaaactaagaaataataaatatatttaagataattacgttttaaaaaataaccatcttacagtgctttgggagtagttgcgtcgtccgccccaatta

SEQ ID NO: 89746 - DNA, 677 bp, Citrus clementina
  Intron number 1 from transcript clementine0.9_001059m (loc us clementine0.9_001059m.g) derived from phytozome v7.0 (c hr-ID scaffold_72; pos 358343 to 359019)
atagaagttcagagctttgattaggagacgctgaggtgatcttttatttcgttgattttcaattgaatttggattttagttttttttttttcaattaatggaatttgctttatggggttgaatgcatgtgttatacttattggtagtatcatctattgctttgtttggttgctgagaaactgtgggaaagttgaaaaagaaacagtagtattgttgttaaatatttacattttatcgaaattttggaaaaagagaatattttaatcaatttgtgctaataaaactcttgaacttgttgacttgatgaattaaaatataaatgaaaaaaaatcgttctaaatgcagataattgcatcaatattgtgttactgcaatgaatttatggtcgataacatgcaaatcttagaacacttgactacatgatgcaaacttatgatatatttgtatttgtattgcagtcaaatgtgctagttttaatattactagctgagcttgatttttcagaaaatgttactcttgtccttttttcttcttaattgtttgcctccctctatcgatttatggaacatttctataattagcattaacatttactcagcataacaaaaagctaaacaatcaattgtttgttatttctcatagtttatactgagttgtcaaggataaaagttgcgatc

SEQ ID NO: 89747 - DNA, 158 bp, Citrus clementina
  Intron number 3 from transcript clementine0.9_023008m (loc us clementine0.9_022124m.g) derived from phytozome v7.0 (c hr-ID scaffold_47; pos 448998 to 449155)
gtgtcagtcgagttacagttaaaaagagcaaaaatgtcagtttttgaattattaactaactttttgtgtcctgttgctttggttcaaacatctatatagcataaaaactgatgccttctttttcttttcccagattttgtttgttatctccaaaccag

SEQ ID NO: 89748 - DNA, 1009 bp, Citrus clementina
  Intron number 1 from transcript clementine0.9_029410m (loc us clementine0.9_029410m.g) derived from phytozome v7.0 (c hr-ID scaffold_25; pos 3430220 to 3431228 reverse strand)
ggcattcttgtagctctgcttggctatctgaagcggtaagtagaagcccccacaccccctcaactttttttttttttttttttctgtcaattggctttggtatatgctctttagttaatttcattccaaaatttctcaaattcaggctccatagcaaggcatgcattttatgattgatttgtttcagttggatttgcttatttcaactttcaagaatgaggttccatgtggagcttgagttgggtgaggttttaggatccacatgactcttcttgggcttgacgctataacagtatatgttgcttagaatggaatggaatgttgcattatggctattttttaagtaaatctgcaataccatttcctaaaaactttgaaaaactttgaaaaacatgcttatttttctgatcactttctaccaaaacaattttgggcaacggttcttcaagattagtgattggtttacgactttctttggttcttggtgccagacaagtaaaacaacacatttcagacagataaacttgtaagtcgtggaatctgaactgactcccaaagcaaactgcacactgcaaatggtaaattgccgatttgcttagacccaaaaactggagtcgttaaagatctttcttgcaacagcacaagcttgatgccacaatgccccataacttatttgatcccaactctgtatttattattaatctctgataaattgttatttatttatttttaacaatgctaggattgtctatgcatgcatgataatctgtttgtcttagcttaggtggagtgcatatttcttagtggctacttggaaccaggctttaataagacagttatcacaaaagagaaacataagatccaacctcaccatagtccacaactttaagatctgagctaaggcttaaagacaaggctttaattagtatatgaattatggctctggaaacagatttcagttgattaatttttatttttttaatctgtgcaggaacaggatttggggatt

SEQ ID NO: 89749 - DNA, 786 bp, Citrus clementina
  Intron number 1 from transcript clementine0.9_000640m (loc us clementine0.9_000640m.g) derived from phytozome v7.0 (c hr-ID scaffold_15; pos 165662 to 166447 reverse strand)
catttgatctgcgcttgacctcgttcaatcttcaggtgaattcaacttctatcatcgcaatttcacaactctttacttgtttttatatcttctctgtctctgactagggttttgctttcatttgcatattttttttatttttttatagattttgtttgattcactttttatttattgaacattctatgttctcttttggaaatacagtttctatacagtttggtttattttttagaagtaattttatagagaagctttaatgatagatgtggttgttatgtgatcacgtgtatggatattcaaatgtcttccccccccacccaaccaaacaattcgttgaaaatttgaagtatattgtaaaatgaaatagcatgtcttgaatgcttaaagagaaatctatgggaacagtttaaatacttgggtttaaaatttcagattagtgttactcaaaatggaaattgggaggaaaaaaaagaaaaaaatgtcttgctttcgtacgcagaatcgctccacatagctcagtggattaatgtcagtaacattatcattatgctacttctctgtagtataaattctttgttctagcccctgttttagatcaatgctccagaattgcggtttttgaaaactacttggatttgtagttcatggcacagttaatattttaatatttcatcttatgatggcaaggtataagagaattaatcaagttgggattaagctgtcttgttgcttggtattttcgttctaggattctggatccccattgggacgagtattggcagc

SEQ ID NO: 89750 - DNA, 631 bp, Citrus clementina
  Intron number 1 from transcript clementine0.9_009016m (loc us clementine0.9_008944m.g) derived from phytozome v7.0 (c hr-ID scaffold_25; pos 1481616 to 1482246)
cccagaaccgcgccaacgtccttcagcttaagctggttcgttttcctttacgattttgttacatggactttttacactggtcgagggttgtttggatctattagttttatcattttgattttttttcctaaagctttgtattatgtttggatgttttatcctgtaataattatggttttagaggttttgattcttggattcaacttttgcaattggtatcttttgtgtgttttttttagttgttttctcttctttttttaatttatttttttactccctagtgtccgatgttattagtaattctttaagcagttatttagatttgattggattgcacttatgtaatataaaaaatgttagatatttttttctctttgttagcattctcaaagtgattggcaatgtaagaaagccctttgaagctgtttgtcttagtgtttgattttactttggaaagaattatgaacttgtgatttgatgtatctttgtgagtacaaccactaacatgagcttctattgtgttctgtgatttgtatctcatttcatcattagcagatgtggttgaatatgtttttctaattttgttaattatgcagattgggcaaagccatcctaccggtttaacagccaa

SEQ ID NO: 89751 - DNA, 943 bp, Citrus clementina
  Intron number 2 from transcript clementine0.9_021192m (loc us clementine0.9_021192m.g) derived from phytozome v7.0 (c hr-ID scaffold_47; pos 605663 to 606605)
tttctccgccctctccgaccttaaccttaaacgaggtaatgggctaatttgattacgttattataaatgtgatagacacacatgtgtatccaatgaccgtgtgacgaggacatgatcattaccagcacgagtgtcactagcaccgaacacaggacatctcttttgaggtttagttttgcattctaatgattatgtattgaactgcttaggttgtaatattatagatgtagagaattactgaaccactttaaaaacaaatacttttgagtttccagatcaagtcggtgatggatgaatgtatgtaattggccattgtttttagatagcgatcatggttgtgtttcttggttagctataaattggttatggtagactgatcacacaacactgcttgttctttactcttgttcattctttgataggttgtagatgtgaatggtttcggtatcatgggatttaagcatggttgactttgttacttgaaggccgttgacggttgattgtatgaaatttcgctggtagctagccacttggttgtataatatgttttgaaattgcatacaaattttcttgttgcaaacatttcaaaaatgaacaaagagggtaggtgttttctttgctgaagagcttttttaactgtgtttgaagcttcatgttttttcttcagcaccaaaggcatctctgttttctgtttaaaatgtaatcttgatgcatcatccctgagaaaaaaccaatttctgataagaaatgttgttgcaacttttgcatagcgtttactcttttgtccttgatatccagtttcctttttctcctcatatgttattgtttaatatatttgttgagcattgaatgattctgaaatgggataagttaaaaagaaacgaagaaaagggaagggaagccgattggttaattgtagtgcatcttctcaattcaggctgcc

SEQ ID NO: 89752 - DNA, 704 bp, Citrus clementina
  Intron number 1 from transcript clementine0.9_003367m (loc us clementine0.9_003367m.g) derived from phytozome v7.0 (c hr-ID scaffold_15; pos 709891 to 710594)
tttactttcttgcttctcctttaacctgcaaaaaggtccctcttttttttttctctctctctctctctttagggttttttcttttaggatcaaaatttgatagcatgattatgagatcttgcctttaattgtttttctaattaggtttttcggattcactattattttaataattaaattctgcctccgtgatgtcaattcagtttcagtaagattgtggatattgttagggtttcttgcaaagctgtgaattgtgaccgacagagactgatttgagttgctttaattgtgaatctaatgttacaaatgtattggcaaaatattgttgctgtgttgattccaccagtcccaattgtgttggggaaagataagttatctttctagacattttcattaatgttgtgcgaaagtgtccaaaatggtagcttgtttggttcacatagtgatctccttgtcaacacttctttgcatgacacgggtttatcagtttgtaaaaaaatgattaatgaagttgatatatcctgacattagaaataaatgcttaatatattcttaatgagttattgatgtgttacttgttgtcaagatgctttttgtcccttgatgttgtgttgctgctagttgtttggttaactagttgtaatggttgttgaattgtgtcattgatacctttgattttgtttgtaatgtcaacaggggagtga

SEQ ID NO: 89753 - DNA, 962 bp, Citrus clementina
  Intron number 1 from transcript clementine0.9_023094m (loc us clementine0.9_023110m.g) derived from phytozome v7.0 (c hr-ID scaffold_47; pos 1120246 to 1121207)
ggttttctcgattctattctcaattggctccgcaggtactaattttttttttttggttcttccacgtttttaccgttatttcgtgattttagcctagtgcttactgagttcaattttatcgttatttcgtggttttagtttatcgcttgtattttaaattattttaggccttgggctcgctttcttgaacaataaaatttggcaaaagaagaaaaacaaaaaagtttagaatttgaatacaatttaattctggttaggagtttggtgttcggaatttggttaattcatcagattgtatgtttgaaaatggagctgcatggtaactggaagaacttgtaggattggttacggaagtatagttggcatctgtaccacttttactagcacgtcttgttttgttggatgggtttaatttcgtagtatgcttttcttttgatttgcctttggtactattgtttgtaaattaatatctgttaccttaaagatgcacatttattatgatactctctttgatatattctcacaattggaagaccagtgatgcgaatctggttgcaaaatttgtttagttccaatttggactgaagttgttgatgttcctgaaattgtctctgtgatggttaacaattatttaattatttcagttacaattattgccttttgtctctcctggggcaaatgatgttactactaaatatgctctcgagaaaatacatgctcttttgttgagatgcttttgttagggtaaattttagattccaataactacatctgtttgtctacctttccataaaggcaatacaggaaagtcacgagtgttcataaccgattgtcatgtttactgaattaaacccttttctaaatccgtttgtttactgaatggaaagctaatttttccatatctaaacccttttctgctcctgatcatgtatttgcatatcagcttattctttaaacaggaa

SEQ ID NO: 89754 - DNA, 655 bp, Citrus clementina
  Intron number 1 from transcript clementine0.9_014590m (loc us clementine0.9_011361m.g) derived from phytozome v7.0 (c hr-ID scaffold_47; pos 1347917 to 1348571)
ccctctcattaaccaggtttgtttctttggcgtgtagatgatgtttcactcacatatacttcaattatgttctcatatatgttacttatttattaatcatcttatgaagtatgaacaatagttataatgtgtatcagatgtctgctaaacttcaagtttatgctatcgtaaaaagtaaaacacataagggcttataatacttgttttacctagtgtgtgcttgggagtggatgtagttgcaacaatagaaaatttaacaagttgagaaaatttggtacgggagctgagaaatatattttgtacaagacctgcaatattgttctctgtggagccagagcttctcaaatttacttgtattaaaagaagcacagtttctattcttgtctttgtagcggtgattatgaaatctctattcacgtttagacatcagagtgaatcaatgtacatattacaggggtgaaatgatgtgtccttgtaatggcacttattttgctaacattagacatgcttagttttgatcttctacctttcagctttgaaatatttgacatctggtcttgtaccttgtcttcaaagcgttttaactccctttttaaccctttttactattttgggcttattatccaggatacagtattttgcaagtccattttga

SEQ ID NO: 89755 - DNA, 795 bp, Citrus clementina
  Intron number 1 from transcript clementine0.9_022858m (loc us clementine0.9_022858m.g) derived from phytozome v7.0 (c hr-ID scaffold_25; pos 726284 to 727078 reverse strand)
tctacaggcacttagtcatcttggaggatctgaaggttagagctatggaactgaatatataacttgattaaattttttttttaataattacgaaacaaataactggtctgcttctgggccaattcacaatgatcttagaataagaatcaaatttgtgaattgctaacagcttctcttttgatttgacagtgagataaattcgtcattgggttcgagaatacgatttaaataagtatttattagcagctcaaatttggttctaaattacaaaacgaatatgcatctactttaaacattttttgctttaaattaactgagcacggtgcccagttgagttatgttctatactctgtctcatttatttagcaaagggatttttcctggtctttctttagtcttttgattgtttatattaaaattatttgctttgggtgatgtttaaagcttctgaagtcttaaaataaagtatatataaaagggcaatgactgtcttagtgcctgtgaaggttgcaccacaaaaggaagagaaaacgaataagcatatgtatattagaagcctcaatttattctcaaacttccaggaatcattcgtcttttctcccagaatacttgggacattgtaactttccaaaagtttcacaaatcaattctatactaagtatccatcatttccgctctttttggcttggtttttcttgattctcttttcacctcctctttgaatagtttgtatctctgagactacgtgctttgttctgttgtgcagtggcaactcctaagctgataaagaaaatc

SEQ ID NO: 89756 - DNA, 922 bp, Citrus clementina
  Intron number 2 from transcript clementine0.9_014154m (loc us clementine0.9_012611m.g) derived from phytozome v7.0 (c hr-ID scaffold_47; pos 1447600 to 1448521)
aagaggaacgcttggtcaaagtatcagaagaggaggtttgtttatgtaattaatacatactatgtaaaatgagttttgcctaaggattgcctatcgaatagagcgaaattgttaacatcaagccccataaaatctttaaagcttgtgtcatactagatgtaattgtcctgagcttcactctgccacaattaagtggcaagagtccaattctaataggcaagtgcaaaaccttcaccgttctatgactcttcatggttttcaaattttgtttgcagggattagatatgcaatgaaaaaactttaggttcggttataacattaatgatgggagaatactaatctccttgagttaattttcttcatgtactatctagttgaggcacttttgagaattaagtgacgtgacctcaatttggcagacaagttttgttcccacttgttgttttactcatatttcttaagacagacgggagtcttagtcaacctggaattgtctctaaataacataagttgtaattattcatattgacatttttgtctcttgttatattttgaaatgtgatttagcttaaggtagggtattatggataaatgacatgcttcaagacttaaagaagagctgtaatacttttatcagttgagctaaggtcagctgaaactgaaacaaagtgatatcacatttttataatttggcttgtcttggctctagcttcttattggcttggaatacgttcagggaaattaatcactaatctatcacatcattagtcagatcttggtccaattcccatccagtgttcatagatgttgttcatatatcctatgttaattgtttcttaattttgattatttgttccataattcaattttgtttctgtgttcttttcataaactttaaggaagcaagatatactcaagcagt

SEQ ID NO: 89757 - DNA, 1009 bp, Citrus clementina
  Intron number 1 from transcript clementine0.9_002921m (loc us clementine0.9_002924m.g) derived from phytozome v7.0 (c hr-ID scaffold_18; pos 3263294 to 3264302 reverse strand)
tcagaattagcagctgactcttgagcttcaagcaggtttgtttcttctaatttgattaaattatatttctattttcaaaacatagtcaatttgtttttttcaattggttaaaagaaagaaaattagaggattatgttttcgtcactcgagcgtatgctaaaatgcgccagtttcatgttgtcatgaatcaggagttgaaaagctgtagaaatttggtaggagaagtagataacatgcgagtaaaatgcggtgtttttatttatttatttacttgcttttattaagcttgagaggatacctaaaatgcccttgctcaatgtactacattatttacccttcattcaagtttggtgttacagtcaactgtttatggagtatggacgatacataatgagtgaaaattctcttctactttataattcatggttgggggatctgagaattcttagtgggctttaaggtcaaacattaactgataagtgatgacactgatgctgttctagccgcagcatgagaagaatgtgagagatagaataagcttaggacggtcggaagttgcgctctgtttggtatttttatttagcgacggctttaatgtttttgatgaacacttacaactgtagtttgaaagtaaaggtgatttatcccatagtttgatgaaaaagtgatgttacctctactagtttctgtcaaaattattaacagtacttgtggcttttaatctgtagcacaacacggtaccaaacagagccttactggtcactatcaatctgctgagataccctgataaagaaatgaattttgtgaaagaatagtcatttgattaaagtcctgcagttccagaaaattgttaatatttaaacaagtaaaactaagttcctctgccttttaataaccactatcatgtagttggatgttcagttaagtttctctgcctttgagtaactactatcatgtagtttaatgtttattttgttttatatccttttccaggtctattttttgagaa

SEQ ID NO: 89758 - DNA, 807 bp, Citrus clementina; identical to SEQ ID NO: 79594
  Intron number 2 from transcript clementine0.9_010506m (loc us clementine0.9_010487m.g) derived from phytozome v7.0 (c hr-ID scaffold_128; pos 68746 to 69552 reverse strand)

SEQ ID NO: 89759 - DNA, 940 bp, Citrus clementina
  Intron number 1 from transcript clementine0.9_001175m (loc us clementine0.9_001060m.g) derived from phytozome v7.0 (c hr-ID scaffold_18; pos 3014599 to 3015538)
atttcagacagcggttttccgatagcggtttcgaggtaataatggtggttttggggtttattcatccttatcacgacgtattactcgtttgatgaatgtgattctctttattgatgtttgtttatctcccgttatggatctggcctgctagggttttagtttatgttgttgttagcgattgtggactgtttcgtccggatctattttgtttggtacttatttgctgaatgacttgtattagtattattgtcttcgtttttactctcctgttgctactttttgtgtgttatgtacttttgctggagatcgttagatcttctccgtttgtgtttattctgaattttgattctatgttttcaatctgtgggtcagtctcttggttctgaggcaagtgctttaattttttcttcagttattaatatatgactggatatttttgaaactctttacttcaaatttttcttacatattttattgagaattcattattcagtgttgtggtgaagaaatgttcatgtttgtaatttttgttttaaagcgcataaattaactaatgttgttttcatatatttttcctttcatgttgccttttgcgtaagtgagcgcacttgtgatatacactattaatgtttcagtcctatttcctgcagtagttggtactacatctctttttctcttcttttacactgttgatggctaagatatattgcttctgtgactatgaatgttcatagtttttggtagatgacttaattagctcagtctttttacatgcaatgaaatgtcagggtgcagtttctgtctttgttgcctaatgttttcatgatcttaatttttctttttcattgttttatttggtaatcttttgtgttggattttatgacttccttgtggtattctatcatagttgattatttttttgttgcatccaggtatcatt

SEQ ID NO: 89760 - DNA, 558 bp, Citrus clementina
  Intron number 1 from transcript clementine0.9_022209m (loc us clementine0.9_021644m.g) derived from phytozome v7.0 (c hr-ID scaffold_25; pos 2227000 to 2227557 reverse strand)
tgacctgaaggtgagttcttcacttttcctctctttctttctatttgatatatatatatattattgcggcctagtacttgtttttggcacttggttatttgaatcaaggttcacgaactagcaccgttctatgattataaggtaaagaaaattattcaagcaactttcttttgtactaagaattgctagattccgttgcacgtgtgctttattcaaaattacatgcattatgtttaacattcggacgattgcgaagaagaaaagtcctactgtccggtgttattgtctccgaattcctgaagatctatctacactgtttgttcctgtcacaaacaaaaaaaatcttgccatgaaatgttgttttctgaaagtgtttgtgttattgggcagtgatagtcatatgtaaagttactgcttaactagtgaatatatatcatagcatggttttaaattattctttgtaaaagccttagggagaatgttttcccattatctagattgtatgtggttgtctaaaaagaattatatgtgagttgtcgattggagttgcaggagcat

SEQ ID NO: 89761 - DNA, 488 bp, Citrus clementina
  Intron number 1 from transcript clementine0.9_019961m (loc us clementine0.9_019961m.g) derived from phytozome v7.0 (c hr-ID scaffold_25; pos 3494080 to 3494567 reverse strand)
catttcgagttttcgacatcgttttccgtcattttgtaagattttatgattcttttatgatcctgttgctatttatctatttatttacttccttcaatcatcaaattgtttgtttcctaacttgctttcttatcccctttacccttctcttccgtttactcagtttactgaaaaataataaatgacaatttaattcgcatgacttttgttattgaatgctactgatttcatcgttattgaatgcttcaaacataatcggcctgttgttgttgttgttgttattattattattcttattgctctctttctgggccaagcaaggccaaaaagaaaaataatgatagtaaatgtcaaaatttttcgttttttgataaaatgcgtgtgctcttttgtttttcctttaatatgttcactggctaactgaataatcctctatggaaatgattctcacaggctttttaatcaattcaatttctgtcaatctgtaa

SEQ ID NO: 89762 - DNA, 708 bp, Citrus clementina
  Intron number 1 from transcript clementine0.9_020048m (loc us clementine0.9_020046m.g) derived from phytozome v7.0 (c hr-ID scaffold_74; pos 1209670 to 1210377 reverse strand)
gtccgttcgggttcgccagctccagcggcctctaagtaatgttagcaacctttttcttttttctatttcatttaaatataaaacaagcgtgtgtttagaaataaaagtgattctgagtatcaagtattttgtaagtgaagaagctcatttctttagcagctggaagcgtgttatatggtgtgttttaattgttttcgcattgcgaaatcgctttcttggtcaaaaagtgagtccaaattgcatcttgcgtatgggttttgtagtgtttaactgaaatgtctacaagtgctttagtgcttttgctaaatgctttttctacaaacaaaagcatttgaagtggtttctaaaagcacttgttaggtactttttctaaaaacattttcaagtgccttaatgcaaggcattttttgcggataacgcacctttagtaatagagtaacggtttaagtgttctgcagaaaagtatctacaaaaagatcccacatacgacaatcacaaactcaattgtcaatatttcatatagagagtttgaacgtatattattattctttatctaattcagctaaactctacaaattacacacaatatgcagttttggagaaactactttggtggtgtcaaaagcacttccaattacactctttaatatttatgcttgaaaatttgaatttttgaatatatacatgtaacgtgttgcagttgaatat

SEQ ID NO: 89763 - DNA, 831 bp, Citrus clementina
  Intron number 1 from transcript clementine0.9_033136m (loc us clementine0.9_033136m.g) derived from phytozome v7.0 (c hr-ID scaffold_118; pos 83571 to 84401 reverse strand)
tgatttccttcgctgctgaagagataaaacaacaggtgatcgaagttacacccctcatattacaaatacttccaatgattttaataaattttgtttttatcaaaaacattatatatttttgctttattttatttatctggtaattttagattttgaaatttgaattgaatttaattaaaaggtgatgtagttagtaaccacttatttttattttatttcatttatattctcaataactactcatattttggtaacttactataactttcatatctaagaaatgatcaaaacccacaattttaactcagcacgaatattcaacgttgagtcattaattctaaactcagcactgaatcccatagctattacttagactctatgaaaaatttcatagttttcttacgttctttgagtttggtaagtgatttcgtataatttcttttcaagttaaattttaatttggtttatgatatagtctctgtgccgaattgtatcttttatgattcttggattttgggcttcaactttttaggatttgatagtcatatatttatgccatgctcagattgattttcatgatttttagtagccgttaagtgacttacaatttgacgaaagtttgaaaggaaaaatgtttcaggattctgttttaatttaccttttagtagaaataggatgcttataacttaatgtggatggttcgtaaaatcatgaaatttggataggattcactagaaatatgtacaagactctccataaagtttcataatttttcattcggtatggggtggtacaggtgaaacttgtggttggtgttgaaaaagaagtgaa

SEQ ID NO: 89764 - DNA, 742 bp, Citrus clementina
  Intron number 2 from transcript clementine0.9_003657m (loc us clementine0.9_003657m.g) derived from phytozome v7.0 (c hr-ID scaffold_15; pos 4574942 to 4575683 reverse strand)
agcagtgtctctctctcagccaggagcagtttccggtatgttgtgtatttaactgatacttgtcctctgctaactataaaatttctttgatttctatgtaaattacatgaaggataatgattgtagcatgcttgtgaagtcacaagcaaaagcatatgattatattagttgttaagtaacagagtccgaaaataatattatctaggcgtcttttagcattaactagggaagtagggttcggattttcttggtgttttaaaagtatatgcagtttatctcttccatgcttagaaagaatgattttatgtaaagtagcatttccaaaatgacctgctgcatgaatatatcatatatgcatgtaagtctatatatatgtacattgctttttttttttttctccagttgtggaacctaattctcgtctctgtacagttgaatgaattaatcccttgatttagactttgtttctctgctaattcactttcattccattaattaaaagacattgacaatacaaaagctgaagatattttccaccttaaaatgagggttaaactgtctcacaaagaattcaactactattatttacctaaaaaattgcgactttcaattccctgttgtacttgttccgttccctcctgcatttttctaaaataggggataaaattttgttccatattggcactcatgctgttgctaaaatgtttaaaaggtggggttgaaaggaattgctttacttctt

SEQ ID NO: 89765 - DNA, 860 bp, Citrus clementina
  Intron number 1 from transcript clementine0.9_004030m (loc us clementine0.9_004030m.g) derived from phytozome v7.0 (c hr-ID scaffold_74; pos 872671 to 873530)
agtgcactttgagtaacaatttctcattcacttgaggatcattttgattgtatagataacattccgaagtactcatagaggaatatgcgaaacaatttctgaattttcacttataccaaaaaggtctcattcaaaatcatgcctcaagtagctacttgcgcattatttttctaacactttcttttttctttttttttaaatttggttgcgtgcagaaaaattgagcggtaattaaaatttcatcttctttcatttatgatgtttagggttaaaaaaaaaaaatgttagttagcccatgagctatggtatgtatgttacaaaagatatgattagtcttgtttattttcctatttgagccattatttataacaattcttttctttgaacttttttccttttcttattttgggtaatacttaatatcttatactactaataatgctattaattatttctactattgtccatattatctcatgtttctgcaaagttgttcaaatagatctacacctcacaaatacaagccgataaggttatatctccatgattgaatccatccagagaagacattgactcacactatttgaaaacgcgtattggaagttaacactgggagcttgcaaaacaattgattcttatataaacgctttgctgagaatcaaatgtagctcaatcaacagaaaaccaccataaacatggcatcagcgtcctctgtttcgagactggtggtcattataattttaataaatgttggtgctataagtgatacgacaatatctgtaacgacatcagctgcaggattgttgtcgtcacccatactgttagaaagggaagctttacttgctaccggctggtgggtc

SEQ ID NO: 89766 - DNA, 872 bp, Citrus clementina
  Intron number 1 from transcript clementine0.9_010956m (loc us clementine0.9_010956m.g) derived from phytozome v7.0 (c hr-ID scaffold_15; pos 2892731 to 2893602)
ctgctgctgctgctgcggcggactcttctgtgaaggtaattatgcacgtgcccatatgacggggacaaaaaaataaataaataaaaaccttttgaggttgttcttcttcaatattgtatgcggctgggcaaagttgaaaacttctaaatggtaacttaagtgaagtttggagcttcagattgataatgaggtcacgttttttatgatggatgttttattttgacctacatgcactgggtttgatgatccaaacgctgtggggttgttattcaattaaatttgtgtttgatgggtttagaagaaatctgggtttgcttgtgtattattttcttgtacgagtcttttgctgtaatgggcataggttggtaccttaatatctaatgaacagctgctaagctgagttgagacttttttggatttgattttgcccgtgtttggaatcattttagttgccatggatgtaatcattgctgaaagcttttgttgaattttttttttttatcattattcagtggaacagtggtcagtaatactgcctttcatttaattgtttctgggtttaagaattatgaattgtcttctctatgtccacttatgttattacagttggttgggtgaaggattcaatctgcccttgattaactgtagccctgttaggtgaaagatttgtttcatttaaaaaaactgggagataaggctgtgtctgtcggtacagtatttggtttttgaaggagattagctgtgcgagtaaattatgaggaaaccaaagaattctctaaaataatgaccttggtgagaggctagtgatgctgaactttatttctattttgctttcaggactccggtaatatttcactgagtaagacaaggtg

SEQ ID NO: 89767 - DNA, 263 bp, Citrus clementina; identical to SEQ ID NO: 83362
  Intron number 1 from transcript clementine0.9_019504m (loc us clementine0.9_019504m.g) derived from phytozome v7.0 (c hr-ID scaffold_77; pos 807277 to 807539)

SEQ ID NO: 89768 - DNA, 425 bp, Citrus clementina
  Intron number 2 from transcript clementine0.9_011300m (loc us clementine0.9_011300m.g) derived from phytozome v7.0 (c hr-ID scaffold_25; pos 3347019 to 3347443 reverse strand)
gcaggtatttatttttaattcactctttcaattcttatccaagagtccaatttttggcatccgaaaaagaactgaagccaattaagacaacaaacaaaaggggcgagtgctggtgactggtgttgtcggctacctacttagcttcaatcataaacctccttttgcgttgattaaagtttaaggccgataattgacgagatgtgttcataagattaattatcttcaaggaatctcaccaaactttcaagaatatgtatgtgctggcttttattgataagattttcaaatttgaataaagagattttgtcagtaaacaagatattttcattaatgtcattaggaccaatgctaatgccaattgttttcatttaaatttgattacttttacagtcagaggtgaactttctaggaagactttctcatcc

SEQ ID NO: 89769 - DNA, 782 bp, Citrus clementina
  Intron number 1 from transcript clementine0.9_008165m (loc us clementine0.9_008165m.g) derived from phytozome v7.0 (c hr-ID scaffold_132; pos 87443 to 88224 reverse strand)
agcgggaggtcaaggcaaattttagtgagtttcaagtgagtggttctctctgattatgggtgatatttttgtttggaattgctaattgcttatattgaaattcgaagaaaaggggaattgaatatagtttgacggttggtgtttgactttggcattgattgacttagtttaatttagtgcttctgtcactcagtagtttgatgattaagattaaattttactttgataacagataggatttatatctgactcctgatgtgtagttaattgctgtaataagtagtcttttcccatcttgctagctgagtaccttctaattgatctttttattgttttgtatgctatcgtgctttttgctctagaacaaactctccctccctgattttttttttaattgttttacgtggaggtggtatcttatgaattgctcttggaatcttgagtcattaatttctagacatgctaattaaacttttgtaagtattcaagaagtcaacacattttagccttccttttttccaggaaacatattgtgtatgtaaaattagagcaaaaatcgtcatccctcaattagtgctcaatgtatttttcagagtattttaaattcaccaataagttgcagaatataatttttctggtaaatttaaagttgtatgcatttattttcattcacctctgtttatttgtttcaatttgagctcagtgatactcctttcctttcctttccttacttgttatgtcttcgctttttcctctgtgcataaaggattggctggagaaaa

SEQ ID NO: 89770 - DNA, 824 bp, Citrus clementina
  Intron number 3 from transcript clementine0.9_032733m (loc us clementine0.9_032733m.g) derived from phytozome v7.0 (c hr-ID scaffold_25; pos 1585063 to 1585886 reverse strand)
ttaaactgaaagaatttttccctccgcatttcaaggtcagattttgagttgtgattttcgataattgttttgacctttactttattctgattgaatgcgaacgccaaaactgaaagaatgcaatgaacatcatgaattgttttccttactagcttatttcatgtgaatgctgtctctttagtcttatctgcttgtttgtttatcatcataaacttattctgaattttaatcagaatttgtgtttcctatctcttgtttgacagttgtgaatgcaagtctgttacttattttggctagagtaatattacgaatacaactatctatatattaactttttttttattttcacccgtccacaactttcatgttacattaattcgtaggagaagagtttattgttgtttagattgtgtatgttgtcagtatatactacaaattaaaaatgtcaccacacctacactaggagtgtaccaatatcagttggtttgcaagatgatggggaatcagtttggtaatgcagcttttctatttttggcttctcagccatctggaattatctgcatgcgtcagattctctggaagtgatattccttaattgttaatggctatcctgagcggaaaaattgggatctgctagtacgttttccctcggcatgtatattcaaactaactctagaggaatagtttatgtgcttaatgcattaagtaactggtattcatgtagtttctttctttttttatcttgaaagggatatttacctagtttcttactatgtttactgatatacttttgcagcttgacatcaaagttgctcctggatccc

SEQ ID NO: 89771 - DNA, 926 bp, Citrus clementina
  Intron number 2 from transcript clementine0.9_019399m (loc us clementine0.9_019399m.g) derived from phytozome v7.0 (c hr-ID scaffold_15; pos 2917744 to 2918669 reverse strand)
gaggttgataagctggttgagcaggtttgcacgtctcattaattctcattttatatttttaattgtttggctattcttttcgaaattacatattgtgtactggatagaaaaaagctaattgatggtgtaaaagttcaaatgcagggaaaggagctcaaattaattaattaaaaaaaacacttgtttatttataggtaattcctgtcctacaatcccctcacataaacagcaaacagtgcgtatcccatatgtataccgttcacgtgagatgagatatatagtgaaaaagtaagtacaataacttttactgaagtcatagaagcttaatgtagagtgaatgagtatcagccgttggatagggtagagtcaaatgtgggtgacagttctaccgctatgatgatcaaacagctggctttgatgtgggtgttacatcaagtcattgacgttgacgtccagacgggttctatgtcatcattggctgtagaatctagatcgcccagttgccgtcgtgtggggcttagcaagtttttaattaagcagtgagagcagaaagctccactggttctcaggtgtaattaatctttgggagcttctttaatggggtaattttaatttcgcgggaccattatctgtcttctggaatatgcagatcaacggtgctggattagtggatcccatggtcttttttatttttattttttattttccggtttagaaaagggacccatagtctcttcatagtctcttaattttgaaattcattatattgttattagattatatattgccaggcaatatattcttgagtcttgttgtcccttaatctgcttttctgtcttctttacatgccatatgattcttgatattagcatcattttccttttgctctttataacaggtttctgccattgaaaagtccatctcaa

SEQ ID NO: 89772 - DNA, 484 bp, Citrus clementina
  Intron number 1 from transcript clementine0.9_023076m (loc us clementine0.9_023076m.g) derived from phytozome v7.0 (c hr-ID scaffold_47; pos 1035511 to 1035994)
ttcccaacttcagagcatataacagccagcaacaggtatctccctctctctctttccataaacatacacctattaataagttatttgaaaagttcaaatgggttttggtctgcctattgaattgataaaagcaattctttctatctgtttcatttctccagaaaacttgtctcttttctgggcagataaatgtcgaatttttctgtgaattcaagttcatccttcacggcggaattgtatttgttttttgaagtcgctcattatgaaatccataacatcagcatacatcaattaggtgaagttgtattattgtccaattattgctattagataattacctcggatttggcagttaatttccaattttgttttctgtatgacaaccagatgttcttctgcaataactcttagtatcattctctttggcacatgctttctgcaagatgaatattctcattgataagtgtttcttttttcagctcag

SEQ ID NO: 89773 - DNA, 560 bp, Citrus clementina
  Intron number 1 from transcript clementine0.9_016689m (loc us clementine0.9_015513m.g) derived from phytozome v7.0 (c hr-ID scaffold_15; pos 2295727 to 2296286)
aggaagctcaaaaggttccattcgttgctgataaggtatctgcaaaccaagcccatgttttattttgttttattttactctttattttatgaaatgggtttttttttttctgttcttgaagaattagttataattagcattagggtgataattgtttcttgtgtcagcattcgtaaccttaaaccatcagacttgttacattgaattgaatgtcaaacttgtgaagagtgtatatagttaattttgggatgttaaatgttgtattacaaaagttcaaccgtgtaatgttagagtagaatatatatctgcttgtgtttgatttcggtttgatgatgatgttgttcaagaagttgtgtatgaatctcatgcattcttagcggtgatttatcacaggaaccactgtctgcattagcatctgaatatcaatccggcagcccaattttgttggagaaaattaaggttgtcagtttgtttgttttacgggttcattggttctgataattgtgatcctttgaagttaattaattattgttgcattttgcaggttcttggtgagcagt

SEQ ID NO: 89774 - DNA, 841 bp, Citrus clementina
  Intron number 3 from transcript clementine0.9_015972m (loc us clementine0.9_015972m.g) derived from phytozome v7.0 (c hr-ID scaffold_18; pos 3776353 to 3777193 reverse strand)
agaaaaaccatttgatttctttcgaattttgtttggtatgtccagtttatgtgtaagtttattgtgatggatgtaaatgcttcaaatattgtatggttgacattgttcatggacctccggtgtaaaatggacttatgtaaatccaagtgctaactgagaagaactttatttagtgctgctagcatacacatctaccttctctcccactctctctctacccacaacccctgctctctccccaggcactcatatatttgatttttttgtcagattgttatgctaagatgttctggttatagaggtttgagttgtcaagtctatatatgtttgtttacttattatccatgtggaagagtaagtaacctgacttgcttcaatgcatgggaagcatttcttgaattacgtggagggcagcattcaaatttttcaacagcaaatcgggttccttttatgcttgactggctagaaatttttagtggcaagttttgcgaaatcttttttatatcaagagagctttctcctcttggttcaattggtccttaattgtgcatcagaaaattcagtaattaactgtatgtttatcaattctgaacttgtatataactaaagcatgtttctatgatggccatgttcaaatgcaacaaagagttcgtgaaggaaagaaaactctgtattctttttctgtaatcaataaattttgggagacaatgtgtacagagtttataatgcctttgttccactaaatgtgagaaaagttagtcatttgtcattttcatgtacacttattaatgtgaccagttttgcagagggtgttatcgcaggaggtacagctggtgttgtg

SEQ ID NO: 89775 - DNA, 593 bp, Citrus clementina
  Intron number 2 from transcript clementine0.9_015972m (loc us clementine0.9_015972m.g) derived from phytozome v7.0 (c hr-ID scaffold_18; pos 3777267 to 3777859 reverse strand)
caaaaacctcttcaggtaaccatttttacttatgtttatagttaaaaattttgttgattaattccagtaactttgaattttaatttgatttcgataagttcaagatatttgaacaatgtgcagaaattaaccatcctcttattagtaaaaaagatttattttttgttagcttctaattctagtttgttttatagagcaaaagtggtgaaatttcaagatatggtattgtttagctctcatattgcttctcgtgttgctttcttttttttttttctttttttttttgtttcctgagaattttgtgttcaagctgatcactgcatttaacttgcattggtattgatttgttgtggtaaacagtaaaacatggtgaaatccttctagcatttcgagaatgagattcctttttgtgaaggatacgagacaatttacttacattaactcagtacttataaatttgtgttattttgctgcatatgttattcagagtgttttttcttcttttttgggtagtcaatttcattacttcattgtaaattttctcttatttgtttctcatggaaataatttgaacagatggtctgtttttgcag

SEQ ID NO: 89776 - DNA, 484 bp, Citrus clementina; identical to SEQ ID NO: 80900
  Intron number 3 from transcript clementine0.9_025521m (loc us clementine0.9_021578m.g) derived from phytozome v7.0 (c hr-ID scaffold_117; pos 349765 to 350248)

SEQ ID NO: 89777 - DNA, 565 bp, Citrus clementina; identical to SEQ ID NO: 82766
  Intron number 1 from transcript clementine0.9_017373m (loc us clementine0.9_017373m.g) derived from phytozome v7.0 (c hr-ID scaffold_15; pos 673500 to 674064 reverse strand)

SEQ ID NO: 89778 - DNA, 552 bp, Citrus clementina
  Intron number 1 from transcript clementine0.9_012469m (loc us clementine0.9_012469m.g) derived from phytozome v7.0 (c hr-ID scaffold_128; pos 186197 to 186748 reverse strand)
gactgattttgcttttacttccaacaacaggtcagtttatgatcctgggttgtgcctttttttactggttttttggactttttttgggtgatccatgtgatttttatggtcaccgatacagtacaatttagaaaatttaattttgtgttttctttaagggatcaagatccaagccaaaccatggtttaattttcgcttcattgatattttggatgcatttgattttagttatacatgatataaatcattagtttgtcttcttagaaagcgttgcaggggtttacttttgacagtatatttgatatcgttcaagaaaacttatttagtgtcaatctgattcttgaaaattaagtttatcttaatacaattaagcttcaagtttcttggtctgccgaacggtgaattgagctattaattaagttcacatgtaacttggcaccatctgatttaattcctcaagtgaagagtgggttgaatttagctatgtaactgtccttgtttcttctaaaccatctgatttccattgacaattctgagatacaggtcggaact

SEQ ID NO: 89779 - DNA, 755 bp, Citrus clementina
  Intron number 3 from transcript clementine0.9_010246m (loc us clementine0.9_010246m.g) derived from phytozome v7.0 (c hr-ID scaffold_47; pos 497823 to 498577)
gtcactccattaaaccccttcttcatcctgatcatgtatcttcttctcccttttaaatttcgtagcagtatttttattggcataatgaatggtaattgtgttttttgagactcctttattgaatcgtcgagtgcattgatgtattgtggatggattctaattgaaggcattataggacttgtaatcgtacttggggttttcatatgtgtgttttactcttttaattcatcaacgaaaaaactgaacttttgaattagtgaactctatgtcagtggcttagaatttaacccacccagttgaaaaatgacaaacttgctaatgaggtttatctgttatagtccactttgccattggcaggtattggattcttttaaatcattgcaatttgggtttatggtgaacattttaacatttttaatttttaaagttacaagtacaactgtgtcaaaaagttgattgtcctgctatctgttgatcccaaattttgttttcttgcccttattcccacattttgtgtcatgtaatgcatttcaattaaatgatctattttttgtttctcaatagtttcttattggcttataactgtgatcgagataattattacttctgatactattggagcattattcaaagtcatccttcatgtggacatggcgtttgctcaaataagagagctgagtcgtttttttggttgttttctcacaccataaggtcctataggtacacttgttaccagaggttgatcttcagggagt

SEQ ID NO: 89780 - DNA, 712 bp, Citrus clementina
  Intron number 1 from transcript clementine0.9_002272m (loc us clementine0.9_002272m.g) derived from phytozome v7.0 (c hr-ID scaffold_25; pos 1879159 to 1879870)
ctgagagattacgaaaggcttccaagaatttgattgtaagtacatttttcttgattttttttgtttttcttctattttttaataaatcttgttcttccgattgacttgattagtagttttgtatgaaaaaggaaacctattggcatgaaagttaactgtgcagataacccagttgcagcagatttagaatttgacgtaacgcatatttaaaatttactttctttcttttttaacatcagaattgagctacttatgacagaatcaaagaaatgaagtcatttatgttgttattctgtattgaatcagacttacattgaattcctgctaggtgtttctgcttagctcatagccaccaattctccaagttagtacttcccttgttatttctggatgctgatgccggggaaggaaccaggaaatttttttgattaagagcattaactgacgtttaaatttataaatgattactgttgtatattctgagattagaaataattcacatcctacccgttttaattcatagttaacaagagttcaacccaagaatattttctatatgtttcctgtagtctttttatcatatgaattgctaatggaatttcctcgcaagtgatggtacttacattctagcaactcatttctattttagccctcggcttaatgttcaatattttcagcttttcccttgcttcatatttgtgggggagaaagt

SEQ ID NO: 89781 - DNA, 799 bp, Citrus clementina
  Intron number 1 from transcript clementine0.9_000358m (loc us clementine0.9_000358m.g) derived from phytozome v7.0 (c hr-ID scaffold_25; pos 1780639 to 1781437)
aagcttggtacattttatttatttcatttattttattttattctattctattaaaaaatagccttttttttttctttggtttaccgaaatgaagacatttttctttaaaaaaaaaaaatatttctttagttatttaatttgttttatttgtaggatagattgatagttaatgagcggcctaatgcatgaacttgtagaagtgtttatgtctctgagaatgataatacaagttttatttattttttaaaagtcttgcataaattatatgtggtggtttttatttgtgagtcaggaaacaaaggagtgacattttgagctgagttggctgcttcttgcctgtaacgcagcttgtttttttacagtatttcagtttgagtaaattttaagctctcctggatcacagaatctgctacaaccacatgcgtggtttcttatgttaggaaaattgggccagtttgggaatttttttttaatttttattttttgactgaaatgatcaggttttctccaacagaaagggtagaaatataggatcacttggttttctatcacaaatttatgctttgtctaggcggtgctagtgtatgtgaatatgacctttagttcaaggactttgaagcaattattggcttttttaatttacttggcatctgtatttgttgcgtggatgctgtctttttaattcaagttagaaagaatgcatattaattgattttatacctcttggggcagcagcattgatagtatttgttccacatttgtaggaccccggcagaaactgattctctgtcagaagagt

SEQ ID NO: 89782 - DNA, 250 bp, Citrus clementina
  Intron number 1 from transcript clementine0.9_025668m (loc us clementine0.9_025668m.g) derived from phytozome v7.0 (c hr-ID scaffold_149; pos 164736 to 164985 reverse strand)
ggtggctcaaacgggagctaaagttttgagcttaggtaacatttcttcacttttttatttcctttttattatggtttagttttgaatcaataattttgatttcattagtgtagctatatattcatctctgttttcaattttgtgtttcattttgaaaaagaaaataaaaggataaaattttaatttttttaataaaattatactattatctttgtttgtgaatatggcacctttgattttctcccagaat

SEQ ID NO: 89783 - DNA, 561 bp, Citrus clementina
  Intron number 1 from transcript clementine0.9_005612m (loc us clementine0.9_005612m.g) derived from phytozome v7.0 (c hr-ID scaffold_15; pos 3158390 to 3158950)
cagccatatcatatccctcttcaaaccactccttggtacgtttcactccttcatcaattgctagtattagtaaactacttttcttggtttgtatttttgtttttcattttttgtacgcgcaaatgaaattgtttcgcctgctaagcccgagttcaactactaggcttttatgtatcacgtaacaatttttttgaaagcgaagacagataccgtatgtgtagtcatgtgttaagcacccaagatcaagatcaatcgctcatttgtattaaatgtcttgtatactttttctactttttgttctaattttcgtttgggaacaaaaatcattacaattaattacatgatgaaaataatcacacacatcaggatctgtatccctatgttttctctttttattgactgatcactttgagtcaaaactcaaaagcagacctttatgctttgaattccatctgtaccaaccaattcagaacgagttaaatgttcacaaatcacttttctaatattttttcattaatatcctttgtacatatctagtgattcacacgagactactctgct

SEQ ID NO: 89784 - DNA, 688 bp, Citrus clementina
  Intron number 1 from transcript clementine0.9_017386m (loc us clementine0.9_017386m.g) derived from phytozome v7.0 (c hr-ID scaffold_95; pos 289022 to 289709)
ctgcagcaaagtcatctaaaacacgaagcatatatgctagctgttgtcatgatggaagaaaaatttagaaacttcgaaaacccactttgagaaggagataaatatagtcttcggataaaactctaattaagtggtgaaaatcaatcaaaacaagaagttacccactacttgggatacctaaaaattgtgctataaatagtgagctcttaatacatagaaggaatcagaaaatatataggaaaatagctaagtaaaaaaaaaaaaaaaactcattgtaattctcattgaatagtgaaagttgccttctattcccgtggatgtaggcctagtgctgaaccacgtacattttttgtatcgtcccatttatttaattttttaattgaccagaattcagtgtcaacactgataatattaaatctttgataacactaataatattaaatctttggtacttaactcccgcgttctcatcttgctagcaagaattcttaaaagttggattcaataaatttgtatcaagtaaatggaagtttgtttatagaagaagtgttaagacaatggaaacttaaaatttgaagtctcacttaggaatttatctttgctattaattttttttcatgattgtccaatgccattgcttaatcgatttgcagattcgagatttcaggacagactgggacctacaagt

SEQ ID NO: 89785 - DNA, 751 bp, Citrus clementina
  Intron number 3 from transcript clementine0.9_031711m (loc us clementine0.9_031711m.g) derived from phytozome v7.0 (c hr-ID scaffold_15; pos 1777005 to 1777755)
cttctgctgctgttttggtcgccatttaccttcaggtaaatagtcctagggataggcaaggattaccttgattcagttcagtttcaaattgaactgaagtgattgacttttggttaatatataaatcgagccgaaaagaaccgattggttcggtttttttttctttttcagttaatttctttgtattttgtagttttttcgttttttgattttttttttataaacatatcgatttttagtactttttagaaccgaatcaaaccaaaataaaacactgatttaattcaatttttagtagacaccagtttttttgtccatccctaataaatgcatatatattttatgatgactaataattggacctttatctaattttagtccactgtatatttaaatcgaagattattctttattctacggttgaaaatccactttccttgctcattgaaattaatcatcccccttcagttcaaaattctattaaaaaaattattaatttgcaaaccatgtttcgtgtctttaactattttatcttgaatttttttattaattgacgatgagatacaaaatgattaaaaaacactacagggggttttggtcaattttcccagtaaatatatatatttgatgacaaataattttaattcaatttttttttaaattaaggataatattctattataaattcatggtcatgcatgctcattataaataattgttacattgatagaatgaaatattatgtaggaca

SEQ ID NO: 89786 - DNA, 762 bp, Citrus clementina
  Intron number 7 from transcript clementine0.9_010922m (loc us clementine0.9_009563m.g) derived from phytozome v7.0 (c hr-ID scaffold_74; pos 1139076 to 1139837 reverse strand)
gcactggtttggtaagttcttacacattgtatcatgtcttattgttgttcctgatttttcgtcattcatcaacattgccattgttgctgccgtgttgtcatggctattatttcattactaacttatttttattttattttttttctgtttttcgatacggttgtttgctatagctgtggtacaaaaattagaaagagcgtctcttggtagatataggattaagcagtagaacttgtgttgtgtccttgcggcattaattgattgattagttacaaattaacttccatatgacagcataaaaaattgagttacctttataccatctgaaagtggctgcatatcttcttgaatgaattgtgttcatcattagctaattgacaggctggaatggtttttaaccagaagattatgcgctgaagtttgccgttagtggtcttagatggctaagttttggctccctgtcagttcacagaggaaaagaaatgtcaaatcattggagttaagaagaaaagtaaaaggataactttctgcttctctttagaagtcagaatgacttgtattacagctgaaacactttccaaaactaaagccttgtgagtgcattagatggagcttggggatagactttctctctcttatcttcctcttccttttgtattactaaacttaagtcactaattttgtatcaagttgttggtcgatagattttctgatgtttctcttttcaattgacgaaatgtatatcttatgtgattacatcag

SEQ ID NO: 89787 - DNA, 971 bp, Citrus clementina
  Intron number 1 from transcript clementine0.9_002216m (loc us clementine0.9_002216m.g) derived from phytozome v7.0 (c hr-ID scaffold_132; pos 287340 to 288310)
tttccaacggctctcagttgatcctgttgctgcaggtaccctttgttcgctttaaagagttgagctttttgttttatgttctgtaatttgtttagatgattcacgtaaccccaaaaaaaaaaaagttattttttggtgcaagttacaagtttttatgattttgctcaactttagtatttgtggtcttaattctctattctttatgtttttaatcgtaggaaaaggaatatcttgccttttcgtctgtgtaagcaattggtcatttgagtgaaatttaaattatcctgctaaaaatattatagttttgaaattagctataaaaagtaataattcttcaaagaatagagttgccctgatggatcatttattttagctgatttaagataggatggttgctttttttgatctaaataaataatttttggaaaaaaatttctttccatttgagcatttgtttgattgtttagatagatctggatggttctgagatatatattgtatagaaagaccaggtggcgggaggaaattttgtatgtgtatgtttttaaattcagtatattgcttattaaactaaacaaaaaaatgtttgtgaaatttgtgactttgaagaacatgggaaaattaaaattttggaggaaattttaaaatgggtttaaaaagaaaaaggcgtaattcagttgtttcttgggactgtatatttaattaatcaatatgaagtaagcggttgagttctaattaatgctcattatggtttctacttggtaatgaatcaaatattttcaaactttttatcccatgtttgaatctaattagtaaaagccatgtttaacctcaatatttttagaaagatttttggagatgagtgaacgatttgtataattctctttacagcattattgagttagtatctgcgttattatagatgagtttgtttcattgcttacagttatctatctgaaattgcagcaacc

SEQ ID NO: 89788 - DNA, 935 bp, Citrus clementina
  Intron number 1 from transcript clementine0.9_010011m (loc us clementine0.9_010011m.g) derived from phytozome v7.0 (c hr-ID scaffold_15; pos 3032258 to 3033192 reverse strand)
cagcctcataagcgcttctctttgacttctgctaggtacattttcttttagccttttagtttcttttgtttggttttcttatttttgtcaaaaatgatgatccgtttattatgaaagcatgaaaaaaaaatcaaaagttgcagccttttcaagttctgcataataccttttgaaagaaaaaaaaaaagaaacttttttgcatgttttgattctgggtattttgttttccaatttattttattttattttttggtttttgataaggggtgttttgttttcttgtattacagagcagtatggtattgttcttatcatgtctgctttattagctctgttaagtcatcttcagtggaaatattaattaataaacttttgtcttgtgtttcagagggcttcgttaattgggtcattgaaaatcgcatttttatatcatcccagttcttctcaaattcatacacagctcaaattttttctctttagccgcaaatttcagttatttgaaaatttcccatttgtggaataattgattgactttaccctagtttaacttcgaagatacattttattttatctcatccaaacatattttgacctttatcacgcaagacatgagaaaattttcattttctcgaggactttacgcgtgttttttcccgagaaagttgtccgttttttttcgattttctatccatctgctgaaggaaaaatagaaaaataatatttggctattaacaaaatattatcatgataaaaacaacgacattgttgtgtgttacagtaatattatagaattaacaatatccttttttttttttcttaacggtgtcttgatggtgttaaatttcagtgcttggcaaaaaaataaaaataaaaataaaaaataaaaaataaaaaccgttaacaaattgtcatctcatttgctatttacaggtttt

SEQ ID NO: 89789 - DNA, 836 bp, Citrus clementina
  Intron number 1 from transcript clementine0.9_007080m (loc us clementine0.9_007080m.g) derived from phytozome v7.0 (c hr-ID scaffold_25; pos 1120778 to 1121613)
agatactttacttgtttcgagtgagtcagagtctcgtacgctcaatttctcccttacctatcattttaaggattaccaaagctgaattttttttgctttttttttttttttttgttatttgagtattcaatggaagggtgttgataattgttttgatagaattatggggtgtcatgtgatttgcttttctattaattctaggccaccaatagtcatattatatttggaatatctgggaattgggcatttctttcaggtgatattttactctctggttggtcagtcattcaggattgccttcaattctttgattcatttgatggaagaaaacttatttttggtattttaattccaagctgatcatatggctttgataattcttttacatgttgatgcaaaatgattaatgattgaaggatgtcttgcaatctcacgtctccatgtgttcgtcttttaacctccatatcaccttcaaatattatttatttactattttctcttcatctgcatggatataccactgtagccttggttcttttctattttaggatttaggatttaaatttcagataaaaaacacttcatgttctgttttctgctctgcaatgattctgaatatggtctcccccaaattcgtctcactgattgatgtattctccttttatctgttaatgtgtgtgaacttcaaaaaatccatgatattatatgtagattttcttaaagttgtcggtgatgcagcaaatacacactggcatttctttttccctttctttggtgcctaattgagtgactttgtggcagggagaggtttgccatcctgctagcaaataatttct

SEQ ID NO: 89790 - DNA, 560 bp, Citrus clementina
  Intron number 1 from transcript clementine0.9_014377m (loc us clementine0.9_014377m.g) derived from phytozome v7.0 (c hr-ID scaffold_72; pos 1140530 to 1141089 reverse strand)
caactgcaggcagctggtcaagtagtttggttttcttgctgttgaatgattttgattcgagcttattttctcgagaaaattaaagaggtaagtgggtttgcttcaaacaactcaaattacttcaaaagtttgaattttttttttagttctgttgatcttctcattcttttttttttttttttttattctctctccatgaggagtcttcacatatatttattagctgaaatggacagaccctttacgtgttgttttaattctctctctcttcataataatctagtttggtccagtatggtctattttctgccataaaaaatatttttttgtttttattttttgaaataattttatttattttacacgaaccagattttcccaaacaaatgattgattatatgtgtaagttatgttaatttgacgtagtttttgaactttcaagttgaaattttgcatccccttttagtatttttaaagttattattattttttttattttttggggtttattgggagatggtttaaatttaatgcacaactacccttcttcacatgcagat

SEQ ID NO: 89791 - DNA, 797 bp, Citrus clementina
  Intron number 3 from transcript clementine0.9_007752m (loc us clementine0.9_004852m.g) derived from phytozome v7.0 (c hr-ID scaffold_25; pos 1679899 to 1680695 reverse strand)
tgctgcaattaatacaacttttagtcacattgaaggtatgcaactgaataacatgtttttttatccatgttgactgtagctttggctgactctagttatgttttccctttggatataactttaacactattgctaacatatccgaataatatttaatttattcaaatggaggctttctgcttgttctttttccatgaccgcacaattctgcatttggcatcatttatttatcctcttatacattttgttcgcttaccagctatttgttttcatatgttataagcagcttgctatatacaacatagtgcttaaagcataattgcgacatcaacattctacagtgaattagtttttgattatgttgtttagcttttgcaattgtattctttgttttaatgtatacaacagagaagtttatacttcatggaaattgtagaaatttaatcataaataatcagttgaatgaaatctctaattctaggtagttgtcatttctgtgggttctttttaagatttttatgactttgtttttctcagtaatttttgaagactgatgggaatattttaatactttctgctttacaatatctgaagcctggatcacataaatttatcttgaaatgaattgaatctgcttaattaatttgttttgcctcataaaagttacactctcacatttaacatcataagtttttttcatctttcagttatcaataaaaacttgcatctggtataaccctttttttaaaattaaatttacagagggtgttaggagtctattgactgataggaataag

SEQ ID NO: 89792 - DNA, 980 bp, Citrus clementina
  Intron number 1 from transcript clementine0.9_018298m (loc us clementine0.9_018326m.g) derived from phytozome v7.0 (c hr-ID scaffold_15; pos 4233450 to 4234429)
ttttgtgtaaaccgattctgtcatttgtaacttataaagttttattttttttaatatttaattctaattcctttcgattgctctattaatatttagctgtaactctatgtttcaatacttattaatcctgtaaaactggttaaacatcctttgctctgatcattcttgcaccaatgaacctctggttgctgggatgatgtttgaaaagtaaaattttcacttttcaactgtaatttgtactctgtagatgtatttttccttgggcgtttcacagaccctgaagtatgaaatatttgatttcttgcattctttagctggctgactctgaaacttggtcgtgcaaatgcagtttttcaatcaatagttcatcttacattagaaatgtcattctaggtcattggctaatattttcttcgtattaacttaattactatgccctcaaatccgcaccccaaaactcagctacctctgtccacactgcctcttaagagcaatgatagagccacaaactcttttaccaacttattttgttcaaattgatgttgcataactgtattggtttggatgaaaatatcctctggccttgatttatttgaattattttgtattttcactaaccaatgaaattatgccacatcagtttatacaagagtttgcggctctatcattactcttctctaaatattcggtttgtttagtaatggttttctctatggcccttaatctgtgtctgctattgtagctgtgatgtgaactgtaggcaagctaatagtatttctagaaaatctttctgcatgaattattgaaataaatgctgccatgggaaagttcccattcaactgtttctcgatgctggccagaacatagatttatggaatatgatggtgtctttcataattaatttgcttgaaaatgatgattttgtttttcctttagtactgacttatttcttatgctttgggaacagttgaaaaagcaag

SEQ ID NO: 89793 - DNA, 679 bp, Citrus clementina
  Intron number 1 from transcript clementine0.9_010774m (loc us clementine0.9_010466m.g) derived from phytozome v7.0 (c hr-ID scaffold_15; pos 423597 to 424275 reverse strand)
cacaattcaatctctcgattctaacgtcagttacagtaagattccttgatacccttttgaatacctgcccttaatttttatgaagtgattataaagtcagaaactttatatcttttgcaatacccagttttttttttttcgcttattcgtttaattctagtgtgctttcggtgttgtttcagctaattataaactgttcttcttttttctttttttctttttttgctttgtttcccagtttgtttgagtactttattgatttatctgttgtgattatggtcaaatttgtatatatccttctttgtagattatatgagcttgatgtttactcaatttctgtatctttttgagtgtggatattttttagtgaagaattgagcttctaatttgaaacttttattaatcattggcttgtgatttgttgattttgatataaccatcataatttgttgtgttgggacactggattgtggattgggattgattcaatgcaactatgtctaatttatgttgtattatttttgttagaatttgcccatttaaactttattaaagtaacttctttgaacatagttattttcaccattttggtcattctatatttgttcatggcctcttcattctcgctttttcttttctcacaggtgctatagtcgcattcacagtgaccttttaaatt

SEQ ID NO: 89794 - DNA, 814 bp, Citrus clementina
  Intron number 1 from transcript clementine0.9_001506m (loc us clementine0.9_001506m.g) derived from phytozome v7.0 (c hr-ID scaffold_118; pos 67580 to 68393 reverse strand)
tgacttccttcgctgctaaagagataatacaacaggtgatcgaagttacaccccccatagtataaatacttctaatgattttaattggttttgtttttatcgaaaacattaactttgctttattttacgcatttaggcattttaaattttgaaatttgaattgaatttaattaaaatgtgatttagttagtaaccacttttttttttcatttatattctcaataactacccatattttggtaacttactgtaacccccgtatctaagaaattatcaaaacccacaattttaactccacataaatattccatgttgagctaagttcgatgttgaggtaagttttttgcataacattcaaatttgtcaaatagtcattaatttaatgtttagtaaaaactcatctctgaaaaatttcataattttcttacattatttgagtctggtaagtgacttcatataatttcttttcaatttaaattttaatttggtttctgatatagtctctttactgaatttatatcttttatgattcttggattttgggctccaactttttaggatttgatagtcacattttatggcatgcttagattgatgttcatgatttttagtactcgttaagtgactgagaatttgacaaaagtttgaaaggaaatccgtttcacgattcttatgtggaaggttcgtaaaatcatgaaatttggataggattcattagcaatatgtacaagactgtccataaagtttcataatttttcattcggtcgggggtggtacaggtgaaacttgtggttggtgttgaagaagaagtgaa

SEQ ID NO: 89795 - DNA, 804 bp, Citrus clementina
  Intron number 1 from transcript clementine0.9_008516m (loc us clementine0.9_008516m.g) derived from phytozome v7.0 (c hr-ID scaffold_47; pos 783484 to 784287 reverse strand)
cacactcgtcctcattgtcatctactaactaagccgtgagttcttttttttttttaataaattttcttttgccatttttcatgctttggctgtgtaattttgagttctgggtttgtcttgctttcgctgcatgttacatctatacagcagaaaataattagagtatcatgaccagttcatttttcattttcttttttaaagaaaaaaatggctaatgtgggttggaaaggtgggaatctagttgacaagttggtgtttggtttgttgcttttacaagtaagaatctgttattgtagccaaaatcttcattttccgacttaattttataaaattattgcttttccttttgaggttttattggaagtctggaaggtgtcttttctttaattttctccctctttcttttagatgtgtaacaaatgtgcgcatcatctttaatttaagtttatcaagttaatatactagatatttcttttttttctttttttctttttttagagtagtaaaagtacttgatgacctttgcatgctaaatttggatgcagatttgcaggttgataaactttctcctaatgagacctccttatttacgtggtgtgaatactgaaattttgttatccactgggtgctaaaattttaaaaatgggatcatataattattgggatgtgaaattacaaattattttatatttctttcagttttgcttaattttgtgaaggtcttttgtgtttgtttgatcaatccaccatctgaggttgttgcttgtatttacttgtgatgaacagaggatctgatctgaaaca

SEQ ID NO: 89796 - DNA, 914 bp, Citrus clementina
  Intron number 1 from transcript clementine0.9_023103m (loc us clementine0.9_023103m.g) derived from phytozome v7.0 (c hr-ID scaffold_47; pos 1022024 to 1022937)
ttaataagctaccaacactgcctccatatcctcaggtaaatcataactcttctaattaactaaaaattagaacttttagcagttattgatctgagttgttttcatcttggttagttttagtttttttcccttttttctttaaattctggctacggactactgagagaaaataaaaataaaaaattgtttttaaaaaatggagaaaaattttactggtgtacatttcttggatgttaatacaaagatgactttttttatttttactctttagttttgtttgtatttcacagttttgtcttaattgagctataattcgagtactatgagaattattctcaatctttgatatgcaaaaatattagatgggcaattctacatttaaaaaattaaatttttttttttttggcttagtgacaactgacaaatgactttcaattacttagcatgtctgtctttttttttttttttgttgagattttaagagatttgttgcgaattctgggagatgccaattttatttcaattcccatttacatgttttaatccataattaagtttttccctccttctaaaaaaggattcattgaccttaaagtgcagtgtaatttagctgatgcagtgttttagatagatgtttgattggaactgtgatacagattttgcgtcagccagggaaagccttgttattcattgcttcattacttcttattttatgttcttccccttaaaatttgtattagtgaaaaaaaaaaaaagagtggttttattccagcttatttggatttattttcgcggttttagttgtgtgttcattttgtgtatacagtttctaaatcacagtttttattttcatgaacgaaaaactctcatttgtttttctattgtgattatgtttgcattttgttattacatag

SEQ ID NO: 89797 - DNA, 763 bp, Citrus clementina
  Intron number 1 from transcript clementine0.9_000999m (loc us clementine0.9_000999m.g) derived from phytozome v7.0 (c hr-ID scaffold_15; pos 1856387 to 1857149)
cggcggcggcgccggtggagagagacattgagttggtaaactaactttttaatttttttatttagttttaattttatttatttttgtgttgctctgaagttgaatttatatttgattttttttattaaaaaaagctgaatttatatttgatgaaaaaaaagtgagagagagagagagagagagagagaattgatgtttactatttaaagcttaattttatctgtgcgattgtaagtgtacaatgttggtttgaaatattaattaagttcactctttagctgattggttggtaattaacaatgtgggctcagctagtaactatcaagcaagtagcgtttggtattattaattgattcatttatggtagataatattttcaaattctctaatagttgataaaggatttgaagtcatcatgttaggtggaacttagtactagtgtctgcctttgtacacgaaacatttttccactgcttgtttcattagcagacttgtccagataagaaatgtttgatattaactccgtttttcatttttttttcccctggaattttctagtgtcatactttccgattaaggtcttcttatcgtatatatgactttagttgctgttccttttatctaaaattctgcttgctgcgttcttagcttctgttaattcaaattattggcctcctctctctctctctctctctctttttattttttatttttttcccatatcataggccatcactgcacttaaaaaaggagcacacttgct

SEQ ID NO: 89798 - DNA, 696 bp, Citrus clementina
  Intron number 1 from transcript clementine0.9_024794m (loc us clementine0.9_024779m.g) derived from phytozome v7.0 (c hr-ID scaffold_132; pos 309029 to 309724)
gcaagaagcaaaagggcaaatcgagcaacaaatcggtatgcattatgcttcttcctctcagcttttttctttctgtttttttttttttgaagttttgaagttgtaataagctattttagggatgccgttaaattcatacgatcactagacccaactatcaactaggttggttcaatgaagagatttttctttttccttcaatttaagttaggtttgtcttataattgcagaacggaaggatatggaggagcagtcagttaagggaagatttataatgacattaatcgattctgtgccctagttagtttcatctgctttgtaatgaactatgtcacattagtttgtagactcaatctttagaacaataaggtgctgtacatttgaacaagtgatgatgaagtcacctattcttttgatacctactttgactaatggctttaaatgcatttatttggaaaatctttttatggaagttccttagaaaaagccgtaaaagcaaataacattcacatatttagtgaaatgaagtccttgtctgccaaattgtctggccaaaactatgttgtttgttttcttttgctacccatgtgcccgcatttggtgagaatgaatgttcttgtcgaaccagattgatgtaacacttgcatttccattgctgagttgcgtgcagatctatttataagttaggtcacttgg

SEQ ID NO: 89799 - DNA, 977 bp, Citrus clementina
  Intron number 1 from transcript clementine0.9_002225m (loc us clementine0.9_002225m.g) derived from phytozome v7.0 (c hr-ID scaffold_15; pos 2306454 to 2307430 reverse strand)
ctcaaattctctctattcgccgtttaaatcgcaaggttcgtctatcgctacttcatttcttattttattttattttatttttcttaattaggataattaaataggttattatataatgcatcagatatattgttgattcaggttgtggtaatttgttgtaattgttaaatattttgtatcgtaccaacgttttacgcttgcagtgttgtcgttttaattttatttattattatttccttgggctttattcaatttcatgctgttttgggatttgtgcgtgcttgctatttttctgtttctttattgtttgttttgtccagtaaatttatttaaatttgttggacttagcaatgttatggtccattaaatacgaagaaaaattggatttccggactcttttaatttttgattggtggttgaaaataaaaaaaagttttgaagcatgtcatgctaacattaccttgaattcgaaattgttttcaattagttcgtataggaaaattctacaataaatttgtatgttgatactgaattcgatatcgttgaccttcaactaaggtaacaattatctctcttttgcaatttgtttttagcgcagtaaaataagctgtgttttggaaggaaagaagcatagccttctatttcccttttcaaaatctcgtggtcttttcattatttgctggttatgaactcaacttctgaagttatttgcatttggctagaaaaatttttgggtgctgcattaaccatgcaattatggacatttgaggcttcttgcctctaagatttattatttttggagaagcttgtaacttatggaggctaagtgccagcatgttgagattcactgatagagtatataaatgcagtgtaaatgtagctcttttgttattgtgttgtgtctttattgaagagtgaaatctgatattatatcacaaacagctagtgggaagtcaactgctttgtctgtgctagag

SEQ ID NO: 89800 - DNA, 376 bp, Citrus clementina
  Intron number 3 from transcript clementine0.9_010295m (loc us clementine0.9_010295m.g) derived from phytozome v7.0 (c hr-ID scaffold_95; pos 833822 to 834197)
cacgctgttaaagctcaaacactcgtacttagcgggtccttacatcttggctcaacccatttattttctgtaatgattaggaaatattggatcacttagcacattatattgttgagtgctgagaatagaaatatctgtttctgttcaactaatatacttacggatgaagaattaattagccaaaacaagcactgccaataatatgtaagcctgagggagatttatgatgagtacataaaacaaaatttcttgccatatatcattttgcattagatgtaggcttatatacagttttgtttgctttcagattaatgcattgagttcagtattaatgtttgtagtgggaaggatcagctgctgccgagtcaggaggaag

SEQ ID NO: 89801 - DNA, 843 bp, Citrus clementina
  Intron number 1 from transcript clementine0.9_017057m (loc us clementine0.9_014227m.g) derived from phytozome v7.0 (c hr-ID scaffold_15; pos 3412827 to 3413669)
ccaatttgaggtgatattgttttctttaacagccttaatgcatcattttatattttgaaactattggtttttcgttatttgaaggttgtacttatacgtgatcataaattctcatttgggttgtgatattattaattattgatgggtttgtttcattttcgtcctcttaatttctttggttgttgtatgtttttcgctcaatcagtttgaatttgagaaatctttatacatgttgcttgtttccattgaaaagatacataaccaagctctgggtgagctcttctgaattgggaatatatgcgggaaaaatgaagtagtttctgtttctgttgtgcccaaaggatttttgcttgtgttaacggatatgatgtatggctatttcagttgaaagattcataataagttttaatatgccgatcacaatggggtatgtaaagttatttatgtactaagcgctttatttgtaagattgtatctcatgtcatggggttatacctgatttcgacttctgtgctgcagaattaacattttagcttggaattttggttattggatctgtcaaatttatgcataaacttgaaaatactggtaaaggatgcaaagtagctgttgaattggaaatggtgccaattttagggcagtgaaacgagctttgcgttgaaacattggaacatgtaacctggttttgaccgttcattgtgctcaagacatgctttaccaggcactacgatgctcttttttgatcaagtatttgagaattgagaaatgaagctggaccacttcatttatttgtttatttattatttttttgtgtatgtgtgtcaggtggagtttctgttgaaa

SEQ ID NO: 89802 - DNA, 960 bp, Citrus clementina
  Intron number 2 from transcript clementine0.9_014812m (loc us clementine0.9_014812m.g) derived from phytozome v7.0 (c hr-ID scaffold_47; pos 398389 to 399348 reverse strand)
ggttggtcagtgcattggaattgtaagtttaacttttatgtatgtggacttactttccccagtaaaacatataagaacatgtctaacattattgctaatgtagtaggccagtggtcgattgaactgagattaatttatttcagaaatgagtgagtctagaacacttccagtgtatgcatcccctcgcgttggattcttccatgtgtacatctaaactgatcatgaaagagtaaatacacacttgcaaggatccaagaagacgtttctatacccggggtatgctagactttctttacagaaacagaaaaacttagtagtcatacattgcactttcatcattaaaaggagccatattgatggtgcaaaatggtgttatcatcaagatggctataactgtgagttggtcatggaccctgtttgcattaggacgcttttagccttttagccatctccacaagctgcttgctttcagaacattgctcccttgcagacttttggttcctgtttattgtgaagctgctcaactaagctcttgttccatcacacagttttcttcctttttgttgttacatgtttaagaacacttgtcttgaccatgcaacaagtgggtcaagttatcatcattcaaggagtgcactaatttaattggaaattgaataacagtagaggcacaattcaaagacaactatgcattttatagtataccagcacagaccgtaattagtagggtaggtgcaaaatgggaaatcagatattgcagatactaaaattctgatctaacctaaagtggttaaacaacaaaactaatacccaattatttcacatccataagtatgcaaaatggatgatgttagtctgatttggtatcaatggtcttgcaaagtgattgtctttttgacagttaactgatctcttatatatattttgttatggttgcagcgcaattatcgattcttctac

SEQ ID NO: 89803 - DNA, 761 bp, Citrus clementina
  Intron number 1 from transcript clementine0.9_014812m (loc us clementine0.9_014812m.g) derived from phytozome v7.0 (c hr-ID scaffold_47; pos 399601 to 400361 reverse strand)
tggtgtcaattgtggggtcaatccttactgtactggtgagatgctttactttttttctgcataaactgtaatgtgccacaatctctattttgttatcttgcaaatatactctgtatttttcggttgctagtctctattgcattccagggctgataataagtaaccttaagcacttctttcaaattattgattaaaaatttattgagagggattaatttttttcaaaaagtttattttgttattttttttggaattatctctgtggactaaatatgaaaaagtggtggaagcgcaaggatggttgaaacagtaaggaatcagcatgcaaagtaaattctcttcttttatgtcctaaatatcctgaaattagcttcttttcttcttcatgtcaccaattctattttaattattttctgtgatgaagtttctttaatttcttttctttttgataattacttagctgaatggctgatcattttcatttgcaagtgttcaatcttaaggcaggcatcagtattactggaaatcaattctattttaattattttctgtgatgaagtttctttaacttcttttcttttggataattacttagttgaatggctgaccatttgagatgaatgcccgtatgcttaccgtcagagcttcccccccttgaattatagatatgagtgagcttttttcctttgacatatatcttcaaatctaaattcaaattttgtgcaggatctattatttcttttcttgacgtctgccagaga

SEQ ID NO: 89804 - DNA, 635 bp, Citrus clementina
  Intron number 1 from transcript clementine0.9_008304m (loc us clementine0.9_008304m.g) derived from phytozome v7.0 (c hr-ID scaffold_47; pos 245624 to 246258 reverse strand)
gctgttcaagtatgtatacaatctttttaattgtagatcaatttaattctttatgagttttttttttccatttattttgataagattctcattgacctccaatgctactgtgcttagtcatcattaattttgcttcttttttgccatgcttcagttttttttttttttaatctatgtcggaataaggaaaatatattattatgatttgaggttttgtggtgaaatgaaaatgaagtattttaaataattgaaggcaattaaagtgtatcatctaaattctagatcttatacgagtctgtctttagtagctcaggtctgttaccttgttcatgcgcatcaaatacccaacacaacgttgaaatgactgaaaattgaaaatcagttgtgattcaagtggcgggacattgatcacacatgtattacttaacgctttgattctatgaatatgaaattattaacgtgtttatttaactaatgatatcatgctatctggatttgtaggaacgagtgaactgagaaggaacttttgtgtgtgatctgagaaagaattttgttattctgatgaagaaaacttttatcattaacttttgaaatgggctaattttgttatgccccttttgttttctataggacga

SEQ ID NO: 89805 - DNA, 482 bp, Citrus clementina
  Intron number 1 from transcript clementine0.9_024764m (loc us clementine0.9_024764m.g) derived from phytozome v7.0 (c hr-ID scaffold_47; pos 507736 to 508217)
gccttcaccgcttccccaagtaagaacttttctctctctttcttacaatatcacttttgacgctttttgttccatcttgaaaattgcttgcttattttttccttcaaaaagttctatagttcacattttttttcttcctctttatcatgagactagaaacattatttattagtagtactcaaatgggattttaagtttaccagatttaccttctcttctttgtgttgttgttcatatatatgtttctgttaaacagacatttcctttgcaattgcttcacattttgatctgggttatgtcaacgatcacttcttttactttgtttcctcctggttattcctgaaaaatgcatttatcaggagctcggaagctttgcatttgaactataatgagtttattttcaaagttttccctttttcactttaatctcaaaagctgtaatttcatctgggttttgtttggtttcagttcccaggttgcat

SEQ ID NO: 89806 - DNA, 599 bp, Citrus clementina; identical to SEQ ID NO: 80800
  Intron number 1 from transcript clementine0.9_001663m (loc us clementine0.9_001174m.g) derived from phytozome v7.0 (c hr-ID scaffold_25; pos 117295 to 117893 reverse strand)

SEQ ID NO: 89807 - DNA, 488 bp, Citrus clementina
  Intron number 1 from transcript clementine0.9_009195m (loc us clementine0.9_009195m.g) derived from phytozome v7.0 (c hr-ID scaffold_47; pos 773486 to 773973 reverse strand)
ggcttccagacccattgttccacgacaagctagaggtatatttgattgcgttcatttttctttcttgtgggttctttccaattctttttgaattcccattttctaaaacccaatagatgattctcgggaacaatactttccgttgatactttcaatctgctttttatttgatacacatttgttccttttctgttttgggcaatttgtttcgatgcaatgggagatttgatcctcgtagtaacgtttgatatgtgtttaaatgatgagaaagctcgaataaaagaaaaagaaaatctatttcctctttctattgaataaaatcatgaatcttttctgttctttaggttttttttttgggggggggggggggggtcgatcagtttattttcttagcattctttgagactcgttatcaaatttcttagcataatgatatcaattggtttcttataggtgaggcagttgtaggaggagtagcaattaagcag

SEQ ID NO: 89808 - DNA, 808 bp, Citrus clementina
  Intron number 1 from transcript clementine0.9_008142m (loc us clementine0.9_005856m.g) derived from phytozome v7.0 (c hr-ID scaffold_117; pos 454606 to 455413 reverse strand)
tcttgaggaggctgaggtcgttttggggatttcaggtgatacatatttttctttttgttagcaagctttttggttcgatcttcaattctcatttggtaaattggtttgctttgctcggtcaccatagaaaaatatctctctctttttaaaaaataaaaaaataataaaagaaagaaaaagaaggaaatttttttatgtgttctgttttcacttgtttgcttttagtgtttaaagtttatgctgaaatgtttacccgcacatgttgtgagcaaagtcaaaaacaagtgattaagtatttgtataaaccctaaacccaaagaataggaagtgatatgccgaccaaagtaattcataaagagtatgtttgtaacttatatgctttttgcttaaaatatttggtatgcttgcttttacagtttagttagcaactaatgtttactagctacccacttacttgatacttgttgctagtagttccatcatcagaaattggatgtgctcttgttcatttaattgttttttcttgttttggtaaaaatctgacatctggtactatgagtaggtgtcacatccaatggggcatcgaattccgattcattcccccctgatgtggtattttatgtgcaaggtagacccattgaagctcacagagtcattctaagtgctcggtctgtattttttagaagaaagtttgaaactgattggagataccgtaatgaaataagattttctggagaaaagttgtcttatcctgccctctacggcctcatccacttcttttattctgatagactagagattgcagtgg

SEQ ID NO: 89809 - DNA, 965 bp, Citrus clementina
  Intron number 2 from transcript clementine0.9_024516m (loc us clementine0.9_021379m.g) derived from phytozome v7.0 (c hr-ID scaffold_15; pos 3191408 to 3192372)
gaaaccttttgagagtgaagcgtgggcttgacgttcgggttcttttcgagcaaattctggctgcagagtatgtatatcaccatgtaattgtttcattaatttttctgttttaatttagttcacttaaattttgccaggctgtgattacctaggttttagtttatgtttcgtttaggcagaggtatatattgacttgagttgttatgaaaaattgaaactcagtgaagtcattacaatatcaattcatcaattatcaaactcaatttggatttgtgatctaagtaaccttgaagcctcatttgtagcagttgacacaataaacaagcaagttttggatctactaaatcgtggcttctagttgtataattatcttaatttagtatggacggaggatatgaggtgtgagcatctaggaaaggagcttaggattaaacatcttggaaaggttgagactattcccttctttcatttgccggaaacaaatattttttgggctcatccagacaaaaccattcgaaaggaacttctgtctgaactgaattaactttcgatgtcaacttgaatgtatttgaggagatggctatgacagatctgattgcatttcctgttattggaacttagtgctatgcttgacgtgtcttgtttgtcatctgtaatctcatttatcctgtaactgaaataatatggaggagttgaatatttgatgtgctttcctagatgttattaacctttaaaatcttttatcctattggttgtttaataaccaaataaactcttaataaagtatcaagatttagatgtctaatatctctgtaggacctaaagttcaagcatattgtaatttgatgtgatagtggtaataggtggttaagattgcagaataattaatcccttttaaccttttcttttctctaaaatatcttatggcaggggaaattccttaaaggatccagcatccaaggctt

SEQ ID NO: 89810 - DNA, 894 bp, Citrus clementina
  Intron number 1 from transcript clementine0.9_014795m (loc us clementine0.9_014795m.g) derived from phytozome v7.0 (c hr-ID scaffold_25; pos 2368330 to 2369223 reverse strand)
ttgcttgattgaactcaattttgttctcatttgatgtacgtatgtttactattttctgctttttttttttttgggcgaatcgtcagccttaattttgtacatttctttagcctagggtttgtttaatgatcattctacatttcatcacaatttagttaattaaattagggttttggtagttcagatcgttgaattgagctttcaagtgtgtaaacttttatttatcttgtaaattagtagacttttgacattgttgttaacgagaaatcaaaattttgaatttattttttttcgttttcttttgatctcatataagtgatcataatcgcaagcctttggatatctcacgatactgaaaatgtgttctatttatccaaatcccatttattcagctggtattagtgtattttttctgcttacatatccattttttaactcgtaagtgcagcttggttctgatttgtggtttttaatgttcagtgatagtgtggctggaatcaaataatggaatatttgaagactagaaattggaagttcttacactttttccagagtttcaatgattataccttttgatatttaggaatctaggtggacagtgcatagaatacatagattgaaatgttggaaaaatgttaaagtatggattgagatacaatcctgattttataatcttatcatgcttatcaacttggtggagttagcaaatatcaactgcatgtagatttctttgaatatacagtgggttaatttttgtgcaggcgtttctcaaaattgttatgtataatcattttattactgtttgcaaagataattgagtattgattggggacaaatttgttaatttagtgtttagaccactcatatatatgtttgtatcatgtaggataggga

SEQ ID NO: 89811 - DNA, 659 bp, Citrus clementina
  Intron number 2 from transcript clementine0.9_004189m (loc us clementine0.9_004189m.g) derived from phytozome v7.0 (c hr-ID scaffold_47; pos 434445 to 435103 reverse strand)
tggtggactgtgggcagagcttgtgagcaacagaggtcatttcgaaatcggctgtttttactcttctgctgcaaaaggatatgcttatgtgatttttagtaccttgatattcttgttatatctagagtttaagaatccactttgccttataaatgcgtcggactaatctttgattgctgtcagtggttcctttgtttctcaaatctaaaccttggttattggttaaaccacaaaagcagtggacacagtcactcaactgccccaataattttgagaaatcatgttttttgggggtttttgaaagcatttgatcatttgattgaacagtgaatgcttagactttctattcttcatgagacctgcgggtttggtgcatatctgctatctgtacatgatgcaataaatatcttcccccttctctttatctgcatactgtacgcattatttgaaacctgttaggctgtttctctgatgtttttcactatgtctaatatagcaatgtctaccggggaggaggtcatttcacttaagaatcaaaatatccaccatgatcattaagccatttattattgacattaaattactttttctgattatttatatctgaagcatctcctattacaggttttgaagctgggggtcaaaacattccctcaaat

SEQ ID NO: 89812 - DNA, 581 bp, Citrus clementina
  Intron number 2 from transcript clementine0.9_030713m (loc us clementine0.9_030713m.g) derived from phytozome v7.0 (c hr-ID scaffold_15; pos 1975053 to 1975633)
cccctggtatcgtatcgcaattttctttatgggtgatgatacagctacaaaattttgcgatataaagttgttattaataaattatgtgtcatgtgacaaccaatgtattatatattcatgaatgccgtgtaataatcacattaacaatggtataaaaaaattcagtaattttaaatcttaagaaccacattaatgatttgcgacacattatttattaaatttttatttgattgaatagtatctagtttgtaaagtagatgtattttagttcctaaaatacgagttagttatcaaatcagtttgtattttagaaaacttatccagtagccagtaggcctgtatcgtctcaacaatctcttctgtttgttaacatctatttaattatcatttttttttacttgttgtatgttagatttgttcgaatttaagaatatcttggataaaataactattttttttttcttaaaacgttattccagcagttacaacttatgaaagtaacggtaaggtttttgaataattgagggcttgctgtcaccagttcgcattctctcgttcattttgcagatacattgatccca

SEQ ID NO: 89813 - DNA, 725 bp, Citrus clementina
  Intron number 1 from transcript clementine0.9_028408m (loc us clementine0.9_028408m.g) derived from phytozome v7.0 (c hr-ID scaffold_15; pos 1147913 to 1148637 reverse strand)
gggagaccagtaggcttcacagaatatacagtgttttcttggtctcttgagaatattttcaatgaaaactttttcaagcaccaggtttcaatatttatttcttctgggttctatgcatattattagtgtttttagattaatttagtccacttggtgctgtaaatattctgctttattcttagtagttagcacttgtgcactgtttgtttttattcaatattttaattggtgtcattagcaactatccctttcaattatatttatatattatgttcaattggtcattttgagtcatcaactataaactgtttctaatgttttgttattaatcatcattataattattctgttgtaaatttaaaattagaaagatcccaataagcatttgatggaatgcagcattttctttgaatacaaaagtattcagaaaatcaatgctattttgtgttagttttctgttcacttgttgagcttattgactgaaaagttttaagcaaggtttcttttatttgtgaacacttacacattcattctgtcactttggctttgctatttcccttaaggattgtagcactaaggctacagattgtcaaatgcaaagtgccgttaattaaaattatattgtggtatatttgagttcataagccaactattttattgatgttctattttaaactgcatccctttcaggtggaaaaaatcccagagtcttttcaatctgttaa

SEQ ID NO: 89814 - DNA, 871 bp, Citrus clementina
  Intron number 1 from transcript clementine0.9_005547m (loc us clementine0.9_005547m.g) derived from phytozome v7.0 (c hr-ID scaffold_74; pos 58174 to 59044)
tgatcagtaagttctcttttttatatctttttataatattatttcataaagttatttctttgtttattttattttatttttgtttgctcatcttttgatgcataaatgaaatgggatgaaattgttgtgcaaactaagctaaaggttattttttattctttttttagttatctgggttttcgtttgttaagtgttttgttgaaggaaatttgctagttttggttaggattatttcattttcatttgtacttttagcatgattattctttaaatattagccacaaacaataataataataattttttaaatttatcgcttttttcttacttcagagtttgctgttacttttagctttggatggtaaagttgacaaaattatggatgttatgatttatgttagaagagtgtaaagttgaagctaactgagtttaagtgggatctgttcttgaatcatggaattattttaacttcaatttcagttttttcgatcctaacgtgtttctagagaattcttttgcaccctattttttgtgttatatatatttatgagtcatttgttagagatcaagttcagtaattttttttagctgaaatttaggcttaattgaagatgattacaggaaattgaattcaagttaaataataaaatgaaaattctttatttatagttagttgtagcatcagaatgcatgatggtattacttattcttttttcagttattttggaattttgtcttatttacccctcttgatgaaattgtttgtatgttcattttgtttgtcgtgactgcttataaactattgttatgttgataagtatggcttattaataattttctttgattattgatagagtttctgaggcaaaag

SEQ ID NO: 89815 - DNA, 587 bp, Citrus clementina
  Intron number 1 from transcript clementine0.9_024696m (loc us clementine0.9_024711m.g) derived from phytozome v7.0 (c hr-ID scaffold_132; pos 181934 to 182520)
cacgaggaggtatcgcttcaattcctcttcgtttcgtttatttattcttttttttagttaaaatggaattattggcttttttttttcccaaattcagtactgtttcatatgtatataaaagttgtcctcgatcttgttcatgctttcattgttttttgttgttgtctcgaagtttcgcgtaacaaattaacgcgaagtgttctgttttaataaacaaagaatgtaccgttttgagattttgaaacttgcgtaaagaacgtgggaaaccctagcatttatataaaggctcacaagcttttttctatttttaattgattttcgttttcagttatttatctttctttaatttctttcttaaaatcaatgtcagtatctaaaagtctgtgttatcctattaattgaattaaaacgaatattaattaacatgaattgctcaattcttgattacattgcatatatgataaatgttcaagatttattgtagtgtatatttgggacttattggtgaacaactgtgtggaatgaaaactgctaatttagtttattcggtgatgcgtttgggttttaaatttttcagggaattgtta

SEQ ID NO: 89816 - DNA, 951 bp, Citrus clementina
  Intron number 3 from transcript clementine0.9_024696m (loc us clementine0.9_024711m.g) derived from phytozome v7.0 (c hr-ID scaffold_132; pos 182781 to 183731)
ctagaaccagtaggtaagctttgcagtttatcaatgataaagacatttatatgaaatcttgacttttatgttttgtgcatatttgatgtgtaatactgggctactgcatggtaggcatttctttgtattgttctgttctgttccaaatacccataatttgtggatatttgaaatatgcctatatttacagatcagttggactcccactagattcacaataatttggctatgttttgcatgctgttgaaaaacttataaacgagtttattttttttattgcatatccaggatatcatatgattatgtcattttaagttttccgcttcattttcttgagatgagttcattccaagaaatgcatctgttgatgttggagatcacattgaagtggttgttaagacatgtgatatcatacgtgtcttatagttattacctgaataaaactgttctctttctttctaatattgaacttccttgaatgcctgatgataatatttgtcacgaactttttaaattaattgtcacaactttatggtcaaattactagctattgtggtgattacccttatttttcaaggaaataattgttagtttagaagtttgttagaactttgctttactatatcttgacttagtgataaagttcttaattgaaaataaatagtcaaataggggaaaactatgatagcagaacaggtaattttttcttagctgttactaggcatattttcagtttggaaagacttctgttcaagtggatcaggaatttgtttctattttcttgtaataaattactattgatgaaggcgatggtaaactattttgctatacaataagtttagttgaaatctgtcttcctttcattattgctgtattattttctttttggtttcagtcatgtcttgatcatgcataacatgtttccggcttggtacagtattggtgcagagc

SEQ ID NO: 89817 - DNA, 559 bp, Citrus clementina
  Intron number 3 from transcript clementine0.9_008523m (loc us clementine0.9_008523m.g) derived from phytozome v7.0 (c hr-ID scaffold_25; pos 2216350 to 2216908 reverse strand)
tctttgacttggccattttccgacagcgttatcaggctagtgctttttaatcaatgtgaatgtaaaattcacttttcacctaaagttttagctgttgccaagtcagattttgtaagttctgttttattttttttctgcatatgttcttcttggatataatttcaaatttgcagtcaagcagccctctgttttgattgaacatttttcttttgagtttgttccgtgcatgcattcagttcatagtatatagagtacacacacacataaaaattatttctcattaatggtagcttgcaattatgtatgtggaacaggatgtagagtcttgatcatctttcttttggctactaattcttatttcatggcaagatttcatttgttcgcaagtagcgttgctaaatggagtctctttagttttatattctttatctcctctcgtttgtggataatttgtataattgtaatattcaccaaaatcttaattcctaccgaatccgtcattttgtttgattaaacattatctttcaggaatctttaaacctgaagctcaaaagaggag

SEQ ID NO: 89818 - DNA, 632 bp, Citrus clementina
  Intron number 1 from transcript clementine0.9_030817m (loc us clementine0.9_030817m.g) derived from phytozome v7.0 (c hr-ID scaffold_15; pos 2841431 to 2842062 reverse strand)
tcctccttctcagccaccattcgatcccagtcgaagtaattttactttccctcttcttttccagtaatttcttttatctgcattagggttcttttggttttctctttagattctgtttttccgagccactagtgtatgtatgcgttgctctaagctgctgcctgttgatccactgtttgaatctctctctctggtatatgggttctaaattatgactgagcttttattgtctatttgtgttttgttttgttttgcttcgaccaactgcttgctgcccttttccctttatgtttatcttatgtgaatttctctagaattgctacataattaagcctgggtgttgctggtatgtcaagtttatttttattagtacctttcagaaaaaaaaaaaaaatgttttgcttgacggggatggattcatgttaatgaagtagcaaaagagctgcaaactaatattaatcttgttatctgagaggcagaattttctacagtgacgaactgattggtgaaaattttggtaaaggattcagtgttcataacttttgactagtagatggcttatttatccatctaacatttttgactcccctgttgaagtgattggtatcatcaagaggaaggccttgattaaa

SEQ ID NO: 89819 - DNA, 839 bp, Citrus clementina; identical to SEQ ID NO: 83639
  Intron number 2 from transcript clementine0.9_007747m (loc us clementine0.9_007747m.g) derived from phytozome v7.0 (c hr-ID scaffold_25; pos 911546 to 912384)

SEQ ID NO: 89820 - DNA, 932 bp, Citrus clementina
  Intron number 1 from transcript clementine0.9_032909m (loc us clementine0.9_032909m.g) derived from phytozome v7.0 (c hr-ID scaffold_77; pos 1007164 to 1008095)
cagtttgccttcctcacgaccgcgcgctgcatctagtaggccttccaaacatgtccaacgcttatcaaatcagtccgtctccccatgctctgcgtctgtgcaaaaaatctaccccaaaaaaactcggttgcttgtcccctaacccgttgccctttcccgcaattcattggaggctacccgcgcgggaagttgccttaaaatttgaaaagaagatacaaagatttagctgcagcttgaaccctttacatggaggtcaaaatcacaaataaaatttcaaacccaccgctgagccgccatggattcttgtaactatgggcacaaatattatttaaatggaaaagtaaaatataaattaataataaaataaataattaataatttcacatcgtaattggatatttaagttgttgttttctgtggtcgaatcaaaattaaaacgtcttagggtaaaaaaatattaggtttaaaaaattcgtggtacgaaaaatgtgtcaaaacatgagaaaattgtaaaattaagggttcaaaaagccccccaagctccttcggaacttgaccaccgcattcgtctcgaaaagttatgcagtttaaaaaaaaaaaacacctcaatcggacctccgagcacaaagttatcgcattttaaagatttcgaccttttccaaacaatttctcaagcgccagtggcactaaaacgcaccgtttctttaatttcaacttactataaaagggacctttcctcacatattcccgcacaaatgaagcacactttttcggcttccccccaaaaccatattattctctccagttcccattcaactcccatcacctaatttcgtattctttcccccacaaatcattgttcctctatttccttcttctctcctctcgggcaaccagcaattcagctcaagttatctttatacttcttcatt

SEQ ID NO: 89821 - DNA, 918 bp, Citrus clementina
  Intron number 1 from transcript clementine0.9_018507m (loc us clementine0.9_018507m.g) derived from phytozome v7.0 (c hr-ID scaffold_25; pos 1771716 to 1772633)
ccgcctccaaggcaactactacttccaagaacagcgtacgtctctaattatccttttaaaatatttatattttgatcatttttcgctctttttttttctaataataattcgatgacctctagtcttcagtcttgaatgttctaacttgatcaattaaataaacatttgtctgattttcaattcttaatgttaaccagctaattccaggttctgtttggggcatgagtaatgtgattgtattttttatttcgttgttgctgttgtggctttagattgggtatgaatgaccattttcctttacagatagttgggtatctttggtagctcagaagcactttcatcaaattatatgttcaacgttcaatgtagcttagaaacatatgcttctgcatagctattaggatggttttataatcggaagtgattgagattttagtgaaatgacttacgttaggggtctaatgtaactctgcttttcacataattttatgaccaacagatgtatatgccaatgtaggatggtcgaattatgcagtactgaatctcttgctctgtttagtctctattaatgatgctgtgtactgtttagagtagtggtatgctcttgtttgcttctgtgtctaaatttttccttaaaaactaccttccctttgtcccagattctctctctgcacaatgtttcattttcactcttttggtcttacaagctggcataactgttttgtttatgcaccatattaatgccataaatcttcttatgcttatccaagcaaaacattcttcattctttattggaagtcttgcatatttgtcttactgttggagaattctcctgacactctggatttattttatgatatatcattctttcaactgattcttaatcttggttataaagtctccaggcatcgaacactc

SEQ ID NO: 89822 - DNA, 908 bp, Citrus clementina
  Intron number 2 from transcript clementine0.9_011837m (loc us clementine0.9_010186m.g) derived from phytozome v7.0 (c hr-ID scaffold_47; pos 11924 to 12831)
taaagaatcggcttccaagtggtgttatatatcaggtatatttgtatttgtatggggctttagtcaacatgtatctttcttaaataatcttgctttgttccttcactacccacattttgggacacgcacgttgtgctaattttttttttttaaatttttttcccatgttgctggatgtttttcgctatgatgtgtctgggttttaactttgtgttcttcaccatgagatcaagctttaacgttttcctttatcctagtgaatatgattttcagttacttataaaaaaaataaaataaataatgaatgaaattaaatatcgagctccagtttacggcttattttctccttttattagttaaaagatatcattttttctcacggtttaatttgactctctattggagccagttttgcccacttgatattcccgttgctgtggatgctttccttggctattggaagccaagtgcaatcgtaataatagagggtgaactgtggcctaatcttattatgggtgcttcaaaacatggtgtaagttattccttcttgttgatgcatgtgctacttcccgcagatttgcttttgagaaaatacaaaaacaaagaaactaatttagtattgttaatttaattccatcctcatattcttcatttttattctatttggttgttgaatagctttttagatcaaacatttaagcaggaagtctgctttgttggccatatatgtatgcaaataaaaagtttatcttaaatggtttagaatatgagaaatacatctatttgcatgggtgttgtatgttgtgatagtctaatattattcattcaccttgatgtgtgcattttccatttgttgtgtagtgttacaactttatgtaatgcctttcagattgcattggggttgctaa

SEQ ID NO: 89823 - DNA, 499 bp, Citrus clementina
  Intron number 1 from transcript clementine0.9_004969m (loc us clementine0.9_004969m.g) derived from phytozome v7.0 (c hr-ID scaffold_47; pos 126465 to 126963 reverse strand)
ttacggttacgttaacttcctctccccacacggtatcataacgataattattttttcgatactggcatttcctctttattcatttttattttatttataatcatcagatttatcatgatgcatttcctctttcttagttgaatatggtatttagtagtgatgcttgttttggcttttattaattttatttatttgtttagtgttgtttggctgctagtaaaagtgtgggaaaaggaaaggaaatgtaattgatagattcttgtgattatctttttccaacgctgtaaaggaaacagataatatttttgatactattagatttttctttacttgggaagaaattgagaggcgttttgatttatgtattgaccaaaagaaaacaaaaaaattgctaagaatttcatggtgatttttctttaatttctcctttagtttaaacatttactcccttctttattgactagctattcgagcaattgaggtaaagaatcacactcag

SEQ ID NO: 89824 - DNA, 614 bp, Citrus clementina
  Intron number 2 from transcript clementine0.9_016449m (loc us clementine0.9_016449m.g) derived from phytozome v7.0 (c hr-ID scaffold_47; pos 1099178 to 1099791 reverse strand)
gtcattgatctgcacgctcaactcggcaacaggttcaatcagttttcccaataatctctatttttcattattttccattttcggtttatagatttatcctttctttggttaagtttttcttctaccgactcttgtgtcaaaagatgacggcaaaaattaaattagagtcacaaattgatgtattgagttatgtcattagaactttgattgactttcctatcatttcatgagaaccacacgactgtcgaaattgaagaatgagtcccatgcactagttggccttttttttttcctaacttatcatttatttattaactattagctgtcagtccccactagccattgtctcgtttttttggctgggattaattgatttttctttcaaaatatacataagccaaatttgtcctccagcagcacaatttgcataatttttttttcttttgaatttactgctttgaaaaaaatttctgatgacatggacttttctagtggtcataaaaaatcaatttttttttctttggtgtaaacttaatgttcatagtgtttacatacaagatataaccaaacaataaaattaaaacgtgtgtattttttttttctcttatttacag

SEQ ID NO: 89825 - DNA, 527 bp, Citrus clementina
  Intron number 1 from transcript clementine0.9_016449m (loc us clementine0.9_016449m.g) derived from phytozome v7.0 (c hr-ID scaffold_47; pos 1099855 to 1100381 reverse strand)
ctgctggagagctgttcccaagcttgcaggtctctgattgatcatcagttctttcagcatatatagactcatctttcgcagcttcattttgagctctttctttcatttgatatttcttgaattttgattctttgcctttcattctttgttgttttgtcgaagagtgggtaataatatattttcttctttaagggaaaaagaatattaacccacttagattaagaagaagggctccttttatttccatttttctttatgataattttaatctttggctttggaagaatggacatgattgatgttgggacaatgatgaaagacgactgaatcattgtcaacaaaggctgatcactgaaattgttttcattgttttcttaaaacaaataaatgtcaaacaccaattaattatttgttttttttttatttaaccagatatatttactctaaattaaagtcttaaatattgaacggagttatgatgggtgattgcaggtttgttaaggtgtggaaaaagctgccggcttagg

SEQ ID NO: 89826 - DNA, 538 bp, Citrus clementina
  Intron number 4 from transcript clementine0.9_017732m (loc us clementine0.9_017732m.g) derived from phytozome v7.0 (c hr-ID scaffold_117; pos 138210 to 138747)
ttgattgcagcccgactgcagagccgacatttgaggttgtgctctttgattctactcctctttgagtatcatactactttgttgataatggtcatttgcaaggttgtaaatgttggtgatattctctagctcaggttattttgtgcaacagtttggagatataattaagttgaatgattaataacattggagataagagttattgcccattagttttctctgtgaccatgctaatgtgtagggcgtcattcttgatatataatctttacgttgattatattcttggcactccttgtgtctatttagtttgacatttagtatggtgtttatagctctatgatgcaagtctaagccctaagttgattttcctcacacatatgcgactttaatctgtacagtgattaacaacttttttagatgctatgatttgtttttatatcttctcaatacctttatcttgtcttgttatttctgctagttaattctatgtacattgtacacagggtagagggggtgaagaactgtctgcagagctctc

SEQ ID NO: 89827 - DNA, 836 bp, Citrus clementina
  Intron number 1 from transcript clementine0.9_033840m (loc us clementine0.9_033840m.g) derived from phytozome v7.0 (c hr-ID scaffold_118; pos 441509 to 442344 reverse strand)
agtgctttcatatctcatcgacgctaatttatacggtcagtattattaaccttaacgtttcaagctaacacatataaaccaattttcaagttatactgtccatgtaaagcttgtcgaaccaacttttttcttttaaaacctcaaggctagctaacgctaaaccataacttataattaacatgtgtttttgacaactctgatatagaggccttctgtggtgaaaatgtccgcatgaaactcggtatggacgaggagtttacagcgtgataaaagtagacagcctgcacctgagaatttttctctgaagcatatttttcaaattctatgcacatgaacattaatcaaataaattcttagtgcccattctttaataaaacttttattactttaatgcacattaatcaaataaatatttcagataaataatatgattaatttttttgtttaaaagaaaattactcataagacaacgaacttactgaactccgatagaaaatattggggggtcaaaattctttgaagatgaacccattaattatcacgcaatggttaagaactcttgacggtatcgagcagaacgacctgttcttcctgactgtccaacactgcattaatttaatcgattatcccattgtgtttgcaattttatcaaatgcacatttaattgttttaatataaacaattaaattttgtttgccgcttttgttaaaccaaattcctgtttctactgttgattgcttggttatactttagttttattatcttcgtttatatgatgctcgcattatatagagatcaaatacatcgccactactctgacattgttcatgaatcag

SEQ ID NO: 89828 - DNA, 738 bp, Citrus clementina
  Intron number 1 from transcript clementine0.9_021369m (loc us clementine0.9_020538m.g) derived from phytozome v7.0 (c hr-ID scaffold_72; pos 241514 to 242251)
cattggttatctcggtttctatttttagttttaaggtgggttattagtttttataatttaccaatcatgtgattaaatgggtttgtttaattttttgatcatcgcttgtttctgaggtggattctgctgtgttataattgtattattgatgtttggatcagatcataattcaaattttgatctttggatggttttagaaagtgtattgctctctattgcttttgaattttgatatatttaattgtttcttagctagttttgatcagttttatctgctgttgagcctattgtggcgctaaattctgctagcgagtgtaacctttttcctggaaaagttggatttttttagatacttcatggagagtttgagaaagttaaagaagttattatcaaaatattcgaatttctgtgtttgttctttcaaatttggcatgtgactcaattgttttcacgaggataaaatatggattcaatgatactataaaaaatgtggataggatcattgcattttaatcttaagctatggttcaatccttattaaggacaggggaagtattagtgtaatttcttatgcatcagagctgttgaaatccgagggtgagagcagttcttgttgacagacgttgtaaactcgtacttcattatgattgttttttgtccatctttttgtggttgtatgactaatgaaatgtgtttatgttttctcatgcaggtgcttagacattgatttcaattttc

SEQ ID NO: 89829 - DNA, 688 bp, Citrus clementina
  Intron number 1 from transcript clementine0.9_007518m (loc us clementine0.9_007518m.g) derived from phytozome v7.0 (c hr-ID scaffold_15; pos 4171954 to 4172641)
aggttccttttatctcacgccgtttacagcaagtaactgatcattcgccctttctctctccacatcggaatcttaatctaatcttagtaaagcaaaaaatgtcagattagtggttcttctttaaacttttattcccactcttcttcaacagacaacacctctccacatccactggcctaaaattccctccagtccagatagataaggacttacagtcatggtatggagccttcattttttatctccaagttgataccttttccatttttttggtatattttcttcttattctattttctttaggagggtttgcttttgtggacaacttgggcttcttttgattgatggggaagtatcaaagatccgatttttattgtatttgaacgctgtttattttggttatttttgggtatctgggaatttttagttgtttttcggtattttctcggtaaaatttagagttttgaattgatctgctggtgggtatttgctagattgtgattttaaattagcagctgaaagatcagtgcttgatgctgttgaaatctggaagtttgtttcaccagtttcttatttttttgttgtgattttggagatatagatgctgaaaaatggaattttttggaattgatttgctgatggtttttgtatagattttgattaatatcacaccttgaaggcttttgga

SEQ ID NO: 89830 - DNA, 526 bp, Citrus clementina
  Intron number 1 from transcript clementine0.9_023949m (loc us clementine0.9_023949m.g) derived from phytozome v7.0 (c hr-ID scaffold_18; pos 3995316 to 3995841)
attctttgtccccacacaaaaaccctagctccaaggtaacatcgcttaaacccttttatctctccttttgatttctcggtttcctttatttttctaatttatttttttctctctgttagaaaatgtgagtttttgtttttttattttttgttttagggttttgttttgtttatttggggattcagcgatgtttaagatccatgttgtaaattctcatctgctttttgcttgattgaactggttttatgttttccctttagttggttgattattagggtttgtgtttaggttaaagttttgattctgtccatttaatttgtttaatttatttgggtattatttatttgtatctcttcgggagtagtccattttaggaatctgtcgaattgtaaaaattattttaattatgtggagtctgtgtttgattgtttacagctgatttcttggaatttgtttttggactagttcagtacaagctagctctgaagtgattgcttttctgattattttcattactgttatgcag

SEQ ID NO: 89831 - DNA, 533 bp, Citrus clementina
  Intron number 2 from transcript clementine0.9_023949m (loc us clementine0.9_023949m.g) derived from phytozome v7.0 (c hr-ID scaffold_18; pos 3995875 to 3996407)
gcagttcgcactggtggtaagggtagtgtgagaaggtgtgtggaatttagtctaatatccaaatattatctcggaaatagcataaaattgctataaaagtttttgcttgtttgtgtcatgacttaattatttatattgttggctgttttctctgagacttagagtttttcttgtgtatatctcttctttacaactttttgtcatctgggactggtagtaaactaaaacaagagagtaagagtgagaggaatagatacttgagcttattttagatactagcccattctgtgttctgtattttaatttgttgctgtctatgtgaatggtgtaagagatgtagatacttcagctttgtgcattatttcctttgttaattgaagtttattttgtaggttggcatttcaataaaattttcctttccattatgaactatatttgaattttaggttgtgtctatcatatggtaaattcttttttgacacttgctttaaatcacagaaagaagaaggctgttcataagacaacaaccaccg

SEQ ID NO: 89832 - DNA, 807 bp, Citrus clementina
  Intron number 1 from transcript clementine0.9_001806m (loc us clementine0.9_001806m.g) derived from phytozome v7.0 (c hr-ID scaffold_47; pos 668860 to 669666 reverse strand)
aaagaaggcgatacattttttctcatcaatcaaaggctcctctcctctctatcttttttttttgttttatatttattttcttatatatcttgaattttttgtgtttagtttcatatttaggggaatttactggtttagagtgctatttgaaggttcatttcttcatagttggtaacagaaagattagtagttgaaattttaacaattttataattgtaattttacatgtgaaaaacttaggggatgtatgggacagggttactgcagcttttaatccaccgctacattgaaaaacactagatgttaagtataagtgggcaagttcttggaaaaacattagctgcctagtaaatgtaggtgtttacatttagctgttgtgctctcacaattaggttgaatcattgaagttacaaacacacacacactctttagttgattattttgcttataatttgattgattagaattaaatatgagtgcttacaagtcatgatgttattttatgagattggccggtcataagcattttcatccccggttgaggaggtcataccatgtcaaacacctttttgaatttaatgtatacatgatggggttttattgatttggatgtagatgagctggtatgctttgctgaaaaattatgtcactttgttatggttatagtgatttaaattttaagctttgacagtgtaacatactgagctgtgggagtaagtgtcaatttaaggacttcatttaaggacttaagtaatctgcatttgggaaatatgttttttaatgccttcctttgttgggtcatgacag

SEQ ID NO: 89833 - DNA, 1007 bp, Citrus clementina
  Intron number 1 from transcript clementine0.9_030311m (loc us clementine0.9_030311m.g) derived from phytozome v7.0 (c hr-ID scaffold_15; pos 811158 to 812164 reverse strand)
aaaatctttacaaggaaaaggtttgttttcttctccattttcatcctcatttaacagtcttctgaaaattttttcatatggattcttgatgttattgaaggtttgcccatgctactgtagtctgtacatttgtacaaaattgctctttgggaattgggacttggattctttctcaatttgaccatttacttatgtgactacatgacaaaaattgaataaatcttgacctcttgctgtaataatgatacaggtgttttaacatcctttaaagtttagagcattttgaaagaaatctattttttttttttaaaaaaaaagaaatggattgaggaaggggtaaaactccaatcaattttttaactcgctgcttctcccagaatttgaatttgggtggcgagttaaataaagttgttttaagatgtggtcatgcttcttgagttagtagtttgtttgatatttgttagtatgtcttaacatttccctttcaataatattgttctgtatgcttttatggtgatgggacaaaaatatttcgcctatattaaggatgtagaactaattttgagtgtagaggaaggcaggaggatataaccttttatcagaattactatcagaacatctaagaatgaagttgattgcttattaagttttttggatgcttttgcatcaagtttcttgaggttagttatttcctattgacaaagttaccttcagtgattgtggcatgaagactatagattacttatgcaaatttctgtgattcttccatgtggctgttgcagtacatgcacatttacatctctagtccttttatctgcacgactataaacatccacttacattttctgtctctgattttcggtacattttaaacctaagatcctttgtgctgttctcttcattttatgtttctgttagttggttttgtcttattattcaattgtacactaactgttacttcgttccttttaggtgaaacaaattccattatcgtttcagtctgtcag

SEQ ID NO: 89834 - DNA, 469 bp, Citrus clementina
  Intron number 1 from transcript clementine0.9_005063m (loc us clementine0.9_005063m.g) derived from phytozome v7.0 (c hr-ID scaffold_15; pos 2753345 to 2753813)
aggagcctactctagggtttgtttctcattcgcaggtaggtaccattcagattcttatctttagttttcggcttttgcatttttttccccagccaagcaacgtcttttttttttttgcccctttgagttgtattgttgttgcatgttcttaattcttgattcttaaaattactcaatgcaaagtttgctttttttttaaagaattatcagtgttgaaattattgggtttcatacaactatttgtatttttcaaaacccttatcaaaaaggaaaaaagaaatagttctaatagtttgataggttttcatttctactgttttcttgttggtgtttgggaattttttttaaaatttttttttgtaagtaagcggcatcgtataagctttcagtcttagcgctctgtttaattcattatttttccatgtattccttgcataatgacctttttgtgtgctttcagccagtgaaa

SEQ ID NO: 89835 - DNA, 689 bp, Citrus clementina
  Intron number 3 from transcript clementine0.9_020456m (loc us clementine0.9_020456m.g) derived from phytozome v7.0 (c hr-ID scaffold_15; pos 3476994 to 3477682)
gaggtaatacatcaattcttgaaatcaaattgttccacctagcgatagtgtggcattcacaagcgtagagaggaatcatgaaaccatttacttgaattaactcttctgcactttcattgtttctgggcagctaccttttttaaaaattttcaatctttctgggcagagcacatttgagctagactttagttatatttttctcaactgaattgtgagttcacatttgtttggaagtacatatggatagggattttatcatttgcaaacttgactagaaatgattagtttgtggggccaaatacatgttggaaagataatttgtctcgcattacatttacgtggacaaagaatctctcttcgtgttttacaattcttttctgcttctgccaactgctgcttctgagatgttattttctattctgctgttggatattctctctgtctaccggttatgtgttgtcccaagtcatatacatataatcattattatgataatgcttatgagatttgataattataaatgcacattgtctttaatcaggaggtaagccatgtgtttctttaaggcaatggctgaatcttaataccaatgcaacaacttcactgataaacatatgcactgcctttatattaacaattttctaagccttttaactgctcaacttgaaacagttcttgacccgtacaaa

SEQ ID NO: 89836 - DNA, 339 bp, Citrus clementina
  Intron number 2 from transcript clementine0.9_025131m (loc us clementine0.9_025136m.g) derived from phytozome v7.0 (c hr-ID scaffold_47; pos 970970 to 971308)
ttcaaaaccaactaaagggacaataatgattgaaacccaagtgcaggttacaagcagttgcatttattgttattttttagtttcttttctttctttctgttgtaattacaagtgcatacaaatttcaaaaacaataatgaaaaacaaaagtgcattgatttgattatttgataaatacttatataattaatgttcatgtagtagataaattgtaattaaagcatcagctgttggtatactgattataacagttctaattttttaatgaatgacactactgctaaaatttagcttttgtacacagaaatctgacgggtaccaaaaagaacttccaagtca

SEQ ID NO: 89837 - DNA, 674 bp, Citrus clementina
  Intron number 1 from transcript clementine0.9_021907m (loc us clementine0.9_021907m.g) derived from phytozome v7.0 (c hr-ID scaffold_153; pos 131181 to 131854)
agattcagcgctccagcagtgccagctctagttcggtgagacattttaagttttcgacatttatgtgtcacaagaaaataagagttattattattattggtaaatttcataataaaggaatcgttataatatattaaaatcttttttttttttaatcttatacttcaataaaattatcgaatatatagtcttaaataaacaaaactttttggtaacaatttttggcaacacacacattcaaagaaacgctgaaggtggtgttgcatgagatacatgcaaatcaggacaaatttttctattccctttaatagaatatagtaacaaaatgtaagaaaatttttaaagaaatctttcagtattgagctctgttatttatttattttttattagagactattttaaaaaacaactaataatgggctttgggttaatgtaatattatacagatgggaatggcacaaacgctagattttatttacgaattgagcttttctcttctttttaatatatttttcaatttgaaccatccccaatcctttggggggaaaatgcaaattcacacaaacaaattcgaggctaaaaattagcaaacgaatgctgtctaaattgatatatattttttattattatattttttctctcaattacaaatttctatgggttgcagtccgagg

SEQ ID NO: 89838 - DNA, 421 bp, Citrus clementina
  Intron number 1 from transcript clementine0.9_015651m (loc us clementine0.9_015651m.g) derived from phytozome v7.0 (c hr-ID scaffold_15; pos 2645861 to 2646281)
agtcgtttggtttctgggcctttcattgcttggtattatgttttgttttctcttgattgtattattattatttttctaaaacttttgattttgctgtcgttgtttgaggatgaagtattgttctttatgtttcgtttggttgctgcaaaaaatgagaaaagaaaaaaaagtagtgagtagaattttaggtaatggggtaaaatgagaggaaattaaaaggccatctatactataattttagtacaattcatggaggatgcttttctttgaggcaatgttgatggcatcaacttgtagtttcctatgtttgtcgtttcagcatttgttatttatgagaccttcgtttctttaatttcttctatgaatgaatctgtcgctccgtggattagagggaagggcgattaacaagtttcattccagg

SEQ ID NO: 89839 - DNA, 416 bp, Citrus clementina
  Intron number 1 from transcript clementine0.9_020481m (loc us clementine0.9_020481m.g) derived from phytozome v7.0 (c hr-ID scaffold_25; pos 3061537 to 3061952 reverse strand)
cttctctgcgatcttcactttcttcttcgcattaggttcgttttttctttcttttttagttcaaacattatgtgattgctcttcaaattctcattaattgttgttgattttctttatggtatgtttcattatttgattatgtcgtttgatgtgggtttttgctttatttgggatttggttaaataaatctggatatagctttgattgtatatggttagattttagatttggtttagccaaaaggaaatgagataaatagggaaaattgatgcttgcgatttttgtggaatttcaattatgtgaatcaattagcatacaaagaaagtatattctgtgcataatcttcccccatgtccagcatacggatcttatatggcatttgtgtactgtatgcagtgggcacgttgttgggagcc

SEQ ID NO: 89840 - DNA, 298 bp, Citrus clementina
  Intron number 1 from transcript clementine0.9_006560m (loc us clementine0.9_006560m.g) derived from phytozome v7.0 (c hr-ID scaffold_47; pos 100429 to 100726)
ctgtacaacctgcagtacgagttcaagatcaatcagtaagtttttttttttttatagttttttttttcaaagatttttttcttccaaattttcatttatcaaaacggcatatatacggatattaattaagagcataaacaaattttgactccagtaataaataaataacacaagtcaaaacaatgtggtcgacacgtgcattgaaaaattaaatttaaattttacgaaactagctctagtatcttttcttctttttaattctggttgttggtgattaacttgaatacagaatagtaca

SEQ ID NO: 89841 - DNA, 669 bp, Citrus clementina
  Intron number 1 from transcript clementine0.9_005015m (loc us clementine0.9_005015m.g) derived from phytozome v7.0 (c hr-ID scaffold_47; pos 265659 to 266327 reverse strand)
ggagcccgcgtcatctatttagcctgctctctcaggtaacgaactactacgtgattgactgctagccagctagtagctagttaatatgatacgcctacgtattcaaatatcatgaatacccctcgtgtttcttttattcataatttataactgttttagtgttccatttttgtggtgttgatttttgggattatcaaaagactagtgtttttattgatatatatgtttatgaattatgatgatgatttttatatttgattttaaagggtagatctttttcttatttacaagatgagcttataaaagagattactcgaaattatagtttattaaaatttatgaattttgattgagaagaaaaataaaagaataattattagaaaatagttatattcatattgtttatcgtcagttgtaatttagactactttattagatttttactgccatgaaagtctttttcagttttttttaaaaaaaagttaataacatttatcccaaatttttttatagaaattgcatttgccttaaactttaaggggaatatgtaattatctctttctgaaaataagaaaaattcaatcgcctgtagaattagaaacattactatattcgtaacaactctgtggaacgctactgatgttacccggcttcttggttttgttaggt

SEQ ID NO: 89842 - DNA, 373 bp, Citrus clementina
  Intron number 1 from transcript clementine0.9_013563m (loc us clementine0.9_013563m.g) derived from phytozome v7.0 (c hr-ID scaffold_25; pos 3344484 to 3344856 reverse strand)
ttacaagtcagcggtcatctttattgctttcgcttgtgagttttcttttctttctttttcagtctcgctgtgtttgtcgaaatgcggcacttaattttttttttttcatttgtttgccattgtaattagcttagctttcaacttacatcatggtgaatcaattgttgatggataatcataaccttccattacactgccgccaactgttctgttttactttatagttaatggtggctgtttactgtttctatgcttatgcttttctttaagaaaaataaattttgaaggctgttaattctggttattgaactttgattgtcttcgaaacaggttttttttccccccctcgacgatactagttaaggtttgtaaa

SEQ ID NO: 89843 - DNA, 481 bp, Citrus clementina
  Intron number 1 from transcript clementine0.9_005090m (loc us clementine0.9_005090m.g) derived from phytozome v7.0 (c hr-ID scaffold_47; pos 1481830 to 1482310 reverse strand)
cgtcaattgcaagctttcgtcatcttactgaagttttttttttttttcttaaactctctttgtagtttgtatatgtgctttgaattatttgttcaataaattgttaaacttaatcagataaaggtacaacccacaaaagcatgtttttaggaaggtttcttgtatgtgttttagttgtttaattaatgtgtcagtatgagtttatgttttgtctttgaaaagtgttgggttgattagtataagaaagagaattatgggatgatagcaaaatcattggtacaatgttggacagcatgtcctaaggtaccatccagaagagcttgctgttcttgaggaatgctttatattggctaaagcagctttatttatgtgccccatagtgtgatactatttattatgttgaagcatcaagtattatgttgtaaagtatttgcttgagtttttgatatgcaaaatatatgttaggtaccaagtgaagcag

SEQ ID NO: 89844 - DNA, 974 bp, Citrus clementina
  Intron number 1 from transcript clementine0.9_010788m (loc us clementine0.9_010466m.g) derived from phytozome v7.0 (c hr-ID scaffold_15; pos 423302 to 424275 reverse strand)
cacaattcaatctctcgattctaacgtcagttacagtaagattccttgatacccttttgaatacctgcccttaatttttatgaagtgattataaagtcagaaactttatatcttttgcaatacccagttttttttttttcgcttattcgtttaattctagtgtgctttcggtgttgtttcagctaattataaactgttcttcttttttctttttttctttttttgctttgtttcccagtttgtttgagtactttattgatttatctgttgtgattatggtcaaatttgtatatatccttctttgtagattatatgagcttgatgtttactcaatttctgtatctttttgagtgtggatattttttagtgaagaattgagcttctaatttgaaacttttattaatcattggcttgtgatttgttgattttgatataaccatcataatttgttgtgttgggacactggattgtggattgggattgattcaatgcaactatgtctaatttatgttgtattatttttgttagaatttgcccatttaaactttattaaagtaacttctttgaacatagttattttcaccattttggtcattctatatttgttcatggcctcttcattctcgctttttcttttctcacaggtgctatagtcgcattcacagtgaccttttaaattcagttacatgttcttaagaatatccagttgacaattgtatttgcatcaaagtataagttcctaggaaacttgagttgctgctgatggttgcgacttttaatttatgacgataatgatattgagcatcttccctaattcatttatccagggatcagggatcaggtagaaagcagccgagttgtttgggagagtttctgtagctatttcctcatcatttccagttctttcgacatctcttgaagaaaactattccaaattgtccaattcgtttcaggtttcagcagagagggagccg

SEQ ID NO: 89845 - DNA, 611 bp, Citrus clementina
  Intron number 1 from transcript clementine0.9_002699m (loc us clementine0.9_002699m.g) derived from phytozome v7.0 (c hr-ID scaffold_117; pos 252929 to 253539)
cgccgattttctccgccacttgctccggcgattcggtaacgtgtttttgctgtatttcgaattattttatgttcgttgaagacagaaattctagttttgattaagagtacagaagcgctttttgaaaaaggattgatcaagtgcttctctaaaaagaacttgaactactactcctactgtaaccagtaggtgctttatggataaacgtctatgcagcattttaaaaaatcagtctttgtctattaataatctattatattcagacgttacataatatatagaaatctcttccaaagtattataaggactattgatttcagttatttgaaagactcttttctatataaagaaaagaaaaatccgtacaatgattcatctggatgattttacttggctctgctttttatgttactcgttggcttgtagtgccactaacttgaaagccaagtattttgtatgatacaatggcttgtgggtttgcatttttatttaaagggatatattttggggactatattgtaaacaaatttttactataagagcttatggattatctcggtatcagaaacatttgatatgttcctttgaccgtttgcaggtggtggaaactg

SEQ ID NO: 89846 - DNA, 649 bp, Citrus clementina
  Intron number 1 from transcript clementine0.9_025899m (loc us clementine0.9_025899m.g) derived from phytozome v7.0 (c hr-ID scaffold_132; pos 414734 to 415382)
ctgtcaaatcttttgagtgagtccttgtttagtacttttaatataagcttcttttatcctggagttcaaaaaaccatttaacgttttaataatcataagatattctttagtgttagacaataaggaaatagtttttttgcttgtaagaagagattatatctttcgagatagcagcaaaagaggtctcggagttgaatcctgctcacgtcagagtttaagagagatgttatttatattcatgaaaaatgaatccgatccattataagatgcttgaattttactaggtttattctttgtaagtaaacataagcaataccctaatatctccttttgcttactacaagctgttacatatttttttttcttatattcatgaaaaatgaatctgatcaataatcaaatgcttgaattttactagttttatttcttgtaagtaaacataaccaatatcttaatatcccctttttgcttactagaagatgttacattttttcgagatagtacaagaggtctgagaatcgaatcatgctcccaacagagttcaagaaagagagatttgttttttttttttttcaatttcctccaaaaagaaaaatccataaccttaaattttttttttttggttttttttaatgtgacaggggacaag

SEQ ID NO: 89847 - DNA, 402 bp, Citrus clementina; identical to SEQ ID NO: 83433
  Intron number 1 from transcript clementine0.9_022124m (loc us clementine0.9_022124m.g) derived from phytozome v7.0 (c hr-ID scaffold_47; pos 447898 to 448299)

SEQ ID NO: 89848 - DNA, 179 bp, Citrus clementina
  Intron number 1 from transcript clementine0.9_011662m (loc us clementine0.9_011662m.g) derived from phytozome v7.0 (c hr-ID scaffold_117; pos 379565 to 379743 reverse strand)
cagatataagccaggtaataactgagccttaatttgatgatttgtgagattgaatatccccactagctatgattttttgatttttttttcttttttaaaatttagcatttataaataatgttctagtcatcttaatcaaataatgtttgttgcttcttgtcttaattaggctttaaggg

SEQ ID NO: 89849 - DNA, 257 bp, Citrus clementina; identical to SEQ ID NO: 83282
  Intron number 1 from transcript clementine0.9_002572m (loc us clementine0.9_002572m.g) derived from phytozome v7.0 (c hr-ID scaffold_74; pos 629399 to 629655 reverse strand)

SEQ ID NO: 89850 - DNA, 542 bp, Citrus clementina
  Intron number 4 from transcript clementine0.9_000055m (loc us clementine0.9_000055m.g) derived from phytozome v7.0 (c hr-ID scaffold_132; pos 251008 to 251549 reverse strand)
atattgaaatcttggagaaagaggaccttgatctggtgagtgactttatgttgaacggttcaacttcgcaagctttatccctctttcattgtttgaagtctcagcatggtgcactttggttttagaatgtttgtactttggggttgggtgggaaggagagggggtctttggcatctcggtattagttgtgaagcttcaatatgccacagctaggttttcaaactttcggaggctttctagtcgtgaattctctatttttcttttctaactttagcattgaccttagtgaacatattgttctttttgctcttttcttttaggaaaagactgaatagactataatgtttgttataaaatagtcctttccaattgtccttttcattttgggtttgtctagattgtttaatcaagtgtccttgcattcactggaataatatgttttctcatgctttatacatgagctgctttgaatgaatgtgtctgattgttttgcttgttcatggacagaaaaatcatttatctggtttgcacaaatcctacct

SEQ ID NO: 89851 - DNA, 447 bp, Citrus clementina
  Intron number 1 from transcript clementine0.9_023812m (loc us clementine0.9_023812m.g) derived from phytozome v7.0 (c hr-ID scaffold_25; pos 1141095 to 1141541 reverse strand)
gccagcttgcagtggggtggaaccattgcagccctgtgagtcaccctcatttatattttcatacctttattttattttatttgttaattttatgttctttttatatctccgctctccggcttccaggattcatggtaataaaaattttgtttgttctttattttttatggacttcaattcaacgaacaccacgaaatcttggctcttgattaaaatttttttgagatattttatcttgtttctccggtgtcattttcttctgctacctttgattctcttattacctcttatatattctaaatatgaatttaaaattgaagacaaacatgtaatagtttatacactaagaattcaagtctcttgttctaacgcggcttattggcatatactagtgactttttttttttcctttcattttttattttctcttgcagattcttgttactt

SEQ ID NO: 89852 - DNA, 878 bp, Citrus clementina
  Intron number 2 from transcript clementine0.9_010428m (loc us clementine0.9_010428m.g) derived from phytozome v7.0 (c hr-ID scaffold_77; pos 444242 to 445119 reverse strand)
cttggggtggttcagccaactggagtgaagtggaggtgtaatctgaactttttttttccttttatgtttctgcatagtaccttctagttttagcttttttacttgtcaaaactttctttttcttttatttttctgctcactaccttttggtttttagcttgtttacttgtcaatgtattttttcatgtaagtggattgcagagactatgcaccccattgaaaggtacccatttgcttgtaccctgacacttttacccattgtgggagagtaatcctggacttgactatcctcaaactataggtttgagcagttgtttcagagaaactatttattacatgtaaaatatctccccataatcatctctgaaatacgaagaatgccagttcttgcaggattaacacccttaaaaattatgtttaatcttctatagcttgctatgaatctggattcctttcgtaaattttggcttgcatattctggcattcaggaagcccaactgctcttgcgtgaaggggatacaaaaattattggtgctaaatagggaatagaagctgatttgaacttttttgctaaacaaagtagtcattgctaaaagatgatcacgagattaagtcaaaatttttgccgccatatcaactcactttaggttcttgtagaaatttttggaaggacaattcatgctgaatatcatatacgaaagtcaataaaaattttcatgggttcaaaacttagtgacaatgttcacatttgtttcaaacaggaattgcatataatcagaaaaatatctgcctttcttttgaatttttctgtttttatctaaacaggtgttccctataaactttatttaacaagctcatcgttataacatccagggagc

SEQ ID NO: 89853 - DNA, 752 bp, Citrus clementina
  Intron number 1 from transcript clementine0.9_010428m (loc us clementine0.9_010428m.g) derived from phytozome v7.0 (c hr-ID scaffold_77; pos 445120 to 445871 reverse strand)
tcttctggaattcaactttaccgtgatatagagaggttgcttcttctgtacgcttatatttatttttcgttgtttgcttgttctggtattttgataccaaaaagagagacagtttatacacacacacagagatggctcctttaaaaacaaatgaaatagaatctaccttattaatattggtgattgattaatcattttttgttttcttaccttattaatagtgttataatatgggacaatttatccttgaaaaaaggaaatattgaatcaattgattgcaaattaggcgatttttcaatttctttcccttctagaaaagctaccaaccttagggaaaatggaatttccaccacgccaaccaatagctctgatataatttaagaatacgaattattgttgtgcccataaactggattatatgggtgctagcttgttcagtaggtaaaatattttgggtttaaactagaggtctagagaaatatatgtttgttttaattcaagatcctgcatttgttaaagtctgagaaagctattaaaccatgaggtttaattttaatggcatacggtttaatagctttcttggactttaataaagtccagcatcctggactagatcaataatctctcactatatagacaaatacttgagaaacagctgctaaactgagagtgttcttcattttttattcatctagtggaaaccttttgtgctttcagattacttacggagactgtgcagcaatcgcaaggtg

SEQ ID NO: 89854 - DNA, 673 bp, Citrus clementina
  Intron number 4 from transcript clementine0.9_019978m (loc us clementine0.9_019978m.g) derived from phytozome v7.0 (c hr-ID scaffold_15; pos 3837537 to 3838209)
aggtaagtttattttgtggtgcactagtttattgaatgtttttactgtgtaaatatagagtctggaatctgatggaaacatttggtagaggatgagttgatttcttgttgacctacctgttggaatttttaaagtttgcatcttggtgttttatgtgaaacattttggtctgaactttgaatatttttttcttcctagagcttcatgatgccatgaatgtccggatgcggtgtagccaaaatatcaggcatttctgatttttattttgaggctgattctttattgacctatttgtttaattaattctcttcctaaagcataatgatgccattaatgtccagatgatgtgtagcctcaataccaggcatatgtgaatttcatgtttggtgtttaattaagcagcttaagctccacaaaatctggaaacgtttccattttaaggaataggcccagtatttgtttgttatgggactgaagtctgtgtcaataattggctggctgggcccattcatgagccaaatatttggctgtggttccagagctcttagctttttttttttttttttttaactcagtcgcatcatgtctaatatatagctctcagttaatttacttctgacttgttattaactacttaggctgccactagaatattagcccgtcaacttgttcg

SEQ ID NO: 89855 - DNA, 517 bp, Citrus clementina
  Intron number 1 from transcript clementine0.9_027066m (loc us clementine0.9_027066m.g) derived from phytozome v7.0 (c hr-ID scaffold_128; pos 201067 to 201583 reverse strand)
ggaataaagaagagataacaaacccatcgaaaaaggcctggggagaagaaagtccactaaattaaaaaattggatctccaatttccatgctggtaataaaaacaaatcattttgcaaagcttagcatagtcctcaagtgtacttaatctcatgtattagtcatgacacttggaataaagaagagataacaaacccatcgaaaaaggcctggggagaagaaagtccaccactaagctgtgcgacaaaagaaagagtacaagaaagaaaacacaactaattcatgaagtcctaaaattcatagtgctaagaaatcttgaaaaataggaaatctcaagtcattactgaacaaccacaaaataagcactcaaaaaatccctaacatgaaaattttcacctggtcctctattctctcaactgctttactccactccatttacaaaattaaccggtaagctagttggtaaaaaccccaagcgataagagagaccaatacctcttatgtgatataccctaataa

SEQ ID NO: 89856 - DNA, 679 bp, Citrus clementina; identical to SEQ ID NO: 80790
  Intron number 2 from transcript clementine0.9_024447m (loc us clementine0.9_024447m.g) derived from phytozome v7.0 (c hr-ID scaffold_47; pos 288191 to 288869 reverse strand)

SEQ ID NO: 89857 - DNA, 736 bp, Citrus clementina
  Intron number 2 from transcript clementine0.9_004916m (loc us clementine0.9_004916m.g) derived from phytozome v7.0 (c hr-ID scaffold_25; pos 1537522 to 1538257)
tcttccctactcgttctcacactgttgcggctcaggtatgagactctcctgagccaacagattatccttagctgaaattttgagtatgtttctgactgttttgcttctgctttgctgcccgcagctcaagtatttggcaccttagttctggatatcccctttgttattttagggatgatgttatagaaggaaaaaaaaaaaataacaatgaacatattggaatattattttttctttggttccaaattttgtgccatatagtttttgctttatattactagttacaaatagatgtaaatatatatttggatgtctaaatgcatatttgagaatttgttgtttaatctatttgtttgatgatgcattttggaagtgtaaacacatgcctaatcaaactggatggtgttcacttcttgttgtaagtttcatgaagtatttgtccaaattgttatcaaatcagagtttgatttcttgcttttcttggatatcctttgaaacatgctatttgacagcaaaacttccatctttatttattaatttttctttctaaagttttttagctatgaaatattatggtcacttattcttgtctttttcaattttatgtggctgtgccttttcctttgacaaagtcttttgaacatgtatagcttgaccctgtgtagattttgttgttactggcttggtttccctgattgtgatagttaactctgatattctatacagggtggtatta

SEQ ID NO: 89858 - DNA, 945 bp, Citrus clementina
  Intron number 2 from transcript clementine0.9_015842m (loc us clementine0.9_015842m.g) derived from phytozome v7.0 (c hr-ID scaffold_18; pos 16495 to 17439 reverse strand)
gtttcctttctaaggtacactatttgacgctattgctttttgctttgattagatattggtttttgctgtttctacttctaaatagatattaaaatgaaaatttgctcataatcatatcctgtcatgcacgattgcaacgaaggggtaagataaattattttaactgggattagcgatagaatcaaaatttagaaaattttcttcctacacaaagagaccaaaagtttgaaagcaaatacaagaattaagttattaaatggtttttattttggggttgttattgttgatcgagaatgaaggcttgttgtgtgacccagcgtgtccagagtaataccttttttctttttttaatcctattctttccaaagtaactcacgtacctattgaatcgtgaaccgaagaatcaagtcctacggggccacttcttaccactggacttcagagtaatctttatttatcagcttcacaatttttttaacagctcaccaagtatctgggattcaagatttcgaacagaattttcaatagattctcggagaagtactgcttttttctgaacttgcctgggagtttacatttgtccttttctgaactttcaagtgatcttgtgatgagttctgagactgcttctttagtgcacattttaatcctttcctgcatccagacgttaattcgactattcaaattgaatcatttatttgcaactcttttgaactttgatcatttgctaacttagcaactagtaacaggagcatatgcttgttgattgaaactattcacaggagaatatgcttattgattaaaactatgtgattgtaatgttcaataggtgaatctgcactcaagggcttttatttcatgatattccgcactaaatctgcattgctactttaggtgtttatttattttttccccatcttgaacaggtaccaattaccactggca

SEQ ID NO: 89859 - DNA, 871 bp, Citrus clementina
  Intron number 4 from transcript clementine0.9_021103m (loc us clementine0.9_021103m.g) derived from phytozome v7.0 (c hr-ID scaffold_25; pos 2102213 to 2103083)
tgtcttcttctgcggctaccgttcgtgaaagaaaggttttatctctctggggatctaattattccgttttcaaattttttttttcccaaaacggaacctaatttgcattaaaaaacaaaaaaactacttccaaggcaaaaactttgtccacacagacacagcactggatcttattaatcaagtaaaaagaaaaaattccacaatctttgtataaccacgtccttttttcaaaacgtagattttctgaattgcataaattttatcaatttatcactgtactttctttaatatttgtattttgcatatttttgaggtaatcaggaaactttattttgaagaagtttgtaggatgctccagacatcgattatggtgcagtatcccactttaaactagatgcaaaatattaactatagatttggaatttttgtagatcaatttgatattattttatttttccattttttttcttaaatcgattaagtgatatttgatgaagcataaatcgctctaattctaagtaatggaaaaaaacaaaaacaaatgagttagtaattaacaataaatccaagagagatattttactataatcagcttggaagccaaccaataacaacaaacattagttttttttaattattattatttcaaataaagctgaatgttgattatgttatccaaaagtgtatgagagattcatgaaaaactgtgccaatttttttgatactaaatttttgagtattgaaacaaagccaagtaaaaatatggttgtttgtgtaaaactggattgtactatgtcattggttttggtgtcagatcattcaataattaactgaagctaacaaatgcaaacttcttactttttacagtttc

SEQ ID NO: 89860 - DNA, 716 bp, Citrus clementina
  Intron number 3 from transcript clementine0.9_010101m (loc us clementine0.9_010101m.g) derived from phytozome v7.0 (c hr-ID scaffold_47; pos 807138 to 807853 reverse strand)
aagcaaattcgacatcttgctaggactcttatcgagtatgggtttgtttcttgtggctatgtgtttacaatcgctgtaattagctaaatttggtcaagaggaatcagcaccctttttgtgtaaccatgcatttagtgttttaagtgttcaatttatctttgatgtgtacattaagattaagcagttcatagatcttgcctagtgagctgaatgaattaagagttgaataaggggctagtctctaagtttttgcatttctatttttcttgaatttttgtatttttgctttatcatgctcatcgaaaaacatttagctgccttttggcttaaagcccatttttgtttcttctgggctattgatgctagttcctcctccattctactttatctgctcatctgctggatgatgtagcccgccatctatcgctttgcctcttcaagttaatttatgaatgagccaagtgatcgatagcatgtgtttgtgctcaatttcagcatgaaagtataaaaataagccagcacccccttgcctcatttttctagttagttagtagtttactggattcattttgatgaatcaatgaattatgtgatgatacttgacttttttcatttccattttagctttagtattcagtaacaaaactcatgtgctaatattatggattaaataacacttaaatatagttcttatccagttttctgaattgcagggg

SEQ ID NO: 89861 - DNA, 954 bp, Citrus clementina
  Intron number 1 from transcript clementine0.9_026046m (loc us clementine0.9_025456m.g) derived from phytozome v7.0 (c hr-ID scaffold_15; pos 4498027 to 4498980 reverse strand)
tggacagcattcaacaaattggccttcaagtacccgtaagaacgaatccctcccccccccccccccccctttgggaaatttaattattttggtcgaaatattcagcttagctaagtgctgtctaccgatgataatttaattataagtttattttaacttatatagctgaagtaacgacatttccgttttgatgattttagaataataagaaatctagaatatgttcagagcatgcatataatattgtgttaacttgcaacgagtactccgatgtcaagagaccataaccgaataaaataaaacgagattgatttgaaattgattgagatttgaggcagaatgagatgttgggtattgatccgacaccattaccatgcacccaaaaactcaagttattaagcaaaatccctatgttagtaataaagacaattcggcatagagtatgtagtagatagaaatgttaggcattttagcggcattagtagggccaacaccaacaccaaaaattaacctctaccagtgccaccgtatcttcgggcaccaccatcattgttactgcaaatgccagtagttcatcgcttggttaaactctgttatttgactctttcctttccctttcctttgcttgtttatgtcgacttgttatataaaaattgatgcagattgatgtcatcgaggttgatggaaattactacggtatgtgctcatttagactttctgcttatggtctttctagttagtagttacttcttgtgtcttcttttcaacttttgggttcttgtgagtgttgtcaccaaaggacaaagggaaagaggtaaaagaagcacaagaactcctccagagactaaatacagctaatatcataatctttcatgttttctccaaggatggtgatcgttgattgttccttcctttttttttttcccctcttaggtttttctgggtgtcaccggt

SEQ ID NO: 89862 - DNA, 387 bp, Citrus clementina
  Intron number 1 from transcript clementine0.9_011573m (loc us clementine0.9_011573m.g) derived from phytozome v7.0 (c hr-ID scaffold_25; pos 374208 to 374594 reverse strand)
cttggcaagtgacgactcttctccaagctctcaaggtctatcggactcttactcatcttctttcttggttgttcatctgagtttctttttagagtattgtcttacagtttagtgccctggattctagcatatgaatgaatgaatatattggattttagttgtttcgcgacatcctgcctgttgattaaatgtcttcccttttatcttgttcttgtgggaaaagttataatgatacataaaccaagaggctacatttgaaattgttccaactcttctctcataatgcaagatggttaagagtaattatgctatgtacatttatttgcttgcttcctcttgcttcagttttttgatgtttaagtttccaatattgaatcaaacatacag

SEQ ID NO: 89863 - DNA, 394 bp, Citrus clementina
  Intron number 3 from transcript clementine0.9_010580m (loc us clementine0.9_010580m.g) derived from phytozome v7.0 (c hr-ID scaffold_25; pos 1808812 to 1809205)
ctgttgttaagggctactacaagaaccttatcaaggtcagttatttaaatatttgatattttttctcttggtagtctaattaaccctggctttgtatggaacaatatttttaggagtacttattttagtggattaagaaaaatgagaaagtcaacaaaattgatgataatgtgaaattttaacttttgatatactgttaaaaagttcattattctgcttggaatttcagtttgtggttggtaatggtgttactgaagaatttcaattgaccatgataatgtgaaaatttcttgaggctcttcttttgtgagatatgagatgtatgatgaccactactattttgtctatgctttttgcagactgttcttaacagatataatacctttactggaat

SEQ ID NO: 89864 - DNA, 939 bp, Citrus clementina
  Intron number 2 from transcript clementine0.9_017818m (loc us clementine0.9_014512m.g) derived from phytozome v7.0 (c hr-ID scaffold_25; pos 3203158 to 3204096)
gtatgtattaattcctgaaatagtcgtttctttcttcctgtagatttattttgaaattcagtttctttgcattgctttgacaagaatgcttgttagttcttttacttctgtgtacttaaatttggaattttattgttaacatagactggatttggatttgtgcttttacatctgactgaactgttggggctttaaggacttagttaaggggattgaggtttaagattaatagtcaaactgaggaagtttgaaaccaaccaccaactcatattgtggatgggcattatttcatttacaaactgactgagatggtactgatatataaaaagctattattaagttgggatgtattagacgcggggaaggccctaaatatgctaaaatgtgaagcttaaatggtgatgaactctctaataagtgctcacttcaatcttgcaatctaagagctgtaaacagagaaaaaatcttagagggctgcaggcagttgtttcaatttaaattcaaagatctatgtgtagcagaaaatattgtccgctgacattaaagcatgccactctattagatgcactgatgaaatgttgttttgtccatctttgttcatgcatattgcatggcgtctacttctttcaacgatgtttgaactttgtttaaaattttaagcatatcattattgaaaggttgactgatatagtcaaatggtttatcgaacgtgtttctggagaggactagctaggccttgtgtcttctgttaggaattcatttaataaatttcaattggcttttagtgagggtgttaatatatgttccgaaacgtattcaaaccctactagtctttcagatttctttagcatataattttacgataacttcagcgttaattaatatttcaactaccattttacaggtatatcacattttatttgcttttgtttgttgcaa

SEQ ID NO: 89865 - DNA, 950 bp, Citrus clementina
  Intron number 2 from transcript clementine0.9_012439m (loc us clementine0.9_012439m.g) derived from phytozome v7.0 (c hr-ID scaffold_74; pos 782614 to 783563)
gtggctgcaagtgagtttattagcttttagtttgtttgattcattactctgtaatttgattgtaaagagttgtgtttttggtcagtttttagtttaaatttataatcttcaactgaaaagtggggattgcttgtaagcttaaaattttattcttaagttagggagaaaggcaccaagttttaattttgaaacagtttgctaataatgcccactcactttgacatctagtgatttcgttccttaatagtcgtatattaaaagccacaccaccttaacttcaaacatacccttgatccaatggatcaaacaatggtgttagttgaagtcaataaagaaaagtttgatattgcgaagtcaatgattataatgttggattggaatgggcggactgttgagaattggtgttctgttctaagttgaaataaactgtgtcttatttataacttctgcttgcactttggcttttgtgataatatgtggtctctgcatcctaagttgtgttatcttatttttgaaagtaagtggtgagatagatggtggagcctaattgagttgagagaagctgtttctttaaacgcttggaaactgcttgtttgttttaactgaatttattgcaaaaaatgtttcctatttaaattgtcttttgttttagttggttgatatggctctgtattactgatgttttagtctgagttgttttcagcctgtaaatggatttaagactagatgaatcttttatcccttgagttgatctttctcaagtgttttcgtttgtagactgattttagccaaacattttcaagaggtttacttcaattagtttagtcttcagagtaggtattactttacaaagtgaaattatacagctagtcaggctagcaaaactatcagcttaagaggttgtaatgtagactgatttattcccatgatgtgcagattgtttgaggtat

SEQ ID NO: 89866 - DNA, 800 bp, Citrus clementina
  Intron number 3 from transcript clementine0.9_021596m (loc us clementine0.9_021596m.g) derived from phytozome v7.0 (c hr-ID scaffold_25; pos 2311888 to 2312687)
tttagtaagaagatcatctacttcttcggcttcaggtgggttttaatagttcaaatatcgggtgtatttgctttcatgagttgtaaattagggtttcaaagtgaagcatcgggtgtatttgattcaatgagttgtaaattagggtttcaaagtgaagtgttccttttgtttattgccttgtaagtttttcactcttagtttatgtttaaaaatttgataaattaaggtctgtgaagagaggactgctctcagttcttaaatggtacaaaagtcccaaagctttggaaaagtcagaatttagaaatatataaatacaatgtaaacattgataactgctttaccgggctcattatttgctagctagattgaagtagcatcaggctttcacccttatggttgtggaacctttaatgagctattaaactcttgagtcataattgatagcttaatgcgaatatagtttctgggttgattttcctcacaaaactactctgcagtgcgaggaaattggtatggttccctgtggttgagtctagtgtctgacaagcaagggcaaaagtcttcattagtactcttgttaatcttttcttttaagtataatagtattcatggtaaagtgaaatgtgatgttggttttgtttttgtcaagtgtttatggccccagaagcattaagctgaataattttgttctcttgagttatcttactgtaataatttggttggatttaatttatttccatctttattttttgttcaataatataggtactgtgaatccaaaggtgctgctggagcttttc

SEQ ID NO: 89867 - DNA, 860 bp, Citrus clementina
  Intron number 4 from transcript clementine0.9_013817m (loc us clementine0.9_013817m.g) derived from phytozome v7.0 (c hr-ID scaffold_18; pos 1095457 to 1096316)
gcactactatcttctggtaagttctagctctattatttcacataatttgtaataaacataatttctctattacaacatgcaactttagattatagcatctgttatcttcttaagcacgtgatttttcatttatttattcatttattcttttttgggtgagagaggggagtaagggacagttttgctattagtagttcgtatgggcagctgccacaacgcagcttccccactcttatcaaagaaattttctcctcaaatataggggtgggacacagtgcaactgtcctaagtagggacctaggaataggataattcgtcttaattttataacattcgtcttaatattagttataaaataagggtttcatttaaaaaaaaaaaaaaaaaaacgtgttaacagctcagcctccccaatggggtctaagaataagattatttgtcttaatattagttataaaacaagggtctcattttttgttagaaaatggaaaaatgtgtcagtgcaagcctttgattcccaacggacaaaaagataacttgatttttttaatttgactccatggctttccattggagattggagaataatagaggacagatatgaaaaggaattttatttgctcataatgaatgccaaagatgttggagtaggcagttctcctaaattagcataatgctcaaatcttgttcttttggatcaaaatcaacatgctcttggtgacgagaagaacactagtatatatataaccttaagcaattgtttgctatgtttactttattgaagtttctgtcgactgatgaaaagattagaagtgggaaaatcaacgtctatgttcttgtttggcaggatttttgctatt

SEQ ID NO: 89868 - DNA, 343 bp, Citrus clementina
  Intron number 4 from transcript clementine0.9_021909m (loc us clementine0.9_020139m.g) derived from phytozome v7.0 (c hr-ID scaffold_25; pos 2999927 to 3000269)
aataaattgaactgtagagtaaattattgcaatttttaactgtttcacatatttaccctgccagtttactgcttgtcttcgcattgaaagatgaaaaaaaaaatgttgccttttgagttgtttttcagtagcatgttatattctgtaggtaatgggactgacatggggattttgggatgcatctatattcgatttaaatcccaatattattctgggggctgatgtattttatgatgcaagtggtaaaatttgtgcttttgaaatcttgatctgttctcttcttcccatttgatttgttggctcaagctgaaatgttgtttctggttttgctggtaagcctttg

SEQ ID NO: 89869 - DNA, 852 bp, Citrus clementina
  Intron number 1 from transcript clementine0.9_031270m (loc us clementine0.9_031270m.g) derived from phytozome v7.0 (c hr-ID scaffold_47; pos 1658311 to 1659162 reverse strand)
acgaaggtgaagaagggcagaaaataatggaaaaagtcggcgctgcagagggacaatgagagccatgctagatgattatgcacgatttgaaacgggtattgaatatccctttctttcaagtattaggtaccttattttcattttggatattttgattttggatgcttgaatttcctttttcagttaaacaacactatgttgggtgatttcttttatttatatatatataaacagggaagcctttactaattgtacggaagaatttgataattgtgatgacagcagcaaaaaagctctctgaggaacaaatttcagagcttattccaaaaacaacattaatagtttatataggatgtaatctgcatcgcaaaaactactcaaaagagaacaggcttctcaagcagtgggtgatatagtctttgatcacataagaattggtgtagccattatcatccttgtaagtaacatcagtcactcgtgcaagattgagaatgcgcttaaagaaaggcactgccacttctgttggtttaggaatccttcatttatatcttttcatccatttgatatttctttgcaaaatattttagagtgtgtttgtcacaattctattttctttcttgaatctcgagagttgagacttgagagagagacgagagcgagatgagaactgaagtagtgaagttgagttgagagagacgagagtgttggctgtaggctgctcattgttgtaggtttgagtttgagtgggctgagagtggtgtgactgtgtgaatgagtgggtggtgtttgagtgtcttgcgtgtgtttttttttttagccaacccgttcggatattatcttccatctgatccg

SEQ ID NO: 89870 - DNA, 414 bp, Citrus clementina
  Intron number 1 from transcript clementine0.9_001458m (loc us clementine0.9_001458m.g) derived from phytozome v7.0 (c hr-ID scaffold_15; pos 4205305 to 4205718)
ttctgctgcaccggttgttcgacctcctgttggcggtatgattcattctcttttgaattctgcggaaaagtggttctttttctttcagattgatttctttttttctttttggacatcttcatttaaataaacaaaaaaaaattgtcacttttatctgtgtttaaaatacaatgtattatgatattgtatgtatttcttaacttgtggtttgtgataatattgacgttcctatcgaatttgttcttaattcttaagaaagggaaatggaactgttttcaaggactaggagcatgtaattgcaccaaaatgagtgtaaatggaattaagattatttgtcaggagtgattttatgtattgactgctgattttattgttccagaaattcaaaaattgaagatctcggagccggtggct

SEQ ID NO: 89871 - DNA, 1042 bp, Citrus clementina
  Intron number 1 from transcript clementine0.9_005181m (loc us clementine0.9_005181m.g) derived from phytozome v7.0 (c hr-ID scaffold_25; pos 1053122 to 1054163 reverse strand)
ctgagggtgacttcaagacacaagcgttcaaagaggtagctgctgctcactcttctcttactctgcaattgttgggtgtatgcttgttccagttctgcatccggaaagactttcgacatgggttatctgtctaaatacaaatttcactccctggccttcgtaatataatgtgttctacaaattaaaaaaataaaaatcatgacaccgcactattgttttggcttctcacattctaatttcgttcgctcacaaaatgtcagtgatcgagaacaaagttccgagcttcaagaaagagaagaatgtagactgcttctagatcacagaaatggttgaatttgttttatttgcttaaactgtatttgatttcttgaaaaaaaaaattctttttttttcctcttccgcatttgtctttgctttatcaagaattttcttagtcataaatgacttttgattagaaagttttttatgtttaccagtttaatatagtttggtctgttatttgagtttttgtgttcttgtttaactgaaatctcttttacttatttgagttaatttgggaaaacaagtttgtctattataaaagagaggttcagttacgtctgtaatccctttggatcaattaaattccttaaaatatgggctttttggcttaaatattgtgggttcttagcaagctgctgatttctctttagaaagaaaaaaagcgccatttttctgataacttttaaattagcaagtcatagttgatattgtattttgcaagtcctaaagaaccattttgagatgggttttgggcaaaaaatgatagcaaggtggaccagtcatagtggcagaaggtaatgtgaacgccactggttcttcttctctggtatgaagtgactgatgattattcttagagcattggcttgtataaaaaacattaatgaagtgaccaagaattggaatgttaatctttaaaatattgtcatgtccaaattatatgtgttgaacatctgtatctgttattttgccattgccagctttccatataagaaaagagttg

SEQ ID NO: 89872 - DNA, 814 bp, Citrus clementina
  Intron number 1 from transcript clementine0.9_029409m (loc us clementine0.9_029409m.g) derived from phytozome v7.0 (c hr-ID scaffold_18; pos 3937779 to 3938592 reverse strand)
ggtcttgctttaccggcccggtcgattaaccatctctattcttcgctttagtaagggtataaacgtatatcagtctttgcgcatttgctttttctttcaaggaaaggacccgccacgagcatgttcggttgtccacttttatcaagcgctttttcctcacatcattgttctatcttatcctctagccttatgcttgtgcgtgactaggcttgagcttactttagacatttttggaaaaacgctgaaaataactctgttattttgcctacaaaaattttaacttgataattttttttattgtatcgtcgaatagtaatttaattctccatccacagcggaggttcaaatccaaacctcttatttctatcacaaaattttaccatctcgactaagtaccgtcaacaaatttttaattgataattctcagtaaagtaactaattaatacaatcaataagatttttcttacttttgcttgtcctttattgattgcaccaaaattttgggtctttattttcttataaagacaaacatatggacacatcatgcatcatgaaactacaacttttcttttctttttaagatttgcaaatatgctaaaggaaagctccaattaattcccacgaaagcaaacagggaagaaagctcaaagcaggaaagtcatcatatatttaacttcacatctctcatttacatttctcaactctaaacactttgtttcagtcacaaaatttccttcatccatggcttcattttcttctactagccttattgctcatagcaaatacgaggtcttcctcaattttcgagggaagg

SEQ ID NO: 89873 - DNA, 540 bp, Citrus clementina
  Intron number 2 from transcript clementine0.9_015884m (loc us clementine0.9_015884m.g) derived from phytozome v7.0 (c hr-ID scaffold_47; pos 302691 to 303230)
aaagacttagaagacaaagggtatggtttatccttttttttttcccataaaaattatgtaatcattttttcttgccaagtgatctccttgtggtatcattttttcttgctatccttctggttttagataatatttcaatgggttaaatgcaatgcctttcatattaaaagcagatgaaattactaatgttaatatttgcccttcactttgccttttatgagtttttattaaagacatagttttaatgtgttgtgatggtctagctggtaacctctgattaatgcagatgtttcttttcgattttgcttgccattgatcctaatatggctgttctcagctttgatatattatcatcggaccttttttgtgcttattgtgctctgttatttgattaaatatgtaaatttcttccattaataatgggattgccatgtgagtcttttttttttcagctgttgtcttaaaaactggcatatagatgcccatcttagatgttaaataacaccttgaactttgtttgtaggcggaggtgatcctacc

SEQ ID NO: 89874 - DNA, 663 bp, Citrus clementina
  Intron number 1 from transcript clementine0.9_008543m (loc us clementine0.9_008543m.g) derived from phytozome v7.0 (c hr-ID scaffold_25; pos 1797808 to 1798470)
tttttttttttcccttttttcccttcgggcttgaggtaacgttcatctccgctgatttatgttcctttttctttaattttcaagttattaatatcctttttttattatttaaattcattttctgaaatttaggtgttgtttggttgtgtaagtgcgataactgtatttgttgtgttagatagagatattaaagaaagataaaacaactcagcttttgaagtagctgtatttattcaacagctgaaaatttgaattagctgtatttattctttccgcagctgaaaatttgatggaggtttaggattagttttggctatatgaatgagattttattgttattttattattttttattttttgctgtgaaagcaaggtggaattttaaattccgtattggttaaatacttgttgattttctgtttttaaattcaattttttcgagtttatgttaattatgatgcagaaaacaaaattataatctcctattgaacttagaatttactcggctggaaaaagtaaaaccacaaagcttttttgacctttttctgctgagtatggttctatttacgttaagaataccacccagaatgagattttacttattttctattttcttatttcttccctaataatttgttttggtaattttgctgatacagagcc

SEQ ID NO: 89875 - DNA, 481 bp, Citrus clementina
  Intron number 2 from transcript clementine0.9_008543m (loc us clementine0.9_008543m.g) derived from phytozome v7.0 (c hr-ID scaffold_25; pos 1799321 to 1799801)
cttgggaaggtactttgacttttaattgtttgcttattattgcttttttttaaaaaaataaataaattatttgactgtacttgattgcatgaatatatttattttccaagcttgggcgctgctgcactggacaatcttgtaattttgtttctgttgcgtcttacgtattttcttgtactgaaaattgctatcatgtttacattttaattgaatattatgacatatcatgattgcctacaaaaagaacaagataatgccacaattatttatcctgggctcccaatgttgacaatggtattcattactttgaagaattagaccaggaagttctgtgcagttttattgacatctttaagatttatgatggaagaatgtgactgcaaagttctgtgcataactttatagttagactatattactgtattgacatacttgtgttacttcagaattatcttctgagagtgggccacaatcctcacat

SEQ ID NO: 89876 - DNA, 851 bp, Citrus clementina
  Intron number 1 from transcript clementine0.9_000029m (loc us clementine0.9_000029m.g) derived from phytozome v7.0 (c hr-ID scaffold_15; pos 900986 to 901836 reverse strand)
aaaatctttttaaggacaaggtttgcttttcttctccattttcatcctcattttgcagccttttgaataatttttttttgtatatatatttcttcgagatatgaaggtttggccatgctaacttacatccatacaaaaatgctcctttggatttgggacttggattctttctcaatttcaccatttgttttatgagactgcaaaattaaaaatagaataaaccttgacctcatgctgtaacagataataaaatacatgtgctgtaaaaatcccttaaagtttaaagcagtttctaagaactcttttctaattggttagtttctagcatttccctttttgtgtttgaagtttgtttgatattttaattagtatatccagcatctctccttcaattatataaattgatgtttgcctatattaatgatgtatatatcattttggttttaaaggaaggcagaatttacctgttatcaaaattactattcaaaagcatctaagaatggaacttatagctggtaatgtgtttgtgaatgtttaacatcaagttttttgggcttagctatttcagttttcagttaccttcagtgattgtggcacgaagattatagattgcttaggcaaagttctatgagtctcctaagtgactattgctctacacgaacatttacattaccagtcctcttatatgcacgactgtaaacatccatgtgtgttttctgcttctgcttgtgctgttctccccattatagatatttctgccagctaagtatgtcttattattcaattgtacgctaagtgctacttcattcctttcaggtgaaacaaattccattctcgtttcggtctgtcgg

SEQ ID NO: 89877 - DNA, 1035 bp, Citrus clementina
  Intron number 1 from transcript clementine0.9_021636m (loc us clementine0.9_021636m.g) derived from phytozome v7.0 (c hr-ID scaffold_25; pos 2997220 to 2998254 reverse strand)
tctctttcctagattccgcagaatcggacataaaggtaattgcatcagcttataaaagtttgattattttattaatgtttatagttagtttgtcgaggatttatagatagatattgagaatgttgctgggtctaagagtactactcctgagaataagttttaagtcacagtttgacgataatgttttgtcagttttgacgaattctgatgggaagtgaagtcatggactttaaaatcctatttggattatttatttattgctgaggagggcactgatcatggccacccctccacatgtagaattgtaatttcttaacttgaaatatgtctgtgcagttcatgttatgaaggtaatttactacttctgcaataaagaagctcacttagcacttcaattaataaatgaatggaaagtaacatctctagggcaggaataaaatttgctgtagcagatcgacttaggtctggtttctaactgccacgcttcagcttagttttgaaaccaccccagctatattgtgtggtaaatacggtgcttaaagattttcagtcttgtagtgtctcgggatttgtattctttcttttagggctagtgattcatggcagctggggattaaagccacagcactcagttgcaaacaggcccatattttacctcaatttacttgctacatatattgtgcatactgcatcaaaatgatagcacaagaagtaattgcggcaaggcgactttatatgatacttttagaagaaaataaaagcagaaaggaagatattgctgtgaagtttctttttcattaagtagtcatttgaattgctttgttttgtttaagatgctctgattttcctgttgcctgctgatgatatttatccatacttggtgattttctagctgcaatgttttcttcttatctcattgcaagtaattttgaaagttagagaatgtatgccctttatttttctctaatgacactgttttttaaaatctgatttccatcagccaaggttaagtctccagaatctgaaatcaactca

SEQ ID NO: 89878 - DNA, 806 bp, Citrus clementina
  Intron number 1 from transcript clementine0.9_007335m (loc us clementine0.9_007335m.g) derived from phytozome v7.0 (c hr-ID scaffold_74; pos 395794 to 396599 reverse strand)
gttgctgtttctccttttagtagacaagctaggaggtagctactttgtcattttacaaatatgttaagagagttagtaataccgtgccttcttatgttttcgattgataaggatgtggatggactagtgatggttgtaaagttcattagaaggttacctgtggattttggaactactgagatcaacctggtttttgaactatacatgggatgggactttattgattatctatctttttttagtttagtgcataagaaaatgactatactatgtttgactttcggaggatgtaaaattgatggggttttgtttatttagcttgctgagtggtttatcttgtttggggataacttgtttagcatgtatggtgaaatgaaagtatacgcaactaaattgctctagtcggcaataaccttctaatattgagtgagatcaccatgtgacaatgctttaattgcatggcatctaagatgcgattttgctagattgtttttatgtaggcaatacattctagtgttggacaacacccttctagtcttcgagcgacttcaccaagtgacaatgctttattggcagggcatctaaaatgcaattatgctaggttgtttttatatttgtttcagcactgtatgcaccgtgtgtctttgtatgtatgggctttcttaaatatgagattgtttctttctaacctctctcatgctacggaagggggtttgtattatgttattatcgtctgattaaatgtccattcttaattgtttatttgggcagatatactcctagcacttctacagtcacatataatt

SEQ ID NO: 89879 - DNA, 875 bp, Citrus clementina
  Intron number 1 from transcript clementine0.9_005054m (loc us clementine0.9_005054m.g) derived from phytozome v7.0 (c hr-ID scaffold_47; pos 215617 to 216491 reverse strand)
tgatctctacaagtgtgaaccttgggagttaccaggtacgtacatacatccatatatttttccattgccctagccagttcttgaatttctggtttatattatacatttaaaaaaaggataaaaaaaggaaacaattaacatgttctttagcttatttatttaaaaacaataaaatacaaatgaatttttcttaaagaaaagaataaggaatatatttagggttcgcaatgacctaaacggcaagtagttgtgtatagaaagcaaccaacatatattcaaaattaattaatgactacaatatataataaacagaaagattaatatttattgccgatctgcagctaacatatgttgaagaacaaaagacggtcaagcacctttaaaaaagttgttaacgtaaatatgtaatcattctgctctctttttgtttgtttgttatgtttatgtcttagcacaaactaaaagaactaatcaaaagaatcgaacgtgttttgtcggtcaaatgtcttaagtttttacataaaatagaataaatatcacaactcgcaagtacatttgaaaaaaaattactgcttggccccaccaaggttaattagtattcattcttcttcttttatttgcttttctcgtgaggaagatgtgagaaacaaggtgagcgaccaagtcaaaaagcatgaagcaaatatttcagcgtcgccacaccaaagatgatttattggattaatatatttttttttcaaatgatctataatcaaatatgatccatttcctattttatcttatgttacttgtacatttgtaacagtttttctcttgttattatcaatcaaaacttttcaggcaagtccttgttaccgagcaaagatttagagtgg

SEQ ID NO: 89880 - DNA, 524 bp, Citrus clementina
  Intron number 1 from transcript clementine0.9_030776m (loc us clementine0.9_030776m.g) derived from phytozome v7.0 (c hr-ID scaffold_18; pos 2919396 to 2919919)
attttaagaaaaaatcggcctttcattgagtatttgtaagtccgcttaaagtaaatattattgtttgattgttggtaaatttatgaatatttagtaaagtcaaacataataatgtgacaatgcactaattatagttttttcaaaatatttaatggattgtagcaaacaagaagcaaaaatattacgagaacaaggcaaaaaagcggtgagtgcagctacgatatcaattaatttccattaaatttgggacatgtttcaagcaataacttattgttatatatatatttttaattttttttaggacatagttgtattagggaaatatttcaaaagtttgagtgaagaagagaagggtaaatatagaatggttggtagtgatatagcacaaaataacaataaagaagatgattttgtaaagggaactaagaaaccattgaaactagatgcactccagatcgttttgcaaaactagttgtaaaattgtcaaaggataaaaaaaaaagttgttgtggagttgggatttg

SEQ ID NO: 89881 - DNA, 717 bp, Citrus clementina
  Intron number 2 from transcript clementine0.9_029185m (loc us clementine0.9_029185m.g) derived from phytozome v7.0 (c hr-ID scaffold_25; pos 438876 to 439592)
aagaaggtttgtgattctttcttttttactcatcactaatttagtaagtactatgtataattaatttaatcttacaagctaatatttcaattaataatttattttttaattttttttcccaaattgtgcacaagtgagttatatttttacgggaaaaaggggcatggacggcgtaaaaaacgtaaaagttattaagagaccataaaggacaagagtaatgatacagccacaaactcttgtacaaacttattttgtacaaactgacgtggcattaattcattggttgaatgaaaatataaaataataaaaacaaatcatgtgggtcaagtgatatttaattcaaccaatcttatcatgccacgtcagtttgtacaaaataagtttgtacaagagtttgtggctatatcattactcaaaggacaatggctcaaaagtaaagctagagaaaaacgagcataagtgaaggctctccccactctttgcgaaggaaacgatattatgaacgcttgacgtagtttttgttccctaattaataaacactttagaagctagcgaagactgaattaacttccatgtgttgaatagaaaccattattagatataatgttattgtgactggcttaagtggcaacgaaaatgaaaaatattatatgtttacgaatgattagttgtcacgctccttaaatattggctctcgggaatggcagttcgtgtttg

SEQ ID NO: 89882 - DNA, 751 bp, Citrus clementina
  Intron number 2 from transcript clementine0.9_002078m (loc us clementine0.9_001103m.g) derived from phytozome v7.0 (c hr-ID scaffold_74; pos 1118061 to 1118811)
taggcaagtgacttgattatgaactatataattaagagaatgttgattgtgatataaagctaaaaacaaatgatttttttttttttttggttgcttcaccaaaaagtatacttctctacttaagctgtgtatggctgaaggtacttcactcggagcactctaggcccatcatgcattcctatgtatgctttgtggtgaaaccgatctttggtcggcttttagcagtagtgaccactgcattcttttggatgcaaaggttcaaaggagtgcccttttttttaatttcagtgttttttgatatgatatgatttttttttctaactatattttattcattttggctagggacaaatagagagaaagttttgttatattaagagaaaacaattactaaagaatgaatcagcattcgaccctgagaaatgagataaagacatatgacagtgaaactctaagctatataattcttacaacatcaaacttatctaaaagctatatcctaatctcttcaatgaaaaagagcacaacatccttaaaaatcccttgcaaagtgattcagagatttatgcgaatggatgtgaaaaattatggttataaccaaattaacgaaatcacttgattgatgagaatctgggggaggcttgcatagtctgcatgaaaggatcttatttatataattttttgcttcaaatcggtttgaacattttaatttaatagtgcttgcgttgatgaatggcagatcttgggaaac

SEQ ID NO: 89883 - DNA, 665 bp, Citrus clementina
  Intron number 1 from transcript clementine0.9_012705m (loc us clementine0.9_012705m.g) derived from phytozome v7.0 (c hr-ID scaffold_15; pos 74832 to 75496 reverse strand)
cgttaaactctctctcttctttctcattctttcaggttcgttcccctctgttctgctttgctttgctctgtttggttggtgagaaaaatattacggaatcaaaaaaaaaaaaataaaggggaaagaatgagagttttgacacactgtttctgggttgggctattctctaatgtttcatggatggaattatcaaaattttgattctgaaattctttttaaaatataccttcaagaatatggctgagtttagtaattagtttctattcatcttgctcctcgtttttgccaatttcaaatatctgatattgaaatttccttttcatgctctcaactttttgcttgaaactttagattcttatcaatttctaggaattggaacattaccttcttctttttgaattctatgttagtatgcatgctgtataatatgtttattcgtattttaattcttttgtgaatatcaggaattcaatcaatttattttttggttcagtttttaaataataatatgggacatctgaatagaattatttatttattttttcattacaaattcactatcaaaatttttcccccttgttctgctttattgctctgtttttatactctgttttttcactctgttttcagattcagtacccagaatccaaggccttccgggagtt

SEQ ID NO: 89884 - DNA, 670 bp, Citrus clementina
  Intron number 2 from transcript clementine0.9_006809m (loc us clementine0.9_006809m.g) derived from phytozome v7.0 (c hr-ID scaffold_169; pos 67257 to 67926)
gatttgcgaaaatcgttttcagtttcccgttctatgtacgttcaattttgttgtacatattccgtttcttttatcgtcttgtgttcttcattcattgctcactgttttagcctctaatttaggatactgttttgtagcgctgtcgcctgtcagtttggttgctttatatttttctttgaagcatgattgtttggagtatttcgtatatattaaaaagtcaaaggtttagaaatatttcatattttatcattcgttagtcatatgctgatgtgtttttctttcattttatgctgcaaattcagactttgcttgcttgccaatgaaattctagcggaaaaatgacaaagtgttgttctggtattgtcgggtttaactcatctaattcaaatattagactcgatgatgatggcatttcttttggctctccatgtggaagtccatatgcttgatgagatacttgattaaatttgttaaccactggtgaaggactctgactcaaaagttcaaagtttgaacattacaaactgttcctagacttggcaacataagtgattaattggaagacttatttgtgatttcctgcattggaattgtaatctcagtatcttcttcattcccacttgcttttgcaacaggggattggctggagaacgcactgttaagcgattgc

SEQ ID NO: 89885 - DNA, 738 bp, Citrus clementina
  Intron number 7 from transcript clementine0.9_007158m (loc us clementine0.9_007158m.g) derived from phytozome v7.0 (c hr-ID scaffold_117; pos 472185 to 472922)
tgttaggctcttcggataaatcttctagtcaagaggtataattttttgacactttaaggccttgaccatgtgatttgtgtattttccttttctttgtagagcataaaaaaacttcctatgttggactgatatcaaagttatgcattgagaatttgggttcaactctgttactgaaaaatttctgatagttcacatgatctgtctaaaacctgaaattatttaaattttttattcatatttgaatctcgagtgtgctggggactacaaccttgacatctaaaagatccatgctatatgaaacttgtaggtctttacatgctaggtggggggggtttacatatgtgcttgctttgtaccttgtcgattgatattgatcaggatatagcagtttttgttaagttgaaagaatgatcagcttgggatgattgcaaagtgcagagcgaatgatgctatacccacaatgcaagagctgccacgatgttacagaatatggttttctcatcaatcatattggccactcaatttttatctttaccacctgcttagctcatggtccatcatttattttgtagtctctattggttatttcacttgcatgtctatatccatttcagttataacccatgtaatctcaactcatcctcttgatatcacatattggatgtcttcttaaaataaaacccatgttgcaacttttgttctttatgtcttcaaggtcttcccctgtgtttctgctac

SEQ ID NO: 89886 - DNA, 738 bp, Citrus clementina
  Intron number 1 from transcript clementine0.9_007849m (loc us clementine0.9_007849m.g) derived from phytozome v7.0 (c hr-ID scaffold_47; pos 1540895 to 1541632 reverse strand)
gtttaaaagctctctttgaatatcaatcaattcaggtactctttgctctactccttcgttgattttgctttcggtaattattcattatgtgatcatttaggatttgtgtatttttagttttggtcaaatttgtgaaagctggggaaaaaaaaaaaaaaaaagagtgcaatttttagattctagggatcaattttgaaactaagtttgattttattttattttattgtttgtgttcatttgagcttttctgttaattgaattctgaaggcttgaaaagcatagtagcagctgcgtttggtgacagataattggaattgagctatcgttttaactggagtttgatatataagtgttctataatatttttttttttttttgaatgagtgttctataatattttgattccattattctgatattaaatttcaattcactacttttttaaatgtaagggatactgttttatctgaatagcttgatattgaaaaaggaatatgcacgattcattttttcccttcctgagccataagtatttagttctaccgtgtttgccaactcctatttgtattcttcactcatagatagtaacctatattcctatcacagctgtatcttaaaactggttaaactcccttgagatatttgtggtagaatattgtctatgttattttgttgttttataggttaacaaactgaaatagttggtttgctttatctttcattggtaggatcatcacc

SEQ ID NO: 89887 - DNA, 648 bp, Citrus clementina
  Intron number 1 from transcript clementine0.9_016913m (loc us clementine0.9_016913m.g) derived from phytozome v7.0 (c hr-ID scaffold_47; pos 515279 to 515926 reverse strand)
gttaacggcctttccccctcccaaactagtctcaggtaaccttctttatcaaaatattatacaaatatcgattctttaactattcagtgatattgaatgtgaaatctgtaaagagaatgagtgctggtacttataagatagtggattgaatgttcagtcggaggggtgtacactttccatcatatgtgattatcttttgggatgtgattacttatttgtatatttttaaggattaaagatatttgaaagcacattgtgctacagtgaggtcatttggtgaatttttcataaatattatgtagttttcggttggttctttatagagctaacgaatttttggttaaacctcaaggaatttgcttcgtcttggatggccagatgatcttgaagattattgtttgtctgctgggtcatagatttgagattcttggtaaatttagtagttttaacagttaaaaattatttttccttgccatatcggctctgcatgtgttatgatgagctagaattggggatgccgacttgaagactcttgaactgtgattgaactagtcagccatgttctgcggtgatggaatcttcccaagttcaaaatgtttcttcttatcttatgttttctttttcagtgttgtgaaaaggttgggagcg

SEQ ID NO: 89888 - DNA, 798 bp, Citrus clementina
  Intron number 1 from transcript clementine0.9_023769m (loc us clementine0.9_023769m.g) derived from phytozome v7.0 (c hr-ID scaffold_25; pos 445979 to 446776)
gctttgcgatctaatcgaccagggcaaaggcagtgcgtttttatcccttgttatttgttctttacgtcgtgtactatttccttgtaattatgtattagatgacaatttggtggaatgatttttgattttttttttcgcaatcttggtaattttttttttaatttttaaacaacatttagcacaattctataaattatgatcttcaacaaggttgaaaccttaattcgaaatattttaaggggtgtctttttgcttttgaatcatgacccaggagagcttagagtccgtttgcttgttcaaaagggtatgcattttttttcttttaaataaataaaaatttgacagaatatttctctccctgatagctgatgaaagttacatctaactagttggtcatcaaaggcagtaaaacttggttttgtatcgtgtcctgacccttttgaataatgctttaattgcctgagaattgtttcactgtgagcgcagctgatgtctggcatcccctgctgagatctatagctattatagcgtgttaggaaagcattatgttctatcatatgagtgcatcatgctatttgcggaggaccatagaatatacggagttagtttttgagaactctttgaaacttggatcattacataattaatgtgttgttcttatcacttatttttgtttctgttaaaagctgataaagttttttttctgtgtaacttccaaattgtatgatgatgcatttaaatgaatttgtaatgaccatggcaggctagtctttataaaggggtttctaggaaagataa

SEQ ID NO: 89889 - DNA, 412 bp, Citrus clementina
  Intron number 5 from transcript clementine0.9_012661m (loc us clementine0.9_012661m.g) derived from phytozome v7.0 (c hr-ID scaffold_15; pos 2888127 to 2888538)
ggcaacaaggtaactgaaccttttctttattttgctttcaattgaatacttcttctaatagatttcttgcttcttgtatcgttatttttccttctcattcagaacaaatttgggtgaaatttttcattgaactgtgcaatagactatatgtacttgttatgtaacaaaaccttacttattttatggtactgtgcaagttttgacagaatgttattgcctcttcctgttaataagcatctgattttacttgttttcattacatgtaaacacagtccttttctttgtataagaagttaagcacttttgtcgtgcttatataaacatagccgtggaagtttatatatccttttgatatttcttgttcaccaataatgcagttagcaattttagcgggagatcttctcatttctcg

SEQ ID NO: 89890 - DNA, 1049 bp, Citrus clementina
  Intron number 1 from transcript clementine0.9_018697m (loc us clementine0.9_018687m.g) derived from phytozome v7.0 (c hr-ID scaffold_47; pos 362411 to 363459 reverse strand)
ttctctttctcaagagattaattgaatcagacaaggtaatttttcatctgggtttttgaattttttggtcgattattgatcaatctgagtcgaaatcaattgatttgatgtaaagcgtggatttttatgtttgtttgtgtgctgattcttcacttgtttcatcttaatatatcagtgtgtatgatagattgctttcttgcaactatatagaaattgtatatgcttttcttgcttcagcttgttggttctgatgtgggtatttttgaaaataaggttcctttcttcattcctggacaattagttgggtaaaaattagggttttgacaaatgggttcatttgatttgaggaattatttgtttctttttcctttcactgtaagtttttagtctttgctttatgtattaatgaagtgatgtaattggatgaattatttgtcccaaaattaaggataatgaatattgttgcccttttggaataatgggactcctaatctcgaactttgatagattcattatactgaagataggaggtttcacgggatggtaactttttgaggaattttacccactcaactcagtcgtaggtaggtgaaaatgctggttcttatattttgataaattattagttttgtatgataattataagggtgtccacccgtgattgatggtagcttacattctgtttggtttctacagaaaccaagtatttaacagtctttttaacaatcagaccgtatgatatgctcccaatgttattttcagtttgcattttaatcaagtttgtcaactttttagcgagtttctttgcttttattttggctagtctatcgtggtgcatctctctgttttatgagttgcaagtacccttccaatgttagctaattttctttgattcctgagaaaaaatgatgttggttgttaatatttagtctagttcagtcaagacaaatgatcaaatgatattgttacctccttgttagttctaatctgaaagttcaatttaatatcttttaggtgctttcggcattctgcttacaaattttttatca

SEQ ID NO: 89891 - DNA, 817 bp, Citrus clementina
  Intron number 1 from transcript clementine0.9_020766m (loc us clementine0.9_020766m.g) derived from phytozome v7.0 (c hr-ID scaffold_25; pos 2009432 to 2010248 reverse strand)
tgtgcttggatcgctcttttaatccccaattataggtaattctatagtttccttttctgttaattcttctcaatcttattattcctatatttattgatctttcatgctatttattgaagagacaactctagatctgcagaaattaggttcggccgattagtaataaattgaaacacaggtaattaatcccaaaattaatcatgaaaacaggatactcaattgttatgaattagggttaggtttagtgattagatctaatttttaaaccatgagtgggcaaaatgttaagtatgaatttgcctttaacctagcggagatcttcatctttgaatgagatttgaagagcttgcaatctaaaggagattgaagaccttttttgtctggaatgtgagtggataggagatttatgagctaatggaggatgaacattagtgcatatatgatatctaatatctaatacttttaggattttttttgaatctgtttcttgccgtgggatgtttatatatatcttatgattcttttggagtactcaagtaaagcacaaataaaattcttgcatgattagctatatgggaaagcatcattcaacggtgcaaggatttatatgttttgccctatttcttgctttggtatcacgtaggaaatttacagattgtaagatgatcaaccagcttttggacttcatgttttggagaaagcactttactaagtctttgctgtgataaatctgtgtgcttatttgtgctgttgtgcagcaagttaaattcgtgttttctgacatgtttaggcaattcggcactgcagaaccgtagca

SEQ ID NO: 89892 - DNA, 357 bp, Citrus clementina; identical to SEQ ID NO: 82532
  Intron number 2 from transcript clementine0.9_016714m (loc us clementine0.9_016714m.g) derived from phytozome v7.0 (c hr-ID scaffold_149; pos 189827 to 190183 reverse strand)

SEQ ID NO: 89893 - DNA, 433 bp, Citrus clementina
  Intron number 1 from transcript clementine0.9_029598m (loc us clementine0.9_029598m.g) derived from phytozome v7.0 (c hr-ID scaffold_15; pos 1350114 to 1350546 reverse strand)
gtttgcagtatgttttgagatcagggacatgtctgaagacattttcatgttgacctggctttatgcttaattgggttctcaaataagcttctattgcaacatgatatggtgccttctgaagtgaacccattgctgtgaaagcatcttaaccctttcacactgaaatctgacaactgttgtgaaagtagtcaatcagttatatgtgagctgcctacagttactgtctgctgcagtagttgattaatgattgtaattcttttgttcatggtggcttctgccccatttcactaccaatattgtttggatattgtccattgaatggtgcttttccttcttcagttttgaattttcgcccggtgcattcagttgcctctttttttctcattttttgtttttagaatattctcgtttcagcataaacattcatcggcag

SEQ ID NO: 89894 - DNA, 702 bp, Citrus clementina
  Intron number 1 from transcript clementine0.9_016663m (loc us clementine0.9_016663m.g) derived from phytozome v7.0 (c hr-ID scaffold_15; pos 2196472 to 2197173)
cgcttctgatttcaaatacttttccaggtaatttaatctttttttcctttcttgctttctggaatattctaagatcttaatctagatttgtttcctcatttcggcattttaaaaaatttgcttttttttttctcttacggtttagggttctcaaaatcatatacgatgctgttttactgccacatttgtaattcggccatttttccttttctttttttttttttgtgagtgttgaaaaggaaaaaaaagtgatattttcctttctgggtattgctggattttggccccagaaaaaaaactgtaatttcgtctctttgcgtgtatatatgtataggtatcttctacattactatcttattggctttccgggtgacgaaaatgggtagcttaactttcttataattgagttatgctatgtgggtttgttgtggtgattaaatactgatggcagtgtctaatgagatgatgagggaactctatctatgcgaaaatgcatggtgtatttcgtgtttaaagatttttatgcaagttttattgtattacgttgttttattaatattactgtctcccaatatttcagttcttgtgtttatcgaatgatagaaaagagtttaccctgatttatggttttgattgagatgtaatggatatttttatttgattataggttgggaagtcaaaacttgaccttggtgcctgcaa

SEQ ID NO: 89895 - DNA, 747 bp, Citrus clementina
  Intron number 2 from transcript clementine0.9_016663m (loc us clementine0.9_016663m.g) derived from phytozome v7.0 (c hr-ID scaffold_15; pos 2197180 to 2197926)
agtcaagaagattgactaggaaacaagatctgttggtaagaattccttcccaacgaaaactttaatactgattaatgtcataaacttgttggttcattttttttttatttaaattttcatttgcctgggcatgtttgctgtactattattcatgcattgggaattgatctttgaatgagtattggaatcaaataatgacgaaagtatataatgaacagttgaatgttctttggtcaaaataaattcactttggcatgacttaaggctgaaagaaaagattatgtaatgaaaagaagacaatttttatgatgattatgtatacatgtcaaacaatgtcgtaaaaaggaaatatgtcatagaatgcagaaaatacaaattttaatatagataagtttattaataagtcttgagtgatgctgcagaaaagaaaaatgaaaattcaaataagtttgttttgaaaatttaagtgacaatgctggttaaagtattgctgggtcagtagcttttaaggaccattttcagttcactatgttggcaatttgccttcatttattgatttggttgatataacgtaagaattttattatgaagaattcccctctctctccgttttctgttgcttattgttgaaacaccatggtttggttaccatccctattcaacaaatatgttaatattatgtgaatcaagcccttacaaattatatatggattgtgctgcaaaacagcacaggctagttgttccacc

SEQ ID NO: 89896 - DNA, 935 bp, Citrus clementina; identical to SEQ ID NO: 83418
  Intron number 3 from transcript clementine0.9_016663m (loc us clementine0.9_016663m.g) derived from phytozome v7.0 (c hr-ID scaffold_15; pos 2198125 to 2199059)

SEQ ID NO: 89897 - DNA, 640 bp, Citrus clementina
  Intron number 2 from transcript clementine0.9_000567m (loc us clementine0.9_000567m.g) derived from phytozome v7.0 (c hr-ID scaffold_149; pos 48692 to 49331 reverse strand)
gaccaagaacaagttgccacagtaagcttgctttactccatctgtccgttgctatttcttgcgcctacttccgtccttccattttcttttgaattagaatatagcttgtataatggtttgctttccatgtgtcatttacatatgcttctaaaatcatttgcttatcacttttaattttctctgtgaatgaccggattaattgaaggactggtgttgattaatgttttacgattatattggatgttgtctgtttcaatctccaatctgctgatttgtagtactccagagtagagttgtctactagtacctttagtaactactgagtgagcagttttaagcttacaagtatttgttacagcatttataacactgagatatagaaatgtaggttattgctgcacagatgggtattatttttgtgatggaaaattcttttttttttttatttttaaatcttctaggcaatcagttgtcaatgatcttgtttatccttttttgtcttttccttttctttttgcaatgatattcaggatattgtttagagtgtgttctacagtgttagaatattaaccctgcacaatgaaatctgtttgatatttcttttgttttgttgcatgcaaaaatatgccacaaaaggttc

SEQ ID NO: 89898 - DNA, 525 bp, Citrus clementina
  Intron number 1 from transcript clementine0.9_000567m (loc us clementine0.9_000567m.g) derived from phytozome v7.0 (c hr-ID scaffold_149; pos 49335 to 49859 reverse strand)
gactcctcctccgccgccggcgccgccggaaccaggttagtgttctcttttttcattttttgggatattggattctgttcttctctctcttgttgtttgctgtaatttaattagcgggaattgcttgtttgtagtgtttgattcgagaagttaggtttttttcccgccctgtatttacatttaataaatttctaagcttacccgtttagtccatttagattgtaatatgtgatgtacaaaaattgttgttttgtttaattttaggaaactacaagtttaggttttgtcatgtccttccaataagcattagatttatattcctgatgtggtgggaattttttaaatgtagtgctggtagctgttcatataaatgctattgtggaaactgctggcttgctaatgaacctgtagtttgttcgtttaggtttatgtgtatttttttaatcatgtttgaagcaatttaattggatcctaatcacatatgatttttttatattaacagaggcaaacagtgaaggaacaaat

SEQ ID NO: 89899 - DNA, 398 bp, Citrus clementina
  Intron number 2 from transcript clementine0.9_010695m (loc us clementine0.9_009571m.g) derived from phytozome v7.0 (c hr-ID scaffold_15; pos 2870788 to 2871185)
aggtcagaagacttcttcgtattttgcttaaaatgtcttgttattccttcatttctcgtgattttgtgtttattagaccttatggtttccacatatctgcaatcaaagattagtgcatctagttcttggttataattgtttatgtcctttttgtgactttgagaagttttcttgctgcaggtgatggcaagcaagacaaaaatatacattgttttggaatttgtgactggtggtgaactttttgacaaaattgtaagttaagtttgcatttgcctcttatggtgaacattcacatgcccctggcagtgaattttctaaattatttttataaatcaaatgtcagtaactgtaatttctggttgttggactgcaggcaagtagagggaggttgaaggaag

SEQ ID NO: 89900 - DNA, 550 bp, Citrus clementina
  Intron number 1 from transcript clementine0.9_030200m (loc us clementine0.9_030200m.g) derived from phytozome v7.0 (c hr-ID scaffold_47; pos 1641325 to 1641874)
tcactggcttcactccactcgtaatttgtttttcttaatttttaccattaaaatgcccttctatctctggctttacttttgattctcttttcctttctttactttagcttgactttcatgggtgatcatagcaatcaacttgataaaatagtaagggtataacaaaggtttttcatcaaacaaacagttttatatacgtatttagcttaaaagctatagctgctaggaagcaataccaaaaggagtctgaataattcgccataccatttcactcaccagagcaaataatattttcatgttctgcttgagtttgaacaagaattatattctaactaaccattttggtgtgctactgtacttaaccagatttgcgagaattgcttatatatttcttcattatttcaatctgttaagattagcctgcaacatgatatcttagtatttgtgtttctgaatcaggtacaaacttgtcaaatacatgtataatgttgacgttaactttaaattttgaacagtttggttttgcctgtgcattagagactctatctgg

SEQ ID NO: 89901 - DNA, 665 bp, Citrus clementina
  Intron number 1 from transcript clementine0.9_001011m (loc us clementine0.9_001011m.g) derived from phytozome v7.0 (c hr-ID scaffold_15; pos 3062071 to 3062735)
ttcaccagcccgcaagaactcaatctcatcattgcgtaacttctcttcctctttttcttattcttcttactatctgtttatttgagtatttatttgattaatttcatctccttgttgcagatatttcgttcttattgtattttcctgctctagggttttgattaatccaattattgtttgttctcttcatttcctcttaacggagcttctattaatttaatcaacaaaattttctattgtttggtttataaattgctcatttatgattcttgcttactttttagttgattattgttctcgttgtagctgttattattattattatttacatttgttcattattaagttgtaattcattttaaaagttcatttttttccctgcgtgggacttataataatgtaattgagaaaaaaatttgttcccattcggtgtatattgctttgctttggaacagattgtgctaaatctaattttttttaatttatttttggttatatatttgctgaaagatctgtgaaagaattgttgtgtggttcattctggtgtcacgagtacaattttaaactatttattttgcaccattttcaaatttagctggattttgtgttgaaaatgcattttgatccattggcagtctatttatagttcaatcttctttcaggaa

SEQ ID NO: 89902 - DNA, 620 bp, Citrus clementina
  Intron number 1 from transcript clementine0.9_011277m (loc us clementine0.9_011277m.g) derived from phytozome v7.0 (c hr-ID scaffold_95; pos 507871 to 508490)
gcgctatctgtttgtcaggtacttttgactgaattagcttctgttctggttatgcttatggtgcattttagagaattgatccgtgtttctgggtttcatttaatttgttcttttagttgattaagcctatatatgatgaaattgtttttgggaaagggctcattaggccatagagtcacgagtcacggaaatgctcctctgtcaaggagctccggggctggtcctcgactttgagaagcctgacattgaaagcactttcaaataactaggaaatttgctttcatgtttacagtatgggcgaacacgtgagctgcattgtggacaagcacttgataagtatttgtttttggagaatcacttgatatatgctttatagaaaagctctttcgcacgaagaaccatgcagaaattcaacgaaagtagtcttagacaaactgaaagtattggtaatgaatgggcacattaagatgtagtatgttctaatctgtgattagttggtcttggtttgaatgtaacaattatttgaattggaagtagaatcgattgtgaaaataaattaatatgggatgatagttgaatggttgatttacaaatctttatatgatgaaatcatgcaggaa

SEQ ID NO: 89903 - DNA, 764 bp, Citrus clementina
  Intron number 1 from transcript clementine0.9_010960m (loc us clementine0.9_010960m.g) derived from phytozome v7.0 (c hr-ID scaffold_95; pos 268504 to 269267 reverse strand)
ctaatattggcgcggattgtacgcttgataacgaggtaattataatttctcttttactctttatagaattttttttcatacgcacttattcattttaattatccggtttatataataatgtaaaatatttttaaaaaaaaataaaatgatgattttaaaacactagaggttggaaagttaatattgtcaatgctgtgattgcttgaggaattggcatagtgaactggtttggctttgattcttgattttaggttaactcatctttaaaacatccgcgtgagatgaagaataatttctgttttttaaatattcttgtagtgtggaatcatttaggataaacaatctaattatttcagacttctgattttagtcaagtatgtctctttctcaaattagggtgcaatcaatgctgtaaaatcataagtttgttggtgcgctaccacagtttaaaatattaaaacaatcactacattcatcttacttgattgatatgacacacgcatattatacattcatctttcttgattgatatgacacacatgtatagcttcagagtcaaaagaaagaattttttttttttaatatttcttgtttacattatgcaatgaatgaacagaaatataattatttatgtatttctacattttacaggtttgtttagaaaaagaaaaaggaaaaatatatatatgaaggttttataacatgaatctgtgatttctgttatgtaactggagatcatcttgtgcaggaagaggaagatcaat

SEQ ID NO: 89904 - DNA, 783 bp, Citrus clementina
  Intron number 1 from transcript clementine0.9_007841m (loc us clementine0.9_007841m.g) derived from phytozome v7.0 (c hr-ID scaffold_47; pos 795964 to 796746)
actctcattttttctctctctagcgaaaatcttcagtaagtctcaggtatctgctttctctcttactcttgggatctaaaattttcgatcgcattgcgcataatttttgttaactgttatgtgaattctcttcgatttatagtttttagtaataatttgtttagatgattagatctgtagacttgaagtcaatgaatttttacttcatgtataatttagtacgttttcattggaattatgtttctacgatattgatgttgtgttcgttttatttgttgtgaagatcctggagctttatactgctctactgttttgttttcattccatgtttcaattgccggattctttttttttttttttttaattttggtaaaaattactagatctattataattcattctatgtgaaaccatgtgtgacttcaagtttgtttagttgattgaaaatcttgatagtttattgcttgtttgaattatgcaatattcttttgttgttattgaaatactgtgatataattgagatattttcacattttttatgtgtgctggagaatctgcaaatcgatctgtgcttttagtatgtgaagtttaatgcaaattgtgttgtttatgatgtaatattagtagttttaactgtcatgatgagtgtttcgtgatttttaagctttgatatttgatcagattgtgtatatcattattctttgaattggtataatttatggtatcttacgtgcatttcacctctcaattgctaattttcatttatgtgaaatttcaggaaaa

SEQ ID NO: 89905 - DNA, 966 bp, Citrus clementina
  Intron number 1 from transcript clementine0.9_030601m (loc us clementine0.9_030601m.g) derived from phytozome v7.0 (c hr-ID scaffold_74; pos 359404 to 360369)
acatactcggcctcgtcacttcccaagcatttaaggtaaggaagagtgaatcctcttctgtatagggtatcctggatcaggcagtaccgcgatgctttatactttagtcttcttgcttcacttttatcagaggggaggtctccgtccttgaggtaccttatgataggctccatccaaagtacctcgttggacagtgatcctacgtccaacggctctaggagatcaatgctgggggcgggtatgtgttctgtcgtgatggggccagctgactgagctacaccaagggatgccatttttgccaaggtgtcggcttcgctgttctccagttggggtaccctttccaccttaacctcacaaaattgggacatcaattctttcgtttttccgaggtaccccttcatgttttcctctttcgcttgatattatgcggtaatttggcttaccaccaactgggagtcgctcttgatgtgtaccctctttgctcccaaagccttcgacatcctcaaccctgctataatgtcctcgtattcggcgtcattgtttgaagccttggttagtcatgggacccatgaagatcttttcttttcttatcttaagttcttttaatcggtgtcacgaatgctgagaaaaaaaaaagcttgcttctgacatcagccgcaacatgcttgacacaaatttatgaagagcatttgcagttctaggaacattattacctcacagttcctctcatgttgagttggaaccttgtcacattacttgtttatggtatttttaatttgagtcatttgctcagtgctcagtctgtataaatgttcaaattcctcattttttttttaaaagtcttaccaggtggatatcctcaggttgaattgttaaggttttttaaatgtctgtctgctgaactttggataactgttatcctttgaacatctgtttatgcgattttccaattttattgacagagac

SEQ ID NO: 89906 - DNA, 777 bp, Citrus clementina
  Intron number 1 from transcript clementine0.9_000024m (loc us clementine0.9_000024m.g) derived from phytozome v7.0 (c hr-ID scaffold_15; pos 754411 to 755187 reverse strand)
aaaatcttttcaaggaaaaggtttgctctaatttcttccccattttcatcctcattttttaatagtttcttcacatggatttgaaggtttggccatgctaacttacattcatattatgtgactccataattaaaaagagaatatttctgagctcacgctgtaacaattaatgatacctgtgatgtaaagtccttttaaagcagtttcctataaatctttactaattagttagattctagcatttccctttttgagttggaagtttgtttgatatctttactaatatgtctagcgttgctctttcaattatagatattaatgtttacctatattaatgatgtatatctaattttaattttaaaggaaagcagaagcatgttacttgctatcgaagtttctaataatggaccagatagcttataaagtgtttatgaatgtttcgcatcaagtttcacgggctcagctatttcagatttcagttaccgtctatgatcatggcacaaagacatacattgctcatacaaaattctgcgattgtcctatgtaactattgctgtatatgaacatttacatttctagtccttttatatgcatgactgtaaacacccatgtgtgttttcttactctttctgcaatattttaaacctaagaacctttgtgctgttctgcccattttatgtttctgctagcgaatttcattttacattcaactgtacactaactgctgtttcgttccttttaggtgaaacaaattccattatcgtttcagtctgacag

SEQ ID NO: 89907 - DNA, 688 bp, Citrus clementina
  Intron number 2 from transcript clementine0.9_020778m (loc us clementine0.9_020778m.g) derived from phytozome v7.0 (c hr-ID scaffold_25; pos 1320995 to 1321682)
tcgtcgtggagaaaacccgactcgagtctgaggtatattagctttcttgtttctaattataatgttaattcacatcagcgatttatttatttgtttgtttaattcaatattgacacatttcattttcttactcaacatgcaagtagtataccttgccgctaaccattcccgcaatttatgactgactttgagttattttaaagaaaatgaatctgagttgaaacgtcttaattgtttcttatcctctataaaaggacaaaagtgccaaagatatttgattgtgaatgagctctgggctcgaagaaagccatcccatgcttatttatttttaactttttttttaataaatatttatttttaactaagaacaggatactacttttatacttgccacctcacttttgacggcaaaagccaccaaaatgatacaggttcataacttggtattgattgataataataataacacggtgagcattacgttagtctttacaacgttgttaaaagtggttagttttgggcttgattatggcctaccctggggagcagcaaaaagaaggaacttacgcccacgtgaccttggaaactttttttcttttcagcaacttcctgttcttgatattgtttaacaagcgatttgacttgatttgcaggtggcaacgctgaaagagaagctttcagttgccga

SEQ ID NO: 89908 - DNA, 230 bp, Citrus clementina
  Intron number 3 from transcript clementine0.9_000770m (loc us clementine0.9_000770m.g) derived from phytozome v7.0 (c hr-ID scaffold_128; pos 437750 to 437979)
agattgtttttgataattctgataatcgcatcccggtaatgttctacaaactattttatactttaatgtcagtcaaatttatttttatgtgatattgcactttgtttttgttaatttgtgaattagttcttcttttaggctttcgaccttttcggcatttgttaatatttattttgcttctgtactccatgacaggtggacaaggaagaggtgcgcttgcgtcgaacaat

SEQ ID NO: 89909 - DNA, 454 bp, Citrus clementina
  Intron number 1 from transcript clementine0.9_000863m (loc us clementine0.9_000863m.g) derived from phytozome v7.0 (c hr-ID scaffold_100; pos 728008 to 728461 reverse strand)
agtgattgtggactttataatagaggtacgtttcaggcttttatctttacttgtgtttgcccttagttattttgaatttttttttcgtttttgcttgttttcagtagttgaatactgtgattttatcttagatagattatctggggactttttcattggattctatcaacttgtttgtctaattgtacggataagtgattacatgtaatcctttttagactggctttttggtccaccttagaagattattcggcttctgggtttatatctgaaaatgcatttatgggtatgtagttcatgtgtactggcaggtgatttatgaatgagactggtttaattagatggtgtttgtggtcatatatatggaatgtatgtgtttctttggcaatacaaaataatggtgtctatgctttgggcaggttctagattatcagactctgctgtaatttcaatt

SEQ ID NO: 89910 - DNA, 690 bp, Citrus clementina
  Intron number 1 from transcript clementine0.9_015366m (loc us clementine0.9_015366m.g) derived from phytozome v7.0 (c hr-ID scaffold_47; pos 1517249 to 1517938 reverse strand)
aagtcatcactctcccaagttctgcactttacgatgtaagtacttatctttgtcaaataatttctgggttctgtttgtttaatgggaatattcaataaaactgagaaaatttgagttctgtgtgtaaattctgttagaattctagattgaattcaggtggcaacataccaacatagtctgctaatcatttgttttatttctcttataatataagtaaactgaggaacattgaagaatttatcatggttcaactcgtaaaacttcttgggcggtacaagagttttctgttagaatgctcccgctcactctagattttgaaggggtttgaatcacaagtatgcgatagttacagaaggaaaaaactttgaagaaaaaaagcggatacactttttaattttttttagatagtccaggacaagaagaagaaacttgaatcatatagaagatgaagtgcatttggtttttgcccagggtacgcataagaattaagaagggatttatgtctctctctctctctcttttattttttttttaagttaaaattataaagttaacttttaaggaaacaaaagaatcatgcgcattgttcatttggttgggtttgtcaatgaccagatggtcccaaattgtgcttgttttgtatgttagacggtgttgatacacttgctgtctctttccctttctgtgtag

SEQ ID NO: 89911 - DNA, 569 bp, Citrus clementina
  Intron number 1 from transcript clementine0.9_023739m (loc us clementine0.9_023739m.g) derived from phytozome v7.0 (c hr-ID scaffold_15; pos 3842253 to 3842821)
atttttccaacgattcaattctccttctcttcaaggtaattttttgtttttttaatttccccttagatatgggtttagtttaacacgattcgttttgatgaatttattttttcgttgaatttttaggtttaaaattgattgattgcgcgtgaacgcgttttaaattcggttcctttaaagccatcaggtgagtcttttaattgcattcggccttttatagtttaaattgatagatcctttcaacaatccatccctcttctagggatttttcttgatttatttttgaatttttattacaagagagcagttgaaaggtaagaattgtagcttgttacaattttttatttttatttttaatttctagttattatcattatgtttttcttttttaagattttggattgaacaagtgaacaagattttgatttatcactatgtgggtcatatgtaggctaattaagataaaagtaacatgaattgggtgttgggtatgaaacttgtttggtgattttggatttgctttgttggcaaagaagtctcatttaatatttttttgacgaatttcaggt

SEQ ID NO: 89912 - DNA, 256 bp, Citrus clementina
  Intron number 2 from transcript clementine0.9_023748m (loc us clementine0.9_023748m.g) derived from phytozome v7.0 (c hr-ID scaffold_15; pos 4291422 to 4291677)
gctattctggtatgcctatttctcttctccgtgcagcttagttaatcaagtgttttaattgttgcataaccagttaattcatggaaaataactcatccatccggtggcattttgagtttgtaagaattctcttcttttataatttttctttttttatttgatttcagaagttatataataatatacgatgaaattctctttgtctaattcttgctctctaggctttgttcttggaaagaaaaatcttggcaagagg

SEQ ID NO: 89913 - DNA, 719 bp, Citrus clementina
  Intron number 3 from transcript clementine0.9_023748m (loc us clementine0.9_023748m.g) derived from phytozome v7.0 (c hr-ID scaffold_15; pos 4291790 to 4292508)
ttcgctctttccattggtttagtgttgcaaaagctgtaagttttttttcatgtgcgtatgcagaattcaattttttttctcttttttttttgattctggaagaatcatattggatacttagtgcatacgttggacacatgttaaactttggctgctacttctctttgtcttgattaggaatttaattactagaaaaagtaatgcaaaaatttgaatggtataattttatctgacatgccgaggaatggatctgtaaaaagtgatatgttgcagttatagaacttttaacagttcgactcagtgtatcttgttgtatgtattggtgtaggaattttcatgtaagtgcttcacacagacacacacttgaaatcaaatgatagtctctaacacaaaatcgttaggtaggctgaaaagcctgccaataattttgtatgaggatagattactttaccagaatgtaagtaagctaacttattaagtctgcataaacgaagtagtcagcttaaagtcattcaattttctcactgattgctgtgccttgtatggataattcagtaatcaatcatggattcagaaaatcaatgctgcaaagcaataaagaagatgcatcacttaaaaattatttatttgaagcttattcctagattcttctggtcaacttaagttagaaatttgaacttgcagctacacaagcctgtgacagccgaagatcttgcttc

SEQ ID NO: 89914 - DNA, 538 bp, Citrus clementina
  Intron number 1 from transcript clementine0.9_006150m (loc us clementine0.9_006150m.g) derived from phytozome v7.0 (c hr-ID scaffold_25; pos 3257611 to 3258148)
gaccgtttgtcctccactgagactcttcagttcaggtaatattttcagttttcacgcactctgcttaagctttctttgtccagttgaacttttagctttatgggtgtctttttaatgctgttacccctgacattttctttgcaaccaaagagaagtatgctgaatgttcatgagctttctgtgacaaattggtttgactattgtatgttgttgctgtgatagaggtttctttgggttagtgggaatttactttttcggaaaggaaagtggggtttcagttaactctagccacattgttgtattcggttcaattcaattgattcttttctattctgggtttttatattagagtaacgtgattattcttatacgataatgttgtctcttctgttttaatgtgttctttcagtaaccaactcaaactgttgccgatgttcatatgtttctacactacaatgttgttaacaaatcatttggaatatgctctttgttgaattttcattgattgtatgatacacataggccgatcatcagcaat

SEQ ID NO: 89915 - DNA, 911 bp, Citrus clementina
  Intron number 3 from transcript clementine0.9_027342m (loc us clementine0.9_027342m.g) derived from phytozome v7.0 (c hr-ID scaffold_11; pos 4305347 to 4306257)
aagctgttgaaagtgctgggctaaaccgaggtgaagatgcggtttaggcttgaatcagtattagcaagtttcatttctttctttcctatatttatctcaaaaactattctatgttaaaagaaaaccaggctcttttttctgccctgagtttaggatttaataattcatttacatcttgaaggggattttgatagggaggctgtataagtatcaagtttgagtatccccagacatatgtattaggcagtaactcttatgtttgttaactccatgtgaagatcagtgtgttaaaatatcaatgataatgattaggttagttaaaatcacgttttttcttgctttgagtttggttttggttaattgagtttactggagttggtatgtttaaattttctgctgctattaggaattaacttccccaaagtagccacgaactagtctattttttaccaggatgtttaagctcttcaaatatttgaatttcagcatatgtatatatcttcttatgattgcaagtcattgcagtagctttacgtgttgataattggaattctatacttctatggtctaggctgcagttgtgaagtgcatttttgcatttaattgcaaagaaatgagatgttcaatgaatagctaattagtctacatctacccccaagattatgtttagcataggaatactagtagtatggacaaaagtacctctaatgtttttaccttagttactcctccatggattctgtagagggtcacaagtccacaccttaagcatatgagtttttggattttggattttgaatcattcgcttatatggttttttaatttagattttggatcaactttaataaattttattctagtaattcactctgttaaaagattgaattgattaaaacaggtggtggcctcg

SEQ ID NO: 89916 - DNA, 784 bp, Eucalyptus grandis
  Intron number 1 from transcript Egrandis_v1_0.022909m (loc us Egrandis_v1_0.022909m.g) derived from phytozome v7.0 (c hr-ID scaffold_6; pos 46025190 to 46025973)
gatcagttcagtttccctttgcgagcttattattaattgaattttctgtcgtctgaataaatgggtcgctgtcttgatctctcctcgaagttaaacggaatctgggcctgggtcgttgcccgttgagctgttgatgaatcgagttcgggtgcggaagtgatatcttcagaactcgtcgttcaagagttcgtggggaaaagcccagcaaaatttttaaaaatggggtttttgggatttcgaccgggtcctgtatggagaagcaaaccaaatttccagttctcgactaccttggttttttcgtatcttgagttgacgtcggcatccctttatgaagtggcagcgtggctgtggttgttgtttctgtgctctcgaggaaataagattgtaaatggtggctgttacgggctctagccatgttagaacactaagggtttttttctttttctctttttgatttatcgttggtctggtcgtagctccatggctagtcatctgttaccttttcggttcgtcagttcgtttcctcgccagagtgcttcctctgtccggcatgtgtttggcaatttagacctgaaggcgacgaaatccttatctttgtaaagattgccagggtaacttttaatatgatataaatggtcgatgagggccggatggattctttaattttcgtttatgctgtagcttttccaaaccaagttgaatgcctgaactaaatgtctggtgttaatttcaagttaactctctttcagagccccatccgaacgactgttgttctgggcacctt

SEQ ID NO: 89917 - DNA, 756 bp, Eucalyptus grandis
  Intron number 1 from transcript Egrandis_v1_0.005241m (loc us Egrandis_v1_0.005241m.g) derived from phytozome v7.0 (c hr-ID scaffold_6; pos 40336324 to 40337079)
ctctgctggtccggcgcaaggttagagattcccaggtaacccaatactttctgccttttctgcgtctcaccgtaaggcacgaacgtggcgattcctttttctcggtattttttcttctgcggtttcgtcgcggcctcactgggttgtttctctgttcttgttacgtgttatgtacgtgcccaagttctcgacttgctgctgccactgtcgtcggggctctgtgaaatttcatcgtttttctgccgaataaatgttgggtgtgttggttaagcgtctcgtctcgcgaggaggtgtataaaggtggagactttgttgtgttttttgcgggttgagtatctcggctcatgtgtaagagctgtgtcggcttagaccttattgtggttcttattagttgcgcatctcatctcttgagaaaagctgtgtaccgagtcgagactttgttgggtttgcttctcgatatgttctcttcctggtgcttatttaatgaacccgtggcggcgtggcttctcttggatgcacctgaatgtcggcttctaggttattgctcgatcctgagttcagtagttgtcggttgtattttcgcctttttgattacctaatactcgttgaatttctcttgtttgttttatcgacagatgcttttgactctaaattctgacgtgcttattatcacattactttgcaaagtttctgcaaattgttatataagccaatctgatcgtaggtatcggttgcttttttaatatagtaagataa

SEQ ID NO: 89918 - DNA, 596 bp, Eucalyptus grandis
  Intron number 2 from transcript Egrandis_v1_0.028126m (loc us Egrandis_v1_0.028126m.g) derived from phytozome v7.0 (c hr-ID scaffold_6; pos 13083273 to 13083868)
caatctttgcaaaggttgagcgagtggtaagacaaaacatttgagtatgatgtacccaaaccagtaagctgtgaagatgccaataaaccacaaaaggaaaaaaaaggaggagaaaatctaacattaatggagggaagtggattatctgcttctctatagtcgctggtgatcggtcatctatgtggaacttacacctgaaagtatataatctacctttagttccattcaaccatttctgcaacttttatgatgataaggttctacaattagtcatagatattggttctttctttactcgtgtaactcagattggaattgatttcagatattgacctttactagaatacttgtgttggctccaatgtcactatatagcattaagttttaattcatacctttgttccttgcgttctttcgaggctaagtgattgagctttattttatatttgagttttggcgacaatctctgggatgagtgactctttcctttccttcagtgttcctttatgcaaaagagaatggacaagattgagcagcataaatctcgtgttgctcattttatatgtcggtaattagaaagatgttattgctgcaga

SEQ ID NO: 89919 - DNA, 689 bp, Eucalyptus grandis
  Intron number 1 from transcript Egrandis_v1_0.043264m (loc us Egrandis_v1_0.043264m.g) derived from phytozome v7.0 (c hr-ID scaffold_6; pos 22130258 to 22130946)
cctcattggttgtggggtctcgacaggtgaagcacattttcttttcaatctcagtaaaagtaatagcttccctcatcaggtcaagacttcttgtagctggtattttcattttgacttcacgtgttaagagggagctgatgtcttaggctctttatttttggttcactgtttgtgtgggcggctcttcccaagccaactattggatcttcctattgatttgcatattctcatgccaattctgtccattcatactttctgtaaagcttttactgttgttgcgggggcatttcagcattatgctttacctatgaagtacaagtccaaccttacttaatgatttaggtttcgatgtgctttttggtcctcaagtagaatatgcgtgctctggctattcaaatggcttacacaaattagtctctcattgcttcactactagtacttgtcttcagggatggttatattgagtcacaaagaaattagatcagatgggtgggctttggaaggtcttgtctgattgcatattgttctcaatttcttcatgtttccaacttgcatgagcctcttgcaacagaactatcttagctaattttgactgacatagcaaagaatagtggataaaaaaaaaatttctgagaactactcggatctgtttaggggttggggctgcttggagaacagcaagcgtggag

SEQ ID NO: 89920 - DNA, 1032 bp, Eucalyptus grandis
  Intron number 1 from transcript Egrandis_v1_0.033241m (loc us Egrandis_v1_0.033293m.g) derived from phytozome v7.0 (c hr-ID scaffold_6; pos 43749399 to 43750430)
agctttttggaaccacccggcaggacccaaaaccagttcgtatcctgtttatcttctgtgtcttattctctctgctttggcaatcgtttcctctcgcgcgttgaattttgtgttctgtatgtgtatgtgtattctgagacttgcaagctgagtgagaagtttgagtgtgagtggtgatcataattcgatgcgaggtattatgcatggagcagttggagttagtcgtatagaggtttacatagaatgactggaggatgcgatcatgaatggattgattggtgatcgtacccggtttctgccggaaattttttgatgtcatgctcgtcagaggattacggtgatgatgattatcgcagataactagtttgcggagatcttcactgtttcttgaatcaaatctcaaaagtgggtccaccattagtagctggatatttctttggggggctcaaaattttgagcgttcttagcaaatgaaattgcgaaatcaaagtcatatatgccgaacaaaccccgcaagcgagagggagaaaaaggcaaatgaaatcgaggccccaaggggtgtcttggttgatagacagcaccctcttgggtatcgtatggtgcctggatcaagtcactcgatgagcttaggcacgaatctttttcaagttttgtcatcgcactgctggcaatcgtagatgggattccgttgcatttatttctcttctactctgtaaagtcattttgtctcttagcaagaggaaggctccgcatgttaaagtttgcatgctgataatacaccacaagggaagcctaaatgcaagtcgtgatttgctgttcatataacggaacagtaattccccagacgagaaattgccctcataacctaatcaatctcgcctcgccatttgttccgtctgccggttgcctactcattcttcaacaatgcatttgtagaagtgtgtgatgcagtaatcagtgtgatcaagttggttgttgcttgttatgaccattgcagttcacttttggggcccgactttcaagtgggttatc

SEQ ID NO: 89921 - DNA, 329 bp, Eucalyptus grandis
  Intron number 2 from transcript Egrandis_v1_0.055171m (loc us Egrandis_v1_0.055171m.g) derived from phytozome v7.0 (c hr-ID scaffold_2427; pos 6822 to 7150 reverse strand)
attgtttacacagtaagtgtgtgcagtttttgtctgttagcttctcctgtttaacgaatcagtatagccctgtgctataggcgtgtgtataccgaatggacgctgcaggcttcgggccggatactttggcttttgggtttggacttatattctgataacaagtgttcccaaaatcaaatcatttgatgattttgcccacccctattgtttttttcactttacttatcatgtgggtctagatgaaactgaaaataatctttttctttgctcattttactcgggtgttttactcaggtgagaaggccgaaatccgtgcaggactatctgtg

SEQ ID NO: 89922 - DNA, 673 bp, Eucalyptus grandis
  Intron number 1 from transcript Egrandis_v1_0.032358m (loc us Egrandis_v1_0.032358m.g) derived from phytozome v7.0 (c hr-ID scaffold_6; pos 37877893 to 37878565)
agaggtcctctctctctctctctctctctctctctctctcttcctccccctctgaaaccaaaacaaagaattaagggaaaagatacatgctgtatagcatgaacacttacatattatgccaagacttgagaagtcagtcaaagatggctataagccaaacagaatgctttgtaacatgagcactaatccctctttaaaattttgcaatgaatccatttgatatactacatgtttttgcaatgtcagtgaactttgaggagagaataaaaaaagtaaacggggagagatgtatagatatttgctccagagtaattcttcacatgctgtttcctttttagtaagattccctcgagcttagctctgctcttacttgagttgaataataaagtaattagtagagtgccttttgtttattgttcagccaagtgctagaaataatacatcaacaaggtcgttcataaaaacccatgtttcccctccaaattaacttatcggtcaaataaagtgttgtccacaatttccgcaacgcactttaatatgcatagatactggacatttcattgggtgaccatagggacacatttcaaaacaaaactctagatttatattaatatgtacgtctctacaaaaccccgtaggtgtaaaatccgtggaggtgaaccggaaacaaagc

SEQ ID NO: 89923 - DNA, 1014 bp, Eucalyptus grandis
  Intron number 1 from transcript Egrandis_v1_0.007247m (loc us Egrandis_v1_0.007247m.g) derived from phytozome v7.0 (c hr-ID scaffold_6; pos 48851815 to 48852828)
tcttcttcctcggttcagagcatttgcctcaaaaggtctctccttttctttcttttttgcacggaaaaaaatctagcagtagtacccctctcgaacgaaaagtttttgtctttaatcttccgaaagggagacgacccaccactgtgttgggtcgggctcctttttacgactcgaaccagaacgtgtgttcaagtagaagtgggatgctgatgctgttgctgatagcgacggatcgagaatggtggatgctgatggttttaggctgccatggaccactcgctgaagatccccctactttggattgttgtctacttcctcctcctattctattttctctcgtcttgtggttctaccttggtgtcgactgtcgtgttgtcgctaacttttagcttcaatttgctttgtttcttttatctttcttttacttgcttcgagctgttgggctcactatgctctcccgtgattggccgaaatgctcgacaaaagcagaatcatttcctttctcttcgcctaatatcttcttcttttgtctcctgatttgctcaataatttaatgcccgccgagtcattgaacttcctgcttgtaatttctgtgagatcattttgggggtcgttgcctcgtgtccgttctgcccagtccttgagagggtaaaaaaagttctattctttttatacattccacttcttttaggcactcgacagtcccatgattcttttctttcacttcatgcatagactgttcagtgtgatcttcatcaaagtgaaaaatggtcccctaaatttgtgattctcctgcatcaagtcgttcccctttgtaccttctttttggggttcctttgtgaatgtttgcgttttggagctgaaattttggagttacattttgaatggttgctgtaaaaactactttttaggtcgtgttgaaagtgattggtagttctgctgcattcatgacgagcttgactgattttattgcttggttcacaggtgtcacagtaccttccacccataactgca

SEQ ID NO: 89924 - DNA, 791 bp, Eucalyptus grandis
  Intron number 5 from transcript Egrandis_v1_0.007247m (loc us Egrandis_v1_0.007247m.g) derived from phytozome v7.0 (c hr-ID scaffold_6; pos 48853440 to 48854230)
gtacctgcccttacagattccaacttgagctggatgtaagtccttttctcactgacatatgcattctgcacaatctgctatatgctcaaggctttgagcagatataataggccccttccatttccctggcattctgggtggctgttggtcagagtcagtaacttaggttgttgccatcttgaccaaatttgggatttctgatctcggtttgtgattcatttgtggttataaattgtaagattatgtgcatcactctgcatgtacttgagatgctaaatttttgtttgattggttgagtataattatcagagtcaaaataaggaggcatcatcatttctgtgtttagaggtgcattatctcaacattacccatagcttcctctatctgacatatccaatgtgtaactatattggagatgaacatttttatattggttgcagagatcttcatgcaccatattctttgtttaaactgtaattagcagcagttcttttgcagtttatatttatcctcttttttttttttacaatatttgagctaaatgaacggttgatttcagaactacaagagcctttgaaattacttaatttctttgcttacttcggtttttgttcgacttttcttagaatgcatatttcaggacagaagatggccatcgtgtttgatgcatacggccgttctattgacttgagatcctccatatctcctagacagaggtgtcatgagcattctaatggttagtaatggaatctggttgctgcaggtacagaaacttcaagagcagctacgag

SEQ ID NO: 89925 - DNA, 1062 bp, Eucalyptus grandis
  Intron number 2 from transcript Egrandis_v1_0.010394m (loc us Egrandis_v1_0.010394m.g) derived from phytozome v7.0 (c hr-ID scaffold_6; pos 23062434 to 23063495)
actcatcgctgactgttggaactagaggtagtatcgccattacggatctccaagttgttttctttatcgaaaataatgataattcgatgctcatcgtgcatgcgtagatagtgcttgcactcgaaccggaatatttttttacgttgcctttctgttttgcttcatgcgtgtgattaattcgtggtttgtggttttttattcttgatataatcatttgagtacgtcttatagaaaacgtgcatgaggctctcgactgcatcaatgggttctttttatttttgtgttttggtgagttcgaggtgtgtacacgccttcaacgaatctgaacttctaggttatgtaacagtttaagggcaaaagccaccaaaaacgtaaaactatgctcactgagatatatttattctaaattttcttgtgacaccaaaaatccaaaatgtgaacatgaatgacatatttacttacgtggactataaaagctctgactacatggacttcaaaaagcaaacggagtcatctaacttaagtgaaattaactaaaacatcatatgatagaactttgatggaaattaaatatatgagatgtacacaagttcgatgtttttatgtcaagagaaaaagtttagataaatatatcacagtgaatatagtttgagatttttaatatcacaaaaaaactcagatgtaatatgtcgcaatggacataaggtttttatcgtttttttttctcaatataaagtataactctacaatttttcactttttgtgttcttcagcaacttgtgacaggaaggaaaaatatcgtggttctctttttttgataatctagaggcaggcacgattgtggaaactcgacccctaggcctttttgggccgtgaggggaccctgacccacagccgaagaaccttgtagttatattagctggtcgcaggagtatccttcttggctcttcttgtgctctatacggacatcgtagtgaagacacgaagcttaaccatcgtctaaaaggagttttctttcattttacaggtccgattctcctggaggactaccatctgttggag

SEQ ID NO: 89926 - DNA, 746 bp, Eucalyptus grandis
  Intron number 1 from transcript Egrandis_v1_0.012526m (loc us Egrandis_v1_0.012121m.g) derived from phytozome v7.0 (c hr-ID scaffold_6; pos 5744967 to 5745712 reverse strand)
gtggaccaggtctctctatctctctgtgggtttcctttaattgggtcttgaatgatgggaagatgaggcaccgagtttgaaagtatcagcttgttagagataatcaatctgttcgattgtgcaaatgctgttttcttgataattggtatgcgtgttctatcaagataaatcagcttggggatttgggtttttgtttgttttttgggtcgtatgagaggcctgcgtttccgttctgtacaattcctcaacttggagagaagaggaaaactaacactagagagatcttcattagcgtaatcactacggcgtccttcgaaatttcctaaccgattggagcttgaggatgtgaaaactggcactgattactttttcaatattctctctgaaagtacatgaatcctacatttattcatttatgctgcagaattcaatgatttaaggagtgtggcaaagccagtgtgccttcccctgtttgatagataatgcaattatttttgcttatcatccttgtgaatattctgtggtttgattcccgcatgattctcagcagtatcataccaaaagtcttttctggatgtgtggtgtgtaaggccacagagacataattttgtgtaagcagttatattgcttgaatatttggttacctagagcattgcttgaatatttggttacctagagtagttctctgtatttaggaaattttctttctttgcattactgtgcagattaaaagggagatatcgata

SEQ ID NO: 89927 - DNA, 620 bp, Eucalyptus grandis
  Intron number 1 from transcript Egrandis_v1_0.009770m (loc us Egrandis_v1_0.007077m.g) derived from phytozome v7.0 (c hr-ID scaffold_6; pos 33043573 to 33044192)
agatttattcctcttctgtgagctctaggaggctggtaatctctctctctctctctctctctctctctctctctcgggtatttttgttccctcaattatctgcgaatttttcccctcttctcgtcactggtatatggtttccatggtttggggtttgagcgtactagatgatggatttattggaatgcttgatgtgggcaaatgcgaaatctactgcttctttgttatactcaaatccaagttctggttttggtgagtttgacatttggtgtcatggtgaagttcgcttcatcctagtcctagggtgagaaaatcttaggccaatttgggttcacattgttgcgtcttcctgagctttaatagggggcaagacaagaaacggtcatatcagcattggccatatgattatttagctgaccttcatattgtcataatgataagtccaaatgcaggtttcctgctgcgcttctgtgtggatgttctttcgtctacttgatacacctttatgttcatcacaggctgtgtgtagttgggcataccgtgtttcttgcactgttttgattttgacgccttgtggtttggttctgtcacagaaaattccagataaatttgtcaagcac

SEQ ID NO: 89928 - DNA, 969 bp, Eucalyptus grandis
  Intron number 1 from transcript Egrandis_v1_0.006208m (loc us Egrandis_v1_0.004144m.g) derived from phytozome v7.0 (c hr-ID scaffold_6; pos 49322352 to 49323320 reverse strand)
acaagtttgtcattggccaagaaagagccaaaaaggtgggaaatgttttgttgatgccgaaggtccagcattataatgttatgtcttattattcttacgtgttatcattatctcagtatcttcttaatgccattcatgagttgccggttgatttactttagagtttagagacctttggcaaagtatgcaacactgcattagatcttgcttgattagctctccatgatacgcatttggacgacattttagtttcaggcatatatctgacatctttgatacagtgggacatcatattctggttctcttatttaattatcttccatctgttttgatttgctgcatatcctagccactgtagggatagttcttcaaattgcaaataggactaggaatcttgatgactctccctccctctcaccaatgctaaatggttgtttaattgaactcctcagatggtttcttcatgtggattactgatacggtatatgtcatttgctcctagtcctaaaagattagcggctgttacttggcatcttgatgtgagttagtaatcatcactgatgacattattatggtcatgattgtattggttaagctaatcaaaattagtcatcgagcaaaccaagtagctggtttcagtctgtactaataggatctcttttagaactaatttccccttgaggtttctgcatggatggattcaaaatgattttcctctgttagttattcaataagcaaatcttcaactggagcaaggaaaagagtaattcagtttacatgcatgtttttgaatgttttttctttgatatgaagttcagttctcaggtagaagatatggtttaaggtcttctcactgataagactctttggacttgtattgtgaactttgtattctattagaagctaatgcagatggtatgtgcctatgccgcaggtactctctgtggctgtttataaccactacaaaag

SEQ ID NO: 89929 - DNA, 603 bp, Eucalyptus grandis
  Intron number 1 from transcript Egrandis_v1_0.002194m (loc us Egrandis_v1_0.000865m.g) derived from phytozome v7.0 (c hr-ID scaffold_6; pos 47587331 to 47587933 reverse strand)
aagaaccgatctctgctccggtcttcagtcgcaaggcgagtctcctccgaactttccatctcgttcgttgctttcggaataatttcgctcgatttcggaggaatttcatcaaggcttcggcttttttcgaagtcgtgttttgggggttttttttttgttgggttcttctttattcggttaattaatttttacccaccttctctctctcttctgcatctttgattcccgtacgctttaaagcttaaagcccggttgtcttctccatccgatcctggggaaactgaaatctttgaaactctggttttcgccccatttcacgtgatttgaccccccccccccccctcccggctcggtccttgtcggtgtcgtcataaatgaaagatggagatgggggtgtgtgtggacaccgagtcctgagttggtgtgggtcctgagttggtgttggatcgtgggttgggtttgtttgaagaatttagagcccgattatttctgggttcgagtgcttttttttttccttttcttttgctgatcatgctgaatagtatctcaagatcttggaattttttaggtggaaatcgtgcatttagatcagtggagcagaga

SEQ ID NO: 89930 - DNA, 587 bp, Eucalyptus grandis
  Intron number 2 from transcript Egrandis_v1_0.029875m (loc us Egrandis_v1_0.029875m.g) derived from phytozome v7.0 (c hr-ID scaffold_6; pos 33930614 to 33931200 reverse strand)
tcgttgcttgccacacaactggagattttcgtgaggtactgcttttacgtttgcctggaattgtgccatgaagtttcccaatcttgatgatttttctctgagtaacttttttccgtacctttgcaataagtactctctgcaactgtgtgatgttcagattaatatatttatggttgtcccgtgatatatcctttgtgattgatgaaggcaatcaacatcgaaaggtgtatgggattcagcatattacagggagtctgaatataagttgtagggtgttgaattttaagaaagttttgaagttttgtagagaatgcttgtcaggatggtggtatgattgagagtagttcctgtttggttttggcttcacgaaactatggagactatatgccacttctttggacttctttctcctatctcaaatgaaaaaccaggtccattatcaggataacccatgaagtaattcttatctatccggaaatattttatttttcattagttgtgttgaatgtaagacaaatttccttgcctattaggaaaaaattgcattttgatacagtttctttgcttcttagctgctgctgtcactt

SEQ ID NO: 89931 - DNA, 755 bp, Eucalyptus grandis
  Intron number 3 from transcript Egrandis_v1_0.013422m (loc us Egrandis_v1_0.013422m.g) derived from phytozome v7.0 (c hr-ID scaffold_6; pos 24323594 to 24324348 reverse strand)
tgtaataggagctgattcagcagcatcattatctggtaagtatgacattctgttaattgtgtcatctttggaggaatgttttaaggagcgttacttaacaaggtcttagggtccatttgggaaatgtcaaagtctctagttcccctgaagaagttgttatacaggaaagctaaaatcttagaagctgggaaggcttgggctaatggtcacatgattaatctacatgacaatgttgcctagctatcagtctttgttcaattaatgccttctaaatgatattagtccaacaaaaaaaggcccatataatagctgaagagatttcttgtactcaagccattggtgtagtgtgtatcttcttggctgttccaaaatgtctctactcttgtcctaaaagcgtttatctgaagttcttccatttgatgatagtcctgattgcactcgtttggtggaataccataaacacgtgttcccgattattgcagagagctagtacagccactgaaacatgttaggtggcaagtgtcctggttgtatgtgccgttacaaactaataactaaacatgttgatctaccattgtgttaataggttatagttatttggaactcctcagaatgagatgaatgggagccttgttagtcactgtcatttttttccttgacaagcttgttatttgctccaaacgtccttctctttggacttgtagtgctaaatctgatgatcttcttgttcaatgtagatatatcccaggcgaaca

SEQ ID NO: 89932 - DNA, 905 bp, Eucalyptus grandis
  Intron number 4 from transcript Egrandis_v1_0.023234m (loc us Egrandis_v1_0.020056m.g) derived from phytozome v7.0 (c hr-ID scaffold_6; pos 43899163 to 43900067 reverse strand)
agcaaaatctagttgtcctgatcctgtggttggaggtctgttgctttctctgtattcgtctgccttgttaaaatatattaacggagtgggaaaaggtgaaaaactcgtgcgaaccagcatcacaataaacagtgtgcagtgtagacaattgaaaattggttgtgttatttttacggtaggcaatgagacgtgatgttgtctattttgtattttccttctaacaaatataactatagtttcatgatccgctagatttgactttaaagatgtgtgttattctggccatcggaggagtaacatggttgaccgtctttcatgaaattcaagttgttttaagttagttgatggcttgttaaattggtagttgaaatctcgaaagatgattcttttattcctcgctcctgtctagaatctcttcacctcatattgcttaagtcttaaagctagttcttgaatagcttttaaattatggcgaacgatccatgatagaaaaaaattgactcatatctgtgcagtcggtatttttacacttactgacacaataacactcagggtaagttcttttgggtcactccaggcaagtctaatggctgaatcactgatttgcctctgaaaatgcatttaaatgggttcatgtaaacatgtgaagatgggactctctggaaatgcgaaaagctgactatgtggctagagggttatttgcattaacatggggaaattggctttcatacaactcgttcctttgaacctgtttacgcgttaaaatagacaactgaaaactatatttacttggtttggtgcagttactagtataaacactagtcagcatagcctctagtatcacatattagctcattcatttgctgatcatcattagctctgctgcccttttacacagcaaagtc

SEQ ID NO: 89933 - DNA, 842 bp, Eucalyptus grandis
  Intron number 1 from transcript Egrandis_v1_0.021124m (loc us Egrandis_v1_0.021157m.g) derived from phytozome v7.0 (c hr-ID scaffold_6; pos 30487677 to 30488518)
ccccggaatctcaccttttgcgccgcgccgcggaggtgatttcggttttttatatcttttgtggctttccctttccttatgtttcacggttggtccgttgattgcgagatttcgcatttctgaagcgaaatgagttgtggtggcgctcgtttggttaatgttagagaatgcgattcttgctcatttcttgataacttcgtcgggcacggctggtgcgagaggcttgaattgctcttcgttgggcgcttgtggacttgcacagaaggtgtttgggaaaatgcttgggtgaattgcgaatatacttctttgagaggacagtgacttggacattgcagagaaatcttcacatccttttctttattctccatctgtggatttctgattctgattttttggtcgaccattttgtatctgccagattgatgaactatttgtttgctgccatttgtacctgtgttaacctccttgcaattcacgtcaatatttcccttcatttttatagtagatgccaaaaaaaaaaaaaaaaagtgtaacagaaatcccccttcaaggaatttgattgcttggaatgggattccatcttcttgattctgtggcaatgaacaaaacagtccttgttttagtgactaataaagttggcaagtacccatctttctcttggtgataagaaaaaaatgtttacttaattaacgaagaacgagcaaatttgggatcatcttttgttcgttagaagcaactatgtttaaggaactttttgtaaactccatatggtattccattttatgatgaggaaaactttacctgcagagaaagaggctgagagggaggaagaggagggagag

SEQ ID NO: 89934 - DNA, 753 bp, Eucalyptus grandis
  Intron number 1 from transcript Egrandis_v1_0.003359m (loc us Egrandis_v1_0.003166m.g) derived from phytozome v7.0 (c hr-ID scaffold_6; pos 45693304 to 45694056 reverse strand)
ttcggcgtaagcctttcggtgaaattcatctcaaggtatgcggaactgcggtgcctgtgattccatcatgacgttacttcttttgcagttgcatgttcgattgcattttcttctccgatcatctggcgattgttttttttttttttttttttgtctgcatgtgtcgcttagttccactggtctcgatcgcgttccagtgagaatcgcggtgagacgtagttggactcttatgctgacaagactaaggagtgggtttaccttgtctgcatatttattcgcttttgtgtatctggagcttaattaacgtatggtccatcccttatttggatccaatttgacaccgttgtgcgtaaattttatgttgagagtctacgatgactctcttatatgatctctaccgtaatgatgagcaaataggttttcgtcccctgatgccaaattaagtagattcagattaggtagttgtcagttcattttctttcttactgctttcccgttccttcctaattgagcggctttatctattggtttagtaactccctgtttcctaatcaacactgggttttgtattcagcattccactgtttttctcgtgttgttgagcatcgaatggtagaggccatgtgattatgcaattaatttactgtgtcgacgagttgatcggcgtcatttgagttggagtggtctctctaattatgggttcctcctgaaaaatgtcctggtaggtttcatctatccgcgaaagtaagtcag

SEQ ID NO: 89935 - DNA, 968 bp, Eucalyptus grandis
  Intron number 1 from transcript Egrandis_v1_0.002716m (loc us Egrandis_v1_0.002716m.g) derived from phytozome v7.0 (c hr-ID scaffold_6; pos 18833296 to 18834263 reverse strand)
cgccgcctctctctctctcctctctcctctacctggtacgcctttctctctctctctcttcctccctccctcttttcttccttttcgtcgctggatgttaaacggatctccctgttttctccgtcttctcggtgcgttccgatcgtttgtttttgtcgtgttttttttttggcttcggcgattgaatctctgctggtttggcctctttttccttcttcctctgtgttatgcggtggtgtgttgtgtggttatacgggtcggatcgaccgtcgtagcctctcctgcggccttagcttgtttggatctgatgcctcgcgtgttttctgatgctgtgattttgcgagtttttgcgagtttttgcgataaagcttggtcctttagattgccctaattatgcctatccgttaatcgggtcttttccgtgttgtgggatctggaatcttgtgccttttgctgcttttgatgttcgttcgcctggcgatagtggttagggtttctagcttattggctgatctgttgccttttttctgtcgagttcttttatggccgattgttcgaccagaagaattgaaaaaaaaaagtagctttttgtcgaatagtttcgtcttgtgattttcacgagctttattggcttcgtaaattccgaaactttaatatgttttttttttcttggttattgttttggcctcccggatatcacactcgttcgatatcttgacatgactgcagtgtgttctatttcgatgtctatgtggttgctctttattttgaccttgtctcaatatgcgtcgctagtgagcactttgatgttagatcctgtgggtagtaaaaacgagtgtatggagatatattttgcgtgtggttctgggacttttgctgttgctatttattattaagttcgcccaatatcgtttgatctccctgtctttgcagatttcttctattttttgaggaggagtgccttttaa

SEQ ID NO: 89936 - DNA, 479 bp, Eucalyptus grandis
  Intron number 1 from transcript Egrandis_v1_0.033010m (loc us Egrandis_v1_0.033010m.g) derived from phytozome v7.0 (c hr-ID scaffold_6; pos 24147666 to 24148144)
ttgtgcttgtggctgaggagcagagaatatctgaggtaaacgacatcaaacagaatttctgaaaattctttttgatctttgatttggagaaaccattttgtttattggtgtcaaagtaggatatggggcataaaaatggagaatctattctcctttcttttttctttttttgaaactctttgcttacacagtagtgatattttgtgtttctctcttcaaactagctgaaatatatggcaaatctattcagtactggaactttttattggccaaaatacagagttgactctctttatattcatatacaaacttaaacagtaacccaaaaaaaaaaggtacacaataccacttcaaggaatgcctaatcatgaagaatgcttgaaccaccacaaaccaatatgacaaaccacataaaaactatcatcccatgcagaaaggttcaacagtctaatgaacaaattgggcaagaaggtttaatc

SEQ ID NO: 89937 - DNA, 886 bp, Eucalyptus grandis
  Intron number 1 from transcript Egrandis_v1_0.012483m (loc us Egrandis_v1_0.012483m.g) derived from phytozome v7.0 (c hr-ID scaffold_6; pos 42721252 to 42722137)
caccactgctccttcagcttcgacttccgccgccggtaaatgtcgtgactttgtctccgcgcctcccctgttcttggttattctcgtgatagtgtctgtctggtagagagtgtttgggaacgacgttttagttgtttaagcgctgggggaatgacggtggattgtttgagtaattggataattcccgtttccagtgatttaatgagcaaaacccgggttcggtctgcattgtccagctatcaaaacttcacatttgaagatgatgtttgtgcagaaggcttaagctcctctgtcatgccatgaagctatcccaacgagtaactgagcctaggttaaagggaagaggctcatttcgctgagagtcaatttggtttcgtagttgtcaatgtcctatttgtttatcggaattaagtaaagagatacggttaattatagatttgaagagagcatgctacgggcttccttggaaatgtttgtagaggactttggatcagaaaggcatatgagatacacatatccaagaaataaaggacatctgtaaatgctttcacacggaatgtgcttggcaaacttcacatgctgttcattttgatagattgctgattttacaaaagtcaagctttaaaattatctataagatgatttttcagtgttcatcttatgtgtggatttttcgaaattactccccttgaatggcaacatggaggtttgagatgaatgtaaaccaattctcgatgtgttgttctttctttggcagtaattccgcatcgtatctgcatacatgaatatcactttctgatgttgcatctctagtttgtgcgaatcttatctatctcactaatggaaatatgagatcctgacattatgcttttctgccgttagtttc

SEQ ID NO: 89938 - DNA, 621 bp, Eucalyptus grandis
  Intron number 2 from transcript Egrandis_v1_0.010267m (loc us Egrandis_v1_0.010059m.g) derived from phytozome v7.0 (c hr-ID scaffold_6; pos 39918226 to 39918846)
gtgcctccggttagtataagtgtcattgctcaagtgtcagtggtttaatatcaattgtcgactgcttctagttttagctatgtagccaaagcaaaaagtttgtcctcagtcgaatttttgctttcctggccttgatccaaggaccttttttatatttgaaaatcaattgaacgtgagctctctgcatttggcttgccactgctcttcctctgtaacaagattaagatgttcgaaaatagaatgaagagagaagatgtgtaaattaaagctgacaaagaaagaaatgaagaaacattgcaattaagtttaggcgtgcagtcatttgtttatgcgagttgattgccacatgaaaacccgctgacatgaaggtgcatcacctgaatgtgccgattgttatgcacttgcttttagagatgcctttgtcatttgggatttgatcctctgactagaaagctgcatttacttaattcgacaaagaaaagttgtcccctaattcttttggtttaagattaaaatgagcatgcaccatagtaccttctcctgatttgttgcttccattgggtttgtgcaaactactgatagctcaactaatttaacattgtttctcagaacatttactaa

SEQ ID NO: 89939 - DNA, 731 bp, Eucalyptus grandis
  Intron number 4 from transcript Egrandis_v1_0.005164m (loc us Egrandis_v1_0.005164m.g) derived from phytozome v7.0 (c hr-ID scaffold_6; pos 31886545 to 31887275 reverse strand)
agcttggtcttccgcttgcgtttcagacgaataaggtggtgattccttgttccactttgcgtttgctgttactgaggattttagatgcaaactctgaatccgatcatgttgcagtgccttgtggtggtatctctgtgttatcagtggtttcagtattatgattggcttggttcttcttcaagtttgaagatttgtcactgcttttggttgaaattggatttgtcatggctgtgacagcattttagaatatggcaattaacaccgtttaaaaatctggaaggaatgataatttcaacatcaattaagtaactaaagggttctggggattttctttttttttttttttgggggggggggggggggggagggttagcctttctttaagttatgcgaactcaatgtcaagagatgtaatgaacaagcctgctaaacagttgatttgcgttgtatgagaatatttgtcggaaagcctgtcctttgaattatgattagttatgtaacagagagatttgtagtaaatgctgaggagtgatgtacttagatgaggaacgattgtagaactgttcaaattataaatcctgttaacaggggttaaataagctatttgatctctctctctctctctctctctctctctctctctctctcaaggtatcacaagacttgccatttgctgcttctaatactttgatttgctggaaatgttttttttttcaattttcagaagaaga

SEQ ID NO: 89940 - DNA, 1025 bp, Eucalyptus grandis
  Intron number 1 from transcript Egrandis_v1_0.019063m (loc us Egrandis_v1_0.017273m.g) derived from phytozome v7.0 (c hr-ID scaffold_6; pos 29480087 to 29481111)
tccttcccaagattcttcccccagaacctcgtcaggtaatgtctctctctctcattcccatccatcccagcttgccaaagtctccagctttcttgagcaggacctcgttttccccctcaagattctttctttccagtttttgttcatgtgggtattttttttttttgggagctgttttgagctaaattccgcttttgcttgggctctgttacttgattggagggtgaacagcggaggatacagttccgatagctctgtgtagaggttacgtgcttgtgtatgtctagctagtgtctgaaacttttagaaacccaagatccattaatttagccttaagggattttctctctgtgaggagattctctcttgaactgccttaacgaaatatggttgtcttccttcttcttcttcttcttcttttttgaatttcttcttcacttacatattttattgataatctgcagtggctgagttgctaactacgccagactcagtttctatctgcccctacttttgaattttagtttgactgtggagaggttttagtaagttgatgtttttctgggttttgacttttatgcctctgtgttttggcatccactttctttgttcttcgcatatcctgggtgaatcgaggagtttttgctgtgcaaggattgtctagtatgatcctgttgaagatgatctgtgtcgtcgcttaatatgtcagcaagcatgagtgatccacttaattttggtctgtgaccgttgagtgtaattgccttcagcaagctttagtcgatggcatgaatgctggagcagtttgctattctcgtgatttatcaattaatttagggacttattgtattgactttgctttttagtttgcaagacaagcgtcggcagctatttctgaatgtttctgatttttggttcatttaattttgtgggtattatggactagtccatatttttccgataacctgacataacgatgttttggtttcctaggtttctttggcgctccagctagtgagacgataaat

SEQ ID NO: 89941 - DNA, 473 bp, Eucalyptus grandis
  Intron number 2 from transcript Egrandis_v1_0.019063m (loc us Egrandis_v1_0.017273m.g) derived from phytozome v7.0 (c hr-ID scaffold_6; pos 29481519 to 29481991)
ggtggtgattcagaggtgaagtaactgctttagtggatctgaaattttagggttgtggtcagtttggaagaaccttttatttctgttattcttcttgaaattttccacaaaacttttgcactttagcggccctgtgcattgtcaaattgttttcgacttattttgttttcttccattaaatgttgttgtgattgaaaatcaagtgactgtgatagcttcttcatgaaattcacattccttttcatttcaatttggaaaaatgagaaacagctattgtagttctgcgaccttctgaaatttgtttctagttttcaagaatttaacaaaaggtgggccaccaagcttgtttcctgtcggttttggtttcctggaaaatcaaaaccaaagctggaaaagctcttgctgaatgaatgcatcttgattctttttctcctgttcctcatgatgagaagctgtatatgcaggcaaagttc

SEQ ID NO: 89942 - DNA, 794 bp, Eucalyptus grandis
  Intron number 2 from transcript Egrandis_v1_0.016898m (loc us Egrandis_v1_0.015125m.g) derived from phytozome v7.0 (c hr-ID scaffold_6; pos 29661198 to 29661991)
tgcagcatatcaaggcaattatcactgccgaagaggttagtgcgtagcggcttgtgtctttcttagcggttaatgtatgtttattgagcagagcggtacttgcgtgatgtctgaaagccctgtgcatcgtcactcacgttttggaattggtttagcgtatgatgttttcctatttctttgactaattcagttgagtttttccttcttgcatttgatgaagtatttcttttattgcgatgagttctagtaccattgactggaattctgaggttgcgaaatgtttagtcgccgggccttaattaggcgagcactgattttctccctggttcagcataacttgtctttcagttgcaagcctcgaatggcaactgttcaatacagtgaaagccttcagttctgaaattatcatatgccttttccttttatttccagccaattatgactgaacacagctttctcgttatcctcaagtctttagatatttcctctttcctgttaagctacgcagaccttttgcatgagcaggtgtctctgttttttatgtgagactacttaactagctaggtacttatattcatgctttttcccatagataaattacaacatttcttatgaaatacttaaatggttgtgcaagaatggaatttgatgtcttctagtgggaaattactttctcccttatttaagaactaagttagttctgggtctgtttattttcatgttttacatcataagtagcgatggcacttgcattattggcttgtaggtgttgcttcgagacccatcagatataa

SEQ ID NO: 89943 - DNA, 1005 bp, Eucalyptus grandis
  Intron number 2 from transcript Egrandis_v1_0.038001m (loc us Egrandis_v1_0.038001m.g) derived from phytozome v7.0 (c hr-ID scaffold_6; pos 27105134 to 27106138 reverse strand)
agcttcacgatcaacgtgttgttcttgttaaccaggtatttcttcttagttcgttttgtggttaagcatgagaatttttaactgtgactcttgtattgccttctgagatcgaacatgggattgtcttgtagaaatgactagtgtgaagatagggacttctcttcattcttcattaatatgaggctatgtgatattatttcttatttttttgagatgttattccaacttgttgactctgcttccttcccctttccgtttttttcttttcagcctagtcattactttctatttgaccttgtttcttttttagtgaagagtcatcatattaaattgtctccattcctaaaactctaattagtagttgcaattatttggaacttgataatactattaaagaggaagcacagcatcttcttttctgataaaagattttaagtattacctgtagtcaatagtagatgaatgacgaggccttcacttgtcttttacactaaagagagacctgtttgagttggagggtatttgtatacaatacaagggctggcaccatcttgaagctttctctagaaacttgtgtttcgaattgttgaaagatgtaatactgaagatcttcataatcgaaaacataaaacgtttgccaatgaagttacattttatttggacctattaaatgggtcaccagaatccttgagtttctccatctagttgccgctatttttttattttttgtgatctggtttctgacatttcttttaggactttttagttgtcattatcttgtgcccctcagttttgcaataccagactggtgagcttggtttggtgtaggtcacattactgtggtcatttctcttactctttgctgctgaaagaatatacatgatcacctccgtgttgcgtaactttgttcatttttatttactgtccaaggaattttattgagtaaacatatctatatatgatgtggcaggattctttctatcataacttaagtgaagaggaact

SEQ ID NO: 89944 - DNA, 824 bp, Eucalyptus grandis
  Intron number 1 from transcript Egrandis_v1_0.026785m (loc us Egrandis_v1_0.024177m.g) derived from phytozome v7.0 (c hr-ID scaffold_6; pos 28868864 to 28869687 reverse strand)
ctcgcttacaaggcggctcaggtatgttcttttctctccgtctctctcccctagggtttttgtatattattttctttagtttggttatgcgagaaactggaggaggacagtgaactatgactagttttggattttttgagcgattcgagttgttgattgtctggttgagttgacgatctttcaggatttcaggggaatttaaagatctatttaggctgccgactggttattagtggttatacgatttcgaactctgttaggttaagaactggtgtttttgatttgatctctggatggtcgttgagatttgattaagtcgctttagtagtagtgggcttgagttttcttttttcttttcttttctttttttttttctaattgttgacgagttgatttactaatttaccatgttgactacaaaacacttttgttgaaccttgcctgcgtgcatgacaggggaaatcgatgaagcctaaacagaggatagaaacttgtcgggtgtatttggatcccttaattttaggggatctgtgcattataagaaccatggcttgtaagatctaatgcttttagtccatagtgctgttctgttacttgccttcaatagctccttgtaatgttttcgagtctatgtttctaacaagagcacagtcaatttagaattctggattgtctagcattatgagggtggagcagatgtagttcgaaatttatgtggtattgcttagtttgagattaaattttgtcttttctaatcttgtgaatgattcatgcatttgtatatcctaggatatcgctcaagcagatctggcttcaacccatcc

SEQ ID NO: 89945 - DNA, 846 bp, Eucalyptus grandis
  Intron number 1 from transcript Egrandis_v1_0.017653m (loc us Egrandis_v1_0.012605m.g) derived from phytozome v7.0 (c hr-ID scaffold_6; pos 36560322 to 36561167 reverse strand)
aaatttcagaggtacatgttctcttgcagcttctgctcccaagtaaaattcttaagggactttcgaaagagtaagttcagaggtgaagatagatgattgaatatggcattttttgtgatggttttacgaaggaaggaagaggttgttttctggctcacaacttaaggtcctctatttgcagtttactttcatgacaagtaaagatgttttcttgctcttccacattttttaggaacaaatgcttaaagttgagatagcttttaccttctgtaccatgctggtgtggaaaaacacatagtttaggggtaaattttccggacaacccttgttctttggatgttttgtctgatgatctgtaatttcaaattttacaaaccacagttttttaaggtttaattaacacaagtggagaggaatgcgataatggcatatggctacatgcaatttggaagaaaacacattttatatccttttccttttctctttttggctgtgttttatttgtaaggtacccaggagctacggcttgcatagcaaatcatttttccataacacaagttgtcagatctatacttcttatctacacttatatcattggaatcaaacagttagtaagcttgagtaggctgttggattgtttcttaggaaatggcaattcatgatcccatactgggatttcaatgactatgatgtacagtttctatgataagctgtttccagaccctgctctttttcggcataagacggaggattgttaaatttctgcacataattgtgagagttaccaaataattggttgatttgtgtacagaacgatctgcttcaactatttcagccatttggagt

SEQ ID NO: 89946 - DNA, 172 bp, Eucalyptus grandis
  Intron number 3 from transcript Egrandis_v1_0.040303m (loc us Egrandis_v1_0.040303m.g) derived from phytozome v7.0 (c hr-ID scaffold_6; pos 52208695 to 52208866)
acgtgagtggtgaatttgattatactcgaatccaagttaaataacaaagaaaatgaaaagaaaatctggattttgagttgttaattggatgtgaggtttttgtttaattttggtttgttaaatgtttaatcgattagggcaattgaacgatcaaactgcttcaataaaaaag

SEQ ID NO: 89947 - DNA, 941 bp, Eucalyptus grandis
  Intron number 1 from transcript Egrandis_v1_0.012868m (loc us Egrandis_v1_0.012855m.g) derived from phytozome v7.0 (c hr-ID scaffold_6; pos 8280824 to 8281764 reverse strand)
atcttggggattggttggggacttcggagctcgaggcaagtggagaattttttttttattacccatttcggttcttgctctggaaactgttctgttgctcctttttttttttttttttttttatgttttcgagtgagttcgcgctggtctgataggatttccggcagaatttgggtgggtctgtctgcgcgctgttccgggacaaaatcttgcgtgtgcagtgcttttgattggctttcccctgttttaccacttcggattctttcttgattgtgctgtgggggtcgataaagtcggttgctttatcggtttctgttcctgcctctgtgtacctttggatgctttagagtcggggggtttttgggttcgctctaaataattgagggtagggcttgtactgcatccgaattgcgattgtccgtggacttagggtttagtggaattcttggtttcgccgatcccgaggatgtagtagctgcgtgaactcttttgtcttctagcttcgggtcgtgcttatttcagctcggagaccgtttcggtcagagggttgaacttgattgcggggttggtgcttggtttggagtttctgggatttggggccagttacagggcaagtcttaagtgcgctgatttcaagtttgattttttttgttttgtttgcttcttttgccagagcaacggttctagctttcggtctcaagtttctttcttcaagtcagcgttgaagtagttcttcgtcaggtaatcttgtgcttgtcccattagagctcatcgcaattcgtctctgttttctgcttgatttctgggcttttgacctctctgagttaagtccgcttgtgcaagtggtgggttatgttttgagtcaggaattattggtacggttgcctgatgtttggcgtttatttcgtgcttggcccgcaggtttcgttgttcggtctagg

SEQ ID NO: 89948 - DNA, 641 bp, Eucalyptus grandis
  Intron number 1 from transcript Egrandis_v1_0.012795m (loc us Egrandis_v1_0.012795m.g) derived from phytozome v7.0 (c hr-ID scaffold_6; pos 2153902 to 2154542 reverse strand)
ctttgggccggagtcctaattacagcctcagattggtaggtaattactatctcttcgtttgttggttgatcactatgtttcttgaggtaatatgaaaagctatgtggctgttaatctttgatgtggatgttcctgtaagtgtggtgtttctgagtgtcacagagtatttgttgtcgtgccgagtctatggctaccgagcttgggtagctgttggttgatttaaagcacaatacttttgttcatctagtcttgttaattttgcgcgcccgtgtgtttccttttgcttttgttatgtgattcggttgaccaacagttcatgggatgggaggttagattaaggagctgaatacaccagggtcttgtcggttacattgctgagagttgataaattgtcctagtgactatggactctgttaaccttcagaatgtaaaattgaacaagactgcagattgattggtttaacttgaatggaatttttgagtctcttcatctgcatattcactggtagattgctactgaaagcaatttgcgcatcttgatgttggagtaacgcaaccaaattgctcctgtgagattctttctttggtgatgatggctgttctctttctgatatctttgtttccccaatacaaacagtttc

SEQ ID NO: 89949 - DNA, 765 bp, Eucalyptus grandis
  Intron number 1 from transcript Egrandis_v1_0.009190m (loc us Egrandis_v1_0.009190m.g) derived from phytozome v7.0 (c hr-ID scaffold_6; pos 5846723 to 5847487 reverse strand)
gggtccttgcagagctctgctcgctgacctcaccggtaatttcagctcgtcttgtttcgatagtctagtcatctgacgatttcgagcttctcttttgcttcttcgaaaccctaaacgagcactgttccggtagagtgcctggtcgtatacgagtcctaatttctgacttcagtgggccatctttcgaccggacaaaaaacaaacgagacaattgtggttgtgtagtatttaatccttaatttggctcttacctcttcagattttggtgcacatagttgggagtggcccacggtgacaacctgttgttttgttgtggatgattcaatgctcccgatcgttttgctgttttgcatttcttccttatttggcttatgatcatcatttaatttagaagtgatcgcctgctatactgggaaatttactacatcataaatggaaaaaggaaaggattgtttgaaacttatgaaccactcgaatgctgaaaataaaataaaggcgagttttttttttccccttagtgttctcccttcgccgccagggatctggaaacaaagatatttcatagaataaacacaatgttaggcaggtgaacgtgtgtgcttggatgaggttcaggaacatgaagtccaaatatgtccgttctggattgtgcgaaaagtagtaggctgttattaaagaaatagcatcagatagcatactattgacatttaatgtcagcataattttttatctcagggaaggaccatagaaggactcgagtagcca

SEQ ID NO: 89950 - DNA, 804 bp, Eucalyptus grandis
  Intron number 1 from transcript Egrandis_v1_0.010062m (loc us Egrandis_v1_0.006373m.g) derived from phytozome v7.0 (c hr-ID scaffold_6; pos 24529985 to 24530788)
tccggctcgctcgagcgtggtaagtcccaccttcttacggcgacctcacgttcccccgagttgtccgagctcgttcggtccgttcatgaactgtttgtttgggcaaattttagtatgtgttcggacgtttatgtcagaaaatagggtattcttaaggtggaatttttttgttaactgctgagtgcaccgtttttgaatttgtgtgtaccttgtcggactggctttatctcgtcttgttcgtaggcaattcatcctgtatttagataattctgtttgaattgtaaaatgagtaatttcttgcataaatttgagcttctggactgcaccttttctggtttcgggcatgtgtggtctttgtgaaacgtcagaccatagacaggtattgtatgcaattgcgctttcgtaaatgatctgctttctatggtttttgctaaagctccggacctctgaataggtttcagagacagttatgcttggaaaattaatgaaggcaaatgtcactattagtctaaggtcgaacttgtagttgccgctgctggttgtgaacaatataacccagggaggatttgtgattcattccatagaagaggcaaaatttaaagggatactgtgcatcaaaagttaactggagacatgtttgcttaaattctaatttgttgcaaatagatagtgaaataactgaaacagggcaaagtgcaagttgaattcatgtatgtgaagaaattgttccaatattcattactattggaaagaggggtgcaagtaatgggagttttaatttgacttcaaacatattttaaggtt

SEQ ID NO: 89951 - DNA, 561 bp, Eucalyptus grandis
  Intron number 2 from transcript Egrandis_v1_0.029793m (loc us Egrandis_v1_0.029793m.g) derived from phytozome v7.0 (c hr-ID scaffold_6; pos 39926174 to 39926734)
attctcaagctgatattgctattttattgagaaaggtgattcttttcctctgttttcggattgttttctgtgaggaggtgatttgctttttaattgtaggtttcgccatatgtattctgagattaatgttgtggttttgactttctattccaattgcttgttgtttctttttgtgaatacgcaaggctagggtgttccttggccaattgctcggatattttttcagggatgcaaaaaggttttacagatgacaagtggaagaagttacaaaaaaacagagatgaatctaagagcttataattgttcttgctttgttccctcatgcagtacttattcctgaagatgcttgttaaataaaaatgatgaaggcgcgtaacatgtggaatatttttctttttagcctttatgacgaattgggatgcattaaaataactgtgtgttttgaacttctgtttgccatctaggtttcccctcctaattaaaaccgtctcttctacaaatctctcttagacctttgctaaaatatgacacctacaatttttgctgtgtagttgattcgcg

SEQ ID NO: 89952 - DNA, 698 bp, Eucalyptus grandis
  Intron number 2 from transcript Egrandis_v1_0.025315m (loc us Egrandis_v1_0.022931m.g) derived from phytozome v7.0 (c hr-ID scaffold_6; pos 3362199 to 3362896)
gcaggcgtcgctggaattctcttcactgatgtgggtgccctctctctctctctctctctctctctctctctctctctctctctctattctgtagttgtttacagtgatgttgaggagaagggtacatatcattatctttcttgataaaagaagggctggaagggctggtaacgaaaaactagtgaaggacaagcattgcaagtgaaaccaacccaaaacttaagtcattcttgggtagtgcaattcctgagtgtagctgagattagattgattcaccattaaatctagcgcgtggaagaaaccagttgagaatcacaagtttcctacattccttgaatagcaatccaattccagataaggttcccaatgttgtgcaaattgcaaaattccacacctgactatcatttgatttttcactctactcaaccaagaaaaacgtttagcatcaaagtgtcacaacttgcccacgttatacatatagttggcactgttgaatctgaactgggtaagctggtgaagacaaataattcccctataaaaaaaaggcactaattccttttcttttttttttggtggttaattcctgttaacaatgttcaattatgcagagattactttgttgtggttgttggtgctataatgatcttcagttatgtgttgcagttacttcgtgtaacaggaataagagacctacctgt

SEQ ID NO: 89953 - DNA, 630 bp, Eucalyptus grandis
  Intron number 1 from transcript Egrandis_v1_0.006862m (loc us Egrandis_v1_0.006854m.g) derived from phytozome v7.0 (c hr-ID scaffold_6; pos 21770540 to 21771169 reverse strand)
gatctcttggctcatttcaatcgcttgccgatcaggtaccgccggcgctttggctctttttgaatttttttatttccttttcggttggttttttgcggttttctctctcttcttttttatctttggtaactgagggagcgagggttattatttttttttttgtgagccgtagatggacggaatcacgagctactcgagtgtttttgcttgaatttggtaaaatttgttcgtacgacgatcgttcttttcctttcgtgcgccatttgggcggttcagaaaccgattccctgtttcgcgatcgttgagtatcgaattcatgattcttggtgatcagtttgatgatgaatcctgaagtaaggaaaacttcacatttttcgacgaatatgttgctctctacttgccttaacttgggccagctcttaagagttgtgaattatttgacagtgagctcgacagagtcgtggattcctcctggtccattgattggagtgcacttgtgttatctgttttcatattttatttccgttttctttctctcctgactgcttcctcaatgaactcgtcgtgttcttgtgcgattgttacctcatgcgtcccctggtggaatctaataatatgttgattgtagat

SEQ ID NO: 89954 - DNA, 792 bp, Eucalyptus grandis
  Intron number 1 from transcript Egrandis_v1_0.015538m (loc us Egrandis_v1_0.015538m.g) derived from phytozome v7.0 (c hr-ID scaffold_6; pos 45496562 to 45497353)
tttcgggttctccatcaatcgagtcggagtgggaggtaatctgattcttgagctcttagaagtttgtgcaaggatcgtattcttgttggttatattcgagaattcggcagcagatgatacggtcgtactttgatcaagacatttctttggaaaatagtttcatgtttttcagcaactttcgttcaactaggatcttccctaatgagttcgtatgttgaaaatacaccaggttgctgttaatattccctggtcttcgttgttaatgaatggaattctgtctgctttgccttgtttctgtcgctcctgttcagtaagcaaattgttttggggagctagattattgaaggatgctgtgaaacagttccggtgaaataagccaaatcagattcttattcatccctccggtgatgtagctaattaacatgtgagttgtcttgtgtgtggtacagttctatgacagttgaagcttacttaagaaatcggttgcatgctcactcaatttagattttccttggtggcactcgaagaattgtagttgcaatctactttggcaattattgaatatagaataacaaaacaggtcctttgatgagtcgttgactaaaatcatgaagttgtgaagccaagcttcctctctagatctcttgtctctgtttttaactaaaatttgtaatttgattacatttccagatatcctcgtgaattgattcatgagtaggttgagaacttatctgtctcataaatctgaaaaactattgcttcatccttcccttcaacttgattttgcagaaa

SEQ ID NO: 89955 - DNA, 948 bp, Eucalyptus grandis
  Intron number 2 from transcript Egrandis_v1_0.015538m (loc us Egrandis_v1_0.015538m.g) derived from phytozome v7.0 (c hr-ID scaffold_6; pos 45497436 to 45498383)
tctgatcaaataacttacttgaccgccagtccgttcttcttttccctcttttctttatgtttcgatgataagcaaacacctagcgttaattggttcttgcaaacttgagtggcatttggaaagaaaacctgtagatatcaagtaaatgatatagatcatcttattctcttggttgaattcagtgttagtttccatgagagccttaaagtcttacctgcaagggacgaaagtcataacaacattagaatctttttctttcaaggatctgatatctgatctttgggacttttttttccaggaagttcagaagatctgacatcgttgcttagtcgtaaaaatgataattttaataggcacggcataagaattcacttataacatagagtgaagatatgtaacaaagatagatgaactgcatttcgtttattgattctcgtctttgcaaagatgtgcaaatttgtttcccattcgcacctagaaaagcaagaaaaagaaatttgtacatgcaaggaactcaacagatgctttggtttttcatgaaacaatgaagcttctgcagtgctccgaaactcccttgaaaagagccaaaaaccattaccaccatcattcacgaaaaaaaagaaaaatagaatgctaagccactgcaacaatcaacgccatcaagtttgccatttgatggagcataaataaaactttccaattagacgaataaaatttcataattcagtatcgaatagtagttgtctgagttgtcttgtacatttaagcttctccgttgacagcttaaccggcgatgcagtttccataatgtcccattcatggtgtgaggactctgtggtattagcttcaaagatgcttctggcttgtgatgaccagaacagcaaagcgttgttattttgtctaactgcaaataattacctttccttttcttttcctttctggtcaggt

SEQ ID NO: 89956 - DNA, 440 bp, Eucalyptus grandis
  Intron number 3 from transcript Egrandis_v1_0.010684m (loc us Egrandis_v1_0.010684m.g) derived from phytozome v7.0 (c hr-ID scaffold_6; pos 38791314 to 38791753 reverse strand)
ctgtcaagaatcgtcgctctctctccgctactcaggtgattatgctcggagtttgatatcgcccttttcttcagtagaagtgtatgggtttccgacacgcgacaaatgtattgagaaactcttataggaatggaacatgacaggaaaatcaataaagtcggaacagacctgcatttacatgttttaacccatttgtttttgaaaacaacttttcatcatagtggaccaaattgattatgactcaaggcgatgcaattagttgacaataaaacaatgaagcaaaatgaactggcaccctatcgtagtaattttattttccctcctgattcaaatattgtagttgatcaaagattcagaattagagtatctgctgaatatctagattcatgtttatttgattgttgcgtttgaaatgcagactttgaccgtttgtttgctat

SEQ ID NO: 89957 - DNA, 852 bp, Eucalyptus grandis
  Intron number 1 from transcript Egrandis_v1_0.053144m (loc us Egrandis_v1_0.053144m.g) derived from phytozome v7.0 (c hr-ID scaffold_6; pos 19199711 to 19200562)
ctcggtaatgcttcgtttgtccccgccccttttcgatgaatttgtggtttcttcttaaatggtgcaaaacttcatacatgcatttttcgcattaggaaattagctgcactcttccttgatcttaatcaactttttcccagcctatgtaaaataatagataaactatttgaaaatagaattcaaacgcactatgccaacgtatctttctatacgtcatagatgtcacatcgcaattaaatacggtgtcacttttccaaggcactttaaaattgaaagggaggactattagttaagtggatacatatcaaattacagatgtctttacaataaatgcattgactaatagggctcgacagtacggtaaggtgtacatatcttgagccttctaaaatgaaaaattattacatgatttataaatcatatgaatctatatcatctcgattattaattataagagactcattatgaagtctacatgataatgatttaaatttgatttatatagtctacaagccatgcaattttgttttcaaacgagatttatgtaaatattactcttcgattgatgactgactgaggatagcattcatgtctgccacaattttggtgtagcttcttataataaattgtgaagtttcacatttaaaaaaaaaatgtatttcactacccctaccgtggaactaaactttgccagacaactttttatcctacctcttaatctatgctccatgcatcttccattgcacagatatttgcaaagggatgcgataatagactttcatgtaacttagccttccatgtctcacttctgatgagacatgctaatgtttttaatttcctttttggaaggca

SEQ ID NO: 89958 - DNA, 596 bp, Eucalyptus grandis
  Intron number 3 from transcript Egrandis_v1_0.017636m (loc us Egrandis_v1_0.008986m.g) derived from phytozome v7.0 (c hr-ID scaffold_6; pos 31869161 to 31869756 reverse strand)
gcttctgagtcagtcatccagcgttggtctccaaggtcagttagatcgtacctctagattgaatttttagttgtcatgtcgagagtttattctgccatggcaatcagttaggaagaaacttgtaggcataccgtgccaacaatttgatttcctgattatgtatgaccaacacgacagataggaaatataaggagtgctgcttctggaaattagtgttgcaaatctcatactttacttttaatcatctgatacaaataagttcttacaaagtatgtgtatatttggtaactggagtacctcctcctcgtatctgacgaatgccttctcattctggagctatatatgtctttgttcttgaaatgagtgattttttttttttttttttttttggggtggggttggttgtttacgcaagttgtttggagttcgtctttggatggttaaagcatgtaatatgcagttttcttcaagcatttccttgagcttttcttgagcttgaatgcagagacaatctaaatctagagatcttaaatgtactttgttcaggcaactcgtgtgtttgatcctcttatttttatctcttggatgacatgtag

SEQ ID NO: 89959 - DNA, 442 bp, Eucalyptus grandis
  Intron number 2 from transcript Egrandis_v1_0.015595m (loc us Egrandis_v1_0.015595m.g) derived from phytozome v7.0 (c hr-ID scaffold_6; pos 12086161 to 12086602)
acgccacaaatctccattttcgaacactagacaaggttgttctagctctattcctcacgaacttgggatttttgtttgtaaagttaatatccggatctattttgtattttgctttgctggcaacgattcggtcaaaatccaacgatatttcgattccccacatctccttgtaattctagaattaattattttatagagaatgtagtccgcaattcccaagttgtctttgagttgatccggtgcttcttgtgtcaaaaacaggagattattcttgggtcgttgaatattaatttgcagtttggctctcctgctttaatacttgtggatgctgttatttgcttgagaataatgctatgcgcgctgagaaaatattcaaatgatctctacgttatatgatcaagtgcactttctttgcccgcaggttgataatcaagacggcaag

SEQ ID NO: 89960 - DNA, 892 bp, Eucalyptus grandis
  Intron number 1 from transcript Egrandis_v1_0.008535m (loc us Egrandis_v1_0.008535m.g) derived from phytozome v7.0 (c hr-ID scaffold_6; pos 51316317 to 51317208 reverse strand)
gttgtcaaggtaccttttccagtcttttcattagacccacctcacatccgaacgagtgctcctgtttagaatcgtggatcattatttccataaagggcggccatgttaaatggatccaattgcataaaaaacccagagaaagaaattcttagaaacttcaagtcagaggaccaaattttgacttgatgaatggtacatgtttcaaacgattctcctagtagtcacgtaacatttataatcttaaaaatcataacaatctaggccgttaaacacaatcatacctttttttttcctttcagatgcacgaatttccattgcttgaaatttaatatgacctatgaagcgcttagtaataatctgttaactttcacagctatcattccagatatagctagacattcttctctcttaagtttagtccgtacaattgttttataaactgaatcagtcgagtgaaattgagtttataaacagacggtccataccgaaccctcaatatgaatcggtaaagttagcttgtaaatcaatttcatctaccgatgttaatacatccagcattattctgtacttatagacaattatttttgaattattttctatgtaatgtgttattctaattagtaatggcacaattttgttggataattcttaaatcttctattctaaacaaagatcaaatgcttggttacgcttaggctcttgagatagtgacctatcacttaaaaagtgtggtgaggtatcacgatctcaggaaaagtaaattaacttgatatgtcctctcatattgaaagtgttgccaaatcatggaattctatatactttttcaactttcttccaattgaaatggtgtcggattgcttattccatttggaatatattcctccagatatca

SEQ ID NO: 89961 - DNA, 745 bp, Eucalyptus grandis
  Intron number 2 from transcript Egrandis_v1_0.022928m (loc us Egrandis_v1_0.022928m.g) derived from phytozome v7.0 (c hr-ID scaffold_6; pos 49178924 to 49179668 reverse strand)
cctccaaagatccaaaccttccacccccaaaacgggtatatctacaaacgtgataactgtttctttatcttccgatgtcgatgggttttttttattcagatctggccaaagtttaatgagggttttcactggtgacacccccttttctcttatttagggttttgtggttgcttctagtccatgcgctagtgatcacaatttttccctctttcttttgggtttatttgtagattttccaaagcttttacattttgatccatatatatggaagatgcattaagggtttttcttttgctttcttttgggttgcttttagctcttttggcgagagaaaagtaagagccgacaaagacaaaaccatttgtcatgggaaattctctaagtaaataacaaaaagagaatagagagaggagaggaaatgaatcgttttactcacccggtatatgccatgcatcccaaagttctttaacatctacttctaaggagccacattcacattttatgcatcgcttgatgttttacttctctctctttatctgattgcgatttatctgattgcgatgtcttctggtcatctaaactgtatttcggtttaagttcatatttcctaagctgtcatatgaaagcgaatggtaattgttgatcactttaatttaactaatgcgagtaaaatggtcgggttggtgatggtggtgatggtggtgatgatgatggtgaatgatgagcaggtggaggagggaggaat

SEQ ID NO: 89962 - DNA, 963 bp, Eucalyptus grandis
  Intron number 1 from transcript Egrandis_v1_0.032574m (loc us Egrandis_v1_0.032296m.g) derived from phytozome v7.0 (c hr-ID scaffold_6; pos 43570735 to 43571697)
gtccaagagttccttcaagctggaacaccctctcggttctctctctctctctctctctctctctctctctgtgcttgtgtgaatgcatcgacatcatgaggaactggacttttagagtttgcttggccctccaggctttctttcttttcttgggcatgagattgtccttgtgtgaacgactgagagggcgggtagagagttaagcttttgtgggttactgggttttgctcatttgactcttttttatgccgttctttgctttctttgctgtccctgcgcgcctgatcctttgggatttcctgtttcgctgagctggtggtaggactgatacttagggtaatgaattatggaggccttgtctatggttacttgttgggctctggttatagcagggtggagtagtcttgaatgtttgctcgtttctttttgtggttatagatgagggagcttttgggtagtctgactgccatagttgtttgttgggtctgtcaaagtgatggattccgctgttcattgtgtgtaaaatcgttttaggaacttgaacggtaggcttttagtggatattgtatatggcccatttgtttaaatacccatttgcagtttgctatgatattaatttccaaaatggtattatgaatcaatcctattatagttagcattgctctcaattttccgtttagttaaaactaatggagtcttctctatctatgagtagtgattgttccctccactagtttcagtctctatctggaagtatgttttcatggcacttgactgtcatgctttttttccttttgtttgcctcaacgttcaaccataattcagatcatttgtgtggaatgttgtttactcatataccttagtgagtaaaattctattggcatggttacttgcgttctacttacatttattcgatatttggcttcagagaggaggcaggcagaagctgcccgaatcagggag

SEQ ID NO: 89963 - DNA, 381 bp, Eucalyptus grandis
  Intron number 1 from transcript Egrandis_v1_0.021029m (loc us Egrandis_v1_0.021029m.g) derived from phytozome v7.0 (c hr-ID scaffold_6; pos 29273198 to 29273578)
ccgtcacgcccaaaaaggtgctgatttgtttgtgtggtgcccgttgtgtgattaggattgcctattgtagttggttctggtatgcgttttgggttctgggaaaagcttgatgggggaatatggaattgaaagccgaattcttttccagttttgagctctggagggaacagtgggaaggtcgttttttttatcttgccttttagcttcttctttttttttttttaattcatgttttgttgtacacactgtagaggatattactggaggagagagagaatgctttctttgtgacctctctcattgccattaaagagaggtgggtttgtgatgctcgttcttttaataacatataattgtctctttccattaactttcaggttc

SEQ ID NO: 89964 - DNA, 564 bp, Eucalyptus grandis
  Intron number 4 from transcript Egrandis_v1_0.004536m (loc us Egrandis_v1_0.004536m.g) derived from phytozome v7.0 (c hr-ID scaffold_6; pos 29174121 to 29174684 reverse strand)
ccagttgtaaaatctgttgctctagtcttgagaaggtattcttctttcttctccaattcactacctgctagattgatggcttactccaggaggtttagggaacaaagcaagagaacaatagctttgtcaattcgattagggtggccatttcagttaagcactaaatcgaatccccgattgtgtcagacatttcttttccttgcttgtacttgtctagatgtgacccaagcgggcccaagtgcctaaatagcatatttaccacctcatatggctcctcgagggccatcaataaatctaaagacctaatatctatcttgatattatttgcaatgttctctctgtttaaagaaaaccctaattggtaattcagttgtttctaattgagtgaggaaaacttatttctccataaatgtttctaattctttttttaatttcttttagctggaacaaagtggtgctaatcgaatatgttacttcttcagagttcctgataatatgtaacgatttgattttaatgtgctacgcgcaggtcatttgactctttgggtggaagccctttggtat

SEQ ID NO: 89965 - DNA, 567 bp, Eucalyptus grandis
  Intron number 1 from transcript Egrandis_v1_0.032055m (loc us Egrandis_v1_0.032055m.g) derived from phytozome v7.0 (c hr-ID scaffold_6; pos 19236397 to 19236963 reverse strand)
agaaaaggagctgccaccctttaacgaaggaaaatgttctttttttctttcccctcttttcttttcttggccttttttcctcgaaaacaaagacaaaagaactcttttttttttttctctttgaatttcgaattctaacgaaacgaaagaaccactcacttttttgctctgaaaatttttctgaatccgcgccccccccccccccccccccggttacgaaaaataaagctctcttttatactaattccaaacagctgctttgtatggcatatttcaaacttccatcttttgttgcattaaatcaatgatgcaaatcggagcatgatttcgcaatcagctcgattttgcatcgattctttccattttatcaaaattattgtcctttgttcacctgatttttaattatttatacatttatcaaaatctgaatatccatcagaattttaaattttcatgcataatcaatcaaatcgatttcctccattttttttttcatttttccttttatttgttcaaaatgcaattttattttttcaaaattaggtgtcaacagctgcctctctttga

SEQ ID NO: 89966 - DNA, 671 bp, Eucalyptus grandis
  Intron number 2 from transcript Egrandis_v1_0.018994m (loc us Egrandis_v1_0.019007m.g) derived from phytozome v7.0 (c hr-ID scaffold_6; pos 53255844 to 53256514 reverse strand)
tgactgtcaagaagcttagtcgtgatctggcgaaggtgatattgctttacttctgagttaatgtctttcaccttgtttctgattaaaaggcttaaaaaaagactaatctgcttgggtgtgtttgtttggcagacaatcgatggtttagaaagtattttcttaaaaatgattgttcgtatcacttacgaaaatgaattggcgattggtattttcatcgtttaagaaaatatttgggcattaattgttgataatagtaaaaaaatgtttactgttgactaatttttgtaagtgatagaagcggtcaattttaggataacattttccaaattcttgaatttttggcaaatcaaacacatggtttctcccagtatatatttttttcccgcaaggaatgcagttatggagtaggattatttttttcacagtaaagtcagtcagtgcagccttttactctatacttgacttctgccatggattttccttaagttgaaatatcttcgctgttcttgatgagtttgccccttgccatcaggcatgttatgttccttacttgctgctgctaacatcaaaagtgatgaaacctgtgccttatgtgcatttttataatcacaaaatattcgatattgatgtacatctcctattgacagctagaaacatttaaaagacaactg

SEQ ID NO: 89967 - DNA, 498 bp, Eucalyptus grandis
  Intron number 2 from transcript Egrandis_v1_0.007863m (loc us Egrandis_v1_0.007863m.g) derived from phytozome v7.0 (c hr-ID scaffold_6; pos 803355 to 803852 reverse strand)
gtgtcagtcactctctctacctctctctgtatttgaatcttctgacaaaaaaaagcaaaaaatctgtgactgcttagactcataagggtagagatattctaccagaaaggcgcatgctttatggtatggtttaaattcctttactttacctggggaaagtatctttggtatgcaagattcattttacgtgctttgtgttcatttcgatccgaatctacttttcctccgattcattcggttctctttttcatgtgtaaaagataagcttttctcccgtttctgtcgttgctgaggataccattagtcctcggattcctcgtagattattctgattgaccctttaagctttctaagcagagacatcaacttaggtttcgtaaaaattattgctttcagggttgagcctgtgaactgatattgaagaaaacatctactgatgagtgttcttgaatcaactttacagatcaagcaattgtattagcatttcagcactatatt

SEQ ID NO: 89968 - DNA, 809 bp, Eucalyptus grandis
  Intron number 6 from transcript Egrandis_v1_0.029811m (loc us Egrandis_v1_0.029811m.g) derived from phytozome v7.0 (c hr-ID scaffold_6; pos 48924496 to 48925304 reverse strand)
ctaatttggtaattttaccaagttcatggcaacttactactcgaattctttgctgtccaatcttttcaaagcatctaggattcatttttcggttccttccacaatgagctaccttatgggacctgggaaaatctgatctgctctaggaagaaaataaggatgcccattgctcgtgactttcaatagtggcactacagttaacagttaattgccaattatccttcactgcaaaaaacttgtcttatcgggttgacgatatgttgaactaactaaagggggaaacttggaaccattggaatttttgctttctgcatcctttccatggcatcttgtgcatccttacgttgcaaagtctattttctcgattatcgcaaggccttaatcaacacagtaccatgtactgcaaatattgtcttttcattagttatccatgtaggtaatagcaatcacttccagattttatttagtcatgtgaaaacttgcctagacttaaaagggattttgccctctgcggtgatctcttcaaaaggaatttgagatagacttgtatcagaaaccatatttctctcaggaaattcattagcttcctccacatggattgtattatgatataatgttatcattgtcctcctcttaactgtcgcatagtgttcggagacaggttattttgtctgaaattaattgtaggtgttgcacttggaattgtaagatcaacatcatttttattcttcttcatccttattttgactaaactcctgattttcacatgttcagcttaatcaagctattggttccattgaggcaattgc

SEQ ID NO: 89969 - DNA, 958 bp, Eucalyptus grandis
  Intron number 1 from transcript Egrandis_v1_0.020584m (loc us Egrandis_v1_0.019976m.g) derived from phytozome v7.0 (c hr-ID scaffold_6; pos 18839166 to 18840123 reverse strand)
acccctgggatctcccaagtatgactcttctgtttcttgctggtgatctttcaattccgacgacacatgaagtgaaatcctggatcgttttctcgtctctattctattagtttcttgatgatttcatatattcatcatctacagttttaaggttttcgcgtggctggtggacttaacaggataatctacggttaacttgcagactaatgaaaatatggtggacaataatataccgtcatgctgaagtactttgaaaacagatagttttttttgctaaaatactgagctaatagagagaaaaaccctaattttagttgagatgcggttcctgaagatcacacatgctatttccaaccagatcaaccgtctcatgaacttaccaatagtcaagaaagctatattgtttgattgaactttatgtaactatcttatactagctgagttccaaaacaaatgtaatctttctttcatttgaagctcgcagttgaaagtgctaagagatgacttcataaccatgaggcaagtttgtattctgtaatttctacctgcgatatgtccttattatccatgatcacctttgaatgtttctaagtttcaaaaagcccccaaaatcaatagaggtaacaagtagtctaactgttgtagtctcgagagatgttcagataaataataaaggtttagcaatttttttgtatttctccgcaataaatatctatgcccttcgatcttaccaaaaaaaaaaatatctatgcccttcgacccgtttcaaaggatggctaggtaaaaaactagtggtattgtatccaatagcctttctggggttatccattctgatggaaatgatgatgatatatttctagaacaattacatgattatatgagatctatctattctcactgaagtagattttcatttgcaacagaagcaagtgatacaggagataaggagtggtacttc

SEQ ID NO: 89970 - DNA, 507 bp, Eucalyptus grandis
  Intron number 2 from transcript Egrandis_v1_0.007258m (loc us Egrandis_v1_0.007258m.g) derived from phytozome v7.0 (c hr-ID scaffold_6; pos 40767906 to 40768412)
ggattctcagatccaagtcagtcagtttctctctccctcccctagtttgcttactgtcttgatttcttccccctaataatttaacttatttcttggtgttaactcattattttatcataccaagaccatcaataattttatttttttgttcccctggtacctactattaatatctatatgagttgaataattaacaaatatgcagcatcagtccattttcttcatttctcaaatgcttcagtatatattccgtcacggtcataaagagcatatttgttgtctacctcaaatattattggttttcaaatcttgggaaattacctgctaaacttaaagcgccgaatattttatcttatggggctaggaccacatagaccagagcgtttgttttgattgtagaaactataatatgctcgtctctttgtatcacttatttactacgttaaaattatgtggaaatgacctgctaaaattaaaaacaaacggacacattgcactgcagggccg

SEQ ID NO: 89971 - DNA, 416 bp, Eucalyptus grandis
  Intron number 1 from transcript Egrandis_v1_0.001235m (loc us Egrandis_v1_0.001235m.g) derived from phytozome v7.0 (c hr-ID scaffold_6; pos 38417820 to 38418235 reverse strand)
cggcgaggtttcgcgcttgccagatcatttcggaggtaacgactcggatattcagtccctgtgagaagtaattttctaatttgaagttactttagctgagaattacttagacagagaaatgaatttaggaccgagggatatattgcgaggtagaaacacgaggcgattacccgttgaagcattttatgagatagaacaaggatagttcacttcggttctatataatttagactttaatttgtatctttgaagcatgtatcttgacaagaaaaagttaacaaaggattttttttcccctctaaatttcctgtcttattctgttttcctgtggaaattctttctccgaatcatattatggtaaagaatgctggttttaatatttgattcgtcattgtagattatattacgacttccag

SEQ ID NO: 89972 - DNA, 692 bp, Eucalyptus grandis
  Intron number 1 from transcript Egrandis_v1_0.024793m (loc us Egrandis_v1_0.023759m.g) derived from phytozome v7.0 (c hr-ID scaffold_6; pos 24010024 to 24010715)
ctcaccctccctcagaccccaatcccctcgccaaggtcgtcctctctctcgatcctcttctaccccctgacaatccttcttccctccaggtactctctctctctctataaatacatatatgtttttcgcttcgattcgcgctttttcgcttgtcttcctagtcggttggacttaatcaagtctgggctcacgctacagggtaagttcgattatgatctcctctgtagattctagcgtttgaagtggcgccggggatacgaattgcgaacttgttctgattttgagcagtagggagttcatgatttggagagtggcccggtactataggctcagatgttaattaagtgcggttgaaaaaggccagttgatctgcggaattagggcacgagtggatgtgcacttgtgatttcgcgatgtggtgtcctgttcgtccttgcttatccaaaccacgacagacggcattgggacagggccggttgtatgtgaataattgtttgatttcgcacaattccttttgttctgagatgcctttctgtttggcgaccatcacgagagagcgcacttgcttgtagctgaagacgtagctgcatcggttctacttagtgtagcttttgtgcatatgccatctgctgctgacgtctcgttgctctgcatttctgatgttatctttgtgtattgtgaatcagttcact

SEQ ID NO: 89973 - DNA, 787 bp, Eucalyptus grandis
  Intron number 2 from transcript Egrandis_v1_0.031726m (loc us Egrandis_v1_0.031737m.g) derived from phytozome v7.0 (c hr-ID scaffold_6; pos 28959550 to 28960336)
tagccgaacccatttggcactcctgtttcggtgcggtatgattacggcacggcagcatgacctgattaagttgtccattcgagcctaccgttggatgctgttccctaatctctagttaaaattccatttgccacgcttccctgttgaatcttagtctccaaggtcattatgaattcaatgggatgctgttcttttggaggtttctcatcgtagtggttggttatgcatctggaatgctctttaagtggcttggaaagtacactgcctcagctataaaaccgctacaacttcttgttgcatctttttggtgcatggtttgtatttgatgtcaaaagaaacttctttgtctccccttttttgtttcgagcacattctattctttgtatttctgatagcttaacctgttatgcataattgcaaatgactcttattggatgcgaaattgagtattaaagcgtgaatggtaggcttttgtttattttttatgtgcatagatttgatacgttgtattgtggatgtgaagagtcgagttccagtatccttgtatatcttgttggtaggatttatatgtagcctctgtagttcaaactgattcgatatcggaatgtcaaggttgtatatcagtaagatagcttcaagaagaagaggccaattattttttcgtttttgacaatgagatgggtattggggaaatatggagataaattgagcaagttatctatattctgcttatgatgaatatgttttgataggtgtagactacattgagttaaggaaattatacgag

SEQ ID NO: 89974 - DNA, 773 bp, Eucalyptus grandis
  Intron number 3 from transcript Egrandis_v1_0.028301m (loc us Egrandis_v1_0.028308m.g) derived from phytozome v7.0 (c hr-ID scaffold_6; pos 43545935 to 43546707 reverse strand)
gacagcgtaagatagctccgactccagaggtaaagtgagctctatatgtatatacacaacagttagtgtcccacctaggggaaggaaagagggaaacttcgattatgaaaagggtaggtctggagaaaaagagaactgaagaggatatagtcaagttcaaggaaaaacaaagtggtgctttaacctttctacagttaagaaaatcactatgcaccctggatgtagaattgcttaatattgtgttaatacataaagcaagtagtctgtgcagtaatggcggactttggatttgtttaaatgattccttttctgttattttaggtctgcaacaaatttgtgaggaaaacctcatgcttttgaataaatttatgatgggggcaatacgactagcttagttctctgcacaggagcttttgaattttattttggtgtcgttgtaagtccacacaaagtcacatttctttcttatcccaccttcccctgaaaaagccctctcaccacttccataaagtatggattcttctaaactctagtgaactctggctaactcctcttgacatatactcctttcctcttatactggaagttgcatacaatatcttttttgtgctgtagcccttgcctgttttgcatcgttagatgggttggtgaagtcatgtctgacaaagacggtcggtatattgtgctgtgtattaaattcattatcaataatatcctgggtagtgattttttgttctttcactgttagataacgctacacctctcttcaggaa

SEQ ID NO: 89975 - DNA, 640 bp, Eucalyptus grandis
  Intron number 1 from transcript Egrandis_v1_0.028301m (loc us Egrandis_v1_0.028308m.g) derived from phytozome v7.0 (c hr-ID scaffold_6; pos 43546899 to 43547538 reverse strand)
gaatcggtcagtgtctttcccttttatattctcttccttttttttacccctataatgtacatgttttatgggtttctcgtggcggcgaagaaattctcgagtttcatgcttaagttatttcgagttgtagacggctctgtttcagctacctctgtctgggaggggtttgatgcctcaaaaggaatgagctttatgcctaatgaagttacacaagtactttgaaagataccgactgtgttattatcagtctaattggttatgtgcaaccttggatgccatttgggttgtgtgcgatgttggatttgaattgtcttggttgctcctgaaggactttgacattgcgaaagggtgagcacacatttgagctaaagcttatggaagtgtttaatcagctgaggaatcatgtaaagaaaatgtgactgatagctgtgtttagatttggactcatcatctacaggaacttctgcttgccgtagtatgagattgattgaaatagaaaagagatgtccgtatctgcattttgcttgtctatgagaatgaactgcactgctgaatgattcagcacattgtttgcttacgacgtactttatggatgtgtttactagtgaaggagaaaaggtgggtggtattcaagggtgag

SEQ ID NO: 89976 - DNA, 1034 bp, Eucalyptus grandis
  Intron number 3 from transcript Egrandis_v1_0.051595m (loc us Egrandis_v1_0.051595m.g) derived from phytozome v7.0 (c hr-ID scaffold_6; pos 2286520 to 2287553)
ctgtgagagggctactcggacggcatcatcaaaggtcatatcctggtatgtgtataacacatgttctgttcacttgacttatgcatgtacagtgagatggttcttctcaatttatacttatgagtttgactgaagtctttgggcgctcaccaacaaaagaaaataggaataacaagtcatttgctgctataccgccttgtgagcttaaagtggtaagaacacgggggttcgtctggaaagaaaggaaacaagaggtgaagagagcgaatggacaaaaatatgacctacttcctaaacaaaaaggcatttcaatacccttagctttgaatgatggttgagaatcttccaatacacgtactttcgtgaatttagaccattaaaaacggcagctctttctaaggatattacaattaatttttttttaatggttgacaaaattcaaactggtttcacatatatgatttatattttaaataatctcgtttctcttttctattttgagtatagggttgttttttctttgtcattattgcatgatcacaatgaatgtgagcccaatgcatatgcattgatggaccgtatagggttgttttttctagggtggagtcctttcatccaaagtgtaatgaatcgggctcacatccccgagagtgatgtgtgacaggacaatgcattttttttcttcaatggtggccgctttttagattgttgtagatttcgaaggagaaagaagcataaaggacaaaattagagcaattatagggcgcaatacacgtggaaatgtcaattacacaaaatcttttgtcgtttgcacggaaaattatttcatagctagaaatggtttagacaccgcaaaccctataaaaccatgtcatccctctccccactatatctctcttcctccccccccccccccccccccccccaacccccccccccccgggacacgtagtctccgtagtatcttcatggaagacgtggggatgcaccttatctcagcatccgccttccttttccttctcttcttgttcaaa

SEQ ID NO: 89977 - DNA, 860 bp, Eucalyptus grandis
  Intron number 3 from transcript Egrandis_v1_0.021722m (loc us Egrandis_v1_0.021728m.g) derived from phytozome v7.0 (c hr-ID scaffold_6; pos 50862380 to 50863239 reverse strand)
caggtttctcatggctctcttacattttctgatgcctctgctttcctctattaaaagaagataaagaataaagaattggccaaatatttttaattgccagaatttgatattgcgtggtgtgctgcttgctgttctagataagaattaaaagtactcttgttactagatgtggattaatcaagtatcaattgttgcaatatcctcgcatagttctccagttttattctcaacagttgacaactgagtcaccatgtagtaatcttttttggatatccttcatgaagatttctcatcttattttgtttgtcatacttatgtcaaaatgctaaactgttggcaatctatggtttggattgcacttccagttacatagctgctttgattagtgatggtagcagtacctttcttaaatgttcccttctgatcagattgaaaaacatttacctcttttaaaattggcgttccaatttacctcttctgctgccaaagctataatccaattcatacccttataaagctccaggttttgcaccacaaagatgctatcactacacatggtacagtcctggtaaatataaatcctcaagagtacaggcaattgtctccgtttagatccagtcatcccttggaaaatgtgaatctattagcactttacttttcttatcccatcacctcctgtttgttgaggatgttaagatgcgaagttcattcatcaaaaagcatataacaatgccctagcagaataattcaccttctacactgaagaaactggtcttatccatatttcattattaccaattctaagccaatgacttgtcttctttcattaggtttcgccagatcaggcacaactacttgca

SEQ ID NO: 89978 - DNA, 922 bp, Eucalyptus grandis
  Intron number 4 from transcript Egrandis_v1_0.053679m (loc us Egrandis_v1_0.053679m.g) derived from phytozome v7.0 (c hr-ID scaffold_6; pos 14672375 to 14673296 reverse strand)
tctagcttgcaaaacggttagtatgaaataggttttaacccctgctattgatttaggtccaatggatgatttctgtgttctgtggctatacgattacaacaccagatagcacacgttaacttttaaaatgcagaatgccaaccgcacttaattcacagccctaacttccaatatcctggtctttagcttagagaataagctgccggtctgtagtcatgaggtggaccaccttcatgaacttgctgtagttcagaaatagcgagccatagacaactgcgaaatgagcgcatcctgtcattacataaagatcttttaaagaaagtcagccatccaattccagaaaaagcttggagttttccacatgcggtcattgctccgcaccccactgcacttttctaaaacaaggttgttggtttccgtcctcctaaggttagattgataatcaccttctttgatgggattggttacagacaaagggaaacaaagtgtttcttggtcgtttacattgatttgcagttgatcctaatttgtcaagaatatataaaagatcacaaagctcccggttgcttatacttggtaaaaccttctgttttcttatagttaggaaaggaaaaacatgtcaaagtcagttttatcgacttgatgagatgttatatatgtttcttctgtttgtccatatttctactgaatgatattggagtttagaagtaagaatatttagcaagttactgaacttagtttgagggagatatttactggagctgtgtctaggagaaaattaaaagatgaaatgtccaccctgaattcaaagttaatttatgcggtgattatatgtacctcgcactttgaattgtgctcttagttttttttatttcttctaattattatttttttcaggtgtcttgcctgttggagaattcgg

SEQ ID NO: 89979 - DNA, 841 bp, Eucalyptus grandis
  Intron number 1 from transcript Egrandis_v1_0.043242m (loc us Egrandis_v1_0.043242m.g) derived from phytozome v7.0 (c hr-ID scaffold_6; pos 11872632 to 11873472)
gaactgaaaccagttcatttcccctgcaagatttgaggggcatatgtcccataactgcattacggcctactaggtgccctcacatcgaggtagcattggtcaatttgcaagttctggagaatggagcaaatatggctggcccattaccatcacaagggacgtcttgatttacctaaacagatattgtcattcaaattaatcataggcatttcaactggagtgagcattgatgctttcattgcagaagtgatccttcttcatattattaactctctttagtataacttaaattcatctgtttgcatatctaatcttttctcaattaccatggtatcattgcatattatatatgtccgatatcacttactttaccgcatggtttctttcatcataatatttaacttatgtgcatgttgattttcattgtggatgtcttttgtgatcaagttctatgttgttttacctgtatgcatggacactccaatattttagtgcaaccagctctggtgccccatcaacatcaaaatgttccacatcaagcttcaaataatgctccaccacctcctcagattcaatgttgtggaacaggcccgataggcccatcgtcattacaaggtatgtagttatttatctaaattaatccttatgtatctatcaccatattatgttattaggggaagcaagaatgctataatgagatagacagatttgattgcagaattagatatgaacaagggtgcgccactgacgagtcatacaaacacaaacaacaactttgaaaagagaggagatttgaaaagaaaaacaaatcgactctatagcagagaagctgacataaggg

SEQ ID NO: 89980 - DNA, 540 bp, Eucalyptus grandis
  Intron number 3 from transcript Egrandis_v1_0.018522m (loc us Egrandis_v1_0.018522m.g) derived from phytozome v7.0 (c hr-ID scaffold_6; pos 32207219 to 32207758 reverse strand)
gcaaggtcacgactggcaatatcgttgcacaagtagagtgaaacctctttggcctgatctctgtcatgtggagagttaaattgactgtgctaattgattttggtccatagtattgatgatgataaatggagtattttgtcgacgttttaggtccaggagctggttagccatcggtcttcgaattcagtagctgaattgaccagatgccagtgtgattatggtttgttttggggaagagaatttagttcttggtaggcttcatagttagtctgatataggttcttaagccaatgatgttaatctggtcttcttactccgtcgccatctctaatgtgtatgaatctacagtatgttgtgaaacggttctttttccactttacctcctgattatggtttttatgactggagctcacccaatacaacatcaatgatttgagtgctgaaataaggtttagataattattcgtcccaatcaatatttgatttcctttgtccccctgttcagttgattgaacgcttcagtgggaggctccctggtta

SEQ ID NO: 89981 - DNA, 826 bp, Eucalyptus grandis
  Intron number 2 from transcript Egrandis_v1_0.006053m (loc us Egrandis_v1_0.006053m.g) derived from phytozome v7.0 (c hr-ID scaffold_6; pos 48640428 to 48641253 reverse strand)
tcaagccctgtggcgacctcctctggcgcctgcaggtacataacatacactatgcgcacacaatacattgcacatgcgcttacgtatcaaaaatgacatggataggtagaatcaatttccaattacgttaactaattgtttatttagtctctgcaacgtagatagcgtgctatccagtttgccgggcctctacatttgcaggagaagatccgtggccacacgccctctcttcttggctcttctttccttttaaaaaatttcgctctagctcaatccccctagtccaccaaaacgtaaaaatgtgtactgaaaataagcttatcgccatattcaaagaaggaatgctagatcttagacattagtcgagcgaagcaattgtctcgatctcgagacttggcgtttatagattagtagccaatatcctctggtgccactactaacggtgagggagaaagtttttaccgaaagccgcttacaaaatgataaatcatgtcataaacacacttatggagggatgcaattatgtcttccacatacaaaagtcactttaatcacttaagaactttgttgtatcatttgtgaactaatctgagagttgtttgaatccccgccacactttcaacattttccttgcgttctgaaaatgagaaacaaagtcactcctacactcctaaacaccaatcggaattttactgttgttgcttgccataaagtttaaaatttgttaatgggtggttatacgaagtaatgggcaatctaaagctgacgcatgatgcctgatttccgggcagttcctgagggagaagcagttcaagcagacgatccc

SEQ ID NO: 89982 - DNA, 712 bp, Eucalyptus grandis
  Intron number 1 from transcript Egrandis_v1_0.015612m (loc us Egrandis_v1_0.009330m.g) derived from phytozome v7.0 (c hr-ID scaffold_6; pos 9704837 to 9705548)
tctcctcgccaatcccattttccgccctcgaaaccgtaagcgaatcgtaaccaagttctcaacatccatcgctgctgctgaattttgattccgtacgttcgctgatcctcccctggaactagcatcgtctcctgtcttcgagtgtcgcgtgtcgtccgttgctgaccggtgacgggtccggtgttgcgaattatgcgcaccgatatgggaatgtgggttggtgttggaatttctcgtcttccgattgtgggtgatcgagggctggctcgcgatttcggtgtcggtttgcgatcggagaattcataacttggttttcgaaaaactatgcttttcgttggattcttcggaggtcggaatctcccccatcggcataactgccgcggagtacgacgttgacgtgaaattcgtgcgtcttgttgattgcatgagtgtgtctgttgctgctagaatcgtcgactcctagagtgtcggcttaaagaaattgctttgctagctcaatttcaatgatacccgtgtattttttttcccgaccaggagaaaggtagtcatcggttcttaatgagtgtttggcgacacgggcagtcgtgtatccgatgtttcttcttgtttgatctcgacctcaattatctcgttgcaattctggggggagtttatatatgtttcatcttagtgaaagttcatttttttcttttcctcttgcagtgtttgagat

SEQ ID NO: 89983 - DNA, 828 bp, Eucalyptus grandis
  Intron number 1 from transcript Egrandis_v1_0.044297m (loc us Egrandis_v1_0.044297m.g) derived from phytozome v7.0 (c hr-ID scaffold_6; pos 21102322 to 21103149)
ataagagcaaatcggtatcaaaaccggccataaaggtatacttttcctgtggtgcagtctttcagttttttatttagttattttgtgacgaacgatgatgcatcgtgctgctcataactaatgtaggaacatggttgcccatgaaacaatattgaaggaattattatacttcgcaatagattcaagcaatgcatatggtgaactatatcataggttaaaaaggctggatgttgcacttgagttttactgaaattcttagagtgcagatgcttgattcacttttgatgatgttcagttggtgtgaactggctggttgattgttcgacagagtgattccagtaaaatcagacttaattgaagattcaattttacaactgtactcataatctggtaattaaggacatttggattgtgcaaagatgcttaaaactattcacagattggataatatatgttgtgcttgtggtatttttgctggtcactgctcaaatagctgatgtagcattagcttttacacaaagttctgcacctaaacatttttagatgccgaactgagtggcttacatgtacattatttttataggattttccatttccttgatttcactgataatcttgaagttatttatcaggaggaaacttggagtttggaagttcttgtcgacaatattgagctttctgtcataagaactttcatagtttttttcatccagtgcttatgctatcatctagatattttaaatctccatctgtttgagcctttcttctttgtattgatttgtgatgtgaacagttttggaacaaacgatcaaccttgggaaaagtcag

SEQ ID NO: 89984 - DNA, 887 bp, Eucalyptus grandis
  Intron number 1 from transcript Egrandis_v1_0.055242m (loc us Egrandis_v1_0.055242m.g) derived from phytozome v7.0 (c hr-ID scaffold_6; pos 17927593 to 17928479 reverse strand)
caaacggatcggcactcgaaaaaggtaagagtctctgtctcctttcttgcgttttttttttttgcgtcccttcttgcagggattttatgcgcaagtctgcttttttggcttgtaatttgtcgtggtgtgaagaaaaacttgatcttggtggattttgttaagaccttttgggagaattcatgttcatctcccgtgattgatgcacccgtaataacagaaaataaatttcggggccgtagacttgggatcttgaaatttgttctttggcggttcgaattttatgattgattgtgagtctatggtaacttcctttctgtcggttatggcttcaatcttttgggtctttttgctgttgatcctattttgactgcctttctccgagtgcttttgaagaagtgagttatattagttctaaccaatggcgtggttgatttgctttcttcgaatttctccacgtcaagcatttacatatgttccttctacatgtgaagcttttgctaatatctttgtggaagatctgtggtagcggtactgaactcagatagcttatctacttgacgaattgtaattcgtacatggatctttttttctgagatgggtccaggacacaatgcatgcataatgtggttgattttcctgttgaaccttttgatatttcctggactctcttggtgtgacagacttcttagggaagattgtggtgggaatgttcactttttgtgctttgctgtagcttgcgagtggtttgttctcagctggtgtctagctgtgaaattttgcttttgatgatttgatagcctcccatttctttattttttttaccatgacgatttttttctttggctcgagtctgaaataactaattttgtgctgcgcagctgaaggag

SEQ ID NO: 89985 - DNA, 890 bp, Eucalyptus grandis
  Intron number 3 from transcript Egrandis_v1_0.025759m (loc us Egrandis_v1_0.025759m.g) derived from phytozome v7.0 (c hr-ID scaffold_6; pos 45420220 to 45421109)
gcagtgccatcaaggtcactgggaagcgaaagaaggtgcttttctttagttcttgtgcatttcacttacttgtgttgttgatagtgtagagtgttaatagtccaatatctggactgattgattggggactatcgatgggttaattgttgtgtcatttctgggcatgtagtttggtcttgtgtgattccacggcactattctgttgaagaagctgactgatgtatctgccaaaagggaaaaaagaaaaattggacaatcattttgtaaatcggtgaattttggtacttttatttgcttaagagagcatgatgacttggtctctctgctgaaaaacatactaatttgcagttgatacctgtgagaaacatagcatctctctctctctctgtgtggtctgcctaataggtaaaaagcttttgaagtcttcctatctggctgctggtccgattggagtttctttgttttcactttgcaggcctactatgcatgttgtgatttggattcctttaaatataggataaagacggtaaataagaaccacgaaagtttggtaattctctaggtttttctagaataggctgatcttcatttggttcttcaaaacaacagcaatgcagatggttttgaatggtttgatgcaattccacctatgcacttctctttcttgtgggttcatcgggtcatatttgaggtggatagatttttgtttggtcataatgaggtgtatagatgtcaggcataattttctaccattttgtattactttggcagtaatgaagatgtacattgtgcagaataaaatgataatctgtgttgcacatgactctgcctttttaatgtcctgtttattttggcatttgagcttttctctttctttttcttcctccaga

SEQ ID NO: 89986 - DNA, 858 bp, Eucalyptus grandis
  Intron number 1 from transcript Egrandis_v1_0.026153m (loc us Egrandis_v1_0.026153m.g) derived from phytozome v7.0 (c hr-ID scaffold_6; pos 30478643 to 30479500)
cctggaatctcacctttttgcgccgcgccgcggaggtgatttcggtttttttaatatcttttgcggctgtccttttccttatgtctgacggttggtccgttgattgcgatatgtctggacctttactcctacgggcaaggaagttatcaaagagcagtctttcgcatttctgaagcgaaatgagttgtagtggcgctcgtttgattaatgttagagaatgcgattcttgctcatttcttgatagctttgttgggcacggctggtgcgagagccttgaattgctcttcgttgggcgcttgtggacttgcacagaaggtgtttaggaaaatgcttgagtgaattgcgattatacttctttgagaggacagtgacgtggacattcgagagaaatcttcacaaccgtttctttattcaccatctgtggatttctgattataaatatttttgttcaaccattttgtttctgtcggattgatgaactatttgcttgcaattcacgtcaatatttcccttcatttttatagtagatgccaaaaaaaaaaaaaaagtttaacagaaatccccctttaaggaatttgattgcttggaatgggattccatcttcttgattctgtggcaatgaacaaaacagtccttgttttagtgactaataaagttggcaagtacccatctttctcttggtgataagaaaaaaatgtttacttaatagagaacgagcaaatttgggatcatcttttgttcgttagaagcaactatgtttaaggaactttttgtaaacttcatatggtattccattttatgatgaggaaaactttacctgcagagaaagaggctgagaggaaggaagaggagggagag

SEQ ID NO: 89987 - DNA, 459 bp, Eucalyptus grandis
  Intron number 1 from transcript Egrandis_v1_0.032742m (loc us Egrandis_v1_0.030268m.g) derived from phytozome v7.0 (c hr-ID scaffold_6; pos 40194476 to 40194934)
aggcaatccctctttgatcaggttcattagattcattgtcttgtgaaacgatgaaggtgtttgattccaaatagatctgctcataataatcatctctttcctttattcttgcatgtaatagcctcttcccaatgacaagtgaaaaaaagaaaaattgcaaaaaatggtcggctggtttttgttgtgtattgttgaagatactactctcacttgcgtaccgacaaataagcttattcatcaatcccttctactttggagaaaaaaaaatgctttgcacttcttttatttttacttgtctttaaacaagcagatgggtaattaatgcataacgcggttcttcaaaaactcagtatagttagagttctttagatataatgatatacttgaaaacataagttttcatttcaatattgatgaaacaaaacgcgtactttggcatcacaacacagggatatcttg

SEQ ID NO: 89988 - DNA, 870 bp, Eucalyptus grandis
  Intron number 1 from transcript Egrandis_v1_0.018753m (loc us Egrandis_v1_0.018731m.g) derived from phytozome v7.0 (c hr-ID scaffold_6; pos 27540285 to 27541154)
gcgatttggagctccaaggtaaacagaaaacaaaacccgctttgtgtccttgcttatctttcattctttcttttttctttctttgccttcggtttcccttttctatttttggtttggattcccattatgaatgcgcgtggagggggtcaattgcgtgaatttaatcgttgcctgcaaactctgtttttgctctgtaatggggcggcagaaacagagcacattcattgcttgagcttgaatctgccaaaacggacctaacaccttgaacatgggcatcggttcttcctagttagtggaagtaggaagagtttcgaagaatttaaaagtgatttgattcagaagcagagtcagatcgctccagtttatttctgctctgtttttgttaggtgagaactgtaggggaaggcgatgatactttttttttcctttgttttgacttgtcacccaccagaccagtgggcccatcgattataccttgttaattccgaaattggagctttttagaggtttccgtttgtccaccgggctttcgtttgtcgccatccactacgccgagcggattgacccatttgacaacacaaacagggtgtcttgcacgcataattaaaaatcggatttttatgatccaattattcgtctaatacaggaactgataagagagaatttaacgcctattttgaaagatcttcccttttcatagaatccgaaccaatcaatttaattttttttaaaatttttcctcagctcagctgtgtgcggaaagataatgtgcaagagatcatattgatgatccgatccgaggaaaatcttatgaatctttccatttttatagcagggagcactgttcagggaaagggcagcagcgaaaac

SEQ ID NO: 89989 - DNA, 733 bp, Eucalyptus grandis
  Intron number 1 from transcript Egrandis_v1_0.025946m (loc us Egrandis_v1_0.024369m.g) derived from phytozome v7.0 (c hr-ID scaffold_6; pos 37272777 to 37273509 reverse strand)
accggggatctccgtacaacacgctcgtctctgaggtatgcccgcattgtcgtgtaatgaagggctagtttgctcgtctctgcgtttttggagaattgagcttgtggatttcgacggaggagttgttttcggattctcgcattgtggtttggttgagtaggtgattagagtaatgggttgagtaattttgcacagtcgagagaatggttttgaaggtgaaatgcctgctgcattttgggcgctgtagtgtaattatcaacttggtcattgtttagtcctgcaatcagtgagtgagctacttggaatgattcgtcgcattgttcttcgcttttgaacttggaggtacactgatgtgtgtgtgcgtgtgtgtatccgcaacactcatcacgcactcttgtggaagtatttccgacgcttcagatcttaagtaaatgcctgttctgcgtctgggtatctttctcccctgagagatgctttgctctgctcgtggtatgagatgcttgaaccatcctggtcgggagtggtcttgaactgaacatttgttaaggcattcatgtcactttcatagctttgtctcgaggttctaattgctcatttccggaagtgcagaagcacattgctaactgtgctagaattttcttctcgttagcctccaaagccaatctttgcttccgttctgatattctctgagttcgtaggctgttaggcttttggtccctccagcaagatttga

SEQ ID NO: 89990 - DNA, 578 bp, Eucalyptus grandis
  Intron number 3 from transcript Egrandis_v1_0.013617m (loc us Egrandis_v1_0.013617m.g) derived from phytozome v7.0 (c hr-ID scaffold_6; pos 38797730 to 38798307)
ggcgatatacggtgggtatgatgccgtggcatcattttttgaaagcgctactatgaaagtctccatagctttgcaggttttactggtttggcctctttcagagcgattgttttagcttgtggagtgaaaccatctcttattagctggtaggaagaattagctggtcacatagaaagcaaaactagaaacggaatttcagttcctgaagctacaggtccctgtcaaaggcaacgaatttggtggtttctccttcatttagtaatctgcggtctctttgtttatatttggtatttgaaattttgatacttccgagtcagtttcacttaagttggttgaagtttgtgtatgcgactagaatgcttataccctccattgatgttgacttttccttcactctatagacatgcgctgcttatggtggatggtcagaatattcttgctttggccctacttcatgcgatttcttttaatctgtcttttaatgtataatttctgcactagggtgcatggatttttctgttcatagatgtagtccttgttgctgaaactgtcgattgcagtttggtgcaggaggacgg

SEQ ID NO: 89991 - DNA, 682 bp, Eucalyptus grandis
  Intron number 1 from transcript Egrandis_v1_0.010385m (loc us Egrandis_v1_0.010316m.g) derived from phytozome v7.0 (c hr-ID scaffold_6; pos 14163620 to 14164301 reverse strand)
gttgagacatcctctggcaacgtatgtttctatagttctttgatttttaaggaaattaattttgttttgacgggtttaacagatagccatttgattgctatataattgtgatcgaaaaatttactggtgatgtacttttttaatgcttttattggatagtgaagttaatagagggtttaagtagagattaattagccatttggttttacttatagatatcgttgttcaattatctgaagcttaaaaatttctgaattacaatacttcaggcatttagtttagtaagactccgatagaaattttccttgtcattgacctccctgtatgtttcatggcctaccgatatgttttttctccctttccccttaatattgaattgtattaaaaaagaaaatttacagtgcttgaaatgatcgtgtcggtgagtctcaccatttgtgctatttgtctatttggtgagattcttacctgcagaatgtggaatgactcaaatcgtaatcatatacaccatcataagaatgattttggtagaaactcaattcaatataaattctgtcattttgggggcaagaatgatgaggaatcttgtagtcttctcccaccctttccaccaaagcatttttaatctgttagcaatccctccgttatcattcatgctcatcaatttttaatttctcagcag

SEQ ID NO: 89992 - DNA, 930 bp, Eucalyptus grandis
  Intron number 4 from transcript Egrandis_v1_0.011012m (loc us Egrandis_v1_0.011012m.g) derived from phytozome v7.0 (c hr-ID scaffold_6; pos 11833064 to 11833993)
tctagcttgcaaaacggtaagtatgaaataggttttaacacctgctattgatttaggtccaatggatgatttctgtgttctgtggctatacgattacaacaccagatagcacacgttaacttttaaaatgcaaaatgccaaccgcacttaattcacagccctaacttccaatatcctggtctttagcttggagaataagctgccggtctgtagtcatgaggtggaccaccttcatgaacttgctgtagttcagaaatagcgagcccatagacaactgcgaaatgagcgcatccagtcattacataaagatcttttaaagaaagtcagccatccaattccagaaaaagcttggagttttccacatgcggtcattactccgcacctcgctgcacttttctaaaacaaggttgttggtttccgtcctcctaaggttagattgataatcaccttctttgatgggattggttacagacaaagggaaacaaagtgtttcttggtcgtttacattgatttgcagttgatcctaatttgtcaagaatatataaaagatcacaaagctccctgttgcttatacttggtaaaaccttctgttttcttatagttaggaaaggaaaaacatgtcaaagtcagttttatcgacttgatgagatgttatatatgtttcttctgtttgtccatatttctactgaatgatattggagtttagaagtaagaatatttagcaggttactgaacttagtttgagggagatatttactggagctgtgtctaggagaaattaaaagatgaaatgtccaccctgaattcaaagttaatttatgcggtgattatatgtacctcgcactttgaattgtgctcttggtttttctatttttatttcttctaattattaaaaaaaatttcaggtgtcttgcctgttggaaaattcgg

SEQ ID NO: 89993 - DNA, 753 bp, Eucalyptus grandis
  Intron number 3 from transcript Egrandis_v1_0.030554m (loc us Egrandis_v1_0.030554m.g) derived from phytozome v7.0 (c hr-ID scaffold_6; pos 42130052 to 42130804)
caggtatatacgtcccttaaaacgtaatttatttaaaccttttgcatttttgctatggatggtacttatgagttgtaaggcttcgttttgagtctttgaatgctcaaggtgtctgaaaatcagtcttataaatctttacctgatattattctctggagttgcaaatggataagttgaaattcttgtctgaaatattacactaggctggtaagacattatatatatatatacatacacatatacatatacatatacatttataggtttcaatgggcagatacttccagtatcaatgaaattataggggacatgcaactataaacctttgagataaggctttttattttattagctaggccattacaatatggcgttgtcctccatttatacacagtgctgaggagtttttttttttcctagttttgatgaaaccaaattactccaacttcattttttcaatatttactaaaagaaatttactttaagtgcatgtgaccataaaaaagctcataatttatgagcagaaacatagcatatgcacttatgcatttctcttccgaaacatctagtcatattgaacatgaccagaaaaccgcttaaatctcaatcctatgtgactacacctttgccatgctacagtccatatttcctgtttattttttgtctggcttctcagaactatagtgaacattcagcgtgctaacatttcaatcttcatcaatgtatgtaggtctgtctctgtccagcctagaa

SEQ ID NO: 89994 - DNA, 955 bp, Eucalyptus grandis
  Intron number 1 from transcript Egrandis_v1_0.027489m (loc us Egrandis_v1_0.027314m.g) derived from phytozome v7.0 (c hr-ID scaffold_6; pos 39777247 to 39778201)
ttcttttttcctcttgttcttttgtgggtgcgtgtttttctctgatgggtttgcggcgattttcggatgatatattcttatgtcgatgatgagatccgattgtcatgaatgtgcggactaagtatatcgtatatgaccctgtgtccgttgaccttctcactgttaagggaactgatttatgcaattagatcaaaatcctctcaaatgctgtgtttatgaaatcacagcgcatcgcccggatgagtagattggcagttgagtagcatatgcggcgaatgcgttcttagaactgaattggaagggttccgacttcgatagtattttatttctaggtatctccgctggatcataacggcagagttctttcttggttccttgttcatttgagggtaggctttggttctagttcctaattagaattgcaaatatggcaaatctgaaatcccatggtaaattgctgttagcactctgttttgtgcatttacttgtgcctgccaatgggaatccgttggcagcagaatcctgactcttggcctttaacctcatacaagcaagaggagaataattgacaatcacgtccacattaagttactctctttcaccatattttttgtttgagcttgtttaacatttcaattttcaacactaagctcatcaattgaaaatctgatgctcggacaaagtcttttatgccatgtttccattcaactccctgtgcttctgttttttgcaatggcaagttgccatctcgttctccagtttattttttcccggttggtcttctgtggatttttcagaaatatatctttgggtcaagagttcatagtaactgatagtgttacttagctatagggcctaactaattgccaaattgtgatctgaataccactgcccccaagttaatggttgagttacagtatttcacgctcgtctatattaggtgctcctgggggac

SEQ ID NO: 89995 - DNA, 930 bp, Eucalyptus grandis
  Intron number 1 from transcript Egrandis_v1_0.023643m (loc us Egrandis_v1_0.020260m.g) derived from phytozome v7.0 (c hr-ID scaffold_6; pos 3518134 to 3519063 reverse strand)
tttgcttattgccaggtcatgtaagattttctctctgggcctgcgatgtgctgttgttgcgtgattgctatgtctaatttggctgctcgttcagtatgttggttttaatttggttgatggctcgaagtttttattttttatcgtgactgcggttttcgtgaacggatttggtgtttcccttggatttatttgaatgctttgattcgtactttggtgtagttctgttcatccggtctattgctccttgccgcttttcaattgggattcagctgatattctggtttcattcgtggcttgtatctgctaactctttacagtcctggtgtggtcgatctttcggtttcctttctggcatgctatatgtttctctggcagtggaaaattggttttcattctacatttattgtgggtttcaggctaaatgtactattgttagttaatctaattcatcaacacggaatgagacacctacaatctagaattggagaaggattttgcagtgcatgaactgtgtattctgtgaaaacagagaaccgaagagataattgtggatctttctatggtattcttttaggctcgtaatgagaaatgtgtatttaatggagttttgctggttattaagccatgcacctatacaatgcaatgcctaggagtaatccttcattgagtcttcagacattgtacaagacattatatgctcaattttagcaagcaatttcgtagataaattgagttatgtcacttaactctcaaggtagacattgtacaagatgctatttttttaagtggtaggcatttgggtagataaattcaatgagttcacttatgtagtaggcattttggtagataaattcaatggttcttggctggtatcttgctttctctaaattgggatttggatttgaccgaccagggagggctggggttccc

SEQ ID NO: 89996 - DNA, 894 bp, Eucalyptus grandis
  Intron number 1 from transcript Egrandis_v1_0.002075m (loc us Egrandis_v1_0.002075m.g) derived from phytozome v7.0 (c hr-ID scaffold_6; pos 48947491 to 48948384)
atattcccaaggttcctaaggagctcaagggcgttcgtgctctcgtcctttttctcctcatttcttatcagttgtcggcaatagcgtaaatgccttcgatcgttgcattgacgtacttcgacaattagaggcgttttgcgattacttgcttcctgcaaccattgttaggttctagtcgcatgaccttatagttaatttgtttttggtgatcctcagtattgattaagctgattgcgtagtttacattggtgtggtttagataggacctctttttgattactagtttgataggaatccatacagaaattgaggtaggaggagtgtagcctcctggtcaaacttggttcaggagagggtaaggcgagtagtagtttgataggaatgtttacagaaattgagctggaaggagcttgtctggtgcacaagcctcctgttaatcttggctcaggagagggtaaggtgaatgcctcgagatgtacatgacgactgtttccttggttcagacgggaggcaaagtaggcgctcactatatttacgagacttcactaatgacaatttgcacatgcttttttcattttaatgatatgcataatgtcttctctgggttgcggctattatcatcttcaatttattcttgcaagaaacttctgcttttggatggagcatgcctatttaagaaagcatactgatgtccataaccccttgtttttattggcttgtcttttataagatccaacgagtaccagctaggatctatataggcctggatgtaaattagaggatactggtgtcaagaattgcaaaatgaggaggggcttggtgttacttgtctttctattcattcaggattgtcttcttttaagtcaaagtcaattcgtgtctgctttgcaggag

SEQ ID NO: 89997 - DNA, 880 bp, Eucalyptus grandis
  Intron number 1 from transcript Egrandis_v1_0.001007m (loc us Egrandis_v1_0.001007m.g) derived from phytozome v7.0 (c hr-ID scaffold_6; pos 40224261 to 40225140 reverse strand)
tttgacaaatacagatagtgttattcgctgtagaggtatatttcagtgactttaacatgctaaattgctaatttaattgtattccttcttacatctcggttattcgagccaatctttacaattttgtgtaagcttatgaatagaaagtggatcagcatgcaatttgattgtgaatttagtcatttgaagtgttttgacttaaaatccttttgcaaatcttatcacttagtgagctactgcatcattattgttaggcgtgagcactagaactggactggttctgcgggaactgccgggcccagttctcagttcctaaaattcagaaccggtgtttgttgttctggtttccatttccaggtgtggaccaaaccatctagactgcttggaccggaccgatattttacttttattagcaagttaatcatacttgatcatattttattacacttttaacatctttccattgaccttttaactaattaaagatccaaaacactaaagaatgagagttttagacaatgcaacaaaatttggtagttttttgaccaaagagaaaaaacaacatttgtagttatgcagggaatggaagaaaaaaaaaagaaagatattactgccggttcctagactcacctgggaaccggattgaactgggctggtcagttcattctaggaccaggtgtgccagtttccggttccacaaattgggaactgacccttttggttcagttcttagttttggggtggaaattgacccacttaggaatcgatcaccttgattattgtttgtatttcatatcgtatccaaatttgaaacaagctatcttaagcatggttttgttctccaggtatccttctcctagcagaagtgctggactctctt

SEQ ID NO: 89998 - DNA, 599 bp, Eucalyptus grandis
  Intron number 1 from transcript Egrandis_v1_0.000915m (loc us Egrandis_v1_0.000865m.g) derived from phytozome v7.0 (c hr-ID scaffold_6; pos 47587331 to 47587929 reverse strand)
accgatctctgctccggtcttcagtcgcaaggcgagtctcctccgaactttccatctcgttcgttgctttcggaataatttcgctcgatttcggaggaatttcatcaaggcttcggcttttttcgaagtcgtgttttgggggttttttttttgttgggttcttctttattcggttaattaatttttacccaccttctctctctcttctgcatctttgattcccgtacgctttaaagcttaaagcccggttgtcttctccatccgatcctggggaaactgaaatctttgaaactctggttttcgccccatttcacgtgatttgaccccccccccccccctcccggctcggtccttgtcggtgtcgtcataaatgaaagatggagatgggggtgtgtgtggacaccgagtcctgagttggtgtgggtcctgagttggtgttggatcgtgggttgggtttgtttgaagaatttagagcccgattatttctgggttcgagtgcttttttttttccttttcttttgctgatcatgctgaatagtatctcaagatcttggaattttttaggtggaaatcgtgcatttagatcagtggagcagaga

SEQ ID NO: 89999 - DNA, 738 bp, Eucalyptus grandis
  Intron number 1 from transcript Egrandis_v1_0.038687m (loc us Egrandis_v1_0.038687m.g) derived from phytozome v7.0 (c hr-ID scaffold_6; pos 15426262 to 15426999 reverse strand)
agctacattaagacgctcgcgcagattgtcggaaggtcagtagattgagttcgtggtctgtttgccaggatcgcttatgctctgttgcgctattgtttatcggtcatttttcagattcttgatgatttatttagaattacctatggctgggggggtgaagggtgaaatgggtgaattctttaagccgttccgtctttcacaaatgagtatcgtatcaggcttgcagtgaataacttttttcttgttctggccaagaataataaataatttataattttttagtctctttgctttggtttaagtgaactctcaatcagattgtagtctttcttttgcagtgattgttatgctgtctctattaagtgtttgagctcaaaggccattctttattgccactttatgtggcaagattgatgctgtgttttgatttagaagtggttttgacatgtagggatgattgggttttttacttttttctttcattgccagatgcggcatatttccctttcatgtgaagtgagcacttcttgatattggtcttcactacaatatcatagctagcatgaaagtaactatgaggatgctatgaatgctacacagaagcaaaattttggcttgtgtgcgaatttttttacgaatggttcccagtagtcattgatcatcttgatttattgctgtcccttctattttgtctagccataattttgaacttgctattacagtgaagaagaagccaga

SEQ ID NO: 90000 - DNA, 1027 bp, Eucalyptus grandis
  Intron number 2 from transcript Egrandis_v1_0.031425m (loc us Egrandis_v1_0.026645m.g) derived from phytozome v7.0 (c hr-ID scaffold_6; pos 37180951 to 37181977)
ctccgacacgttcgaggatctgtctcctacaatcggtaacgtttttggctttcccgtcttgtggttttttttttttgggtatggagatcatgggatggatggaggaaggggacgttcggtggttccgtgttttctcgttcggatccttgtcgtgggtgcttagggaaaaagaaaaagagttctctttgaatcttgtttgggatttgcgagccgtccgagtggtgggtttccgttgaaaagttgtttctcgtgtccgtttggtattgttgagccacatatgtctgtgcattactgcttctgaatatgaagtaaggaattgtgggtttaacgaagaatctaccgtgattaagtattgtggattgtcattatccttttaaaatactgtcatgcgatattgtgaactgtcctcttttctccattctctgtgttaggcgggaaatcactgttgcaactggggaagtggggccacaatcatagttttagcatagttttactgggagaatgggatgcgaacatagttttcttttcccaatttaagcattgattatctggctcaaatatggttctctagttcgttttgtcttagctactgcagcaacagagtgaattgagaagcataaatcaaagtagaagtagcccgaaagaagataagcctgacctcatgtctaatttccgattaaaattcgatatgacatcatgcatggactaagagattacgtcttgtcatggaatagctcatgatgttcctcatgatctttcactttggggacatgtggtctgacactgagtgactaactttatctccaagtcattatttgttactacgagccccttaaatgctcttacgacttaatcacttaatgatttcaaatattatattgtcacctttgtattgagaatgccatacattaggaaacctttattcttagtcgcagtacattagtgcgagttagcacatttttctgagaagatatatatgcctcctaatcttttgtgtgtttttcaggtgtggacttcaagataaagt

SEQ ID NO: 90001 - DNA, 438 bp, Eucalyptus grandis
  Intron number 1 from transcript Egrandis_v1_0.029495m (loc us Egrandis_v1_0.029495m.g) derived from phytozome v7.0 (c hr-ID scaffold_6; pos 43454944 to 43455381)
agaaaccatatattggtaataactgaggtgtcctccactgcaactaaggtttctagattctaggttgttacatggtgggaatgggggttattcttctttctacgtagctcaatcaaatgaggtggacttcattaacaaatgtcttgtccatatgataatttacaattcattacatggatatcagttaaaatggctatgagattcaatatattggctgtctgacaatttttatgctggttacttgggggtaatcatgtgaagtccgttcttatctaggttgtgagagcctctagagaccactgtattgagaaacttttttcatatgaccatgattatggattcatctttataaagccaggattgtagttcaaaagggagttggaacctttctgtttcaatcttgcaaagtttgtttttgatctttctgtaaattgaaag

SEQ ID NO: 90002 - DNA, 970 bp, Eucalyptus grandis
  Intron number 2 from transcript Egrandis_v1_0.009562m (loc us Egrandis_v1_0.009562m.g) derived from phytozome v7.0 (c hr-ID scaffold_6; pos 22382388 to 22383357 reverse strand)
gcggctttcggtgagtcattagaatatgccgagcctgggtatctaattatctgtcttatgtctgactagaattatgtaaattacaactttggttataaacatgaaattatacacatagtaaggtcgaagagtctcccaagtcaacccataaacggactgatgtgatcggatatgtatgcattcacacgcctaatgacacaattcgttatgtgtcgtatgctaaatgattcatgtggagtcgctaacgtaatctggaaggcaaagcggaaaagtaaagaagaatagctgagtacaatggtcccgaccgaacactcaattccttttaccggatgcagattcgaatcagatgtacaagtgaatagactttctaagatctccacaatgaaacactatagtaaaattaccaaaaaagttcacgatttcaagtagaataaccacgtgaacctagtagcatgatactcttgtgcgtcaaagaacgagtttctctctctctctctctctctctctctctctctctctctctctctccattggtaactagtgtgttgaccactcgttcaaagttcaatcaatacgtttaaaaaaaaaaaaggatatccttaaaaaagaaaaaggtagttggaattaataagaatagttatgtttttaaatggagagtgggtgcttgggtggtacctaatatgtaatttgtacctttgctattatttggtgtatggtagttttgaaaggaatataaagcgagatgaaatgatatcttaacatacaagttgatcggatcagataaagataaccatagggattgactttttattgactgagaaagctcaaacttttgaccgctttaatgcatgagcatgatcgaccaacgctttacataaagcttcatcgatggcaaaagccaatagcaattctaaaagccaatgacgcaactccaggtaaaaagaaggggaagctcctggccctcttccca

SEQ ID NO: 90003 - DNA, 686 bp, Eucalyptus grandis
  Intron number 4 from transcript Egrandis_v1_0.007880m (loc us Egrandis_v1_0.007880m.g) derived from phytozome v7.0 (c hr-ID scaffold_6; pos 44247778 to 44248463)
gcactagcgagggctaaagtgagtctcttccttcattgcaagttcttaagaatgatgcgtttgttcttgctgcatcatggtctataggtataacctgttattggccaattgttatgatccgaggcctggattttcgctgttgaatggcgacggcatttggcctgagattaggtgcaagaggcatgcaggaataatatggacttcactagattagacgttaactaagtacttaacgcacctgatctttgatttatctaaatattttcgtacataaagtataaaatggttagcattttagacttatgtttattataaattccgatgctatgcgatattggatgccgatcctcttaatttagggacgatgtagcaaattagtacatgtacttggcacaagtctctaccctgtatatgtgcacgtgcaagtgcaagggcaattcacaatccttgttatagtcacgctattgtttactttttcttaattagcccataaacttcttgggcccaaaaaagccctcaaaggagccggccgatgtatcgctgttgtgaatgggttcgatcggatcatagcccatttctcagtccacaaaagttcagattaagcgatttcacaaaagtcctcatgaaattttggttttgtacgttgatcagacgaagaagtggaaggcttgggaagcagaaagctc

SEQ ID NO: 90004 - DNA, 985 bp, Eucalyptus grandis
  Intron number 1 from transcript Egrandis_v1_0.032612m (loc us Egrandis_v1_0.032612m.g) derived from phytozome v7.0 (c hr-ID scaffold_6; pos 6382276 to 6383260)
gtgcattcgcctgcgtgggacttcctctcaaaagggtccgtcactggtgctctcttgtctttgagtggctgtgcattgtatggggtcagagttagacctgcttgttctgcattttctgactgattccatggataattctggactaatttgtgttcttttggttccgtttcgcgtgatattgattcgctcttgtgtttctttcttagttggccacttgaggctgtgtcttacggctttctgggttgcttggttatggtctttcgggaattgcacgctgagtgtttgatgaaagttatgaaagaggagacaaatgtagaagagaactgtctttgcttgtttggcacatgatgtgccgttgaaatgttgagtggagaaaagccaatcgaaactgagtatggttttggtcaagtatggttttctctatttatcccatgtatcagttgtatgactgcttcacgagatgctttatcagcagtcagggtcaatatagtctctctcagctgttaatgttcttcattgttctagtgcaatggtgtgggaaccaaggttgtgtttgtttcacggaaaacattttccaaaagatgattggttgtatcacttagaaaaattagtcaaggaaaaatgtttgcactatcgaccacaatttatggctaactattttcgtagatgatggaaatatttctcattcaatcttgagctttccgtgaaataaatgcaccctaagttacttacaaagatcttatttccagtatggttctattacagtctactatgctgcaagcttaaggcttgtggtttatacttctcttcttttgtaatggaaaaggtgacctctatataactaaaacaaaatactgggccttgacataaagagggaatggaaaagatgaacattctaattttctgattattttcccttttatctgatttttgtgctttcgttgtagcaatttgaagtttgttatattgattccccaactcagag

SEQ ID NO: 90005 - DNA, 456 bp, Eucalyptus grandis
  Intron number 1 from transcript Egrandis_v1_0.019057m (loc us Egrandis_v1_0.019057m.g) derived from phytozome v7.0 (c hr-ID scaffold_6; pos 30164200 to 30164655 reverse strand)
aggagcacgtcattctcgggaagaaggtcggttgcggttctttacttttctctttgtttcttcagctttttgttttttttttggggtttactttcgtgaattgtcgttttttttctttttttttctttcggggaattatgcctgggagtttgaggtcgccgcgcgcttggttgctgttgaatgctagcagaatttgaaacaagaagagattttggggtttcgggttggttcggtttaggttcttgcttgaattctgggttttgcgttcagaaattattagcctcggttcaggaggatcacggtggagtcaattctaagaggtttttttttttttttacttactttgaatgtgtgatttttaggtcgtctgattgtgtcgtttgtcgctgcaagttgtgttaccttcctaaatattatgtaggtgctggtaagggaggcatacaaaaccgagcacca

SEQ ID NO: 90006 - DNA, 719 bp, Eucalyptus grandis
  Intron number 1 from transcript Egrandis_v1_0.013625m (loc us Egrandis_v1_0.013633m.g) derived from phytozome v7.0 (c hr-ID scaffold_6; pos 14823892 to 14824610)
agttcatcagcaagctctcctacgcctctgtcttcgtgagtttctccctccgtactcgaactggtcatgcttgttttgttcaagttctctttataacttgattgattgtctcgcgaggggcgaattttggcttcttctgaggtctggggcgttagttatgtcttaggcgatgaaatgagagcgtgggcaagacaaatttcgggaatttcgcttgtttttgtaagtgtactcagtggataattctctatttttttcgtgtgttttctctccgctgaactcgtattggattcctgtaaaggggttaatcgcttgtgaagtgggttggcaatgtatgatgtcagcacgtgcgtcgacatttgctgatagaacaggagtgaatttgagtctgctgcctgaatttcgtgttgattaatgggttgttctaatgtgtgttcatcagagctctttatgcttcttgctgtgcaatgattctgagcttggtcttgcctggaagctggttaattattttccagtgtgtgtttgcaattgggtatttgcacaattatgtctgcttttctgctttttcggttttcatgctataggatcatatatgttggacgcaattcttgtaagtaattgaattagtcaacaatgtgatcagttgcttgctgcaccatttgaacgttacatgtcaatgctgttgtttatacgcaagcaggctgttgccactcttggaacat

SEQ ID NO: 90007 - DNA, 658 bp, Eucalyptus grandis
  Intron number 3 from transcript Egrandis_v1_0.003910m (loc us Egrandis_v1_0.003843m.g) derived from phytozome v7.0 (c hr-ID scaffold_6; pos 7809469 to 7810126)
cgacaaggcctctgttccacggaagctccggtcaggtgtgctccttttcctttcctttccctttgcttgcgagccataaaagcgtttgtctttgcttctttcgtgttggatttttttcccgtattctcttttgcccctatcttggtgtttgtattgattgattggttgcgccattatgcttcacattaactgcttggcgaccccagctggtgtttaaattcggtgtgctttaggtgggtcttgtgagaagtttctcacttttgtgttttgtgcgctttagtttgatggattggaattgaagcaaaattgaaagcttcaaccttttttagtgttttggcctttcccacttttgccctttttgtttcttttaatggacgccaagattcttgcgtgctttctctagtcacggtagtaatttactatttcctttgctgcgactttccaagtgcattgatgctcttaaaaatgatgttgtaacgtttgagatttgtcgtcttttcttctctatctgaactttgctttttcccaccccggaagatcaccttttcttttccatgggacgcaaaagtttgagatgaataggaaagtgaaggaaagatcttgattgatatctgaggcatctgttatgtggatatgactttgctttgcattcgcagcc

SEQ ID NO: 90008 - DNA, 393 bp, Eucalyptus grandis
  Intron number 1 from transcript Egrandis_v1_0.027907m (loc us Egrandis_v1_0.027907m.g) derived from phytozome v7.0 (c hr-ID scaffold_6; pos 49456789 to 49457181 reverse strand)
ggagcttctgagcggagcgagacccttggattctggtaatgtctctgatcttgtcctgtttctccgacatcaccataggcgccatggcttctctcggattcacgctagattttctgctgttttgtctgaaactgaagagttcaagtaaacccagatcgatgcttgtagatttttttgcttgtagggtgttgctaacagagattcaatggtctcttcttgggatgattagattttcgcctaagaaagtggaagcaacgatagttttggcatacaaaagaagcttatttttcgtttttttttcccccttttaattttggtattgcagctcttctttaaatcctgtgatggctatcctttaaatggctgttttgtttttcttctctaagtgtaggg

SEQ ID NO: 90009 - DNA, 582 bp, Eucalyptus grandis
  Intron number 2 from transcript Egrandis_v1_0.051060m (loc us Egrandis_v1_0.051060m.g) derived from phytozome v7.0 (c hr-ID scaffold_6; pos 37660542 to 37661123)
tgacccccgcagcaatttttatcatcagattgttcatcggggtcaggctcaattcttcaatgacccaacctatccctaagcaatccaccgctacagtgagccgcttaaagggccggcaggagtcattggttattttagttttcttgcaactgttttttatttttcctgtccaataaagcttcaacacgattagatggggcttagcggtgatttggcactgcttgtacagaaagttcttaataatgctaatatagttttgattctgctacgtgtgtttctgatgtttagtggatccatgaactggatttagttactctgatgatgttagtaggtttcttacatgtgttgcagaactcacgtttgatgttaactggaaacagcgtgctgttttgttgaatacgtatgcaactaaagatcgttgttcagagggtcatttaaaaccccctgaaggcctgatgcattgagacataacaatagagccatcccaagaaacgcaactgaaataggatcaaaacacaatttcactgaggatatcgagttaataaagaaactcaaacctcacagcgaccgaaaacaaagtac

SEQ ID NO: 90010 - DNA, 491 bp, Eucalyptus grandis
  Intron number 3 from transcript Egrandis_v1_0.032449m (loc us Egrandis_v1_0.032494m.g) derived from phytozome v7.0 (c hr-ID scaffold_6; pos 35813115 to 35813605)
cgacaaacaacatcaacatcatcctcgcaagatcagtaagtttgatgggaccaacaaacccgacaccattacttggaagatgctgtgtacagatgatgatgtatcgatgcgtgcataaccacagaaaacgataaagagcaactgtatatgcctgtatatgctgcattaacagtatatatagccataaaaattaggagcatttcatacgcggtgtttctgtaaggaacaccgttaatggaaggttttgttttcgcaagtggccttaagatcatagcatgtttatacttaattaataaccatgataacgtgcacggtacacaagtcataactgagaccgccatctggggaagtaagactttccaaatgttagtaagccgcaatgaaaccgtctataggtccttcatgtgtagtacgtacatcagcacttgcacaatttgattgccgttttcatgatgtcttcacacagactgcagctacgcgtgcgcgaggag

SEQ ID NO: 90011 - DNA, 1003 bp, Eucalyptus grandis
  Intron number 1 from transcript Egrandis_v1_0.023725m (loc us Egrandis_v1_0.023725m.g) derived from phytozome v7.0 (c hr-ID scaffold_6; pos 30676866 to 30677868 reverse strand)
gcgtgcggaaagtggcgaaggcgggtaagtttttaggctttcgggttctggtttggtggcgagtcaacgagtcgcgagtccgcctcgcctgtgttggcacggtggaggcgatggggtagccggcgggaatttctttcccccgcccccccggaccgggatccggtggatcgggtcgattcacagctcgggtccgaataagtaaatacccggttttggacatcaaatataattttcttttctttgatcactttcgtcgattttgtcctttcgaaaaatcgattttgcagtttgcagttgcacctcacaaaaaattggctattgtgtgtgcctttttttttttataattattatctattgttttaacttttgaaaatatatatatgaagttgcgaatctaaacgactaaaattcgattgaacaaaagaatttcctttctcaaataacttagaatttgtagtgattcaagccatgttagcatagaattgcattttcttttaatgagatgccgttttcaaatcctaaattcttgcacctacccaagtgagattaaattgctctaatcctaagcaacatgtctaattgggttttacaagggaggacaattggagggcaattgggtcttcccatatgaggttttattaaagtgaaattcgataattttcctgttcgtgcaaatatcggccaaagtgaaaaagcggacatcgtgatttccatgcctaatgtttttttcctcccccttttgactttttgatgggcggcgtgaaaaatggacatgtcctaatggccatttgatgtcgggaggggttggtggaatgtcctttggtccaacttttcctcggcctttatagtgtttggtaagctcggtcgtcccatcattcgacgacagagcaacgttcgccctctccctctccctctctctctctctttctcttcgtgtcgctgacggcccaatattccttttggctgctttggcatctgcttcgagccagcgcgagatcaacac

SEQ ID NO: 90012 - DNA, 838 bp, Eucalyptus grandis
  Intron number 2 from transcript Egrandis_v1_0.000740m (loc us Egrandis_v1_0.000740m.g) derived from phytozome v7.0 (c hr-ID scaffold_6; pos 32261203 to 32262040)
ttattttttcgtgccatcctcagcggtccaagaaggtgagtcgcctttgtttgcagttgtgagtatcaatgctgatgttattgtgaaagtcgctagactgattgaggaatcaagtttctattttggacaaggctgtctaatggtaatgtgtaataattgaagacaatgtgcgaatttgtcaattgctgcatgtttatttgaggctttcttgtagaattcaaattttgaaccctgaatcatattgcaatacctatacaattttgtggcatcgttcagattatagcattgtagatcaaatgaagttctttttgccttcattctagatttttgagccttttgtagaagtaaaatttggggatctagccaatctcagagtaaccttagcctattctccttctgcatacctttatatactttacattttctcgagattggctagatgcaagatcatagggacccttgaagtttttgctgaaggacaacattgaagaacttttgctagttgtcatttgcaggaaacatctggtttgtcgcagtttagttaatcatttttagatgaatatgtcaatagggcgacagttacattgatgctttcacatgcctttctgatctataatgtattattgcagccatcaatcattgcttagaattataaggcgaaacctaccataatggtttctatcagtttctgtctttcatatgttttagatctttttgtctttgcaatctggcattttctcttgatcttcttgatgcctttaattcatgctttgccattgatatatcgcattttctgggagcagcacacgagacgtagttcattcgatatttctgattc

SEQ ID NO: 90013 - DNA, 606 bp, Eucalyptus grandis
  Intron number 1 from transcript Egrandis_v1_0.009831m (loc us Egrandis_v1_0.008659m.g) derived from phytozome v7.0 (c hr-ID scaffold_6; pos 39854068 to 39854673 reverse strand)
gggacttctcaggcttacactggtggatactctgcgtaagtgttttttccagttcattcctagctgttgtttggacattggtaatatgtggtagagccttgtgtgataccatgtgtgcgtggatggtctgcctttgatccgacctgagttatagtcttagtcaggtgtaagtcatgattttacctcattgtgatatgaaaaggaagaggagaagaaagaattttctttgtggaaattagtttaggccccccacttcgtttctgtttgttctaaattatttcagagttgattgaaggttcaccttagttgaagtgcactacatgatctttctctttgtttatttatttacttgtttatatattcagtttgacttgtgataggatttgcaatcatactggctaatgtcactgatgatgttctttttctttttatcttgctgtgttaatatgttggtggaattggcctcagttactaaattatatagctagaaatatacatcaatatagtgtttctcttgactgaatcattgtatggtgattgtattgagctatctgaatttattatggaacagggaagaaatagtgatctgggcaaggaaaaagactg

SEQ ID NO: 90014 - DNA, 1035 bp, Eucalyptus grandis
  Intron number 1 from transcript Egrandis_v1_0.014432m (loc us Egrandis_v1_0.014432m.g) derived from phytozome v7.0 (c hr-ID scaffold_6; pos 12935523 to 12936557 reverse strand)
gcagcgagttcggcggaggcacgcttcacatcaaggtccgtcctttagcttcaatgcgtcgctttggcttgatctctgtttggttttgagtgccattctggaatttttttttttttttttgggtggtttgagcctgtggtcactgatgccgagaggttttctgttggactattatgtcgggtttggtacggtggaatggaatggaatcaggaaatgatggggaaagcaatggaatggaatgatgattccaagtcttggttttttgttcagtgattgtggaggacggaatggaaatccttgtgtttgagtgcgattctggaagattttgggaggtttgagcttttggcggtttggtaatgtggagagatggtcactctgttcacaagcttttgagcttttctggtctactgtcgctgcttaattcaattcgctgctgttcgattttgtgataataaggccagacgtgaggttgtagcgttttgttgatggggtctaatggccatcgtttgccagcttttggcagtttctgattaattcttggtaacttcggtacttagtttgagcttgagtttgattttttctaatggattcaaagtactgaactggattgagtttctatctacttatggtccatttcttatcaactgaagtgccttgcttcaatatgtttctagtggatttcgccacttgctgcggtttcttttcttctcctttcatctgcttgtttgtacttgattaagccccatgaattggtggtaccatggttggtcatttgagttttttgtgtctagggtttaagtgttggaaggacttagtgatttggttgctcatacaagttaggttgtttcgtttgatgtaaaatcaatttatcttatggaggcaattccagtctaggtgggtactgcctcatgttgatagttcttatttttgcatatggttctgctaaaaatggaaactaacgactagctctaggtagccggcttgtaaccatgagtttggattgctcatccaggtcagcaaagcccatagctggac

SEQ ID NO: 90015 - DNA, 553 bp, Eucalyptus grandis
  Intron number 1 from transcript Egrandis_v1_0.038339m (loc us Egrandis_v1_0.038339m.g) derived from phytozome v7.0 (c hr-ID scaffold_6; pos 13533526 to 13534078)
ccaaatcaacactagctctgtctaataaaagtcagtaggaactttgaatttatttctttcatcatccggaaaattggcactttataaccgataagtcgcttatatatcatttaatggctcaattgctcattgatctttcataaaaactgcagttcagcaactgagtccaagttgaaatagaactccatttcaaggttagggatgtccaaatcatgtgccgccagacgatcacacaggcgcccacacgcgcacaaaacaaaatccaggaaaaaagaggagctgctcaaagttaatcatactgtaaatccgtttattctattttttgtctgaacaaatccatgccggatcaagaatcggtaagcaattaagaatacaacaagagcagtgtatgacgggtcaataagagtcagacaaacaaaagggaaaatcaagaaaatcctcagaactccttccgaagagcctcctccaacagaaactccgactcctccatcagctcggggcttaatctgaacatcaagacgcagaattccatctgactgagcgcgccgtcccc

SEQ ID NO: 90016 - DNA, 680 bp, Eucalyptus grandis
  Intron number 1 from transcript Egrandis_v1_0.002389m (loc us Egrandis_v1_0.002389m.g) derived from phytozome v7.0 (c hr-ID scaffold_6; pos 45304727 to 45305406 reverse strand)
ataagacatcccatagcaagttctttatcgagacggtaggatcatgaatcctctgtaactttctacagatgtttttgttgtgagaaacattgatgggttctggtttaagagcacaccagtgaaataattgtcgggttatggccttgttagcgtcgttgaaatcctattgatggaataatttcttagatgggactgttttagctgaagtggaaaattgcaatgtgatccgaagatggtatacaaaatttaactaaaagagaacatgtcaacttttgtttgtatagatcttaagcaatttaaactcttactggaaggaattagtggttgatgggattcaatgacagcaacatgaccgtgtaagcaaatagggccttgcggaagcatcgggctgtgatagactagaaaaagtaatgagttagctttgatatgttatctaaaagaggggcatcaccatgccagaggctcctgctatttgggttttgggcttggggagggatagatgtatgcagcctcacttttgctttgcatagaggctgttgccatgactatgtattgaatatgatctataggttgctactgctagtaagtaagatttcatgcagtatctgttgtagtttttatgacatacccatgacagtctcttaccacaatttaattttatgtgtttgcaggctggggta

SEQ ID NO: 90017 - DNA, 566 bp, Eucalyptus grandis
  Intron number 1 from transcript Egrandis_v1_0.005933m (loc us Egrandis_v1_0.005933m.g) derived from phytozome v7.0 (c hr-ID scaffold_6; pos 47842772 to 47843337)
aacaactgttaactatttggctccatttattcttggtgagttttttatattttggccttctggttgctattgctttgctgctcctctcattcctctcccattgtcagttttaaactttcaaaaggatatttccgaatgcagtaaaagaatttaggactttctcgtttaaatgtccatcgattagaatcctattccttttattctagcttgtggtctcttgtgctgtttgatggctattcatgaatgtctctgtgcattgctcttccgccataacagtcaatccttgtaaatgaagatgattaggttaatgctaccttattcagattgttaacggtaagcatgacacatgagctgtgtgttttcctttgagtttgtcttctgctgctacaatttaggccagtgatcctcacattatatatcggctagtttcatgctctatttttttctgcataagtggtgtgactgtttcttgactttcttacctgaaagctgctgcttttggaatgtcttgtcgatctgtgaaaaaattttcttttctatttctttagatctgaaacaaacaggag

SEQ ID NO: 90018 - DNA, 791 bp, Eucalyptus grandis
  Intron number 1 from transcript Egrandis_v1_0.026026m (loc us Egrandis_v1_0.021322m.g) derived from phytozome v7.0 (c hr-ID scaffold_6; pos 8311301 to 8312091 reverse strand)
ttacaggtacgaaagttttgttcaatttcgacgactctcgactctcttataagtccaataagtctattccttagttggtaaaaagcatgaaaagtccatttaaaaaccaataaaagtgagagttgaatcacgtttgttagaaggaagtgagcaaaactagaaaagtcttcaatgaggttgttttcatattgagttccggcttatctcatggaggagaatcagccaataagaatgacttcatcaaaaccggtgaaaccgatagatggaaatttctagtattcatggcttgcgagcgtggccggcaagcaaccactttaggtgagcatgcaaaaggccacgcctcacagacgcaaggcaacagcttttttcttgtccaaggtttgaccgaccatatgcacttaaaagcccagagggagccgcgggaagtgttaaaacgaccaaaaaactagtttgcatctatttgtcttgtccttcgcccagcatgtgtttgtactttgtgtttcatgttagggaattgcctaatctccaccactcatcatttagagtacctacatgggccattagtgtgggaattcagatcccattgtaattaatgataatgatgagatgcatcgtttctcctaccagtggtcacccgtatgggtccaatcataaaagaaatttctcttttcaaataatgataatttattttcactctcgaaaactaattttaaatattactttgattgttatacttaaaaagtgaaaagtactaataataatgatgttgatgtatcagggatccgtgacac

SEQ ID NO: 90019 - DNA, 479 bp, Eucalyptus grandis
  Intron number 1 from transcript Egrandis_v1_0.001162m (loc us Egrandis_v1_0.000634m.g) derived from phytozome v7.0 (c hr-ID scaffold_6; pos 47906947 to 47907425 reverse strand)
actgtcatctataaaaaggtaagtgttccccctctatagatatcttgtttatgagttgcattttgtcaaacctgaaatcaattgggtttggcatcatgcatttgagtgtgcaccccaatctcttaaaagtcaagctcttagtgtgttgtttattttatgttatcgtggcaatgtctgattttcatagggttctctagttcttcaagtggccttcggtttatgttctagcattttttcttgagctctacttatttatctatttcattttcaataagtacttaccatcatatttaatgcatcctctggagaaggtatgagaacaaaaagatatagatgatgttaggcctgattaacctttttacttttatatatgagtgttgtagattgttgtagtcttcatatgctgtcagtatgagtatccaaccttttcatttgtgtattcagtgtctgtccgtcagcctggcagagcaagcacaatt

SEQ ID NO: 90020 - DNA, 816 bp, Eucalyptus grandis
  Intron number 1 from transcript Egrandis_v1_0.015755m (loc us Egrandis_v1_0.008550m.g) derived from phytozome v7.0 (c hr-ID scaffold_6; pos 29208028 to 29208843 reverse strand)
ctggccaaacaggtgatcgttctcgtgatgacggtttttttcgctctgttgttctcgttggcgggctgggtttcggtgtaggaaggtttgggttgaatgtttttggtagagagtgattttgtcgaaggagatgagagtgtcacggggggcggaggcgaatgtgtttttgtgttggagttgtctgctgactgcaatttgatgatgacgcgaaatgaacacggatagaggagtttctggtcatgcgtgtgcttcagagttgcaagcaagcagatggagaaagcagactttttttcagaagacggtttgcaacccatattgacattttgttttgcaaatggcattttgattattcacgagacttatacacaatcacactccagcattttttttttttttggtattgtcaaatactggtagtgctctgtgtctttcttataatctttcatatggtttaattagtttataaacttcttttcaaaaaaatgcaatcacctcctttcaatggaggtagttaaaattacctatctttcacttaagaattccccacgtgtaggacctaagtgcattcttaagatacagtttaggacttaagcgaacctattgaatggtttaggaccctttatgtacttttcccgacgcaaaagtgaaaacacgcaatgcttggcaaatgtgaaagcatgaaagaataattatccagtggcaattatcgtgttcttacgatcgtctctaaaagataaagccatgctcaatgatgggctgagtaaggccaaacgcgtttggtgcttagttctcatgtcagtgttcttgcagggactg

SEQ ID NO: 90021 - DNA, 931 bp, Eucalyptus grandis
  Intron number 1 from transcript Egrandis_v1_0.012877m (loc us Egrandis_v1_0.012877m.g) derived from phytozome v7.0 (c hr-ID scaffold_6; pos 43467103 to 43468033)
agagcgaattcggcgggggcacgctccacatcaaggtctgattctggcgttctcttcgcggattcgtgcgtgttgttgaactcggtgagcgtattttcgcttgttgttgggaatcggagcgctggagatttttgatagttgaggatgactgagttaggttgcaaatgaatctgagttattgcgagccacttgagctccggttgaattttgttagttttgactctatgacaggtatcgaaccaagtggagttgaattcgatttcgtgatgctttacttgattggttcgcatgtgattcgacagtagactttctggtgataactatgtcttcgactgattgaggcctttgtgcttatgaattgcttttggataaccatccaagctctggcctagcggaatagtgactaccttatcagctgagttcagtatccagccttgagttttgatctaagaatcgagtttggacaaaaacctgtattgagtcgactcagctctgaccattccccggatattggctgtgcatctcaatacagttggttgggaaaaagcgtttagtttctctatttgcccgttcaggtttctcagttcaagatattgctggaaagtgaggcttttcttttgtgggcatttgctgcttgcatagttttcttcccatttgatgtatcgttgtgagcctttagactttttgttatttgatcgctgattcaattcttttcctagtatcataatccatacaaatattcaattttgttatttatggcaaggcatttatgtcatgttcctagggacacgtggttgttgctccatccgtgattttaaatagtgctgcatataacctgttattatctgtgttgtgtcatgctttcaagtggtgactggtaattatgaattttatgggcactaattcaggtcaacaaggctcacagctggac

SEQ ID NO: 90022 - DNA, 785 bp, Eucalyptus grandis
  Intron number 2 from transcript Egrandis_v1_0.043240m (loc us Egrandis_v1_0.043240m.g) derived from phytozome v7.0 (c hr-ID scaffold_6; pos 5715363 to 5716147 reverse strand)
tcctctctcgccgatacggctcttgccctatcaaggtctctctctctctctctaccgatgactaagttgtaatttatgccggatgttatgtccttatgagcgtatttggtgagcttacgtgcgtagattttgaatttcgttggggagattgaatcctggttcatttggttgattgagtggaattaaatgtcgctaggcggtggggagaacgctggagatattggtctcgctaggttctttcgcgattaagctgttgctggatcaaagcaatggacagattgatcagaataagaggaagcgaggtgctgagttgagaaggatttttacgagactggggccgactttcgttaaaatagggcaggggctgtcgacaaggcccaatctctgccctcccaactacttggaggagctctctagatactccttcatctctgaacatgtgcattcgtgcgctccgagattgcacttaactctcatagagacatgttaccatggcactgctcgattcttcgattccttataagaatcgatcgacctaaattctagtgcatgcatgagtaatgcatttatgtcaattcagacgtgaagattgcattagaatcgagagggcatttttgtttacatcgttagcatattattttgttgagttcatacatctcaaatcattaaattggggtttctacatctcgtttgtttgtacgataatattcaggataatagaggaagactatggagagagagaaagttttctaatggtttattgcctttatttttaccacaatagg

SEQ ID NO: 90023 - DNA, 639 bp, Eucalyptus grandis
  Intron number 2 from transcript Egrandis_v1_0.019128m (loc us Egrandis_v1_0.019128m.g) derived from phytozome v7.0 (c hr-ID scaffold_6; pos 26980710 to 26981348 reverse strand)
cgccggcggcggtcgcaagactttgacacaccccggtatttcttgatcttatctctgatttaattgcggtgtcgactcttgagctttgatttgtcgaattcgaaaatgggtcacaaattccctttgtcaatcggaaactcaacacatcaaattccagaaaaaatgctggggggattggaatgtgagctccttttgaaatggagatcaccaagaaattcagttctttcgtttgtctttcaccgatgtttcagttttttttaatgtggatatgggtaggcatgggtcggtgggttgctaaagctgaaagggataagaaattgggccccacctagaatctctcagagaccatcctctcccttcttttagcaacattgtccttcccatgtcccttgaatccactgcagcaatttgttttgttttgttttaaggaaacctaggagtttgcttagaccaactagcacacacactctccttggaacaaagggtttatgctagtaaaaacccttatggttttccatctaactgtgacagtctcgataagtccaatgtcatactgatcttgattttggtttctatttcccttccgttgtgtgcacaactgcagaaataacagataagcagctcaagaataacgacgat

SEQ ID NO: 90024 - DNA, 764 bp, Eucalyptus grandis
  Intron number 1 from transcript Egrandis_v1_0.052463m (loc us Egrandis_v1_0.052463m.g) derived from phytozome v7.0 (c hr-ID scaffold_6; pos 26260723 to 26261486 reverse strand)
ccgagtccgagatcaagaaggcgtattacatcaaggtaagggcaaccggtcgtcgtttctcgctcggggcgctctgccagtccctccgcggcgggggggcaaaattagggaagcgtcgcggtcggtgggtggggaggggggggggggatttctaggtctagtttctcgcggattgttcgcgattcgcgatgtccgtggggtggatcgagcagctggcggcgtgcgatggcgagagcgtctggagtggtctcggatctgtgtgggcgttggggttttgttacgccagctccgcagttgttgactttcggtttctcgtgggaatggcggtagacagaggttttttctttatcgttctgattctgttttttcgtttttccttttataatgatcaactggtcgcttcctccgtaatccatggaacgatgttctggattatccgtctgcctggtcggaagttatgtctgagtgagatcgacgatgttaggtatagtgttccaatagctgtcggcattggcggtgaagcacggtatgctaggcttacggaattggcgtctagttctggttcttgaagatgatctttctccttttggcgagttttgacttcggctcgttgtttaagaatttgacacggaacatgctcgacatgtgtctttgacagtgctatctagttgttgattgagatggaatagtatataagcaataagctgaaggacctgaattttatgttttgcaggcccggcaagttcatccagataaaaatccca

SEQ ID NO: 90025 - DNA, 724 bp, Eucalyptus grandis
  Intron number 2 from transcript Egrandis_v1_0.023793m (loc us Egrandis_v1_0.023793m.g) derived from phytozome v7.0 (c hr-ID scaffold_6; pos 18982891 to 18983614 reverse strand)
gcaataactggagccaggtaggcccctcaatcctccacatgaaactatattctcgtcaaagagcagggcgtgaggatgggtctcctgcggccatagattacaacttttgactgcgattttggtgttgttggaaatgaatggaaggagatttctgtgaaggttctcaagaaagctgttttttgccttaattttggactggatattcatctttttctatgccttttggctctggattcttttgttggctttgtgatcttatcctgcgatagatcccgtaagtaaagccattaacggaacatgtgcgaatgcttttggtttgttgatgacaagcataactaaaagtagaactgataagtgtagcataaaagtgcatatgtgagactcttccccttctttgttctataatttttggtttattggggaagttaatgaaatttgttgactatacaattctttagaggatgattcctgatatcatgcttggtttcaatttaattgtgttacttattccatgatgaatgtgctggcactttttttcaggaattatgtagatcttgtcttttcagtatgattatttatcagttctttttttctggtgtggccatttgtgtaaatgataggcaatcgagctgttttcccccctccaggctgcaacctattctttagttacaactttttttcccatgcagtgaaaaagttgcccttcaggctttgaaggccagtg

SEQ ID NO: 90026 - DNA, 967 bp, Eucalyptus grandis
  Intron number 1 from transcript Egrandis_v1_0.004524m (loc us Egrandis_v1_0.004524m.g) derived from phytozome v7.0 (c hr-ID scaffold_6; pos 45060147 to 45061113)
tcttcctccgcgagctcatcagcaacgcctccgatgtaagtccccctcaccccccctcccggccctccgcgagcagcgcttgtcttttttttttttttctttttctttcctgagtttctttatgcgggatcgtcgtcgggatggtgtgtttttccgtgctggttttgagatctggttagtttatagactcgttagattgagggcggtcgaggattcgtcgctccaggtatctggcgtgacgctttcgtgcctcgtgttctgaaaacaggcggactgtttagaaagagtgcgatcctccagtggaatgaatgtgttggctattgctttatggctctggatattgctgttggtttgtatctagacatgacttcatgtcctagcgctgctgcaccgttgaagaagatccatgctttccttcaattgcttttttactttttatttttttatatggcttgttggggactcgtttgcttctagttattagaagcgactcaaagcagtacggcttttgtttttctgaattgggcttcgtttgtttctgaactaggctactttgttttggtaaatatttttcccaaattatttatttttcacgaaaaaatatgatttaaatagaaaattctgttgttgtcatccttaagctgcagtacagatatgtttagtttcagatgctgggtcgcgaatcatgcatgctaggtctcatgtgtgttaaatttgagttctttgagtcaaagaattgattggattaccttatggaagatatttattccactaatcctggtatattgttgtatggacgctattgtttctaacacctacgcccgttgtttgtgatgctggcattaactgaatgttgggtggagtcaaagcagaatctatattgggagtacctactgaaacgccatatctgatccaaatttactcgtgtataggctctagacaaaatccgatttgagagcttaacgga

SEQ ID NO: 90027 - DNA, 1045 bp, Eucalyptus grandis
  Intron number 1 from transcript Egrandis_v1_0.008002m (loc us Egrandis_v1_0.005809m.g) derived from phytozome v7.0 (c hr-ID scaffold_6; pos 36585507 to 36586551 reverse strand)
aggagaatccaaagctgattcttcagctcgaatcagtaagcatatgtttcgcgagatttagcttaatataatgccacgttttgcatgactgagcattagcaaggaaaaatgtggaaattatacttgtcaagtagaagaaactgaggggggaaaatggtaaagactactgcaggaccacgcttggtaaaggagctggtcctactatgtcgtgaatattggttacaggtgccattaggctttgtttcgggggtcttatcaaatgcattctgttgttaaattatcacctgtgaaagtacatgagctgaagtagaccattaaatagagaataatatatgattgatttaggccattaggcattgagttgttcttttcatttcatatgacagttttgtttcaactacgatgtcaatcatagtgtgtctgcattgtggagtggttgtagtactctacaaatacaagcaattccttctgttttatcaagctggtggggaaaatgcctcgaattgccaaaaatgaaggcaaaaaggttgaacccgcatagtcaattctgccatttgagtctgtcgaggagcacgaaaaaaagataggcaagaaaaagtggctccttggtatccagaagaattggaataggaattctagggcctctatttggggacaaacttttctcactagctagagtgttcgccatatgattagcacatctatttatgctaatttgatttagcccctgtggtaaaatggttgtttacccaaggattcacatagaacaattccaaattttgtgaatttagagaagaatgtcttgttcagcaatgtttctaactttaatcaattttggaaattgccatgagcgtcctcacggaatagttttcttccttgtcaatatgctcatgtattcaagtgtagatatcaaattaacattttagctgatcaaataaaaaattcaatatgcttcatctatatctgtttccaattagcctttgcttattccatgttgtttgctgtcccaggtttggatcatagcatcagtgctcctatcagacct

SEQ ID NO: 90028 - DNA, 828 bp, Eucalyptus grandis
  Intron number 3 from transcript Egrandis_v1_0.017522m (loc us Egrandis_v1_0.017522m.g) derived from phytozome v7.0 (c hr-ID scaffold_6; pos 16890557 to 16891384 reverse strand)
ccatatcaaacttgtttctgggcctaaacttgctggtcagattttattttgcgttgcctgttgcctaatatttgtattggtttgatgcttatctgacctcctgagatgtgttatccatgcactggagatgggtcctcctgaaataaccaaatggaattactatattcatatagttacattggttttgaccttgattcttcattttatgatgtctcaaggagctaaaatgtgcaatgactgatagttgtttctgacatctataactaaaaacctgcctttcagattttaagaagagtacttttttgcagtttttttttccctttcctgaaaacatggatcgattggcaacatgctgcataggtaaataacggttggttttgagggactactagatgtgtaggtttaaattattttttaggggctactagcagtatgaaatgagttttgccatctgagttaatcaataatgtcatgtcaaaataacacgcccgatggccatgcttgagttcgaacatttgttatgaaatctccatgccgacaaagtgatgccttgaattgaggtttgaataggcccacttgttgcgtggatgcctatacagctcgatttgtggatggaactttgaaattgaacagggatcttgttgacttcatggttgttcatttgcacagttatgagaatatgtgagctttattccctcgcctgccacatattaaatgtgtattcctagaaatttcatggtttgattaataaattattttattaagtccataagggatatttactttgcttgatgtatatgcagacgccagggaagaatttgacagtga

SEQ ID NO: 90029 - DNA, 489 bp, Eucalyptus grandis
  Intron number 1 from transcript Egrandis_v1_0.041804m (loc us Egrandis_v1_0.041804m.g) derived from phytozome v7.0 (c hr-ID scaffold_6; pos 36551724 to 36552212 reverse strand)
ccaacttcgtcggcgcttcagccgccgctggcaaggtgaaaaaaaatgcgagctttatccgatcacttttttgctttcgtttatttcaattttttgatcgcgtgggagattttcgcttttgttcttctagtgatcttgtggaaacggagtaatgttgcgtatgtaggcatttgaatgagtgaaacttattcgatgatgagtaagagcctatgacgtcattagccaatcttagcatcattcgaatcgtaagagcatttgcattgttcattaaccagtgtgatcatgcacttttaggtagaattaattgaatagcaggcagaactaatgattttcgtgtccgattctgtgttaaaaaaacagaaaattaactgagtagaagattgtgttcttttccctctttgtatgactcgggccttgtggcagttaagcgagttggaaatttttcaagttgcagagtgtgtgaaggttaacccggattcaccccagaag

SEQ ID NO: 90030 - DNA, 782 bp, Eucalyptus grandis
  Intron number 1 from transcript Egrandis_v1_0.019026m (loc us Egrandis_v1_0.019026m.g) derived from phytozome v7.0 (c hr-ID scaffold_6; pos 43422684 to 43423465)
cttcttcagttacgggctcccccgccaatacccaggtcccaacactctccaaaatgccatctttttcttcctctttcaaccgcataccttttgtcggtgcttgctcacgtttattgttagcgatctttgtccaatgcaatgattgttctgtgatttgggtctcttgttagtttggtcggaggaattactgggtttgtttgcacgtagtatcttctccaatgctgtatcgtttgctggtggcactgaaactttgtttatctttgaattgagcatgatatgttggttgagttatgctagggtatactcaggccggagtgcaaaatgggtatattgtaagtaatgtattggactgcgagtggaaatttgaacaagtgggctacaatcaacatctagcatatctgatgaacttgtctcttggggctcgagtcattgttcaaacagttctttttcgaggtattacgacatgtccacacacataatctgctctaatctcttctgtctttgaagccataagtacacagtccttcacagtgaagtcaaacgttctagcaatatgttgcttggttttgagagagacccagcttttcgatggtcattttggatgctcgagttttgctttggcgtgtattaacataagcttttgtagtcatagaattgttggtgttaataatggaggctgagtaaggtttttaggaagtcgcccctgtttcatatgttgtgcggcctcccctctccggttggctgattagaattatcctcaattctcctgcccatgcagggta

SEQ ID NO: 90031 - DNA, 925 bp, Eucalyptus grandis
  Intron number 1 from transcript Egrandis_v1_0.025718m (loc us Egrandis_v1_0.025718m.g) derived from phytozome v7.0 (c hr-ID scaffold_6; pos 46675379 to 46676303 reverse strand)
accactcgccatccatacaaatcctgcaggtgaaggtaagaggataggagcatgttaagggaaaaagagagagagagagagaactggaccatgttattcgtttcaagtttaatcagatgagtgtcttgtgttcttgcatctcaccgtgtttttgttttttttttcctttccttctgttaatatcgccaaaaattaaacatggcgcgatagatcgatttcggatcagcggcggtacttttatttgtttttgcttttggtttaaataaggtttataagagcggtcattgagatctgattaaattcgaagaaatcccgacaaaaactgtccctgttacccgctttcatgaggaggcatcccttcttccgagattatggggttatcttgccgagttttcaaaagaaaaaggatctacagtaatacaagagggcgtcagttatatctccttgggagaaaggctatattttttaggattaatactagaaaaaatctcaaattaatatatttgtgataaatttattagtttatcgagtttatcttttattagtttactttcaaattattaagttaaatgacacatacagttgattgatatatcaattcgaggttttatattccgtttgtcgacgtttataatttttgtgatttttttgtaatattaatcaaatttaacatatggtatatttgtcacaaatttactaatttaaatttttttatgttcgaataaattagattgaaataaattggtatatttatgatcagttgagattttttatgataaaagaataatttagaataaatttgtcaatttgaaatttttcagaatattatccttatttttatgttcctagttgcacggtagattcatcgacgtttgcgttctcttttacaggtagaacaggttcgagagccaaactagaaaggcca

SEQ ID NO: 90032 - DNA, 1010 bp, Eucalyptus grandis
  Intron number 1 from transcript Egrandis_v1_0.026821m (loc us Egrandis_v1_0.026817m.g) derived from phytozome v7.0 (c hr-ID scaffold_6; pos 10010215 to 10011224 reverse strand)
tacctcgccactacgtcaatcaggtgcccttcttggtgggtcttggatcttggttttcgtaaggggttttcttgctcttgggtttcttgttttttacccctttgaagtgaattgctccttttgatttctgttctgttacagcgattaccttcgaggctcgttttagccgtcttttgagttccgcggcgtttttataaccaagcgcatggtttgggctgttgttgggatcgtagttaatctaaattgaaactgggttgttgcgaagctaaagcatgttaactgattgatagagttgtgccattatttgaatccactggaggtctgctctgttctaattactattctccaagattgtttttagttgtttttcgtgttcgtttgttatgaataacccagctcatgtaacgggccatggtaggatttgtactgagtctgaatagagagagtgggtagcgcggagcgaaagcatctcacttgaaagaagctataatttgcatccattggatgtctgttctgttctcatgattattatctgtgattgatcttggtgctctttcttgttccatgagcttatgactaacccagcacaagttttattattttgttattgcaagtgctgtggtcaatctgaatcaacctgggttgtgcatcttggttgatatgatcgctctatcatttcagtccattggatacttctactttttattgtttctgatgatgctgtaattcgggagttcattttggaatttgtaagttacatgaactgtggattcgcatctctagtgttataaaggtagttcttgcacagattttgctctcttctgcatctgctagcttttgggtttcttgtgcagcagttcttcattactttagacaatataaacttctggaccattttctgcttttgtggatatgacgaagatgtactcgtatggctctgtcagacagcgggcgtcaatcttgatatttaattattcttatggttatttccagctggacatatatctgcc

SEQ ID NO: 90033 - DNA, 663 bp, Eucalyptus grandis
  Intron number 2 from transcript Egrandis_v1_0.053274m (loc us Egrandis_v1_0.053274m.g) derived from phytozome v7.0 (c hr-ID scaffold_6; pos 20077113 to 20077775 reverse strand)
aggtacttgcgaggcgtattaatcacgccctccgtcataatatataactgataaatccgctttaaatttaatttaaatttctagaagagttggcagtagtttcacaaaatctcccgcactctttttaccaaatatgtgtggatccaatcatggaatactaggtaatgtgaaacttacttttatattcttgggatttgtagggattggacttgcaagtagaaatggtattcctgaactttcaatgctgaaattccaattgcgacttattcttcatcttttttttttcccaattgattcgggggcgggtggaaactatttcttgacctggaagtaactctatgtgcatgtaagaattagctgaggagctttcttgtcttctgaacctttgaacgggactgagctttgttgatgtagacctctcagtttgattctgctgctgatactgcataattttatttaatgggagagttttgaacaaatcagggttgagtgcagttatttatacggatgaatagttgctttcacaccactcctgatgccaacctgatggtgtttctaacatatgaactcacagaaaatacgagcttgtgtcatggtaattggtgcttacatttcggacttcttgcaggaagaccacaagttcaaacaggcccttcgaataac

SEQ ID NO: 90034 - DNA, 369 bp, Eucalyptus grandis
  Intron number 3 from transcript Egrandis_v1_0.017452m (loc us Egrandis_v1_0.017452m.g) derived from phytozome v7.0 (c hr-ID scaffold_6; pos 38277935 to 38278303)
gttctgcaataaagccctctacttcatcggccttggtattgataacgctcactactcagcacctctgtgaaacaaagcaaatcatattagcttaggactgcggtagattttttccgatgcttcataaaaacaaataagaaggcagcacatgaggccgcagcattgtctaaatcgatttatacgagtgctactcaacatgaaaaagagcaaactccaatctttcagatgcagagccatgatattcgagattaacaccagaacagcaacagaagaaaagcacattttccttgtcaaatgatgtatcgtgcctcaaatatttttcaatgtatggatactaatattattttcgatattgtttttcaggcagca

SEQ ID NO: 90035 - DNA, 547 bp, Eucalyptus grandis
  Intron number 1 from transcript Egrandis_v1_0.000922m (loc us Egrandis_v1_0.000613m.g) derived from phytozome v7.0 (c hr-ID scaffold_6; pos 5219113 to 5219659)
ggtaagagaggtcggcctcttccccggtcaaagtttctcctttttctattgcggtgttaaattttgggtttttcgtttgtgggtcttttcttttgttggtgatggtgatctcggggcacttcgcgtgttttgttcttttgatgtttgatgctgtcgaagcgactggagagattgcggatttctgttcgtttgatgtcttaacatcctctagagaagctacattctctgtttttggatttgtttctgtgtttctctctgtatgagtgctgctaccttgttgttcgaaagaaatattggatggagatttgcaattctttatatggtttctcgtgatttattattcacttcgacgcaattaaagttgtgcaatttttcattcggttggtgcagattttctcagattctgtcgtttcctgccacatgaattggggactgtgattttcaaagctttcagttaatcgattttgttgcaatgattttgatgtgtgagtgtggttcttgttccttttcagaataacggtgcgctcccacattcgactctgaggac

SEQ ID NO: 90036 - DNA, 979 bp, Eucalyptus grandis
  Intron number 2 from transcript Egrandis_v1_0.038553m (loc us Egrandis_v1_0.038553m.g) derived from phytozome v7.0 (c hr-ID scaffold_6; pos 32050340 to 32051318)
aggaagctacttcctgcaacgtgagtgtgcagtctgttgaaaacatggacttcactgtccaatgtactgatggaaaactttcacatttgaatggtatcacaaagggcatagctacatccactggaggtaagatgcaaggctgagcacttaagatgaacactttgatgtaatattatgaactgctctaaaatatcaaagaatgtcgaatggtcaacactaatgctgcgagcatggctgtaactgttgaaaccctttaccctttttttcatcttatgtacttagtatttgaaatgaagcttaaattcgaagtaagtgactagtagagtgtggatcaagatgtcttaaagaaagtatgttaatcaaccaggcagtcatatatccaaggagcaaacctatggagttcattccttaactgttgagacattgaagaagttatgtgcctctaatgagcaatgcaaacaaatattgcaccatgatagcagagaaacccagggtgtccatccggaagcggtattgataaataacagcagaattgctgaggtaactttcttctgaagtcttttattaaggtaatttagtccataaatgatgcttggatatggtatccataacatcagttgaatgcaggatactgcttcaagcaccagggaaaacaattttgtggttttactagactaatgatgctcgtcttccaaattctgtcagctccgttctatagtatggtcgattttgattattcatttttgagacacttgttttatttgaatttcatatctgaagcggcaatcagatcttttgttaaaccaagaagtcaatgtaattctcacgtgtgcataagtgcaattttgagttcaatctcaaattaatccactattttgcaagattgggtagttcaagaaaacaactagcaaaatgctttagctgtgcctgtttcctctacccaggaatttaaggggatacgccacagagatacagtcac

SEQ ID NO: 90037 - DNA, 524 bp, Eucalyptus grandis
  Intron number 3 from transcript Egrandis_v1_0.013809m (loc us Egrandis_v1_0.013809m.g) derived from phytozome v7.0 (c hr-ID scaffold_6; pos 24825008 to 24825531)
ttcaacctttttcttgtatctcggtttgagccccggtaaaaaatttgttgcgaatcttcattgcttatattcttcagggtttattggacctgagtgagactaggcctgtgtgtggactttgtaagtgaagtttttaaaaaacgcagtttctacaatgtggcgtaagtttgatctttgtgaaccggtcaatttaccaaataattcacgttccttctttttgtcattttcatttgccaactctagcccttatatttgtctatagcatccagctttccctgatttgtcgagattgcatatttaggatggttgtaggcattagaagaacctccacttcataataaatagagaagatcgctttagtatcgcacctttatttttctaaaatgccatcgatgaaatttagtatgttgatgtgttttttttaatatcataactgttttgatcttgaaacatattatcgcttcaaccatggaatatcaatgattacagacctgtctgaggggacgagcaaactgcttttggct

SEQ ID NO: 90038 - DNA, 501 bp, Eucalyptus grandis
  Intron number 1 from transcript Egrandis_v1_0.008401m (loc us Egrandis_v1_0.008422m.g) derived from phytozome v7.0 (c hr-ID scaffold_6; pos 51032011 to 51032511 reverse strand)
aaaaaagaaatccggtggtgagtttcttggaacccttcctcctgctttctcaaatttttagaaagtttcgatctttttctaagagtatttatttgttcagattggtgagttccttaagctcgaatctcccatcaaccagtttttttccttttgtcttttattctctctctctctctctctctctctctctctctaaacttatctgggtactgaaagctggacaatttgattattaaaaagtaagttgtcaaccatcttgattgtttattttcgtttgttatgtctgctttcttctttgtcaacttgcctgatcccacaggcttctctttaaattgtaattttctatatggggataaggtaaagaagcaatttgcttcgtttcgtttcccgtttcaatgttttcctctctctctctctctctctctctctcactctctgaaagccatgttcatctcttctcaatcaggtttcagctgggaattgcagacctttgattgttga

SEQ ID NO: 90039 - DNA, 401 bp, Eucalyptus grandis
  Intron number 2 from transcript Egrandis_v1_0.011803m (loc us Egrandis_v1_0.011803m.g) derived from phytozome v7.0 (c hr-ID scaffold_1655; pos 4379 to 4779)
cggtcggataccagcatccatctcgcgaccttcaggtaaagtctatttggttttgaggatccatgttcaggttgcaataatttgaaggttgtcggtttttgtttggaatcttatgctgatagtcgccctcctgggtgtgaaaagttcatgagtcattgaaattagttattactgtctcttggatttcatacctgttcagttttttaaacggagactcaatcaagctgaagccttaaacctaatagaaagtaattttaggagttgttcttagttaatatcgtgaggcttagattatggtttttcgtctttgtagctttcttgatttgagaagacttcttctggatcagctgatctcagtctctcacttgttttgatctgggttagttaaatttttttacagg

SEQ ID NO: 90040 - DNA, 604 bp, Eucalyptus grandis
  Intron number 5 from transcript Egrandis_v1_0.011803m (loc us Egrandis_v1_0.011803m.g) derived from phytozome v7.0 (c hr-ID scaffold_1655; pos 5673 to 6276)
gtctcataagagtacaagatcgagaagatttcctggtaaactttgtatatgcattaatctaagttaactctctctccctccccgccccgccccgtcccgtcctgtcccgtcctgtcccgtgggggaatgagaaagtcatgctcaatggaaaactagtttagtggtataaattgggattggaaagtaaatcaaaatatcaatcaattaataatgaatattggctttttattttgatccatgaactagtagttaagtctcaagtattaattactaaaatggagaattaaggagatgggtatgtttggatgacacgattggaggggtctctatgttttttatctcctgagaaagaaacacgttcgaggcacacaagcacctctctttcagaagtttaccgtttacttatcaatttatggagctccccttctgtgtcttgggaaaaaatgagcaattattatctcatacttggggaatgaagaacaatttagattgtctgaaggctcttcataggataatgtttctttagtcttttgctcttttggtaaaattcaaatgcaattgatgcacaggtgaaaagaagaaacatcgcaaagaattgattgct

SEQ ID NO: 90041 - DNA, 732 bp, Eucalyptus grandis
  Intron number 5 from transcript Egrandis_v1_0.020498m (loc us Egrandis_v1_0.020498m.g) derived from phytozome v7.0 (c hr-ID scaffold_6; pos 21848922 to 21849653 reverse strand)
tagaactgtacaagccatttccttccagcgcacatgtaagaatcttgctaaaggtcaactggtaattttctccaggtggattgaattgagcctgcttcgtgatgaatatggacaatcagttcgtccctgggaattatattactgaaaagagtctgagatgtcatcattgaagacaaaaacttttgggatgaatgtgtaaggatactcagccggcggacctagagctccagttcattcatgaaccaagagcatatctaccataataaaatcctataaattgatcattgtataattggttatctggatagtgagaattgctatcaacaaacaaaggtgtttggaagacatggaggtgaaatgtagaatgcttgctatatgaagagtgaatggatttaggaaacaaatatgctgaataatttttttgagacaagaatgatgtgaatgctttttgattgctgggttgagtctaacactagtttccggatcttctgggtttgatacttttgagtgtgaattggttgagcgtgtctgaacttgattattcttcgaaggcttttgttgcactgttatgcaaaccgataaagttgataaggacatgcttgctgttattccattcattgtgattgttgtcttttgtatacagttagatgtgcaatttcactcttgcttataatagaacttggttaatttgtgctttgcagttacaacataaggtaagtctcgccggcttgc

SEQ ID NO: 90042 - DNA, 638 bp, Eucalyptus grandis
  Intron number 1 from transcript Egrandis_v1_0.023759m (loc us Egrandis_v1_0.023759m.g) derived from phytozome v7.0 (c hr-ID scaffold_6; pos 24010078 to 24010715)
ctcttctaccccctgacaatccttcttccctccaggtactctctctctctctataaatacatatatgtttttcgcttcgattcgcgctttttcgcttgtcttcctagtcggttggacttaatcaagtctgggctcacgctacagggtaagttcgattatgatctcctctgtagattctagcgtttgaagtggcgccggggatacgaattgcgaacttgttctgattttgagcagtagggagttcatgatttggagagtggcccggtactataggctcagatgttaattaagtgcggttgaaaaaggccagttgatctgcggaattagggcacgagtggatgtgcacttgtgatttcgcgatgtggtgtcctgttcgtccttgcttatccaaaccacgacagacggcattgggacagggccggttgtatgtgaataattgtttgatttcgcacaattccttttgttctgagatgcctttctgtttggcgaccatcacgagagagcgcacttgcttgtagctgaagacgtagctgcatcggttctacttagtgtagcttttgtgcatatgccatctgctgctgacgtctcgttgctctgcatttctgatgttatctttgtgtattgtgaatcagttcact

SEQ ID NO: 90043 - DNA, 543 bp, Eucalyptus grandis
  Intron number 1 from transcript Egrandis_v1_0.046696m (loc us Egrandis_v1_0.046696m.g) derived from phytozome v7.0 (c hr-ID scaffold_6; pos 37106519 to 37107061)
acccttcttaactgcttgctttctgcttggtaattcttctcgtgtccttccctttcttctaccaactttccttccactttctctgttttatattgtaccgactctagtcattttaacttattgcattttgggtgccattcatggtagaagttacttgtgaattgggatgggtccgccatgcatctgcagtcgattgcaggtggagccacgcaattatcgagcgacgatattgcccttaggttttggattttcgcctcatgccccccgtttgtattcaattatataatgcaatgataacttctttttaaactagaaccttgtagagcatgtagccgtctcacgttatgcatctctagaacttattttcttcccttcagttaaaatctggtgcaagcggaagtgtccatccaccatttatctagactttgaatgttttgagcgaaatgaaaaaggaatttgagtttttgactcctcaatatggtgggttttacaaatcctccatgttcacttgctgacatgatgcgatgcgattgatttgcaggt

SEQ ID NO: 90044 - DNA, 765 bp, Eucalyptus grandis
  Intron number 1 from transcript Egrandis_v1_0.019839m (loc us Egrandis_v1_0.016202m.g) derived from phytozome v7.0 (c hr-ID scaffold_6; pos 34038234 to 34038998 reverse strand)
acttcagggactactacctctccaagttcttcaaggtacgtcccaatctttgattgggagtgtgaatgggaatcgtggtgaatgctagtggatggtatcttccctcgacgtggaagtggaactttcagtaggaaagtgcaggaaatgttagctttttggggctatgttggcaaaaactgtgagttgctctagttgaagcaggttaagacaaaaccttttcggcggctttggcatctgcacgtcgggtgctttgtgatttccataacgtttgttcttgattgcatcttgggttgaacatgacttcactgagcattaggcattcttgcgttaatgttttcttgggcacggattttgtataccagtggaatcactgggcacatttgcggatagttggcccgaaataggtgacaggatgcaaaagtgaaataccatttacgttctgctgtaaataggttaatctctttgaaaatgattagatttcttatgagacttgctaaatctttgagcttctaaattatgatacttgaataatgaagtactcaaggagaaagtcaatacaagtgcttatggtcaatctcagtgatagggtagtggaccactgatttgttaataaacttgttattatacacttctttctgcttcctgccctatatccttctttcgctttgtaatatgtaaacagaaatcatttcaaactctcaagcctgatatgctggtggtcttgggcgatttttctgccagaggttcggagctgacgagacgcaa

SEQ ID NO: 90045 - DNA, 817 bp, Eucalyptus grandis
  Intron number 1 from transcript Egrandis_v1_0.012149m (loc us Egrandis_v1_0.012149m.g) derived from phytozome v7.0 (c hr-ID scaffold_6; pos 38232157 to 38232973 reverse strand)
ctgacgtgattcactctataatcttgcaggtaattggatggttcaaactactaaaggctttggttttcggttgactgtgcaataagctaatgtttcttgaactgttggaaacttaacttcacttagcggcgtagctctgactcatttttttttttttggtagtcaaaagctctgactcagttcggctgttgactttaggtggttcttgctgttatgtctttagccaattcattctggagttctgttgttgttcactcttctatttgaggattctgtttctggtggtccaactctaactttgggtatcatgagaaatggtaataacattaggatttgtaaatgaaaaagctcttgtttatatatttgtgaattgagggcctaggtggtttttctggcatctcagtggtattttcagcctaaactagaacgcggcgatgagtcccttgagaaaactcaggagctaataaagtgatatgtttttttgttgtctagtggctctggtcatccccgaacccaactacataggtggtaggtaaacagtctggtttttttaggcacgagtaggttgttgatttcaattctcaagaatttcctatagaccacctacaaatattctatcgcatcctaagtagtacgatgtgggattcagctttaccttaaggaattgacacaggaaggggacctttaaaatcagaggaatgtcaaagccagttaatgtgcttttcctctataggcatttgaagaaaggcaatggtctcctgtagttactgagcttctttttgggtaaatgatcctgttatcatcttttttgtccagg

SEQ ID NO: 90046 - DNA, 636 bp, Eucalyptus grandis
  Intron number 1 from transcript Egrandis_v1_0.033877m (loc us Egrandis_v1_0.033877m.g) derived from phytozome v7.0 (c hr-ID scaffold_6; pos 20068295 to 20068930)
gacgaagagcaaaggtatgtacaatgaatccatctggacagttattatttccattatctgcaaagcacaaatcgtatcatgatgacgtttttatattgaattatacactctgttctgtcggttctggtcttcttccagtgagtatatatgctaatgatatataattagtggatattatttttggcaattgaatgtagtagtaatccacacagtggattagaatcagaggattgcggtgtgttcaaacttcttcttcttcttctttttggtactaatgcaaagttcaattctgcttggaagtgggtgcgtttatttcgcaattggtaaaaacgaatcaaaaaatatttttgtaaagatagttacttatattgctcactattcagaatgaatcacatatattttcataatcaatgaaaatagtcatgagtagatttgttgataatgaaaaaagaaaatcgactggtctttttaaaaaacacatatgatattttcacgaaaaatgttatataaattatcgttccttttcgcgaaataaagaaagactgaggttgattttattacatctggcagtaaattttctcactattctctaatgctccaggttgaagagcctaaggatccagtgaagtattaggg

SEQ ID NO: 90047 - DNA, 842 bp, Eucalyptus grandis
  Intron number 2 from transcript Egrandis_v1_0.003738m (loc us Egrandis_v1_0.003738m.g) derived from phytozome v7.0 (c hr-ID scaffold_6; pos 36314170 to 36315011)
tttgaggttcgcctcttgagcttcgatttcgccttcctgaagatttgctgctagtagccgacaatagctactatgagcttcattggaattggcattcatctctaactctagcttttcgtttcgttattcgacatatacttaccagtggattggaggaagaacaaaaaattttagcttgtttctccatctctcgtcacctccctcctcattgataggagagataaaattgaatttctccaactttaatctttgagattgctgactagaactgatcctatggttgtcgctactttctcatcaagatttgaagaaaaattcaattagttttcattttgcttctacttgattttattttatggatttacctttttggtttttctttcacatttcggtcgtctttttcttctcgataactaatgcttctagaagagttcctatttatttatccttaaatgcgtttctgcttggttgaatatcggtctgttaccggaggaaaatattgtgagttgtttcatcaaaaggtacatggctgcttttggtattaatcgaaactgactgctactatcttcagtcacgatttaatctattgatcacttatcacatgtcttttccttttttccttaatgataaccagagttttctctgtaaattttgtttgtctgtggatgtccttgttctccctgttgagaagtgttggatcatattttcaggaatgaaaattacacttctgtcaaacttcacaataatgagaatagatgtgggctttcggtgaaggactctgttttactttcatttgcttgcttgcaggttagagcagaagaacttcggaacatactggttga

SEQ ID NO: 90048 - DNA, 638 bp, Eucalyptus grandis
  Intron number 1 from transcript Egrandis_v1_0.028658m (loc us Egrandis_v1_0.026050m.g) derived from phytozome v7.0 (c hr-ID scaffold_164; pos 54154 to 54791 reverse strand)
ggagccattgtcacgcttactccgcgagcttctaggtaatgctttcatctcaagcacaactaagagtcaagtagttccaaatttcgttttggcatcttcttgccaatttcgtatcatccgagcctgtttagttgcttgtgacttcagacagttgcttgttcgtttttctttatgctgacactgtgattcttgaggtcgtgctgcaacttgaatcaagaaccagataggtaaaaaaaacaaaaaacaaagagtttggatgaaaagggtgtctccagattggcccttgttttgggattattgctttgcttgattagcatggtttggctaatagatttagcaagtgaagactaggttttggctggcctttctgaagaattatgtaactcaacctgcaaatatcacctgggcagttgttaatccttcaggatgttaacccaaatgtgctcaaccccttttttcccctgtcctttgattttggaggaggtgagttttgaagaagtgcaattctttcaatatattttggcacagctggtctgctatgctgatacagctgcgttgatttaattcggtgtgagcatattttttggagtttgattgggtggataccattttgttttccccatctcttccagatttga

SEQ ID NO: 90049 - DNA, 711 bp, Eucalyptus grandis
  Intron number 1 from transcript Egrandis_v1_0.053134m (loc us Egrandis_v1_0.053134m.g) derived from phytozome v7.0 (c hr-ID scaffold_6; pos 23480752 to 23481462)
cagaaacgagctcgggaaacatgtaatatagatcaaaggcatatcacagagacgaacataccttacttgtcacagattaagtaccgttgcaatctcagagaaatcctttgaacccctgaagttccgttcttcaagaaagagtatactgtttcaaatggaagaaaattaagaagcgtattttctctctgaaacgctacagattacgttatcccctttactttttattttatatattgcagttattttcatttagaaaataactaccctttcctcttatgaacccttcttttatgggttgggtttggcccaacatgggcggatgggcttgacttggcccatcaaataaaaaacccattacagttaaactatctcaaccgcattcgggaaatctgctaggagtatacaaagtctcattggagcgtgttatataagcctctctagtcttttacagggatttggtttttcttcctgtcagttgtttacaagacccttcattttagtgtgttgcttgtaccttttatcagctccctctcactcttcttgcttttgcttctaatgtgtgagttttggcgcctttcttttgtacttttgtcctaagcttaatatattcttactcttaccaaaaaaaaaaaaaaaaaaacccttcattttaattttttttttcttgggtatgcgcagacaggaagcacgaccgtttgaacaaatttgaga

SEQ ID NO: 90050 - DNA, 788 bp, Eucalyptus grandis
  Intron number 1 from transcript Egrandis_v1_0.006760m (loc us Egrandis_v1_0.006760m.g) derived from phytozome v7.0 (c hr-ID scaffold_6; pos 49684420 to 49685207 reverse strand)
gaaggttggctgctttttgagttcgatcttttgtgcttcggcaaacctttgatctttttcttgttcttctgggttcgtttgtgataatgtatgtggcttttctttttcttttttacttttatcttttttttcaatcttgcgcctcctgagatttggaggtttgcgaatgagtgaacagacttttgtggtcactgttgaggatattcctccaagactgtgatacctgtgcttatgcttttctggaaatcttgcttagtttttcccgtgagtaaccttttaatcgtggactttagggggaatatggacgagtttgctggctcgatagtctctgtttagtgcaatttcgtcgccctcatttagttgaagtacttttggtaatgtctaaaggactacttgaagcaatgctatcacggaatgctttctctttatgatgccggttgcatgttcgggggataatttgaggtcttgttgtgtccaaaagtagtatcaggccagccactgccagtttcaggttgacatgattcatgaactagtgcaagtaatgcagaagttgttttctggagtaatcttattgcctttgagaggtttggtatgctagtcgcttcacagtgcatggtgccctcttccttgggtaactgtgaactgcccacttttcattacagtgatcttggaaattggaaaggaaactccctcttgtggaaaaaaaagtacatttttcatgctaatggtgactgtctgacattcaattggcaggtgacgctttgcatagcctgaggtcaagcttagcc

SEQ ID NO: 90051 - DNA, 867 bp, Eucalyptus grandis
  Intron number 1 from transcript Egrandis_v1_0.042655m (loc us Egrandis_v1_0.042655m.g) derived from phytozome v7.0 (c hr-ID scaffold_983; pos 8900 to 9766)
ggaagagttgttgggaaaatattgcttcaaattgagtagaacaatgaagaaggatatttaaagtactcaagtcggattttgaaacgtgatatgatttatttgcctcacaatgttactaatggtcactggaaaatatcttccaaaatacaacaaagtttcaaaataagaatactagatagcaattctagtatttctccaaagtctctctaggaaacaattggaaaaatggctgcagtttttttagaaagaatgctcgaaaatgatcactctagttcttctgaaaatttgcaagtctatatataaaacagtcttaaaacacatgcaactcttcgtgaaaaattgccaaaaaatgaacaaacttgttattctgaaaattgcccagttgaacaaaagcatctatttataagaagttgaaagaataaccaattacaacccttcgggaaaagttgcaaactgaacgagcatctttccatttgttattttgaaaagacacaaataaaaattcggaataatttttttaaataaaatttcgaatttttattttaaataatttccaaaaatgctcaatacaaaagcaacctttgaattgattaaaattaataacataacaaaaaaaaataacaaatggattagtgttaattaaaccgcaggtgccaaataattgcacaattatttgcgcatcagcatgcgggtatggtggggtctagccccacccaatcatttatttagatatataaaaaaaaaaaaaactcacacttattaattggcccacttcctcccacttttcttacgtgggacaaggaaaatgcatttagtttatttttacaaacaaacctccaacaagagtgcttttgcaacctgaggact

SEQ ID NO: 90052 - DNA, 840 bp, Eucalyptus grandis
  Intron number 1 from transcript Egrandis_v1_0.020224m (loc us Egrandis_v1_0.020224m.g) derived from phytozome v7.0 (c hr-ID scaffold_6; pos 35177305 to 35178144)
accacttctggtactaatcattatccctttttcgtatgatactgaccgtataagaagaggctttactagcatggattttgctaacataatagcatttgggctattgtaaaaataataatttgttataagtcataattttttgaaggagtgagatccacaataatttataattatttattatttgattttttgtgattcagaataaactgttattttaacggtagattaaatattgtcacacaataatttcttttactagcataatagtttttgaactcttgttagaataatattatattgtgagtcatagtttttttaagtagtggatctggccctttttgattatttgttatttgttttgttatggcccaaaaaaagcttttattttcctaatagattaaagacaattacataagtatttctctataagaaacttcaataaaagaggccttgaaggctcatttactaactgcaacatcacttttaatcaccatcttgtaacactatatcggtatgattcgtgttaatctatttaatgttatgataagatcaccttcatctcatctctgtagagaaatcatagtgttataataaacttagtcctagcttgatcatacagacaaaatcattcgaggtgcagaaaacgagcaattcagaacatatgcctggcattaaacctaacaattattcttgctttatcaatcgctcattaaaaacaagtttggtttacaatatatgaccagagttggactccccaacaggctttagcttctcaattttaggctttagacttctctaatttaactcctccttttcttttcggctgcagcaaaactgttc

SEQ ID NO: 90053 - DNA, 631 bp, Eucalyptus grandis
  Intron number 1 from transcript Egrandis_v1_0.017986m (loc us Egrandis_v1_0.017990m.g) derived from phytozome v7.0 (c hr-ID scaffold_6; pos 45203291 to 45203921 reverse strand)
tctgatcttggggttcacgggttgggcaaagaaaggtgatctttttttacctctgcttttggttttttaaaatcggagtggattgtgcaattcttgaaaactataattaggaactgcgtggtgaatttggtctgactagttctgtggatcgttcatgtaaagaaatgggattctctggatctgtttgctccaaaaactattaattgctcggcgggctgggaagccgaggccgagtatttttctggaatgtgatgaaggcagatcccagggcttcagattttcattttttttcacactgtacacggtgcagtccgtttagtagcattcttatgctatcttgatacactatctttatgagttggctgtgttagaaatcaaaaggctttcctctttattctaggcaagaaaaaattctgctgtggtctggtctctttgaattgtccacaacataaatatactggcctcaaacgtgattgttgttgaagcttgaatagggttttactcgtcagtggtgctattttacatcaaaccattgatagtgatctctcttcacttggctttgattgaggtcttttaagtttaggcatgttttgatattctccaggtgatcctctgttgcagaagcccctcc

SEQ ID NO: 90054 - DNA, 816 bp, Eucalyptus grandis
  Intron number 3 from transcript Egrandis_v1_0.032285m (loc us Egrandis_v1_0.032285m.g) derived from phytozome v7.0 (c hr-ID scaffold_2726; pos 895 to 1710)
aaccgagaacagccttgatctaatagaacattgaagtatgcactctcatggttaatttgcatagacatttgtctgaagtgtaattagatggtgcttttagaaacgttctaaactcaaccctgactactggaaacagagtttagcaatcttgtgatgaatggtgcgctcaatttctacttgagcaagatcttccagccttaatatcacttcagggtagtaagggtgaagggtatctcttgttctgaatggacatgattctggacctgttgttaaggaggccaatgactgaggtttttatttggttgagggccaaatacttgtttaacattcattttgctagttgaaagtgaacttggactctttatttgcaggggaaggcatgttgtcacgtcatttctgcatttagtaatgctcatgtacttgtattgcacccttgttttcctttcataatttggttatctgtgcttatggacataaactgcataatggtctctttcgtccttaataatggaataaattgttcattcttctctgtgataaggggaagattcaaattttatcttgtttgcattttgactggtaaaattaggttagatatccagaagcatgatcttttaatgtttgctcgtatatactgcattagatgattatatggagagtttgatatatgaaaaatgtctgtttatgtcagctttttcttactttgtgacctaggagggccttcctttctagctctctcatgttaatggatggattctgatgttcaaatatatgtaaacagttgagttggaaaagcagagctattgctatctcaaa

SEQ ID NO: 90055 - DNA, 336 bp, Eucalyptus grandis
  Intron number 2 from transcript Egrandis_v1_0.053003m (loc us Egrandis_v1_0.053003m.g) derived from phytozome v7.0 (c hr-ID scaffold_6; pos 15785774 to 15786109)
acttggaaagttgttcatctagagtctcttgaagagccaggagaatgaagttgggtctggctttttgagggtgtggcatattctgtcaaaaaaacttagtgagtactctgcaaaattaatttgcaagcacgctcatttgatatggacaaaaagaaaaaaaaaattgctagtcatgtattgacattatatgagttgtttatcaaggaactgggaaagtcaaagccatagtcttacaatctaggaaccatagaacggtgcgttataatggagagtccttcacaaacaagactaacttaagattgcttgatcttcgtgccatccacctctcttttctag

SEQ ID NO: 90056 - DNA, 494 bp, Eucalyptus grandis
  Intron number 2 from transcript Egrandis_v1_0.029750m (loc us Egrandis_v1_0.028266m.g) derived from phytozome v7.0 (c hr-ID scaffold_6; pos 50391325 to 50391818 reverse strand)
ctttggtaatgattatcatcttcttctcaatccttgcaattattttccattttatatatagataaaattcgcatctccactttattgacttgaatcatcatgttgatcacaaacattggacgccaaggatctcaattacactaagatatcccaattgaacatcatggcatgccatgcaacggatcatccttacaaatgaacaatagtttgaattcattcaatttccttcaccaatcaactagaggagtaagatttccccacgattggcttaaaaaaaaacatagttgtaatccataacagtatttatatgactaaaaacttctgctcaaggtgaacaaatgaaccttttttttttctttgggttgaacttataccgtacttagagcatatttttaaaaaatgtaaacgtggtagagagatctttttttcttctttaccttgactcgtcttgtttcattcacacaattcctaattaatgatgcgcaaattgcagt

SEQ ID NO: 90057 - DNA, 804 bp, Eucalyptus grandis
  Intron number 1 from transcript Egrandis_v1_0.037943m (loc us Egrandis_v1_0.037943m.g) derived from phytozome v7.0 (c hr-ID scaffold_6; pos 10151475 to 10152278)
gaactcagtggccaagatcacaaacgcgtgagagactctctgatgtcattcttgcgaccagaatctctgaagcagtaggtggggaaaatggatgaagaagtcagaaagcacatcgagttgcactggcagggcaaggaaaaagttgcggtacgtcaatacactgtaaaactcccactgttgctttgatctgtttgagatatattctatacttatcaattttaaggaacatatggtgtatgcactagacttttctcttcatctcaggtcgatggatcgtcttgattggaagatcccctatatggaaaatacacatttcagtttgaccgagcctaattataattgttttgttccgaagcaaagatatccatggaacggttcgtactattcagatattcatgatcaagaagtattgtattctcttttggataggccccgaaaggagaaggaaggccggaatgccaacaagcatctaggattgaattcacccgatgcgatagtatccattttgggaacatctagtaccaaagtcactgaatgggtaagtcgccgatccctaaaaccgattatggaatgtactttatttgctgggttacattacaggcgggcattttaccaaaggtttatattggatcaatctaccctcgtgtgattcctgttgaagcatatactgggagggtgtatggcctctgcattcgttgactatgagcatgaatgcatagactgaaagtgcgcatgctctcttcaacaaacgaaagcagagtaaataacattaaagctttgattttcctataggcattgctcctg

SEQ ID NO: 90058 - DNA, 586 bp, Eucalyptus grandis
  Intron number 1 from transcript Egrandis_v1_0.046688m (loc us Egrandis_v1_0.046688m.g) derived from phytozome v7.0 (c hr-ID scaffold_6; pos 49111470 to 49112055)
ggtgagattcccaagaatatatcgagttgcttaaaacttgaattcttcgtcctctcgtacaaccaattggttggaggaattccggtggatttagactcattgtcaaatctttatttggtcgccttttcacaaaaccaattaatggcagcatcccttcatctataggcaacttatcatatttggagacgttttttgtagtgacaatggtttgagtgggatcattccccaatctcttggtcaactaaccagctagatgaaatcagcttgtcaattaacaggctttcaggtaccattccaccttcattctacaacttgtcttcgttgattgtattcgaggtaggtatgaacttgatccatggcaatcttccagaagatataggattcactctcccaaatcttctatttttgttcattactgacaacaatttctctggatcaatcccttcgtctatagccaatgccacaaatctaagagcgtttgaacttgaaagcaatgagctctctgggaaagtcccttcgttcgtgaatctccataatcttcaggttgttaccttagaccttaactatcttggaagtgaaggatctg

SEQ ID NO: 90059 - DNA, 799 bp, Eucalyptus grandis
  Intron number 1 from transcript Egrandis_v1_0.026928m (loc us Egrandis_v1_0.026928m.g) derived from phytozome v7.0 (c hr-ID scaffold_6; pos 35047265 to 35048063)
tttctcctcatcattcttcaggtccctcttttcaggtaaatatgcccattgtttatctccccacttgcgcttctcttttccccttttggttgtcatgatatgatgaacgtcggtcaagaaatgaagattattattattattattattttttaatatgggaaagattagtgcaatgatgtctttttcttgctccgctatgattgggttttgtgtttgaggatccgggttggtcactggtgcaaatgggtcgttcgtttttgggtctttgaaagggacaagagaacagatgaaccaaagattttgtttaccctcgttccgtagagaaatttccggttcttgatgatgactgaagcgatgttatgttttctttgggaatgtgactgatgggttcgattagaagcaaacgctccatttccacaaaaaataaaaatgtgacctcgatgattagcttcttccggtttttcatgccccgctattaatgcttttttatgtttccatctggactacggcagtgagagagggaaaatgaactacaaggaacgctttgagaatgttataaaaccagaaatggttggactattgaaaggataagtaacgaagaaaagatccaaatgtgttattcctttaagaagaaccagcacatataagagggtggatttgagttgatgacaggcggatgtgattatgggtctggtttgttttctccgttatgtggcttagaggaagttgctgcatgttttcaatgttctgcatctgcagattcaactatgttgtttttcttctggctctccagggttcc

SEQ ID NO: 90060 - DNA, 828 bp, Eucalyptus grandis
  Intron number 1 from transcript Egrandis_v1_0.001485m (loc us Egrandis_v1_0.001485m.g) derived from phytozome v7.0 (c hr-ID scaffold_6; pos 32502746 to 32503573 reverse strand)
gagaagcctcttcgctacggtagagtcatctcaaatcttcttcttcttctttcttgttttttttttttttgggttaattttcgggcgaattcacttctagcacctgggcgttggtcaggttttgcagtggcgggtcggtgagtggtttttacttgcttgctaattgctccgttttgtcaccgactgaatttgtgaagtttgagtttgccctttggggtttgttattttctttctttctcgggacttgaggatttacagttttggaggtgtcattgcgcgaatgtcattcgaattttcggtaggggagagtcttgcgtgatgataatgccgtctctttctgtacttagtttttgtattcggccagttttgttcatgggttttcctctctcgaggcggaacactctttgaactgttaattctggttctggggtctatccaaagcatattctcaatcgttacaagggaagatatatagtgaattggtgcactgtcatggtacgtgtgcttgctagaaaggagtggaccttaattattagatttagcggatggaccaatggacgctctcatgaacacttccactagagtcaaagggctgtgtaaggccaggagcaatgatgagcttgatgctactatttgagcgaagtagacattacgaattatgtcaatataagtgctggatcagccgcttatgatgcagcatggatgagcaacctgtgctagggttgaacaacctctcttgtttctggtgctttacggttttgaagtctgtaggtattaattcttactgtagcctcataaggtcaatgattttgccttttcacttagcag

SEQ ID NO: 90061 - DNA, 835 bp, Eucalyptus grandis
  Intron number 3 from transcript Egrandis_v1_0.012343m (loc us Egrandis_v1_0.012343m.g) derived from phytozome v7.0 (c hr-ID scaffold_6; pos 6282637 to 6283471)
agtgcctgtcgcgttcccgcgaggagctcgacaaggtgaggttcttgtttcgtcgaaatcgctcgattttgagtttgtctgatcgtttttggaagtgcaattatttaaatatgttgtttatttgtgaagtttgcagattcacttgtgtatgatttgattccacttgcagattcattactaatttaagaagtcctcgtttgtttataagttcagttttttactttatatgctcttcttgatttttccattatcgtagcatatccaaagagttttgcaaccccttgattccgggctgtccgataagttcaactttattacatctcgaactcatccgatcccggtggaaaatttgactcggtgtgttctcatgtttggggtagttcttcttaatctaaattgcagatcggctttccctagtaccacaacaagtgatctgggattaaatatagttttcttgtcatgtcaagaaccagaggctgctatgtggggactttttttttcctttttttgacttgtatgcaatgaaatgtattcctttggttccggttgcctttttatatgatttttcgaagattttctccctttttcctcttatagattttctgtttgggtatcttgatctctgttataagtagcccatgaattttagggactctacccttttttcttgattattttgatctttcctaataattagatgattagattggatctgtttgaagaaacttccgttgtccagattttacctcttcagatgttgcttcttgtaccgcctttctaagcatatattccattaacaggagtgcttgcaagttgagaagggggagaactttta

SEQ ID NO: 90062 - DNA, 758 bp, Eucalyptus grandis
  Intron number 2 from transcript Egrandis_v1_0.001908m (loc us Egrandis_v1_0.001908m.g) derived from phytozome v7.0 (c hr-ID scaffold_6; pos 21878622 to 21879379 reverse strand)
attcacgaatcttcaaatttcaggtggacagaaatgtaagcgaccaaagatcaactctgtctgctttcactgacttgttttgtgtgacgatatgctagttgcacttgctgttaaacttctgttctcgacattatgtatatacgcaatttaatcatagcgcaaaaacacgatttaaggttttgacccatggtcaatgtaggacttaaggttttttatttctgatcaactgaagacttaagtttttcaaaaagccacaagcagatctctagtttgctgttggtggagttcagctatcagaagtgactcatggcaaatgatcaaatattccatgtggaaggcatgccaaatttccaacgcctgaaatctagcgatggcgagctcaagacctgatttgggatatttttaccttaagtcttcgattgactaaaataaatccttaattgctggattgacaaacgacctaaaccttatgttctgtacttatcccattttcaagtggacattgtctgcttcactaggtttttttgtgtgacaatatgctagttgcatcttgcttatacacttccaatcttgaggttatgcatttatgtaatttgattaagttttccatgtatgcatttttcataaccaaaatttggcctgaaaacactctgataactgcctggtgtgagagttgtatggttcatccatcatctcatgataattattgtggagctgttccaggtgccggtttcagcattcaaggaaaaaatagccaa

SEQ ID NO: 90063 - DNA, 1040 bp, Eucalyptus grandis
  Intron number 1 from transcript Egrandis_v1_0.001908m (loc us Egrandis_v1_0.001908m.g) derived from phytozome v7.0 (c hr-ID scaffold_6; pos 21879477 to 21880516 reverse strand)
cggcgcctcctctcgccggacgcggttctctccaggtacggttcacgtccgcctgcgcgttttttttttttttttgtgcgattcggattccgttcgatggtgctaccgtgaggggtttctcggagcattgattcgggagaagaaatgtttgtcattttctggttgttgatcggtcgatcgaggtgtttaagcatggtccagcggagaaatggtgtatcggctttgcatgagggaatttgctggcttcagtttcgtgaggttttagtcggaacgaagccctagttctggcttgatcggttttaaggggttttttgtacggccatcccgagcgaggctattggctttaggcgtcggaatcgattgtggccagttttagtatggcattggccgagaatgaagtcctcaaaagcaaccgatttcgatcatttccgcaactagtgtacagtcatttaatgattgggggattgcaacacgttaacactgtttgattattgatgtccactgtaagattttgggccacacggaatgctttttgctttttctttatgtgcgtagccagtgcttgggatgcgctatatacgttatgtcaattctcgtggtttattgaaagaaattatcgttgagctatcctttcgaggcggagatttttgattgtctgcattgtcaagcttcataaacttttcggcatagattgctttgtattatgcattaaagatactgccttcccttctctttccttgtcactctcttaatacttacgtgggttttgctctccgtttatggtatcttcattactttggcacagttcaatttttcatcaaacgacttcttgccatcattactttttgtgagtgactaggagtacactaattaattattattaatccactcatacccattagtttctctattctcgctggctgttgtccatagcatgacgtaactcccgtattaatttcttgttactctggtgacgttttgtccttgtggaatttcttgttatgctgtttgtgattgggttctgttgcttcacaggtagc

SEQ ID NO: 90064 - DNA, 596 bp, Eucalyptus grandis
  Intron number 1 from transcript Egrandis_v1_0.016776m (loc us Egrandis_v1_0.016776m.g) derived from phytozome v7.0 (c hr-ID scaffold_6; pos 30904524 to 30905119)
gttccgacatctttcggtaccttcgcaacagggaggtcggtgccatttatttatttatttatttgtgtgtccttttcttgtttttcttgactaaggtgagctttcttgcaaagaaaatgattcaatctgatgatctgaatgactggacatgaagcttttcttttgacgttgcgggagcgtgtctttcgcgcaactgactaatccggtttcatcgctccttgccccaccataaccgggtcattgcattgtccaaacgattagctgggtttcgaagaattggactttggatggatgatcatgcccagaaaacatgatcacgcagaaaacatcagtcactttgatcatgttttccaggctaaaattatatatgcctgggcttttatgagccaattgcgcatgagctttacatacgtcgatattcgcttgctttggtaccaacccgacaatgaaatttagtacactggttagtgtgaatctgcctgctcggtcggcatttggcttggattcaatttgatgatggaaatgggaaaaaaaaatacaaaagctttttgagcagtttggatgggaataatttgggtttgttggttgcgatgcag

SEQ ID NO: 90065 - DNA, 1028 bp, Eucalyptus grandis
  Intron number 1 from transcript Egrandis_v1_0.000673m (loc us Egrandis_v1_0.000593m.g) derived from phytozome v7.0 (c hr-ID scaffold_6; pos 42344633 to 42345660)
gatcaagagctcctgcgatcacctcgtgattgccggtgagcgccctcccctccctctcttttggagccgtccgcacgtcgttcgcgtgcgatctctctttcccccgcttcgagttcgatcacgagttcggatgtgctcgcgaagggcggctggttgttgagctgtctactactactgttggatttgaatcgatcttttttttttggaaatgagggcgcccgatcgcgatccttaaaaccgtttgctttgagatcgcattgaattgtctttcgagttcactccgtgtgtgtggtgattttctaaaattgaaatttttctggcttcggtctgtttggaatcgttttgattttgctctctccgcgctgggcgtcatcgttttgatggcgcattgtgcttcggaactgaactgacgggtgatgctgtgcagcgaatgtccgcggaatgtcgccactttgtaatttgttctcttgttaattgaactgtggagtcatttcatttctcggtcgcggcagcaaagaaacttcttttcctggacttttagcatgcaggagattcggctcagctggaatgtgctatttgtaagagctggatcatataggaaacaagtgacttatttttttcccctgagagagaaaaaagagcatgatcaagaatcatctttttgtttctgagaaatgcagaatttagggaggaatgtatctttgctgggttgatccaggcttgagttcagaccattcatgcagttctttggttaatttattactattttgcttctaaatataggtttgagcttctatgcatgataagttagcttatttaatcttatttgggcttcatcaatatgttggctagttttcacagcatcatcaatttaccttcatctacttttatgttttaattttattgtcatgactattttctcgtcaattctcctaccgtctttgcattaacattttcactcattaggggtgacctctcttctatgtgtcttctgatctaaattactctgaactgacttccagttgaag

SEQ ID NO: 90066 - DNA, 707 bp, Eucalyptus grandis
  Intron number 3 from transcript Egrandis_v1_0.017216m (loc us Egrandis_v1_0.017216m.g) derived from phytozome v7.0 (c hr-ID scaffold_6; pos 21250236 to 21250942)
ggtggctactccaacgtcatcgtcgcccattaccggtaacctctcgccttctctctttccaatttttgttcgtttcttttttgtttttgttcgattgaaagacagagacggtacaatgcacgtgtaatcggaatctctatgaactattgttgtcggatttccatggaagagattccaatgcacgcaattcatgtgagtttttgcgcttcgtactttatatgtcttcaccatctcgctgaactcagggagagtaaattccaaagagaaaaaaaaaaagactgacccgaatggcattgaactcaaaaacaggggagcctatcttttgaccatgttgattatgaactgccacttccgttctattcgtcacatgattaggtagacctaaatataagttgttttatcattctgattaaactaacttacgaaaaaaataataatagacctatgtacggggactgtgaaaacgttggacagaaaagtcagttcaatctggtgacccctttcgacccatgttcagcccttttaggctccgatttcatggaatggacgagattgagtaacaaagccatgctcgtcaatccagaggacaacataacacgatagaccgtttgatacgatctatctggttgaataggtctaaaacttagcccgctcgatgattgcactaacttgaaatcctttggtccgggtcgcttgcttgtgcagat

SEQ ID NO: 90067 - DNA, 991 bp, Eucalyptus grandis
  Intron number 1 from transcript Egrandis_v1_0.002839m (loc us Egrandis_v1_0.002839m.g) derived from phytozome v7.0 (c hr-ID scaffold_6; pos 18863528 to 18864518 reverse strand)
ccgacagctgaccaccaacgtttacgggaatcctcgtatccctctctgcgttgattccccgcatgtgcttttttgcatctttcgatgccctcctccggattcttttctttctttttttattttttttccttcacttcttttgccttcccccataagcctgacgagttggtctgtcatgcattggactttctgggtggattggctgatgatgaaaatcaaatggaaaagcggtcggatgcttgatacgcgggcatttaggatggttcaattcgcggaaaatcaatgatatgaaaatcattttttaaaatattgtcatcgtccaaaaaaatgtttagacacgaattattatcgatgataaaaacctttttcattgattaattatttcaaatgatataacagataattttcaagaagatgtgttctaaatcattcatttttcctaaaacaaatggagttttacttgaaattcgattggtttgattcgccccatatagaatgaagctatcattcctgtagtactggttttaggggagtaagagatgggcagtgattcaaagtagttcgagtaacaacttctaatgggtttttggccatttgttttagtgatcggacagttcaaataatttcaagacaaccttttcttcaccttttggaaaggtattgaccgtggaagccgaagttaggtgaagtggctgtttaaagcattgagtttgaatcgatggtagtgacagcactccctttctactctctgctgattaaagtctctttttaccactgctgtgatgggagtaagctatcctttcatttgtactaaagtagttctttaggttttcttggtacttatggcaattgaattaccaagaacggaattctgccccgtctttgatgtggaggggaagtctctttgtttatatatagtaggtttgactggtatgagttccttaagtacaatgtagatagccaaagtgattcgagcattgcaacagctgac

SEQ ID NO: 90068 - DNA, 625 bp, Eucalyptus grandis
  Intron number 3 from transcript Egrandis_v1_0.028988m (loc us Egrandis_v1_0.028988m.g) derived from phytozome v7.0 (c hr-ID scaffold_6; pos 43654929 to 43655553 reverse strand)
tacttgacaaccaggtcttgttcagtttctggtgatgcatgctgtaacagtgcaaacaattggaagcttcaatctcatttaacttgttgcactatttttctttaaaaaattgtagtcataacaactgctggaggacttttttagctgagtcctgtttaattttacgtcatatcaaatgagcaatgtttcacttctttcaggattgttcaggttgcttgttcagctgcaaacctctgttttatgcaacttttgcttatattatgtttgttttagacatggctattgccattaacgtcagttcataaagagaaggagaaaaattggaagcatttgttacctttgaacttttgcttgtcagtctacatatatcgagctcaactgttagggctgatagcctgataacttacccatcctcaccctgccactgagggttttggctgtgtgcatggaaagtctgttttttggtcttcggagatttttttttttttttaaggggtttggggggggcagggttctgtttgtcattcttgcatgtgttgcacatttctttggagttgagctttttgaaacataatgagttctaatttattagccatataaccatcactacaatcatttacaggtt

SEQ ID NO: 90069 - DNA, 530 bp, Eucalyptus grandis
  Intron number 2 from transcript Egrandis_v1_0.018751m (loc us Egrandis_v1_0.018795m.g) derived from phytozome v7.0 (c hr-ID scaffold_6; pos 27196177 to 27196706 reverse strand)
gatttggagcagcaaagaggcggtgaagattccaggtacctttttctcacttcttttacttttatttttcgttcttttagcatagattagatgctatagactgtcataacctgatgttgcttagagtggaggattgatgaatcattttgattctgagactcctagggtgcacaaatggtcttcgttcaatcttaccccggaacttggatcaggcatcaaaaagtaaacaaaggtgaaataatctctagctggggcaatggattcttcgtcgacttatccaattcaacacactagtttaatcttggaccgctatagttcaagtttatttctaggtgtccacccaattaagtttgagattttgtttggtccagatagatctgacttgtaggaagatgcattcttctgatatattagactgtcccatagatggcgaagcgggttagatatatcttacaaagttagtttgtggttttttatacagattctcattgtgtaaatgtcgattttgttggtgcaggagtgtgcatctg

SEQ ID NO: 90070 - DNA, 942 bp, Eucalyptus grandis
  Intron number 1 from transcript Egrandis_v1_0.026494m (loc us Egrandis_v1_0.026494m.g) derived from phytozome v7.0 (c hr-ID scaffold_6; pos 24152341 to 24153282 reverse strand)
gacgttgatcctcgtcaatacgaacaagtcgtgagtttcgattttccttccttctccttgtctgatgctaaatctcggtatcccttgagctcccttcctctccctctctctctcgaaggcccgatcatcggctgcggttcgaattgcgatgcgaacatctgtgcgctgttctcattcgtcgatgttgctctggcagttctagttttttcctccttttttttttttttcttttggtaacttcgattgctgcgccctccgctgatttttcatcgccaggttgctttgctaaattactgatgcttcacgctgtgatttgctgggtttcatgttgaaacttgagatttgattggtgggaagtgttttaaaagagaatcctttgttttatatttgcctgcggaatgttaattttagaagccatggagtagacgatacttttggtttaattggaactgtgcgtgagaggctaccgatgactctaggaagctcgattaggacgcatgtaatgataaaattcaatagtataaacaagtccattatcctgggcactccatttcaaaagcctgctggttcttagcaagctgctttccggttcatgggcaattgatacaactttaactcaatacaaggactttttgatgcaaataatgaccgtgatacttcatttttgcattgttttttagctttcggtatgtgggcattgataccgatagttccgtaacttttgtggttgtcatggatctgtgttttgccatgtgtctgaataatcgttctccaatggttccctaacttccgttgtggccattaccatttcctctaaataaagacgaagcgacacataagttctgggttctttgcataaaatttgcgtgggaatttctgaattatttgactttcagtttacttattcgtactttttactcttgtgcattttgcagactatta

SEQ ID NO: 90071 - DNA, 754 bp, Eucalyptus grandis
  Intron number 2 from transcript Egrandis_v1_0.019495m (loc us Egrandis_v1_0.019495m.g) derived from phytozome v7.0 (c hr-ID scaffold_6; pos 37886810 to 37887563 reverse strand)
ccggttccctgccgggggttgtcccatttttcaaggtcggggtttttcaagattggatttttgtaatctggggcggttcgcgttacgttcctagcgtgtaaatttcgtttgggtgtgcgagttggacgattccgtttcgttagtaggaagtgcaagctggtactgaggaggcctttcgttgagcggtgacgtgcatatcacatgcttgtgaattttcctttatgaagcctttaactaatagtcatgcatggggcatgctagatgttatcttcactcttcaggatcggtagtatgagactcatgactgtatatgcatccttatttccatttccctcgaaaatgtcgtcttttgccgtttctagtttaacttttgaaggagtgaggtcggttgcatgtcatttagttaaaagaaaagaaaaggaatggaggatgttagggcgtgagacatgacttagttgcaatactgcaaatttaatcttattttcgtgcattcattattttgacaagttcatgtttcgatacttttgttgtcgactctgcctcaacggcatgaattttttaacttccctgttgattagactcatttgcatctttttgctggtttgaaatatgagaacaattctattttctttgcttcctttatttaattgatcgtgctaagtttacaacatgcttttgattttgcattcccaacttttccttccgttggctgatattgggtcatgaacattaccttatccttgcagcatcacgt

SEQ ID NO: 90072 - DNA, 879 bp, Eucalyptus grandis
  Intron number 2 from transcript Egrandis_v1_0.023379m (loc us Egrandis_v1_0.020753m.g) derived from phytozome v7.0 (c hr-ID scaffold_6; pos 43775726 to 43776604)
ccgttgagacattcctactcctgctagctttgaaggtactgactgtactcgtctctcttctcgtttatggttgtgagaacggtgtggctgttttatttaaatttttgcttttcgcaatttaatttctcgctgggaagaactttttaatttacaaaattaactagacttcagcagcaatttgtgttatgccattctatccacagttatcacctttaaggcaaacccattcctttgacaggagtcgggatgtgaaaaggcagcaatactcgatttattggttgtagtttttaagaatgctaagtggtgtttctgctagagtgcagacgaacttcaccttggatatgttttttgttaatctttcatgaggatgaagccctttctttttcagtgatcgatgtaacccacctagacatccagatatggcagacattctcctagaaaaatttctgtattgatagtaaagaggggagagaataataggtcaaggtcgtttttctgttgtcttcgtgcatacacttggtttgcaactgcaacagcattagttgggggggggggggggggggaactccctggtaactagtgaatgaggtttacttttctccccgagggaaaataaagtaaagcatctcctcatgcctgattttcctttgtcagctgcattaaatggatgaggcattatttggtgaaacaatttttctgttgtaagttgcttcctcaacacaaatcacgtaattaatagtatgtgactatgttgatatcaaaaacgaattgatgtgacttaatcacccttctttcgccatgtcagtccttttatttggttttgacaaagttactctgcaatcaggtcagatacccggacagaataacattgattcgagg

SEQ ID NO: 90073 - DNA, 768 bp, Eucalyptus grandis
  Intron number 2 from transcript Egrandis_v1_0.008545m (loc us Egrandis_v1_0.008545m.g) derived from phytozome v7.0 (c hr-ID scaffold_6; pos 34391663 to 34392430 reverse strand)
ggaacaccctcctcaaggaagtaggcgtctttctttgtgctccgtggcggaatacttgggctgggttttgtttgtctagtcgcgatgtcgtttgtttcgccgggcattgcgaaactgtgaggatctcacgggaagtggatagtagcggttttttgtttagttcttcggaatgctaaatctgcccatttgttcggattctgctagttctgcctgtagactcggggttgcttctgattatgtaaaacagacggtcaatttgtagttctatgtttcccaaacgttcgacgtgttcgggactctagtgttgggtcgattagctttcttgtggatttggtgcggcgctaggtatgtgtgatatgcaaggaagacggcatcttgataggaaacgcattgttacacttttttgcgattcgttgatcgaattgagtttcagcaattaaggagaagctgtgcctgcactacctgggtggttggattgtctttcattcgaaacttcacgatgttttggcaaagaaaaatgcctccaaaatatactcgttggcctagatgttttataattagtgcgtgataatttttgcttttgaaggtagaataccatcagttattggattagcctttacgcagctttatgcattagtattttttgatactgctcattttaccgcagtaaaagttctcatgtgaaaattgcattttgaacgcctttggatttagcactacttgatgtttaaccaattgctgcagcaaattcaaaacccaactgcaatt

SEQ ID NO: 90074 - DNA, 644 bp, Eucalyptus grandis
  Intron number 1 from transcript Egrandis_v1_0.030627m (loc us Egrandis_v1_0.030627m.g) derived from phytozome v7.0 (c hr-ID scaffold_6; pos 40789281 to 40789924)
cggcctcccgtctcttagcttcttcttacccgacggtactctctctgtctctgtctctgtgattggtgtttagtttttcgttgcttgtcgatagctactgcgttgttgccttggcgatgcaaattcatggtactactactactgggtgtaccgtgtaccgaaaatttgtttttttttttttttaaagaatatggtttctggtgaatttgacagttttagatttgatgaaattaactgttattgaccatcttaatcgctcgaatgcatcgtccttcccgtgactttagtggggttggcaggatagttagttttcagcttaaaatttgacttgcaagctttctgatattcagagtactccctgcttctttaaggctcgtgatagtagctctgtttcctttttgacatgacagtgtttcttcaatttgtgattgtataaattctcctgtttgtgtagtcacttttgctatatttagatttagatcggataatgtttgtagcaatctggccttgtgtaatgggcgaccaaatcatcaataatctgggataaggttgacaacccactgtgtctctcttgcatatgcttgcttgtccgatacctttctacattctctttacgtttgcaaggtcgttctcgtgtgcaggtg

SEQ ID NO: 90075 - DNA, 408 bp, Eucalyptus grandis
  Intron number 1 from transcript Egrandis_v1_0.003242m (loc us Egrandis_v1_0.003242m.g) derived from phytozome v7.0 (c hr-ID scaffold_6; pos 29873940 to 29874347)
gcacttacggagttgctgcagagccacggcgaaaggtcttgattgcacgaatcaaataaataggagcacttgattgccaaaaaaaataaaataaatagaaggaccggatcgcatgaaaaaaactgaaatttaaatatcaaagcttgaattattcctacctctaatcatggattatgagtattcttctggtgaaggagaagctggtaaagatgttccttttatttatttatttcttcatttccggggaaaaaaagaaatagattgcttggtgattatattggtcggtccggcttttgtgggaggctgctcggtcatcatcgaaacgagcttggggttataaaaccaggaagaatgacgatttgctgcttcacagcagttcagattctcgaaagacacatcaagaattac

SEQ ID NO: 90076 - DNA, 462 bp, Eucalyptus grandis
  Intron number 2 from transcript Egrandis_v1_0.003242m (loc us Egrandis_v1_0.003242m.g) derived from phytozome v7.0 (c hr-ID scaffold_6; pos 29874326 to 29874787)
cgaaagacacatcaagaattacagagtctcctcaggtacacacatcgtttttcttttgccacttttgctacttctgctcatagaaagattatgaatgaatcaccgaaaccttaatgcatgtcatgagttggaggatggcttctctctgttgtttcttctgtcatcatcttctgcattatccggtttcaatgggtttcggcgagaagctttctttcctggggctagtggaagactagagtatccttctcgacctctataagtccggtttggaatatgcgcaggttgagattttggctttgttaaattgtcgtggcaagaggattgcgtatgctgaatgcaccagttaaactaatgcttacatgtacatggacttactgttcatttttcaatcattccatgattcttagctaatcaaaatgttgatactatgaaactgatccttcctcttaattttgaaagaaa

SEQ ID NO: 90077 - DNA, 441 bp, Eucalyptus grandis
  Intron number 1 from transcript Egrandis_v1_0.015521m (loc us Egrandis_v1_0.015521m.g) derived from phytozome v7.0 (c hr-ID scaffold_6; pos 8585621 to 8586061)
gagagaacagctacgctaataactcccaagctcaggtttgatttactttgctcatcttggttatctccctctccttctgtcccgttcatctaagatgccctgtgactccatcgtgcgtatactggatctgtctcaacggtttgagaaaacaagattgatctagctctcttctctccttgacaaagtcagagcttttggcgaccgaatttcatttggtccgagagatagtccgattttccttttatatagtgttcgtcaggcttcattttgtttctcgtaatttcctctaatccatatgccctatatctattcatcaaattcatgttaatgcttaaaagtcttcatgtaacatccaaaaggaaccaatggttttgatttcctgaaagttcagaaaaaagaaagaactctgaacaaaggtgttatctatcatgcaggccatac

SEQ ID NO: 90078 - DNA, 691 bp, Eucalyptus grandis
  Intron number 1 from transcript Egrandis_v1_0.013252m (loc us Egrandis_v1_0.007171m.g) derived from phytozome v7.0 (c hr-ID scaffold_6; pos 45737355 to 45738045 reverse strand)
ctgatatacacgctgataattcttctgcaattgaggtctctctctctctctctgtaactttgtttgagttcttgtttgtttgcttttgttctttttatgctcttgtttgtgttttcttttctgaaatgttctgtaattttgttgtttgtctcattggccaaaatgctggtgctgaaccccgtttttgtggctctgtgggaatcaaatcagcttgaaacttctagattgggaaagggaatttgaaaagtatattttttatttatttttctttttttggtaatagcttgctgtttgctgtacatatcaatatcgctaatgtagtattgttttaattattgttttgtgctggatttcatgttctggaaagataggaacttgttcggtccatttaccagtatcacttctgggttgttttacttagcacagtgagaacttgcagatcacagagtatgaccataactttgctacttgcaaatgtttgagtcagtctgttcaaatcaaatcgttgttcattggacaaattgtgacctccgtttactttcaactgcatctctctttctctctctctctctctctctctctctctgtgaaagataaccttgtaatccatttgtattggtaattgaattctctgtgttttatggaacttgttgcagttggaaactctttggacatataaaaggaggctcaa

SEQ ID NO: 90079 - DNA, 844 bp, Eucalyptus grandis
  Intron number 1 from transcript Egrandis_v1_0.003373m (loc us Egrandis_v1_0.003373m.g) derived from phytozome v7.0 (c hr-ID scaffold_6; pos 9686514 to 9687357)
cttactacttgaaagtgcttcgaaaagctcaacaggtatgttattgttttaattttgttgattgtattcaatgttttgactgcagtttttgtataaactgtgaagtacttcaaccggtgatttgaagatcccacatggttgcctagaaatttatgaggattgaacttgcgctgtctttttatggttttttttattttatataaatatatccagcgaaagagcctttatatccattagatgtttctgcatacgtaagtgtagattgtatcctattgaagtaatccaatgtttgattcaacttttacacagtatatatatatatatatcatgaggccttcaaccaaagaagaaaaggaaattttacaaatgtttacaaaaaaactctccgtgatgcaattagaagtcaaatttttgaatgctaatacagaagtataagctaaagaataaatgcaaaagtcattgtaaaatgcaatatgtccagtaagatacactattatattgggctgccggtgtcagaaaaatgtagatatttgaaagccttttggcctcaataagttttctaatttattaagtgttgaaatgctggtaaactcaatttctattattctgatttgtttctgagatgtgctgatacaattgttgctatctgtgcaaacttagattttgcaattggctttttgtggccttgaacctatggtatacaaaaaggtcatgaccgcagtggtcatatctttgaatcgtccaatgatcttcatcaactcatcctgttcttatctttcttatatcctaaattttgctctcaattacagtcaaagttaccaggaaagaaattgagtccggagaa

SEQ ID NO: 90080 - DNA, 626 bp, Eucalyptus grandis
  Intron number 1 from transcript Egrandis_v1_0.025095m (loc us Egrandis_v1_0.025095m.g) derived from phytozome v7.0 (c hr-ID scaffold_6; pos 42410402 to 42411027)
cgatcgtttccatctgggtattgctccctctctctctctctctgtcgacacgcgtatgcaccaacaatttgtgaaggatcgactgtatgtaggcttttgatttaaatttcagccgtagatgcagggagttaaaatccattttcaagttaatttttcaggatattaccggctaaattggaacacgtagttaattttttttgtaagcggttgaatcatctgaaccggtattttcagttttgtggtgtttgaagatgaaatttttcaatagcaattactgatacagcatgcttcagctctccaaaagccttgggcaagatattaacatagtagccatgggtggccggagatcctaataattaatgaaaatgccgcaagttctttaattgagatcacctgattagataggcattttgcccctttgcatgactatttgtggtgaattcgatcccttctagctttacacactttgctttatcatgagtttaggataaaactccacgtttctttctgctgttatatgtctagtatcttcaggactatttcttttgctcttaaagttgggagtgattggttgatgcctgttcgttccagctccttgtcgtgctgataccaattgtcggtttggg

SEQ ID NO: 90081 - DNA, 537 bp, Eucalyptus grandis
  Intron number 1 from transcript Egrandis_v1_0.002738m (loc us Egrandis_v1_0.002738m.g) derived from phytozome v7.0 (c hr-ID scaffold_6; pos 41175231 to 41175767)
ccaggatctcaagcaattaggcgacgattccggaggttcggcgatctctctccttctctctattttcgtgtttcgtttcgttttgagatgattgcggtttccgcagatctgctttcactcgtttgtcgaggaagcgtggtgttatcgtctgttaacttttgctctttcctcgcgcgctcctcctcgtcttcttccatttgaagttcaactgatgctgataagctcgagaattgtgtggatgactattgatattctctgaaatgttttattgcgagcagagggaaatcgcaacctcaaaattgttcagtagactgttttattcttcttggcgagaattctgtttgatgattttctggtctcgcatatgattagaacaacaatgttcacatccttcttgaacttctgattactgatgtatacattctcccgctatggctgatatatgaatttccggaaatctgtgattttcactgatttgtctatgctaatatggatgttcttgcgaagcaggggacgctgtgttcgacgcgtcacaat

SEQ ID NO: 90082 - DNA, 1046 bp, Eucalyptus grandis
  Intron number 2 from transcript Egrandis_v1_0.002738m (loc us Egrandis_v1_0.002738m.g) derived from phytozome v7.0 (c hr-ID scaffold_6; pos 41175876 to 41176921)
ataaggaagaggtgacgcgaccctctccttctttctcatctttagttttctggtttagtttgtgcatggagatgtcctgatgaatactgcatggagaaatactgatgacttgaattttcgggatagtacctcaatcacttggattttatatgaactggctttgacatatgtcaatttgagtgaatccttatttatacattcatcatttccagaagttttgagttccttttctgttctcgtcttctttgattgcaatataggtagtgctggaatatcttgaattctctatttctgcattggagcgtgtattcgtgaaaaggttactgttctacaccatacggagatatgacttattaatctggcaatggtgcacatatgcaatatgcagtgtccttttggccgtatatcattgagatagttggagagtatgtgcaggtttatcattatagagtatatgccaagtagattgctcatataaattgatcattaaaaccagtaatttttggttccacctttctcgtcgattgctgaagtttttatggtttgaattggctctgaaaacttagttacaactacacaacgtacttatttccaaatgcgattgtggcttctatcaaggcagtgtttctcatttcctgaaggaagttaattatgctttccttgggtttgatgatgcgatttgtctcatgaagttgaattaacaagtgcagttatgcctcttcgtcttattatatataatgattgaaacggcgaaattagctcaaggtcaattgaagaacagttgcgttagacataaagcatttttttcatcgttaatgtgttcatgaaatgttttgacactaagctttctagctcttcctttgcatgctcgtttcattttccgttcactttcgaacatgatcaccagaaagcatttcttatggtgttctgatgattgctcaatgtactttggctataacaatttgctattgtctcatgtttcatggatgacggagatttcctctgttgcagggtgaggacttaagatctttatccgaaattgacga

SEQ ID NO: 90083 - DNA, 641 bp, Eucalyptus grandis
  Intron number 1 from transcript Egrandis_v1_0.046522m (loc us Egrandis_v1_0.046522m.g) derived from phytozome v7.0 (c hr-ID scaffold_6; pos 19895488 to 19896128 reverse strand)
ttccaggtgctgaaaatctgaacgagctcaagattgtaagttaatcactattcctcactagccacattactacaaataggcacgtttagttttcttcattggttgtttgctatctaatgaataaaaatcattgtttgtcgaacttgggctagcttcttagttggaagaaaaggtttgaaactccatcatcaaatcccaggaccaatccgaggatgagatggtggtaatttaataatttgacctgtgtgatgaagaacttctgtgcacattcaagcaagaagtttgaattgtctcacttgcctatttaagaagaaattgtacatgacatggagactatcttccagtgtttgttatgttatacatggaggtgcggtcccaattaattatataggtatagctaaggtatcgcctagtgggttcattcttcgattagggtcaatttaatgctctaaattcactattcgaacgtgctcactgctatcaactggcatttgtcttatgtaaattttcctaataacctattacgccactccattggcctaagttttgaaagtttagcttgactaaaaaattaaacattttgggttcactcaatacgtctttcttctgtcctttttttgaacagacaacgatagtattga

SEQ ID NO: 90084 - DNA, 667 bp, Eucalyptus grandis
  Intron number 2 from transcript Egrandis_v1_0.023012m (loc us Egrandis_v1_0.021940m.g) derived from phytozome v7.0 (c hr-ID scaffold_6; pos 17943844 to 17944510 reverse strand)
ggggtgttcgacatctctaactttggttggaacaggtgaattcctcgctgcattggccattgatgaccagtcacttcatatctttcgcacacgcaatgagatctagtacagaaagttgttctcaagaaaaactgaatctacatttttcttaataaggagagcgaaaatcttgtgcagaatatcttctatttgatattatcaatgagatgcaacagaaatactgcacaatgtggacttcgacccacatctgcaatgaagtcagtatgttgcaaatatgggatatctttcaatactaactttcagaaggaacctactcaataatgtatcacgcgatggttgttggagatatcttaaacagctattctctcccaaaaaatcatcccttgcaattcaaattttttgaggttaccttttttttctttccataatttgagtcattatcatggttcttgtttgaaagaatctcaaagtcccttttctactgaatacatgatgttacgtccttcatttcctctgaccttacctactcaagaatggtttatttgggtcgtatgcttggtaacttaatgctacaattgcaggatacagggaaaaagtttttgcaataatcggcgttaaggtctatgctgcaggactctacataaacccatcaatcttttctaaactg

SEQ ID NO: 90085 - DNA, 332 bp, Eucalyptus grandis
  Intron number 1 from transcript Egrandis_v1_0.023012m (loc us Egrandis_v1_0.021940m.g) derived from phytozome v7.0 (c hr-ID scaffold_6; pos 17944563 to 17944894 reverse strand)
cactgcaaaagctgctgctgcttcgtcatcttcgggtacattctcgggggccttctttctttttcctgctgtttctctgcttcatttgatatgggttttatgaattgtatctacattgacgccttgcttgtttgttacttctgacccatcacgttagtccatgtaaatttggatgaatttctttattttcttctgaaaattgcagtttttgtcaggattaaagtgttctgattttcggaaatgaaaagagcccctttcagatgtagtgctgtcttatttcggttgccttgtttttctgttttttattgagcatgcagtagggagtgagtcat

SEQ ID NO: 90086 - DNA, 671 bp, Eucalyptus grandis
  Intron number 3 from transcript Egrandis_v1_0.038762m (loc us Egrandis_v1_0.038762m.g) derived from phytozome v7.0 (c hr-ID scaffold_390; pos 27790 to 28460 reverse strand)
gagaaggtgattacctcgctgttaaaggacccaaggtactaatcagctctatgattccttaattttaaattatagatgatatgtatttgctacgtactttccctcttgatttcaatatgggcctggttgcgatgggcaggcctggacaataagttaggcctaactttaaaggtcgccttggtctaagacaggtccaatgattaccttggctactcatgaagacctaaatgggaaatctggagaatgtttctattatgtcaaccggggtatccgagactcttaagcacttgtgtaattctttaatattagtcataaaatcaaaatttttacaaagattgtgtctcgaagcatactatagatacaaatttagataataatttattaactctattattgcaacaaattgttttcacgtgagtcagcccttctaaaggaatgtccacgcattatcatttgaaacggtctccattaagcatggatctaacttactcaacatcatcaatctcacacaatgtgcatcttggaacatcacaacatttcgttgggaaaagatacaggcgagactagtgcaatatatcttcttcaaatctaaaatgatcttgtatagtgacgatgttttgatcatctcttctcaagggacgactcaagtataagcccaatcaagctcgtgc

SEQ ID NO: 90087 - DNA, 934 bp, Eucalyptus grandis
  Intron number 2 from transcript Egrandis_v1_0.046064m (loc us Egrandis_v1_0.046064m.g) derived from phytozome v7.0 (c hr-ID scaffold_719; pos 3401 to 4334 reverse strand)
tccagagatccaattcctttctctcttgcaccaaagtaagtgttttctgtctttatgagtaatcggatctccaaagtttacatgattacagattgaaacgtgacgagctcatatgtcagtggatgctgattggtttgccaagcactatagaatgtctctgttttgtgtttttcgtcgaataatgttgcaatatatctagcttttagaagttacagacattgtctcgtggattggacaaaacatgtatcgtcataagaagtaatataattatttagcagttcatttgaggactgactccttagtgctcaaaaggagggaaaacagagaagataaataattttaaggagaactgagaacatcgctaattccttgattgtcttaaagaaccaagtttcactggaatataatgttgaattctgatcatatttgttcgtccaatctggaaagattgtcttcaggaagcactggagcttgtttgcatttataacttttgaagtcagaactgaatgctgcctttttttatcatcccgcacgtgcttgaccaagcaaaatttcaaatttttctgttttcacttgttccatcacaatataaagaatatgcttgaatatgcgagaaattgaccttcaagttgataactctggattggatgaacttgtcaggccatgtgatgttcaattatccaaattcatgtgatagttgactgtccttggttgtgaacttttgcaaaccttgtgtatcgcagtgcaatttatacttgagctgttgatgctggttttctgttcaatgactcgagttggtttaaacttacttttacagatatctttctccttacacaattactagaaactatatttcatgctaagaataattgttccgtctcttatgttcttgtttcataatgtatccacttgttgatgcaggataagcaatcca

SEQ ID NO: 90088 - DNA, 763 bp, Eucalyptus grandis
  Intron number 1 from transcript Egrandis_v1_0.017837m (loc us Egrandis_v1_0.017837m.g) derived from phytozome v7.0 (c hr-ID scaffold_6; pos 50215913 to 50216675 reverse strand)
actgctttgttaaggtaggtacccaaggagctctgtcacaatctgcattcactataccgggcaaagtgatttgggatttacttgaaagttgtatcttgatttgctcgtcacatgtccttgtatatggtggtcagctgatgttaaaatgtttacacacccttttggcaagatctgtgatcatcttcttccccagcaaaatagacgagaataagaaaagacggagaggccaaagaaaaaaaaaagttcttgtcgagttggtggcctaggttagcagctgcaataagtgaacttctttccttttgatattgctaatttttagaatgctgggtagattacgaagtcatacgggtgcctaaagccatcacgactttgtcttttagcatactaatattactgtcttactagtaaacacttgctgaagttttggaggatgctttttgagcgtttgacatagttgatcctgatctttagtgctttatatgctaaaatgaagagcatagaagttcatagaactcccgtgttcaggttttagacagaactgctgtaataattctggtaaattgtcttcataagatgattgtacgagcagtccagttaagcccggattgtgtgtggcgaggatttttttgctttgaaggttaggatgggtttaagtcatcgcggtttcttttacaattgaatcttgatcacttacattaaaataaatgataaaacattctttgaattcacgattattttttaagatctgatgagtgatgcaggg

SEQ ID NO: 90089 - DNA, 897 bp, Eucalyptus grandis
  Intron number 2 from transcript Egrandis_v1_0.025550m (loc us Egrandis_v1_0.025550m.g) derived from phytozome v7.0 (c hr-ID scaffold_6; pos 24285475 to 24286371 reverse strand)
ttaccggaatcagtgcaggcttggtttatcagaaggtactaatctttgaatttttgaaaactatttttgttaacatgattgcttatatcgcttaaaataattagtcattaaaatttttttcatcatcaataattatttatgtctaaacgttattgtggatagtaaaaatatttctatttcattcatttttatagatgatacaagcaagtcatttttaaaaagatattttctaaatcattcatttttcgcgatacaaacacacccttatttatgtttgctattccgttcttgtagaggagtttcttattgtgcaaattatgagggtgacaatcagggtcatctgtttgattcatgggaaagtaggaaagaaatcaacaccggaagtatctttcttgtcgtggttgttatgtttggcctgaagtcgccccatattaatatgatttaggaaccggaagaaaaaggtttttcaatgatctggacaaatccttctcaaaatgatcctagatgaatgcagaggatttcttatttgaagtaacaaggacaaagtacgcttaatgtaacaataccggaaatctgggacagtgactgtattggtaaagaatcattcgaaaaatgcaatctttcatttggatatacttcaggaagtacagatttatcccatttactcaccatcataggccatgatgtagtcttgctggggcttacttggtactatgcccttgagaacaaaatctgtccgctgctattgcttgataacagggacattaacttcaatctagattacacaaacatgctttctttgttaaattgctaccatagtgctaatatgcatgtatgtcattcttgtgctatgatatgccagtgtggatcagagctggtggctgccctgtggataac

SEQ ID NO: 90090 - DNA, 394 bp, Eucalyptus grandis
  Intron number 1 from transcript Egrandis_v1_0.025550m (loc us Egrandis_v1_0.025550m.g) derived from phytozome v7.0 (c hr-ID scaffold_6; pos 24286446 to 24286839 reverse strand)
tctctcctttggcctccaaaccgtctccccgccaggtacacagtcgctggctccttcttcagcgaatcacttagttaataatattcttgaaagtgccattagcccgagtgacagccttggcgctacatgtaaaaactggagctgtgttgacggaaggcttggttacgctctatacgaaaaggtccagaactagattcgcatcaattgaaagaggttgaagacttgattacgttatgtacattttgatgtgcttttctatgaattggttgctcgtgaagttgctgaattgccttaccgttataagttctgcaatggtgggtttattttattttttatttttttggatgtctgcgggacaggcgcaagcattggccgtgactctatcgtatctgat

SEQ ID NO: 90091 - DNA, 585 bp, Eucalyptus grandis
  Intron number 1 from transcript Egrandis_v1_0.041108m (loc us Egrandis_v1_0.041108m.g) derived from phytozome v7.0 (c hr-ID scaffold_6; pos 3232933 to 3233517)
ttgtttggaaggtaatacgccgactctttttaatttcttctagggaactattttcacgtaatgatgattagcgaatcaagatcatcttataaagctttactctttcacagaattatagaagatggattagtctagaggaattactgatcgaactgataaattcggccttccgactcgattcatgattttatccttcctaaggacccaacagagcaaggaatcttgtccctcctataaacacaagaaattaaagatgcctacacaattgacgtttgagcttcgaaaagtgagaatctgacaagacattcacaactactattttgtcatttttcaagatgctcggtacggcaggtatcttggttgtgtatcatttgatttgtccccgagagttactgtgcaccatttcctaaatgatgccttatatatttggtccaagcaaatagtattctggattttataacataataaccttagtcactaacaatacacacacatgtgtagtaaagtagagattaaggttgcttaatagtttccgatgtatttttaacagcacccaaatccagttggccagagctatttggtcaa

SEQ ID NO: 90092 - DNA, 1069 bp, Eucalyptus grandis
  Intron number 1 from transcript Egrandis_v1_0.022282m (loc us Egrandis_v1_0.022282m.g) derived from phytozome v7.0 (c hr-ID scaffold_6; pos 52420177 to 52421245 reverse strand)
ctccctcctgcacgccaccgtcacctcttcctcaggttctctctctctctctctggcttcctcgccctctcgtttctaacgtcgttggtcggagccggttctgtcgttccgtttgaattgggtggttcggtggcaagcgggtaccggcaattataccagtgacacttataacgctctgcctctctatctccgtacgtgctttgcgggattatcttacggcgaaattcagaacctgaatgacagcaggtccaagttcacattttgatcgtcctacttgaaaaactgcactgcaatctccagtgcccaagttttcttggcatgcattattcgcgaattcacggtccataagaagccactctgcagtattctgttcgcactgcttttgtcctgcctttccttgtgtggtggaagctaaaagactaagtccttctctggcgttttcggcgagttaacaaactgatagtgtcgagtgccttgtcactgaattgttaggagtagatcaatgctaaattactgatttccgaataatagtaggtgcaatctcctctaatttggagtttcaattgtcttgaaattgtacaagtctttggaaggggtttcacttgtatctggtttcttggacacttcgctctccacggaagagcataaggacatctgagggagcggcgataagatatcaaggaattgaggacaattagagatgtgtgtgtgtgtgtgtgtgacagagagagacagagagagcaccgttaaaatactagcctcgttggagcatccttttttgcacatgttagctctgattgtagtgaattgaagtgtccatgttcttttgggtgtattgcttaggtttgttgaaacttttccatgctgaagatttctcttctttttcaaggctagatgtctgctcactttctattgacttctatatgttttgcatgcttgacatccggtaaagtgtcagctgcattcactgtattgattttttggttttattcatatatagattagaccataatagatatctgtttcctatgcagtggtcttcattttacttaatttgtggctaaaagat

SEQ ID NO: 90093 - DNA, 630 bp, Eucalyptus grandis
  Intron number 1 from transcript Egrandis_v1_0.010735m (loc us Egrandis_v1_0.010735m.g) derived from phytozome v7.0 (c hr-ID scaffold_6; pos 46058662 to 46059291)
catcgtccgagctttcctcgacttcctctccgctggtcccccccccctctctctctctctgaattgatattgcgcgcaatcgtcttgcttctgcttcttcatatgcccctgtctcattcttagtcgataacttctcttgcgacggctgataatcgctccgatcgacatttgccggtggttgccgtgcgagtgcggtacgcgatctttaggcgcaattcgcaagagttgtcctgggaacagcaaaaagaaatctttttgttgttgttgttgttgttgtttttcttgtatttctgtaagaaaaagtttcttggtagaggtaggtgtggcctgcgccccttaacgagcgacctgaacttgtcgagttacgacacggtcaattttttcgtctgcatttccatggatcgtttggcctgagaacgccgatgctgctttttctttctgtaacttaatggtgttctgtggggaagaagcaagaatgagcgcaattcgtgccattctccttttgaattattgttcgagcgccatccgcatgagcgaattctcgtttcttaggattgctgtcgaagcttatttccacgtttgattgttgtttttcttgcttcggaatagttgagcccacgcccggagtca

SEQ ID NO: 90094 - DNA, 563 bp, Eucalyptus grandis
  Intron number 2 from transcript Egrandis_v1_0.010735m (loc us Egrandis_v1_0.010735m.g) derived from phytozome v7.0 (c hr-ID scaffold_6; pos 46059502 to 46060064)
gcggatcgaatatactaaaatcatcggcatctaaggtcgtgctgatcttttcttgcaattcctattgacttcttccttatgaatgtgctgtcgtattttccaggagtatagatctacaagagaaccttaataagtttttttttttttttttttttaagctagatatcttttatagccaactttactttgatatcttacctatgggtacctctatatccattgggggctctgaattctacacttggggggtccccaggtcaccctggtttcctactaagttgtaggaggttttgagcatccagaaatatctattcttgaatctaaaaggtgagaactaaggaattctgtcttcaatatcaaattttttcagggctcttctgatatttcaggtaaagtttgcgagacttgatgcatctcttcatactagaagaggggctggctgtgaatttcaatatgttggggaagggggttaacaatcaaaatttttaagggaaatgacgctatcacatttgtctatttcgggttttctctaactttacttttccattatttgcttgatcagg

SEQ ID NO: 90095 - DNA, 738 bp, Eucalyptus grandis
  Intron number 1 from transcript Egrandis_v1_0.022413m (loc us Egrandis_v1_0.022413m.g) derived from phytozome v7.0 (c hr-ID scaffold_415; pos 5712 to 6449)
cggcgcactcaaggagaattattttcttggtaagttgcgtttcttttataggtttatcgtttgaggaagtttgtgtccgtccattcctccaaacatgtgtcagactggcgatttaccaacgtggacgttactcacataaaagttattagtttaatagaaaagttgataaatttaaaaaaccgattaaacttttgtcggtaactcaagtaagagttgttaattatgtaagcatttttggtaattaaatctgataaaagttgtaagtcactctcatttaggtcggtaatgttttgtaaaagttaatgaattcaaagtgcttaaagagatatgcacataaaaattggtaacttagtacaaatttagtaatttgaaaactacaaaaagaattgttaaactcataaacaagtcggtaagttctcagcaaattatcttaaaagaaatccctgatcattttatttaccaatagtttttggcaactaccaacatttattgaaaatttagcaacatagacatagtctgtatttatgcatgtcatcgtctgggtaggtttatctagttttcaaggtttgagaaagcgtatgccaattagagcggtttacttgtttccttcacgaacatattaataggaaaagaaattgaaacaactgaaataacacttcaattccttcaaattacaatggttcttattaaattttgtgtgccattttcttcaatgaattggccctgctaggcgcttac

SEQ ID NO: 90096 - DNA, 867 bp, Eucalyptus grandis
  Intron number 1 from transcript Egrandis_v1_0.018731m (loc us Egrandis_v1_0.018731m.g) derived from phytozome v7.0 (c hr-ID scaffold_6; pos 27540285 to 27541151)
gcgatttggagctccaaggtaaacagaaaacaaaacccgctttgtgtccttgcttatctttcattctttcttttttctttctttgccttcggtttcccttttctatttttggtttggattcccattatgaatgcgcgtggagggggtcaattgcgtgaatttaatcgttgcctgcaaactctgtttttgctctgtaatggggcggcagaaacagagcacattcattgcttgagcttgaatctgccaaaacggacctaacaccttgaacatgggcatcggttcttcctagttagtggaagtaggaagagtttcgaagaatttaaaagtgatttgattcagaagcagagtcagatcgctccagtttatttctgctctgtttttgttaggtgagaactgtaggggaaggcgatgatactttttttttcctttgttttgacttgtcacccaccagaccagtgggcccatcgattataccttgttaattccgaaattggagctttttagaggtttccgtttgtccaccgggctttcgtttgtcgccatccactacgccgagcggattgacccatttgacaacacaaacagggtgtcttgcacgcataattaaaaatcggatttttatgatccaattattcgtctaatacaggaactgataagagagaatttaacgcctattttgaaagatcttcccttttcatagaatccgaaccaatcaatttaattttttttaaaatttttcctcagctcagctgtgtgcggaaagataatgtgcaagagatcatattgatgatccgatccgaggaaaatcttatgaatctttccatttttatagcagggagcactgttcagggaaagggcagcagcgaa

SEQ ID NO: 90097 - DNA, 1035 bp, Eucalyptus grandis
  Intron number 1 from transcript Egrandis_v1_0.010186m (loc us Egrandis_v1_0.010186m.g) derived from phytozome v7.0 (c hr-ID scaffold_6; pos 11899378 to 11900412 reverse strand)
ggagcgagttcgggggaggcacgcttcacatcaaggtgcgtcctttagcttcattgcgtcgctttggcttggtctctgtttggtctcgagtgccattctggatttttttttttttttttttttgggtggtttgagcttgtggtcactgatgctgagaggttttctgttggactaatatgtcgggtttggtacagtggaatggaatggaatcgggaaatgttggggaaagcaatggaatggaatgatgattccaagtcttggtttttgttgagtgattgcggaggacggaatggaaatccttgtgtttgagtgcgattcgggaagattttgggaggtttcatcttgtggcggtttggtaacgtggagagatggtcactgttcacgagcttttgagattttctggtctactgttgctgcttaattcaattcactgatgttcgattttgtggtaattaggggagatgcgaggttgtagcgttttgttgatggggtcgaatagccatcgtttgccagcttttggcagtttctgattaattcttggtaacttcggtacttagtttgagcttgaggttgattttttctaatggattcaaagtaccgaactggattaagtttctctctatctatggtccatttcttatcaactgaagtgccttgcttcattatgcttctagtggatttcgtcacttgctgcagtttcttttcttctgctttcatctgcttgtttgtacttaattaagctccacgataggtggtaccatggttggtcatttgagttttttgtgtctaggtttaagtggtggaagaagggcttagtgatttggttgctcgtataagttaggttgtttcgtttaatttaaatcaatttatcttatggaggcaattctagtctaggtgggtactgcctcatgttgatagttcttgtttttgcatctgattctgctaaaaatggaaactaaccactagctgtaggtatccggcttgtaaccatgagtttggattgctcatccaggtcagcaaagcccatagctggac

SEQ ID NO: 90098 - DNA, 883 bp, Eucalyptus grandis
  Intron number 2 from transcript Egrandis_v1_0.008874m (loc us Egrandis_v1_0.006684m.g) derived from phytozome v7.0 (c hr-ID scaffold_6; pos 3381518 to 3382400 reverse strand)
ctcttgccgattggctctccccctgtggggtcaaggtaaaagtcccccccaacaaatttcagagtaactttaagttaatttttctggaatttcatgattagtcctgctaaaataatttaccaagaaattattggtgtccccgttgaccaaatggggtgaattgcgttgggaatttttcctctagagatggatgctgatgggacttcatggtcgcgttgagaatttaatttagcgtggagaaaaaaaaatggagagccatattagcaaatgtgtgaatgcgtcatgcacgtgtaggaaattgacatttgaacaacttagtataatagttttatttatgaaatctttaaaaatgtttgcgtaatgagaaggggagtaattggtcaaaaagtacacgggacaaacaatatgtattgatttttatgaaaagagaacaaagtttttgatttgaaatcttgataggaatttgcataggatagagaaaatatttatattttaatatcaaaaaatgaaaaagaaaatagagcaaaagttacgaagttacccaattaaccatggttaaatgatagaacaagattacgtgtatatctattgggaattaggttgcttgcttttttagcaagaagctttcaatgaaaaagatcagaagaaaaaaaaaaaaaagtgtgaacgcgccaggtaggggtcgaacctacgactttctgcttaggaaacagacgctctatccactgagctacaggcgctgattcgtcataactgtaattattttatatttcacctaattccataacaaccctttgcattattggttattattgatgcaataatggctaatgaaatttaattcgcaggcatcaacgaggtgtacgacctctccaacatcctc

SEQ ID NO: 90099 - DNA, 912 bp, Eucalyptus grandis
  Intron number 1 from transcript Egrandis_v1_0.019790m (loc us Egrandis_v1_0.019790m.g) derived from phytozome v7.0 (c hr-ID scaffold_6; pos 9478753 to 9479664 reverse strand)
atctcagagaaaacgcgctgctcgagctctccaaggtaaactagacgaaggggctgcttatcaagtctattggattgctttgttttccatttccgtgtcgcgccatgtcgttggatagtggttttttcttagtaggtcatttgatattgctggagtgcgtgtgtgtgcgggaaaggagcgatttttaacagacatcctcgtgaaatggtatgatgagttagggttttggtgtgaattctgaatttgctttgaacgacgatgattttatctgaggtgggtcggtaaattttgggctgatttagtgtggtggaagatccaagttgaggtgtggctcgttctgttgctattgcattttgtttaatgcgattggaataggtcagaaatggtgaaatggagctctttgtgctatgctctccacaactcgctggtcacaccaaagaagcagagactatgctttaaggttataatgagacttcgacttaatagtagactagggtaacatgtcaaaagactaatggaacgaatgtatggaggatgatcacgagtatgtgggccttgcaaagacatggtgtgaagtaggtgcaatggcatgagagaattcatgcagctgatccaacttagcgagaacactcttcaaggtagtagtagcgctggtggtttccttattatcatttaaaaagcagagcactttgaattgccttcctacaattgaattgctgtattatgagtgtctatcagcgtttggtttcatttcattgaacaatgaactggtttcgagaactggctactttttggttgttttagtttgcgcatattgttattgctgcactcatgcaggtatggctgatacatctttgtttattgttacgttttgtagaaaagagaactcttccaagatttggctcccctgct

SEQ ID NO: 90100 - DNA, 290 bp, Eucalyptus grandis
  Intron number 1 from transcript Egrandis_v1_0.015041m (loc us Egrandis_v1_0.015041m.g) derived from phytozome v7.0 (c hr-ID scaffold_6; pos 40797394 to 40797683 reverse strand)
caggttatgatcatatataccttccgcctcaaagcagtcttttttcccttcatattattcttcacattcctgtgcatagatcagcatttcttcttgaaatatgttgctaacactagaatttcatgaagtttttgaaccagttcatacacgcacattctttgaattcaccatcttgatcggtattcctttccttgcctattttttggtcctatggtctttaattaccataaactcattcattgtttcgctatataatgtttatcttgctcttgaattataggccttcagag

SEQ ID NO: 90101 - DNA, 952 bp, Eucalyptus grandis
  Intron number 1 from transcript Egrandis_v1_0.046018m (loc us Egrandis_v1_0.046018m.g) derived from phytozome v7.0 (c hr-ID scaffold_6; pos 44773181 to 44774132)
gtccgggacaagcgcagacgaacaaacagacaaaagtaattatccattttgaagaggacaaatggaaagaaaatcaacaagaagttcggtgctccggtgcaactgctcagtgcttaccactcgtggtggggactcggaggtggagtcgctttcgggtcgagagaaatcaaagctcagccgatctttttctttgaaaaaatctcacccacaaagacaaatttatacacacacacacacacacacacaaagaaaacaaacgaatatattgacactttgaaaacttgttaaaaagaaatggcaaagtttactaaaaacttcataaatctattgtacgtgtgctaattcggcttgtcagtcaacaaaggaagaaagaagaaaaaagatcagaaaaaattccaacaatacaaaaaattgcttaagttagcgccgactatatcaaaaaattgcccatacaaactatagtgagaaattgttaaaaggtttataactaaattgttcaaattaaaaagtttaaaattaaattagtattatacaatggaatgataattatccaacaagaaatgtgtcttagaaaattcggaacggggtaattataacctaaaattcgttcaagaaaatgcaaccaagtatttctatcagcttcatctattttgagtgactggaaaattccgacatgaattttttggacggtttcgaggatagatttgttcggcgtccacgtcggcaagtttttattcgctcattctcttcgcccccttcccgttcatcgcgaaagcgtggcaatcgcgcaatgggcttttcggcccaaaaacaaaaccgcggctcacctagctcggaaggcccaagttccaaccgggcccagctcaagcgacctccaccacccgtgacattgaacatcagtcggagaatcgacaaagcacgacgcatccgtcgcactcagcccgaaagagca

SEQ ID NO: 90102 - DNA, 464 bp, Eucalyptus grandis
  Intron number 2 from transcript Egrandis_v1_0.022623m (loc us Egrandis_v1_0.022623m.g) derived from phytozome v7.0 (c hr-ID scaffold_6; pos 45502343 to 45502806)
ctacagacggttggcaaagtattatcatccgggtttgttcctctgtcttgattgggtgtcttataatgcataaaataaaaataaaatttgctttatgaattacaaagttgcgaaattcattttgcttatgaacttatttgggctaaacaaaattagaaggaattatcaagctggtagtttattttgtcttgttacggttttgctccttgcttatcgccatgagggcttgattggttggggtgaatcaattgttagcagctatttgtcaccagaaagatcagttgtagtggcatacaagtagtattaggaatgataagatggtagctcacggagtatctataagtgtgatttaatcaattctttgacgccaggatgcaccatttctgcaagttagtgagttcgttgcctgttctcctagtgatcggaagtctgaactgatttaattttcttttctggtaaagttt

SEQ ID NO: 90103 - DNA, 950 bp, Eucalyptus grandis
  Intron number 1 from transcript Egrandis_v1_0.054192m (loc us Egrandis_v1_0.054192m.g) derived from phytozome v7.0 (c hr-ID scaffold_6; pos 4477524 to 4478473)
cgggctcatcttcgggtacgacctcggaatttcaggtgcgtcttctgcctctcctatctctctatcttctctgtgcagattcttctgtgaaaatggcgtgatgctccgacgtcctccgtcgacgcgtgaattgtcgcgtctccttcgagcaatgaacgcatgaaaacatcaaaatccatatccaatgcctcatcatcatcgaagctgcgatgtcctcctccatcaacacctttgtagtttcagctctaggacgcgctagtgtagataatttttaatcgggcaaataatgaggaaatcattaaaaggttctaaacatattatatttttacaattcaatcataaactattttatgttttgtcaatcgagtccattcaatcaattttggctggaaatcgctgatatagaagtcaaccgtcttatgtgacacggctaacgctagtgtagataatttttaataatattttaaatataaatttagtgtctttattcttttattttattttcttttctttttttcccttttttcggtagaattacaaaaaaaaatcctaaacttataataattgtgccgattcaatcctaaaccccccccccttttttttgtcaatttagttacaaactttttgtaattgtgctaattcaattcttctaaatctaattgccatccaattaccatatctaactatattctcgtgcacagtataaactcttcaatttattcgaggtaatgccaacaagtcaatcaatttacgtgttgaacgcacaagtaaatttattcatgtaatgcaagaagtgcagtgggtcagcatttctctaactgattcttttgataagattcattgcaatcattaagggaatgaagatctagaaacaagcggtgtacaatttagtgcactaacagatacatggtgcaaatttgcaattaatctgtctagggggtgtcactaca

SEQ ID NO: 90104 - DNA, 798 bp, Eucalyptus grandis
  Intron number 2 from transcript Egrandis_v1_0.009699m (loc us Egrandis_v1_0.009699m.g) derived from phytozome v7.0 (c hr-ID scaffold_6; pos 8072876 to 8073673 reverse strand)
aggtaatttttatgttttgatttgccaaaagggtataaatagagagataactgcagtatcttactgcggcactcctaaaatcaactgtcccatatttgtatttgtagtgagcttgcttacatatgttttacatgactcagaagcatctcatagagatcactagcttcatgtactcttctttgctggcttatgtgggtatcaggtgctagttgaagggcttaatagctctcctgcaaaaacttccaagtgatgcatggtacgggcaattattaggtcgctaccttgactgtggtgagcccaatgcaatcaccatcttgggctaagttttgaaccttgcagcttcctttctagagtctgttaagttcaatctcaccatcgaggctaaattctcagttttctttccatggaaatcaattaggtattttcaattacctagtaataattccattgattttcccatctcggtaaaaacagtatgccttctttccttttgatttgcaaatgccgtagaatcctcacgcactcaaatcagtaaatgttgatgtgattgatatggtgatcggattctataccgggtttttcatcgtagagtttacataaagaacctgtaacagtttttttctccagtgtacttctgacatctttattgggtcttagcgtgtttgagaaattcattattttcgaataagatatggcttattatatgaatatgatgccttcaaatggccctgatgctatttggttccagatacattgttgatttaagtcatgatgtcttctctatattatgatacagaa

SEQ ID NO: 90105 - DNA, 758 bp, Eucalyptus grandis
  Intron number 1 from transcript Egrandis_v1_0.017168m (loc us Egrandis_v1_0.017168m.g) derived from phytozome v7.0 (c hr-ID scaffold_6; pos 46483676 to 46484433 reverse strand)
tgtcgacggcaaaagcaaggtctacagagaactcagtccgtctccctcgcctaattccattatgttgtctttcttgaatgctttcatgtgggtagttcttttggtcagattaagatggagtgctcggttcatttgcaaatgcacaagatgataggtggttcttgcttttttgagaagttctttgacatgttgttttagactgcttgcgaagaaatctagaccggtttgtggtaaatgaaaaagaaagagtgaacttttccggattttattggtcatacaatcatgtctttcgtgtaaaatttgaagtcagtaagtatcttttgggcctgaatctttctcatgaggcctcttgcttcacattaggtgaactcccatgtgtgagtggttcttgctttttaagttatcaccctagtggaaagattcttcatttcttgttcctcggtgttccaaatatgcttggtttcggagtttgctcttcggaatttcgaaccaggggttcatttgatatctatggttgccgttgcaaggaagttatgtcaaacatgttggaaatagatgagttttgcaaaatgtgactcctgtaagaggacttgaagtcaagtttaattttcttgtacaatctgacacgaattctgagaaatgtaagcaaaagtgtttctgggatgttggtggggtaaaaatctttgcagttcggcttttatgtaaaatttgcatttctttttctccagggttgttttcactaaaaaggaagattgaag

SEQ ID NO: 90106 - DNA, 894 bp, Eucalyptus grandis
  Intron number 2 from transcript Egrandis_v1_0.003914m (loc us Egrandis_v1_0.003914m.g) derived from phytozome v7.0 (c hr-ID scaffold_6; pos 44279388 to 44280281 reverse strand)
tttcaggttcatctctgtgttcttgctttctaagcttaataaagatcattgttctagatttataaggttagtgtttatagtagtaccagagtctcatttatttgattggttttgtacgatttttgaagcatcaatgagcggcaccagctggtccgctggttgaacacatttagcacttaatacgttgtccttttaggctgattaataaagataagaaataagcatgtgcaataatggtacgactgaggcttgtagaagtttgcatttagtcttgctagttggccagcccctgctcatcacgggcacagattaccctgtttttaaggacatatagccaattaaaaatgaattctctggtatcaagtgatgtcattgttgcgaatatggaatttcattgcagtgggagagttgaagatggatccttatgttttctcatcaaggcaaccattcaatagctttcatcttcaatttagcctcccatatactcttaaaaatgactcatctacaagtaattcatggctccatgacaggccatgcctaggccctggcgatgcatgattgcagtaatctgacgtgcacatctagctttgacgcatgtagatgttctgcaacataagatgcatttagtggaaataagcttttcgtgctgatgaagtcaattctaaagtagataaagaagcatcacaaaagatttatatcaattaagcagcctggccaatgtagcgttctgacatttgcatgccctcctttcctaggctgaattgtttggagatcagtgtttctgtattacctgctattccctgatgagaggaatattgtgacttcctttattcatagatcttgccgaaatattgtgcaggtgagctggctctattagttgagggtcttggaatt

SEQ ID NO: 90107 - DNA, 629 bp, Eucalyptus grandis
  Intron number 1 from transcript Egrandis_v1_0.010756m (loc us Egrandis_v1_0.010756m.g) derived from phytozome v7.0 (c hr-ID scaffold_6; pos 2917024 to 2917652 reverse strand)
cgggttcaactcgaacggctccgtctttcttgacggtaaaagcttctgatccttgcattatcatcttctgtgcacattttcattaggaaaaacaaaaaaaaacccgaaaaggtacgacctttattatcgacagttaccggcgacaggaaaaagttcttgatgggaatggcttttccgcttccatgatcgcgctttgatttcatatggtttgttgatcatgaaaagtggaagccaatggcttatgtgtttgccactaattctcgttttcagtgcgagtaaagagtcaatcgtaaggaaaggcctctgctttcttttgacattgccaagatttgctctacaagaacaagccatcatcaaattgaaatgcctttttcctgttcagatcgactatactgtttgatgctatcgttgtgtcattttccctcctgtagtcatctcgcttttatgcaacttactattggattctttcgcgtaagtcccgcccgtgtggcgcaatttaacttgatcgagtaaaatgaatcttgctaattatttcttcaatttctgaggttgctgttagcagttaacttaccctttggatcatctttcattcaggaatcagactcgtgtttgaatccgagaaggcggaa

SEQ ID NO: 90108 - DNA, 674 bp, Eucalyptus grandis
  Intron number 1 from transcript Egrandis_v1_0.020436m (loc us Egrandis_v1_0.020436m.g) derived from phytozome v7.0 (c hr-ID scaffold_6; pos 43502178 to 43502851 reverse strand)
cggcggttcttggcgagacggcgaccgtgcttcgggtaagaatgccatagcctcccctctctctgtctcgaacagtcatcaagtcttggttttgatacatgggtttgttttggttttacgaggaagcgagctgaatggcgacattcgtctcgtcaagactccgttttctacttcatagggtgttcagtttcttgtcgctgtttttttcccccccattttcaaataatctttgaggagtgaaattgagttttgcttcaaaatccggtgctcaagtagattactgagcagactgttgagtagcttcgatcgtcgactggaccttgacgctcttcaagctcttttgtcttcgacgaactgaggaagaatgagttgcaggacggttaatttgaagtttgactatgaatgcagttgaaacgatcagctggtttcgcgtagaactgatgaataaacttttttttcaccgttcttccaattctctgcaactgaatgggaggcacagaaattgtgcatagttcttattgtgatggtacctgataatttcttggttggttgactaatcctgctttcaccatagttcatttttcgtgatttgccgatattccgtttgtaattctgctataatatacaatacggtcacagcttgcacttttccacttcattttagaaagccccaa

SEQ ID NO: 90109 - DNA, 174 bp, Eucalyptus grandis
  Intron number 2 from transcript Egrandis_v1_0.011064m (loc us Egrandis_v1_0.011064m.g) derived from phytozome v7.0 (c hr-ID scaffold_6; pos 52255967 to 52256140 reverse strand)
ctgtccactccaatctcggtaataatccattaataataaatttaacaaaaaaattacagatcttggtccaccgaccaaatctaaagatgctccctttcgtttcatttgattaatggaattttctctttttcttctgttctttggaatatttgcaggcggggcaaaagtgaagtt

SEQ ID NO: 90110 - DNA, 1037 bp, Eucalyptus grandis
  Intron number 1 from transcript Egrandis_v1_0.017931m (loc us Egrandis_v1_0.017931m.g) derived from phytozome v7.0 (c hr-ID scaffold_6; pos 15475598 to 15476634)
ccgtcggatcgggagaaattgcaacggtatgccgcgttttcttttgctgtatctgaccgagtgctcgtgctcgtgctcgtgctcgtcgaattgtctgatctcacggtgtggaattgatctgctgatgctgatttattgcatttaattttttaagtctcttgttgtcaatgacttgggaataagaatgcaattccagctgtttgttatgtatgagaatttgcagcgaatcgcaagtggctgctttggtccattgccactgttgaattttgcagtgtgcagctcattggaagaacgcactcatttttgcgaatgctgagtggcatacatagtgtttacgctagaaagcttacttcttgttaactatgaacccaacgaaattactatgtagtatccgctagagagattacttcttattcttcggctgatgaagatcacttcatattgaccatgtatccgttgaagttgtttttcaggtttcagggtctaaaactataatgtagctcgcttaccaaaaaaaaaaaaaactataatgtagctcaaattgtggtattccaggaaattatcatctggagcatattattgaaagaagcagaaatgttgaaactaatatttctttggtagcagtgtaaagaagcaaagtttcgaatcactgatggagctgaggaacatagggaacggttatatggctatacatgaatatttgttatggttgaacatggtagagattgagattagtttgtttagatgactctttcagtagtcatcaatcatcaggagattagctcttttggttggtgagtattggctttggttgttaggtgtcttttcttaacagctgtttatatggttatatcatcgttttatcttgcattttgacctgctaagttccaactactgcatacaagcagttcaattagctaaaatccgagatttttttcttgtgctcttcatgtatagctataggaaactctattgattttgactttatggactaaattgcagcttggaggaagacactggattagtttttagatttg

SEQ ID NO: 90111 - DNA, 575 bp, Eucalyptus grandis
  Intron number 1 from transcript Egrandis_v1_0.048497m (loc us Egrandis_v1_0.048497m.g) derived from phytozome v7.0 (c hr-ID scaffold_6; pos 45039048 to 45039622 reverse strand)
aggttgcatttccacgactgcgtcgtcagggtacgtagtttgtccgaccgctttttttttttttcttttttttttaaatgaaaaagggctaaagcagattaaaaaaagttaacgtggtaaatatactatttctattttatcacctgataataataaataaaaaaattagtattccagcacttgtcaattccaaagttagcaatctagtcagcagagcaatttccttatccaaaattatgttggtcagcatcaaccaaattattttcgtaagttttgcaaaaatcgcacttattaataaagtcgtcgctaagaaaagcaaccaaaaatttattatctagtagtggccacatataaaaatgacatacataaggcaatttcaaaatcataatgagaagtctttatagttaatgaatcaatacactaacattaattaacttattgcattataatttatatctcactcttgattgagctttctatagaccaaatcaaaaaatttcgacatccaagtaaaccaaaatgagaatttttgccggcttcatttgactcgagtttcttgatttggttatgtaggg

SEQ ID NO: 90112 - DNA, 876 bp, Eucalyptus grandis
  Intron number 1 from transcript Egrandis_v1_0.049252m (loc us Egrandis_v1_0.049252m.g) derived from phytozome v7.0 (c hr-ID scaffold_6; pos 11738108 to 11738983)
atcttgggaggtttgagcttgtggcggttgttttaatgtggggagacagtcacctttcacgagcttttgaggttctctggtcgaatgttagtgcttaattcaatttgctgcagttcaattgtgtgataattctgggagatgtgagattgtagggctttgtttgatggggtctaatggccatggtttgccagcttttcgcagttcccgattaactcttggtacttagtttgagctttctatcttgcttaatttgaggttgatttattctaatgggttcaaagctctgaactggatagagtttctatcttcttacggtattttcttaccaactgaactgtgcagtcataccattatatatagagttgtgaaagaaaattaattatttgaaggatattagaggatatcctttgatgtttgggccttgcacttgatcccaactgttcctcttttctaattctgcttatttatgttggaatctgagtcatggaatttttcagttcttacttcaatatgtttctaatggatttcgtcacttgctgagttttttttttctttttctttttcttttcctttcatctgcttgtttgtactttaattaagctccacgagtcgctggtaccatggtcggtcacttgagttttttgtgtctaggttttaagtggttgaagaaggattatgcgatatggttgctcatacaagtacaattgtttcgtttgatgtaaaatcaaattatcttatggaggccattccagtcgggtgtgtactgcctcatgttgatacttgataggccgtgtttttgcatctggttctactgaatatggaaactaacaactagttgtaggtatcctgtgatcagggaagcattaccaaacacac

SEQ ID NO: 90113 - DNA, 708 bp, Eucalyptus grandis
  Intron number 1 from transcript Egrandis_v1_0.012855m (loc us Egrandis_v1_0.012855m.g) derived from phytozome v7.0 (c hr-ID scaffold_6; pos 8281057 to 8281764 reverse strand)
atcttggggattggttggggacttcggagctcgaggcaagtggagaattttttttttattacccatttcggttcttgctctggaaactgttctgttgctcctttttttttttttttttttttatgttttcgagtgagttcgcgctggtctgataggatttccggcagaatttgggtgggtctgtctgcgcgctgttccgggacaaaatcttgcgtgtgcagtgcttttgattggctttcccctgttttaccacttcggattctttcttgattgtgctgtgggggtcgataaagtcggttgctttatcggtttctgttcctgcctctgtgtacctttggatgctttagagtcggggggtttttgggttcgctctaaataattgagggtagggcttgtactgcatccgaattgcgattgtccgtggacttagggtttagtggaattcttggtttcgccgatcccgaggatgtagtagctgcgtgaactcttttgtcttctagcttcgggtcgtgcttatttcagctcggagaccgtttcggtcagagggttgaacttgattgcggggttggtgcttggtttggagtttctgggatttggggccagttacagggcaagtcttaagtgcgctgatttcaagtttgattttttttgttttgtttgcttcttttgccagagcaacggttctagctttcggtctcaagtttcttt

SEQ ID NO: 90114 - DNA, 379 bp, Eucalyptus grandis
  Intron number 1 from transcript Egrandis_v1_0.006440m (loc us Egrandis_v1_0.006440m.g) derived from phytozome v7.0 (c hr-ID scaffold_6; pos 7661460 to 7661838 reverse strand)
aatatttgcttggctgagctcctctgtttgaataggtattgctctttctttgtacttttcttgctgtttttgtgtttcggctggtgaagctgttgaactctgggaaccccattttattttatttttcctttttttcgtttgtttgtttcctcttcgacccctttttcccattgaccctcgtttggctcccgacaaatgatggggaattgataaggaaaaatcttctcttgtttcggcatttggggtgtgagctttgctttggatgagcattaatcaaatgtgctcgcggcagcagttgcagtgattgagctgatttcttgtttctgggctgctttgctgttcagagcggtttcgattttgtctgggtttaaaggaaaag

SEQ ID NO: 90115 - DNA, 790 bp, Eucalyptus grandis
  Intron number 1 from transcript Egrandis_v1_0.010635m (loc us Egrandis_v1_0.010610m.g) derived from phytozome v7.0 (c hr-ID scaffold_6; pos 20761861 to 20762650 reverse strand)
gggatttggtcgcggttcttcggaggtaaatgccgtttcacattcccaaaagagaagagaattttccactctctaatcgttcgttaattcgtgagtccgagtcggtttgttggtttgctttccgcattgaggtgtgcgggacgctttgttaattacccacttgcatgagaggagtgatttttttaatagcctcatttcgacatcaatctatgcaggggtcttgctaataactcgcagaaggaattgtttcaataaaaaaatgtctctgatattcgagtgaaatcgcccgcacttgaattgcagcgtaaattattttgttgtcaacgacttgcggaaggacttgtttcaatagaatatatgtcagaggatcgagtggagtcacctgcatttgaattgtggcatcaatcatttctttatccggaacgactatggcgatgtttctgtattcagaaatcccacttgtaagtcggtcgtgtgttattttttggtgcagcatcgtgggtgggcgtgcgcttgcgatgagcaacagccatagtgtttgactatccggcttcttgtgagaactgtggttactagttataatttgaaagtaccgaataaaatctttagtttctctctgtcaacatttcattttatttaaatatgccagagtatcctgttgtattgtatctgaaaaataaattgccattagcttccgtgtgaatacacttaacaatttgttcttactaggaaccattcacattaaccttttgcagtattgaaatctacaaacacaacaaagaagaaagaa

SEQ ID NO: 90116 - DNA, 616 bp, Eucalyptus grandis
  Intron number 2 from transcript Egrandis_v1_0.021940m (loc us Egrandis_v1_0.021940m.g) derived from phytozome v7.0 (c hr-ID scaffold_6; pos 17943895 to 17944510 reverse strand)
ggggtgttcgacatctctaactttggttggaacaggtgaattcctcgctgcattggccattgatgaccagtcacttcatatctttcgcacacgcaatgagatctagtacagaaagttgttctcaagaaaaactgaatctacatttttcttaataaggagagcgaaaatcttgtgcagaatatcttctatttgatattatcaatgagatgcaacagaaatactgcacaatgtggacttcgacccacatctgcaatgaagtcagtatgttgcaaatatgggatatctttcaatactaactttcagaaggaacctactcaataatgtatcacgcgatggttgttggagatatcttaaacagctattctctcccaaaaaatcatcccttgcaattcaaattttttgaggttaccttttttttctttccataatttgagtcattatcatggttcttgtttgaaagaatctcaaagtcccttttctactgaatacatgatgttacgtccttcatttcctctgaccttacctactcaagaatggtttatttgggtcgtatgcttggtaacttaatgctacaattgcaggatacagggaaaaagtttttgcaataatcggcgtt

SEQ ID NO: 90117 - DNA, 596 bp, Eucalyptus grandis; identical to SEQ ID NO: 89918
  Intron number 2 from transcript Egrandis_v1_0.028347m (loc us Egrandis_v1_0.028126m.g) derived from phytozome v7.0 (c hr-ID scaffold_6; pos 13083273 to 13083868)

SEQ ID NO: 90118 - DNA, 582 bp, Eucalyptus grandis
  Intron number 2 from transcript Egrandis_v1_0.044559m (loc us Egrandis_v1_0.044559m.g) derived from phytozome v7.0 (c hr-ID scaffold_6; pos 42146898 to 42147479 reverse strand)
agttccagatcactgacgcattgagggagaagagggtaatcagaaaatttgtgcattttgttttgataaatacacgtttgtttagctatgactctctttaccatgagtttgatgataaaaaatacgcgttatttgtttttggccattaaactaatcttgatttgatgtgttctcaattctttttgagaatatgagaggtcgatttcattcttcggttaatactctttatgcaagcgaaactctcactgctaatttcactcttagcagtaagtgtctattcacgaaatgtatacagatttctgtttttctgtatatcaaattactgttgttatgcaacatcagttttccattattaggccaccacttagtttttgctttccgtgccatgtgtctcttttattagttgatatttccactaatttcctgcacttgtttgattgtggaggaaagtgaaagtactgtgctgaggtaccataatagaagatgaaatagatgctgtgtgaatgcatttggttgcagtcatttgatatttgtttccactatgcagtcagagaggtcagacctgattgctcaattgagagc

SEQ ID NO: 90119 - DNA, 1025 bp, Eucalyptus grandis
  Intron number 2 from transcript Egrandis_v1_0.053229m (loc us Egrandis_v1_0.053229m.g) derived from phytozome v7.0 (c hr-ID scaffold_6; pos 15989255 to 15990279 reverse strand)
cttggtatcttcaaatactgcaaagaggttggcatgtcttcatagagaatgatttagaatacatgggcttgaaacagcactgctaatagttacttcctcttcaggttacttcctctttatctgggtggttaaaggacaatccgtcatgttagcatatcaaacttgtttctgggcctaaacctgctggtcagattttatcttgtgtttcctattgcccaatatttgtattggtttgatgcttatatgaccgcctgagatgtgttatccacgcactggagatgggtcttcctgaaataaccaaatggagttcctctgttcatatggttatggttatgttgataaaggcccttgattctttcattttatgatgtcccaaggagctagattatgcaatgactgatagttgtttccgacatttataactaaaaacctgcctttcagattttttaagaaagagagcttctttgcagtttttctttcgaaatcatggatcaattggcagtatgctcatatgtaaatactgttggttttgagagaccgctcaatatgtaggttttaattattttttaggggctactagtggtaggaaataagttttgccatctgtgataagcaattatgtctcgtcaaaataatatgccagatgagcatgcttgagttcaagcatttgttacgaaatttccatgcagacagattgatgccttgaattgagatttaaacagtctcacttgttaggcggatgctcatacaacttgatttgtggatagaacttcaaaattgaacgtggttcttgttgacttcatgattgttcatttgcacagttatgagaatctgtgagctttattccctcacctgctacatattaaatgtatattcctagaaatttcatggtttgattattttattttttttaattaagtccataagggatatttactttgcttgatgtgtatgcagaagccggggaataatttgatggtgaatgctcagttcaagtctatagtgtgcaaacttgcattccgaag

SEQ ID NO: 90120 - DNA, 463 bp, Eucalyptus grandis
  Intron number 1 from transcript Egrandis_v1_0.027507m (loc us Egrandis_v1_0.027507m.g) derived from phytozome v7.0 (c hr-ID scaffold_6; pos 12273978 to 12274440)
acccgtatgtccatgtaaagttttatacatcatccaggcgtggaagaaaaatcattatatttttcgtattagtaactctctctataatgactcaaattcatccgcttccatatcgtattgattccaaattacagttgtatcatcgcatattctatatgtccgatatcattatctttttaccgcaccgtttatttcatcaaaatatttacttatgagcatatgttgattttcgctataaatatatatatatatatttttttttttttaaaatcaagttctagacgttcgttttacctgtacccatggcttgatttaaaagtcccattgttgatttattttacgcttgacttttttagtgcaaccagttttggtggcccctcaacatcaaaatgctccacctcaatccgagataaggaatgtgctgcagaatccaactgcacaatcatcaacagctctaagggat

SEQ ID NO: 90121 - DNA, 872 bp, Eucalyptus grandis
  Intron number 1 from transcript Egrandis_v1_0.001067m (loc us Egrandis_v1_0.001067m.g) derived from phytozome v7.0 (c hr-ID scaffold_6; pos 20729243 to 20730114)
gatctgtagagaaattgtggtcttctggcaaacaggcatacttccttcacatttcaattgggctgggacgtcgaacagaagaagttcttctgatctttattcagctcgatgttaaaagattaagtagtagttgcagtcgtaatggtttgaagtctccttcatcaaatagtccaattggcagcctatcgtttctcatgccctcgaaatctattttgccaagttttactttctcatcttctgttcgtagtgagaaaaattattttggtccgtgggatctattacgacaatatgcccgctgacagcatttcttcttttcgttcttgtactttgtgttcagttttcattcttcatttgaacagtttctctttttttagattttcagtccaattaaaatattttgctctgatattgctgcacactgaaaaagatatgagcgatgttcgagtttaattgaagaacctggtttatgttttttggattttcttgaataccaactagaatattggcttaaaaaaagaatagcaactaggatacagtatactattcgaacagatgagagtctctctggtttggaatatgtttggtcagatttcaacatcatttcagcttgaattccattaaaaatcttattccatcagggacgaaattaactcatatatgaaggggatcgcagagttatgaacaatataggagttttgtttcaaaagaattcaaagacttggaatacctatgccatctgattgttgcctgaattaccagaccttcagcatgtgatgttacctgtgtatcacttcctatcatgtgttaatatgcaatcagtcccactcaccctggtgtcgtctgatcatatcaaatattgcgcaggaatctgc

SEQ ID NO: 90122 - DNA, 791 bp, Eucalyptus grandis
  Intron number 3 from transcript Egrandis_v1_0.001067m (loc us Egrandis_v1_0.001067m.g) derived from phytozome v7.0 (c hr-ID scaffold_6; pos 20730348 to 20731138)
gtgccttaacaccggcaaaggcccaggttgatcaggttcgtttgctgatagatatagttactaaagattgggccagcctttatgttctgagtacctggaatttccttttccaatccatcctccaagtctctgccaaactggtgaaggctacgactgtttttgcattcattcaatatctatcagaatgtttacttctgatgatagagaagctcttaagcagaattaggtattagtttttccaattagttgaatgcaatatctggaacttcccggtttatatattcttaacccagtttccaggtgaactgcctacttctactttgtggtaaagtcctcttaattgttggtttagatgaattgcctaaaccatcagtgtgccatatacatgtgaacttgtagatgtcccagatgaaattttgccttctccctttccctccttagtagatcgactcctgtacatacactgacctatgttaatccttcttgaaggttcttttctttctgtgtaatttgctcatcaaaatcggtagtgctatctttctaggtgcagcaaaatatcacattcactattatatcccctatattgattgttctcctctttaaaaggtgccatttgaatttattccctcatttctagttttttgtttcttcaataaccctttaggctaaatttaggtgaattttgggtttttttttttttttttttccaatgcaagttcattttgtttgtttatgtccttacatgatattctccctttgctgctcacaggataactacaagaaaccaaatt

SEQ ID NO: 90123 - DNA, 512 bp, Eucalyptus grandis
  Intron number 1 from transcript Egrandis_v1_0.003485m (loc us Egrandis_v1_0.003485m.g) derived from phytozome v7.0 (c hr-ID scaffold_6; pos 43278601 to 43279112 reverse strand)
agatatcacacgtcctgcgcagtacgtgtttattgatttcgctgtgattaattagtattttgcagcttgcatttgtagtttctatctgtagtagataaataaaaattcagaatttcgagattggttgtggtgccaggaagatgttcaaggaatttttctgcctgcagtgaattctgaatgaagcataattgcattgtgttgttcatgtatgcttgtcgataaggctttcagaagtgttacttatccaatgctcagtaattcatttgaattgtggattcatttttataatgatgatacctgcttttgccatcttatttaagaaaagcactagatagcgctattcagactgtaccaggatattgtatcaaaagttctcttttatctttcttgattaagctgattacagcctcgtcattattgaaaacaatctagttaagtaaatttatgtggctcatatgttttcattatctttcttaggtgattcttccatcggttcacctgattcagaagat

SEQ ID NO: 90124 - DNA, 712 bp, Eucalyptus grandis
  Intron number 3 from transcript Egrandis_v1_0.052668m (loc us Egrandis_v1_0.052668m.g) derived from phytozome v7.0 (c hr-ID scaffold_223; pos 30864 to 31575)
gccattcatatagttgctcgaaaccaaaccaagtgagtttgaccttcagcactttgagtttgagataacttttcaggaatatgctctgtgagttgagtttgaaaacttaggaactagtgtactttgtgaagggaaagctggtgtagtgtgtaatttaagcaatgtctataggttcagaaacaaagtgaactttgttaatttagctgcagagtcttatagcaagtttatcttgccatttgagtataaatttacaactcatttgacaaaagtcttatttctaaaaatagttttgaatagaatctagagagaacagctgcctttggttagtctgagctgtgattccttttgaagagtcttatagcaagtttatcttgccattggagtataaatttgcaactcatttgacaaaagtcttatatctggaaatagttttgaatagaatcgagagagaacagctgcctttaattattctgagctgtaattcctttcttcttgtccttggctagctgtatgctgtttgagatgatgatgttgtcccttgtctcttctttttttctgaacttatgagttgctctagaagtcttcttgcatgattcttaagcaacacatgcttctgcaggttctcaggcaaaactttgtgtctccaactcacatttgaataaaactttctgttgcaggtggtttgcaaagcgttttctacatcccagcattg

SEQ ID NO: 90125 - DNA, 992 bp, Eucalyptus grandis
  Intron number 1 from transcript Egrandis_v1_0.000829m (loc us Egrandis_v1_0.000636m.g) derived from phytozome v7.0 (c hr-ID scaffold_6; pos 21535935 to 21536926 reverse strand)
ggtatgttcctgtgattctcacttcatgtcgaagtttattatctcgatctgtgagttttctttttcttttttaatgttatttctttagggaatggaacaattagaagtctctttcgactttcccgaatattttgattccctttttccaaaaattataaataaaaatgatgtgagcgggggtgggtggatgggggatgtttgtcgtggttgtctctaaattgtccatatattattaaatctattataggatggccaattaaattataaacttttcatttatgccaaatttttcctaaaccttttcgacaatttgccaatttattttaaacttttcaattgtgtcaatttagttttaaaacttttgatgatgagttaatttatttttaaactttttgacgattgttaatttaatcattttggctaattttgactgaaaagtactaaaatgacaatttacttaaagccaattatcttatatgccatggctgatgctgacctagataagttttgcatttttttttaaattttttcaaaattattcattttttcttttattttcctttttcttttctttatcattttttcaaactctagtccagcgaggttgcgggccataggtgagggtgctgtggcccttgctggcctagagttgtaaaaagaagaaagaaaataaaataaaagaaaaataaaagaacaaaaaaaatagaaaaattacaaaaattgttcatgttaatgttgaccatcctttaacagtgccatgtaagacggccgtcatccatgttagcaatttcaactaaaattgcattaagaactaaattggcaaatcattaaaaggtttattacgcataattgaaagtgcttagaagttagaattgaattgaaagtcctataatatatttataattttgtgtacaattgtccctgatgtatgcctatgtttatttttcatacatagtgctcacatatgctttccctcacgtttaacatcagaa

SEQ ID NO: 90126 - DNA, 530 bp, Eucalyptus grandis
  Intron number 1 from transcript Egrandis_v1_0.046556m (loc us Egrandis_v1_0.046556m.g) derived from phytozome v7.0 (c hr-ID scaffold_6; pos 18610076 to 18610605 reverse strand)
gagccagattctgggccgatttggtctacaagaaggtattactagttcctctgtttttttttatagtcgtctaattcgtcaatgattcttcagtctgttgacatttacgcgccttcataatggagctatcgtttttagctatttacatctcatgctgaatgcgaagaaagatcatctggcttaagtcgtcatcgtcatcgtcattcactatcattgattctttgtatggtttttcatttttttttgaaagtgccatcaatttattgcatttgtgccaatttaatctataaattttaatttatctaatttaattctaaatattttgataatttaccaatttagtacttttggttaattttaaccagaaatcactaaaaaagaatgtcaatcttccagtgcgacgtagttagtattggcacaaacaattttcataatttttttataaaagatatatattttttctttgtggtcccaacaacccttgccagcaactaggttgcaaaggccctaggcaagggcctttatagccc

SEQ ID NO: 90127 - DNA, 625 bp, Eucalyptus grandis; identical to SEQ ID NO: 90068
  Intron number 3 from transcript Egrandis_v1_0.029237m (loc us Egrandis_v1_0.028988m.g) derived from phytozome v7.0 (c hr-ID scaffold_6; pos 43654929 to 43655553 reverse strand)

SEQ ID NO: 90128 - DNA, 565 bp, Eucalyptus grandis
  Intron number 3 from transcript Egrandis_v1_0.026855m (loc us Egrandis_v1_0.026855m.g) derived from phytozome v7.0 (c hr-ID scaffold_6; pos 39834344 to 39834908)
aagttcagtttgaagatcgattgttcacattgcaggttagtgatgtttttgctgtgatttgctggtaggatcaattccggcctctctgatgagacgagcgttcattggacaatcaatggaggtgtattgggctgtgtatgtatgttgttagttaatcttcaaactgaattttgatggtttcgtatattaatcgtgggttagattggccatgccatcggcaaataatactttttgaagaactctgtaggatatgtagattttgagttgtaaaaaattgtgctgcttgccccacgcgatctgttttgggggacttatcggcatgttctccttcttttcctgctgtttctagagacaccgagtgctcaacaggaaaatgaaacatctgttctctttatttcatgaagttttaatgctgctatgtggtaatcacgattggtggttttggtggataaatcaagaattagagtgaacatgactaattttgaatcgcggaatcatactgagttttggttactttgagaagccggtgttaatggtagacgtgctatttttgatgtctgcagat

SEQ ID NO: 90129 - DNA, 500 bp, Eucalyptus grandis
  Intron number 1 from transcript Egrandis_v1_0.015283m (loc us Egrandis_v1_0.015283m.g) derived from phytozome v7.0 (c hr-ID scaffold_6; pos 12466701 to 12467200)
ctccagcaacaaacaagttaagttctaaatcagtcttctttcttctacataagttactgagcacagagctgcctaactatttgattgaatatatataaaaatattatataaatgcagtaggttgtcatttcatgcctgaatttcttgagagatgcttaaagcacgggtgctaactgatttgtcttttgagaggaagcaagcagtgctcttacaattaaaaggaacagtagtgactgggcagcattggaagtttgttttagttttattgcttggaatttagaaactcgtatttcagtttatgtaatagtctgaaagattttaatgatgctttatcatcatacatcgaaacaggattatgaatatctaatttctaaaaattttggaagatgagcagtgtgtattcaattgttacattacttcctgaagattgcaaaatcaatactgactccggtcttttcattgcagtcctatttttgcagaaatagtccctgaaaaatccc

SEQ ID NO: 90130 - DNA, 428 bp, Eucalyptus grandis
  Intron number 1 from transcript Egrandis_v1_0.037937m (loc us Egrandis_v1_0.037937m.g) derived from phytozome v7.0 (c hr-ID scaffold_6; pos 10036844 to 10037271)
gccacgtgactggtagattggtaagtttcgtgtcactttattgttcatgtaaaccttgtttgtctaatcttcagggtaggtcttcagcttatttaatctttttttatattttttgggccggtaagttatgtgtaatgacaccaacttttgtcatttggataccaaaacaaaaccatcattttcactttagaaccggggagagtttgtcaagaaagtgcttcatggcagtctccattaaagttcactgcaagtcatgtaggtctttgtttccaattactcagataaatgggatgcatatttatgtgatgttcttgatgagcttcttgtacaatgtttgtgtgagaatccctcagtttgttccacttttgttgttgctatttacatggatgaagaatgtcgtgattaatgaactcaaattatggttgcag

SEQ ID NO: 90131 - DNA, 808 bp, Eucalyptus grandis
  Intron number 1 from transcript Egrandis_v1_0.017990m (loc us Egrandis_v1_0.017990m.g) derived from phytozome v7.0 (c hr-ID scaffold_6; pos 45203291 to 45204098 reverse strand)
ctcccctgctttcttcggtaagcgttggaagcatctgggttactccaagattcttgcctttcatttattattgtttttttcttcttgggagcttcttggtgggtttgagcgcgagtgacgtttggattgagatcctcttgtttcctctggcggaatttggttaactgctgaaacaattctgatcttggggttcacgggttgggcaaagaaaggtgatctttttttacctctgcttttggttttttaaaatcggagtggattgtgcaattcttgaaaactataattaggaactgcgtggtgaatttggtctgactagttctgtggatcgttcatgtaaagaaatgggattctctggatctgtttgctccaaaaactattaattgctcggcgggctgggaagccgaggccgagtatttttctggaatgtgatgaaggcagatcccagggcttcagattttcattttttttcacactgtacacggtgcagtccgtttagtagcattcttatgctatcttgatacactatctttatgagttggctgtgttagaaatcaaaaggctttcctctttattctaggcaagaaaaaattctgctgtggtctggtctctttgaattgtccacaacataaatatactggcctcaaacgtgattgttgttgaagcttgaatagggttttactcgtcagtggtgctattttacatcaaaccattgatagtgatctctcttcacttggctttgattgaggtcttttaagtttaggcatgttttgatattctccaggtgatcctctgttgcagaagcccctcc

SEQ ID NO: 90132 - DNA, 677 bp, Eucalyptus grandis
  Intron number 1 from transcript Egrandis_v1_0.036485m (loc us Egrandis_v1_0.036485m.g) derived from phytozome v7.0 (c hr-ID scaffold_223; pos 39978 to 40654)
caattgaaaaagtctaaaggaaatcccaaggtgcgtcagattagcattagatctctagtaaataagcggcatttataatatatagtttgctcattttccgtttgacaattcaatcgtataattttcccgattattaaataaacataatgatctagattacgcatgcgaaatttgaatttttgatgtgatcgtgcttaaaagaatactatctaaaatgcaagtcaatgcatggagttgattaacaaagtaatatgagaaattctattatcggataagcactatgatctgaattacatatccgatatctgtggtttcgatgtagccgcgtttaaaaaaatactatctaaaacgcgagtcaatgcatgaaattgattaataaagtaacgcgacaaattctaattcgtcaatttttttttttaatttcatttcggccccctcaaaaaaagtacttattccacaaataggaatattttctacaaaaagaagaagaaaaaaagtaggaacgatgaaaaaaatagaaacaaattaggacacctctgtttttcacccatgaaacctcacatggctatcttcaaggaaggaaaaatcctctctctctctctctctctctagcatttcaaagcgtacgtatttgtccgcgagctgaccgaagaccaagttgtctctctctctctctc

SEQ ID NO: 90133 - DNA, 346 bp, Eucalyptus grandis
  Intron number 2 from transcript Egrandis_v1_0.018962m (loc us Egrandis_v1_0.018962m.g) derived from phytozome v7.0 (c hr-ID scaffold_6; pos 33071945 to 33072290)
atctaaccctagcccacgtgaagagtcacttgcaggtgggcgtttgctctttatatttttcttctttttttttttttggagaattagtttctccatatagtctcttgatctcatgaattgtgaatgacatttatggtttctatgaattttttttttttttgtccttgttgtattttatgatgttgcgcatttgtggtgggtactggattacaagaggtaaggacaaaggggtatctacagagctctctctctctatagctagagggcattaatcttagcattgtggacttcaatttctctcatttattaatttattttctattgtgggttttgattctccatgcag

SEQ ID NO: 90134 - DNA, 987 bp, Eucalyptus grandis
  Intron number 1 from transcript Egrandis_v1_0.009813m (loc us Egrandis_v1_0.005374m.g) derived from phytozome v7.0 (c hr-ID scaffold_6; pos 23117572 to 23118558)
ggcctgaaattcaaagcgtttgcaaggcactagaggtttgtcgaatctctttccttgcattacctaaattttcattgtgcactgattaaatgaagatcgccaagggtacctttcctagtagctttctgcactgattcaaagccacttgtttcataatgaatttgaagaggctttctcagataacaaagatccctgtcttgatatatgaatccataggtaggaatcttctgtcatgtttgcttatattttttaaatacgttgctggagtgatgctttatatgcttatcaaataatacagtgctatttgagatcacagatcaattaaaggaagctgcactctatttaggaaaagaactgtcttctgtcagtgtcgtgtagattctaattataagacagttttagaacatattcacaattttgttacttaatcttattgttattaaaatattaacgcactcgtgggattttggtgccttgtggaattttcatgatacacaattgttatgttgagaagattttcatttctcaaaagggagttatagttgattgatgataatgaatatttccccattctgatctctgtactaatggctatacgttctggaccttgaaattcagtattcgttttggaaagtcttggttttcataagttgtgagacatgagttcagttttatatattcagagaaaagcaggatatttcagctgtcattaccttaccagtttcctttgcaacggcaatcttacttggtttgtgttttgatttgcatcatctcatacaagagtataagagcaaatcctcttttccacggttgtccggtttcttattccattagttagattgttcagaactctatccactttgcgaaattatacttttaatcggagtcattccagaactattgatcttttcccgttaaccttttcttactgaaataattgtttccacctcaggcttttgatcttagaagctctgaagtattcggcaa

SEQ ID NO: 90135 - DNA, 1056 bp, Eucalyptus grandis
  Intron number 2 from transcript Egrandis_v1_0.020050m (loc us Egrandis_v1_0.020050m.g) derived from phytozome v7.0 (c hr-ID scaffold_6; pos 35880955 to 35882010)
gacggcagaatcacggtcattgccacggctgaagggtaatgcttctttctctctctcaactttaatgccaagaatcaagaacttgtgatgtcggaactgtactctgctatgttttcagaacagtctgcttgagtatcagtctaaataccacttttagtgtcatgattcatcccaggatatagggctcttgcttagtactgatgttgggacaagttggggcttgtagttctgctgattcaaatatagttgggatgatttcagagcttaggaactaatgggtgtagtattgtacttaaagagtaggatactcttgctaacttttatgtacaaggttattccatttgaaatatcttttaaatggccatagtaaatcaaatgcagtgggtatacttgacggagatactttttgaccatcggtgtaattccatttattgcgcaaatgagttcgaccctgtttttggactttggagcagtaatctcttaggatgacaaaatggaacccatggtctagtcaccagcaatgttcctgcagattcgtcaagagacagacaacaatatttacttgtaattcagaaacattaactatcatttattaaggctttctacatcttaaagtttccatctggttattttagggcctatctggactctacctggatccactcatcttcgcactgatgtaactgtttaagctgcaaatggatctaatcccttaacttctctggattctcctatatctatagggatgacttgagggcttgtgatattatgtaccactaattatcatgctttccctggcattttttctcttttaagttcctttagggtagttgggtgctaatacgatgcaagttcttgttttaatctctttgagaagattaattttagtaaactgtctcattctgtcattacctttcacatacctcgtttctctcttcaactatgttttgatttcattgttttctctcctgttagctacagagatgatctcattttttctttaattttacatttgtttcagagtctttggagaacccttttattatcaaaaagatt

SEQ ID NO: 90136 - DNA, 694 bp, Eucalyptus grandis
  Intron number 1 from transcript Egrandis_v1_0.013011m (loc us Egrandis_v1_0.013011m.g) derived from phytozome v7.0 (c hr-ID scaffold_6; pos 19883144 to 19883837 reverse strand)
tcgccgccgcggcgtcggcgtcggatctcctccaggtccggaactccccgtttcctgtagcgtcgatgattcgtttttcggattccggaacgtgcggggtgtggggtttttgcttttgagaatgctgcggattggggggagtttgacttgctttgcttcgtgtggtttgactctgggtttgggactttgctgtcttccatcgaaggattggtttttgtcacgagtttcttggggagtgttgttacttaactgaaaaggaagcttaattattcgagttcaactgcctgcatacttccttccttttccagaagcatccttgaatttgattacgtaactgattttctagcatcaattatgtatatagggggaggtcactgctttgaaaaatttaaactagttccttaaggacaataacgagttcttgtgatgttacctgatctagctggtcatcctcaatctttgtcatataaattactcgatagattcgagtgcatcgtattgtgcgatgtgcttgctgcttggtgccttcggtgaaattgtttcgacccacagatcaatctttgcctctgtgcgtgatttttattgtaccatctgtcctgttatatgggggacttcttttgcttccttctcacatttcagaaaattgttcttttgggcagtctgggtcatccccttgtgaatcttcggaaaaggt

SEQ ID NO: 90137 - DNA, 901 bp, Eucalyptus grandis
  Intron number 1 from transcript Egrandis_v1_0.003780m (loc us Egrandis_v1_0.003780m.g) derived from phytozome v7.0 (c hr-ID scaffold_6; pos 26563669 to 26564569)
gaaatcatcgtagcattgactccacaatcaagcaggtaatcatttccaataatggagttccacgccccttgtctttgctttttctcttcttctctctttttttcgtcgttgggttttgttatctttaccttcttttgattctgaaattttgggaaaattttttgcgtttcgtacctcactctctttgtatgcatttctgggccatgtgttgataaaaaaattttgttggaaaggtgtgattttgccgtcttggtttttcttttcctgtcgactggaagcggacaggcacgtttccacattgtggaatgttttggtttccctatttttagatcgcgatgtctgttaatctcgttttgtcatcgacggatcttggccaatttcggaatacgatccatgatttcctgtcagaaaatctggagtcttttcgctagcttgtgggtttttctgggtccaattgtttttaagtgtacagagcagcatcgttgacagagttgattgtgcaaaaggacaacccaaaagaatgtaaatttcttgtctttctgtttttccatgtgataatgtgttctgcttacagatcatttcctgatctcgaatttctttttggaggagctgctttgcttctcagattcttggaattgatttgattcaaaatataccgagcagttgattggatatactttgtactcttctgtgtaatacctgcttgatttgagcaattctcaaaggaaactttatctcatggttcccctttatccctgtcgaatttcagtagaaacatgtttcatgcgtttattcaagctgcagctcaatatggccgtacctattcttacatctcctatgtttcttgtatggttcatatttttcagaacattctacaacaccgcgatagttttccgtctat

SEQ ID NO: 90138 - DNA, 942 bp, Eucalyptus grandis
  Intron number 1 from transcript Egrandis_v1_0.048042m (loc us Egrandis_v1_0.048042m.g) derived from phytozome v7.0 (c hr-ID scaffold_6; pos 41456589 to 41457530 reverse strand)
caactctaacatccgtagtgattttaaggtatgactaatcatcattttacactggtttccatcctgagattgtgagcagggtattgctaatatgataggggaagcatgtttggatgtgctggtgagccactagccctttttagaagtagttgcccagtcacatgaaaatatgcattcttgtaaatgcatactttattattggtaagcctaagaaacgtcttcaactaacaattccccatctccactagaagaatggaaactatagtataatttttaaaggttaggcaagtttttaccaattagtcttagcggatttcatggttcttaatttatttactaacactaatgataaagggaaggacttattggtgggcctgcaagatgcggtcatgaaccgttaatggttgctatcaactaccctggttactgctttatgccactctagattgtccctgctcatcctcctttgcgagttctcatggtcctaccgattaaaaaaatatctttacatgccatatttgaaggaagtggaatatttaatgtttctttgttgcttatagaaagttagaagtaactcttttacctttcgtcaaattctaaatattacttaaattttagaacattatgaatacatgtatcaacatttaaatattgtgaaagttctatgaatttagatttaagaaaaaaagaatcaaaagtaaaagtcactgcaaacaaacttttacttgaggaaaatacttcaatttggcgaatgccaaatttgtttttgcgacgtggcactggaaaagtgctacccatctttatatgttgtcaacctctgtataatttttcagcttgtggatttgatttctgaaattttgtcttgtgaagttctctcttgatctgacacaatctaaatgttgatcaggctaaggatagtttcgggactcacccagacgtgat

SEQ ID NO: 90139 - DNA, 555 bp, Eucalyptus grandis
  Intron number 4 from transcript Egrandis_v1_0.027416m (loc us Egrandis_v1_0.027416m.g) derived from phytozome v7.0 (c hr-ID scaffold_6; pos 23222845 to 23223399)
caccgctcagagtatgcaacttccctttctggaaaaacaacctttttccttgctgatgcctagtttgtggggagaccttattttgggagaaatgcttgaggtttttaatgagcaaagcggtcagaggttgaatataactacagtctagcccaggattttatcccagcctcctgggccatggttgtagtatttccatgaattaagcaaattgcagaccagttttgaacttgggaagacagtcgttcacctgtatggtgcttcagctagataaaattttatatgaatctagcatggcatcaggcacttgaataaccacaatgactttttccccatcgagaggattctattagatgcttgcatctgttcatttctgaggttcttttagttcttatgattttctatgtcctagcatttagctttcttcacatgctccaatagcatagcctatagtcccctgcatctaagtataagcaatttgaagtcaatatgtttattagaacatcttcctttgttttgccaggtattttctgaaatcctcagttgtatcagcacttt

SEQ ID NO: 90140 - DNA, 820 bp, Eucalyptus grandis
  Intron number 3 from transcript Egrandis_v1_0.008188m (loc us Egrandis_v1_0.008188m.g) derived from phytozome v7.0 (c hr-ID scaffold_6; pos 26183036 to 26183855)
catcgccgaggctcacttccacttctaattttgtgagtaatctgcacattttttcaagaacttgcatgcaagaacgtgtgctctgagttttactcttcttgatttgtccatcagagtatttagttcgcaagctccagtcgacagtcagacgtgcatattctggcaataggtcgtgcccatagtcgtcggaatagattaatatgtcacacttctgaaagaattgtgcagtcaactatgcaagtccgaacggtagttgatttctcatgagggattgctcaaccttagtggtctatcctaatcagatttttaagatcagacgatgcaaattgagttcggatttcaaactggtctttgccggccaaaactgctcctggtatcatcccttacatgcggattgagcaatcttgggtttgttttaccttgaatgacctgagggcgattccaccatggattttgaaacttaaaattatattgctttggcttgctactaaagataaccctttgagctgaagccttgccacttgaattttcgcactctctgctttaccactgaaaggagtccctagcataagtactgactatggatacctacctttatttaacattatcagcaatgtatttttcatatcaattctttcacctgctagtcgagaaccctgccgtttgctttggttgctacacctcacatgcgagacccaataacatctgcgagagagactttacatagggcatgactactacagaacctctatttgtaaatcactttgctgtgtcttttgacccagattgtgcaattggagaggacttcacctgaacaaac

SEQ ID NO: 90141 - DNA, 630 bp, Eucalyptus grandis
  Intron number 1 from transcript Egrandis_v1_0.011747m (loc us Egrandis_v1_0.011747m.g) derived from phytozome v7.0 (c hr-ID scaffold_6; pos 29845966 to 29846595)
tcccacaacggcgaccatcacgcgcagcgatcgaggtgggtccccgttcctccctcctagggtttcagcgagttcctcgtttgcttttttccctcccttctctcattttgttgcttcctttgaagttcacctttttcgcggcggtgctgcgcactcaaatttcgaacagtacctcggttgagtaaagccattggcattgtcactatgcgaacgcttttagttttgggtattagtcactgtgtccgtcgctttactcttcttcaagaaacacgacgtcgaaggaagcagctgtatacagcggttaacccatttgagtatttccgaagggtgtcctcccttacgaaagtggagagcagatccgccattgaaggcttccttttcactttgcttatgaccagttccgtctctgtctgagtcggtatggctttttttccccctttcgaaagtattattgtgccctattatagtatcaagcagacgtctgcaaagggtcgaacagtagtatctccttttctctttctttggtcctgtactgatcgaagcttagctaagtttgagtaattttttaaagcgctggattatcgccgacgcgcaggtcacttccatcggagtcgagctgctcgaggaact

SEQ ID NO: 90142 - DNA, 935 bp, Eucalyptus grandis
  Intron number 1 from transcript Egrandis_v1_0.019976m (loc us Egrandis_v1_0.019976m.g) derived from phytozome v7.0 (c hr-ID scaffold_6; pos 18839166 to 18840100 reverse strand)
actcttctgtttcttgctggtgatctttcaattccgacgacacatgaagtgaaatcctggatcgttttctcgtctctattctattagtttcttgatgatttcatatattcatcatctacagttttaaggttttcgcgtggctggtggacttaacaggataatctacggttaacttgcagactaatgaaaatatggtggacaataatataccgtcatgctgaagtactttgaaaacagatagttttttttgctaaaatactgagctaatagagagaaaaaccctaattttagttgagatgcggttcctgaagatcacacatgctatttccaaccagatcaaccgtctcatgaacttaccaatagtcaagaaagctatattgtttgattgaactttatgtaactatcttatactagctgagttccaaaacaaatgtaatctttctttcatttgaagctcgcagttgaaagtgctaagagatgacttcataaccatgaggcaagtttgtattctgtaatttctacctgcgatatgtccttattatccatgatcacctttgaatgtttctaagtttcaaaaagcccccaaaatcaatagaggtaacaagtagtctaactgttgtagtctcgagagatgttcagataaataataaaggtttagcaatttttttgtatttctccgcaataaatatctatgcccttcgatcttaccaaaaaaaaaaatatctatgcccttcgacccgtttcaaaggatggctaggtaaaaaactagtggtattgtatccaatagcctttctggggttatccattctgatggaaatgatgatgatatatttctagaacaattacatgattatatgagatctatctattctcactgaagtagattttcatttgcaacagaagcaagtgatacaggagataaggagtggtacttc

SEQ ID NO: 90143 - DNA, 357 bp, Eucalyptus grandis
  Intron number 1 from transcript Egrandis_v1_0.045472m (loc us Egrandis_v1_0.045472m.g) derived from phytozome v7.0 (c hr-ID scaffold_6; pos 51059430 to 51059786)
tgatagcagcaggagctgctggttgttttctagaggtattagtttcagctgagagaaatataatgctgcttctttacgaagctctcagccttttctctttcttcctcactgtaccatgtcccaaattgtaaattagtcaagtttgagcctatcattcagtttaaggtatattgaattttatgcggtcgaacattcggtgaaagatcttaccaaaaaaaaaaaaaaaaaacattcggtgaaagatgttattacacatacgtgttattagcaaagatccttttgagttagttattcattaattctgtctgacaactgtgcatctactgatttcaaattactttcttctcaggatcaagc

SEQ ID NO: 90144 - DNA, 1007 bp, Eucalyptus grandis
  Intron number 3 from transcript Egrandis_v1_0.045472m (loc us Egrandis_v1_0.045472m.g) derived from phytozome v7.0 (c hr-ID scaffold_6; pos 51060185 to 51061191)
gaggtactagttgactgatcctctgctttttgtcatggtctaccgtctaatgagggttctgtttgttgtgaagcagaaatactgatctcagttggagtcacgcggtcatcctgtgttgagacacgggtttacagtcaatatgcagatctctttttttgacatcattacagtattcaagtgatgattagttgttcaaccccaagttagtaacaagaatagacattttggcatcttatgtattggtagatctccactttttcatcctataccttcatttctccagaaactcatgcagattctgccatatttttgttgtatcatatgacctcttagtttgtgttccatttgcctcttctcttaccgttttgctcttgacacccattatcacccttgacaatcttcgcctgccccaaaaattaaaaagaggaaaaggaaaggagtactgctctctgcaacataaggaattcagtgattaagcttattgattacaccatcctagggaagttatataattttagactggtcgtgaatggggcttgtgaattcaaaattagagctttgtcagttggaactgaggtgattgagcttagttgtttacttcaggcagtgatacaattgctcttcacaaaaattatgcgtcaaagttctattagttgtttcacccgatggctagaatcgtcaagacatttgctgtctaattctctgtcggaagaaggaaaaggaaaggaattagcagcaacatatcataaccgtataaatgtttgcatgatgatttctgtcaatttttcatttaactatgtgaatcctattatcgtttcttagcattcactggatggtcaaagctgtttggataatgtttattggtgcttccaagaccctacaagatggagcattgcgtttccccctaaagcattgatagaatctcgtttgaaatgaataattgaaaacaaatttttggtttcttaactcgtgttgtttgttgtaataaatcttgcaggcaggagctg

SEQ ID NO: 90145 - DNA, 716 bp, Eucalyptus grandis
  Intron number 2 from transcript Egrandis_v1_0.030219m (loc us Egrandis_v1_0.030219m.g) derived from phytozome v7.0 (c hr-ID scaffold_6; pos 50156914 to 50157629)
aacaaaaggttcggctcctcttttcgctcccgctggtgcgaagcttgcgttgcttctggagaatcgagtatcatgtgtgtgcggctaggatagttcggaaaaaaaaattgattctttatttgtgggcgctaggattaattctccgagtaagaaaagtttcgtgctttctggctgtttgatgtgcaagtggtacgtctccactcatacaggcatctgggtcggatagtttctgtcgcattttggaggatagttgttagtggtcatcattatctgagtgggtcttcggtgatcttggagcactgttttttcggttggctactcacccaactacttgggcactggtcacatgcgaaatgaagtagctgctgattttgtagtcatcgtgaattttatggaaaacctgggaaacatgatgacttgtagtgttttgtcttgtggacggagtaggaattagggagattcggtgctcattacttctttttctaaactgaattacagcactggaagatagtctatatgattggtttaatcttctgttttatctactggtttaatacattgctagttctagcatgtgaaataattgtctagtgaatgatttgtctttgaattcctcgcaaaatgataggcatttctgctataagatgcatctaatgcgggaattttctcttttgctgccagggctggtgaattgtctgctgcagagctagacaacc

SEQ ID NO: 90146 - DNA, 854 bp, Eucalyptus grandis
  Intron number 1 from transcript Egrandis_v1_0.016202m (loc us Egrandis_v1_0.016202m.g) derived from phytozome v7.0 (c hr-ID scaffold_6; pos 34038141 to 34038994 reverse strand)
cagggactactacctctccaagttcttcaaggtacgtcccaatctttgattgggagtgtgaatgggaatcgtggtgaatgctagtggatggtatcttccctcgacgtggaagtggaactttcagtaggaaagtgcaggaaatgttagctttttggggctatgttggcaaaaactgtgagttgctctagttgaagcaggttaagacaaaaccttttcggcggctttggcatctgcacgtcgggtgctttgtgatttccataacgtttgttcttgattgcatcttgggttgaacatgacttcactgagcattaggcattcttgcgttaatgttttcttgggcacggattttgtataccagtggaatcactgggcacatttgcggatagttggcccgaaataggtgacaggatgcaaaagtgaaataccatttacgttctgctgtaaataggttaatctctttgaaaatgattagatttcttatgagacttgctaaatctttgagcttctaaattatgatacttgaataatgaagtactcaaggagaaagtcaatacaagtgcttatggtcaatctcagtgatagggtagtggaccactgatttgttaataaacttgttattatacacttctttctgcttcctgccctatatccttctttcgctttgtaatatgtaaacagaaatcatttcaaactctcaagcctgatatgctggtggtcttgggcgatttttctgccagaggttcggagctgacgagacgcaaatgggtccctgtacttcgtcaatttcatagattgataggatctcttattgcccttcctttccatgtcactttgggtgacagggatattggaga

SEQ ID NO: 90147 - DNA, 872 bp, Eucalyptus grandis
  Intron number 2 from transcript Egrandis_v1_0.028277m (loc us Egrandis_v1_0.028277m.g) derived from phytozome v7.0 (c hr-ID scaffold_6; pos 42334628 to 42335499 reverse strand)
gacttgccgttgcggctgagcagagaagaagcactgtaagtttgcgtttgttctgtaaggactctgtttcgtgctcgtaagttgccaattctgcggcaatggctattgtccaagtcgttcagtaatttcgtgaatttgttcatggattgcatcatcttttgcctttgttgataagagagcgattatattcacctgcttagtggaggaaaaatagcatcctttcacctccaaagggccacggcgatagaaacaaaacgccaatcttctgcttctcataattaggattcacacctactctcgaaaagcatggcaaaccacggaatttccagatctactaattccaacattatttctcgcggaactccatcattgaaattccgattcaacgagaaaaaaaggtctagcttaagatgccgtagagccagatctcgcttgtcgcaattgtgtgtcctgattgaatcttttgataggtatacatacattgtggctaagtccgcccctccgatgctcgagagattagatactggcttaatgctgcagttccgatctatgactacaaattactatattgtgcaattttgatgaggaattcgattgaatttaaatcaaaccgatgttctggatccttgttttccttaaatctgcgacttttgcacaatgaatacgtcttcatatgaatagatatctttgtattctatattcaaagttgagctttgctcgcccaaacgaaagcattacctacttttctacacgagtgatgcagcaccatcaaagaaatttatataaaaaaaggaaaaggaacttcccggacaatttcccggctcctaactaaaatggattcgtctcttttcaggccacaattgtcacggaca

SEQ ID NO: 90148 - DNA, 846 bp, Eucalyptus grandis
  Intron number 1 from transcript Egrandis_v1_0.006571m (loc us Egrandis_v1_0.006571m.g) derived from phytozome v7.0 (c hr-ID scaffold_6; pos 1841260 to 1842105 reverse strand)
caggtatagacatttgttggcaccgatagcgtcttccatcaagctgctaaataaaaatcttgccttcacactgttcaccccctacgagcgaggcatttttgagagaagggtggaagtgttaatctttgattttcttctgggtagtaaactggtgatgtgggttttggttggaacgtgtaaagctttgatttttttctttcccctttgtttttatgaaaatgggtcaatccctctctttgcattatcttatgggtaggacttggggtggatcgcatttctcttgggttccaagaacgtggaggtcactggccattttctgtcaagtctaaagctgcattaggaggacttttcatgaacatctctacctatctggtctctggtctgcgtcttgtcaagaaaaaagctgagattttttttttttttgcgctcctttgtattcttttttcttgctgtcaagtatggggagggtcttgtctcctcttcaagggagtgcagtgggcacaaaagaagaaaagcccataacaagccagagatttcttgggttgggatcttttttagtttctcctaatttgccactggttcttttttgggtctccttatctctacttgccctccttcagctctgaccgttctatgtctctttaaataccggcagacaagctgttgttttgtttcgttcggggctgcttcactcgacagccttcaattttttccttctctttttgctgacttgaaatattctggcttgtctgttgtttgatttgattctttaggcgttgagctacgtgagcttaatcttcccttctgtatgctctttttcaggcttcaactctgctgcaagtttga

SEQ ID NO: 90149 - DNA, 782 bp, Eucalyptus grandis
  Intron number 3 from transcript Egrandis_v1_0.030075m (loc us Egrandis_v1_0.030050m.g) derived from phytozome v7.0 (c hr-ID scaffold_6; pos 18711028 to 18711809)
tcgacggatacaggttagcatgtttcttctgttacttcccttattttttctttaccttttgggtgctttttttttttttttttggacggttccttgttgggtgtttgtgtctctcttcactgtccaatttcctgtaagggatattccttcatgtcggttcaggcaaatgggtttgctacttaaatttgtattcagcatataattgtaatttcaaagcagatatgatatctcctcgatggtgaggccaacgcaagctttacggaggtgccctattataaaataaggcgttgggtcttagagtagagaatggaaacgaggttaactttgttgccatgagctcctcttttaaggtttttgagagcgaaatacaagacctttcgtaaagtttacatcgagagacgagaaggatatttattagagcgaggaagaaaatgtatattagcgctagatcgtttattttcatttgcctggatttagaaagaatattcacctagtaataacaaaaaaactgaattccgagaggaaggctcagtggattactgaatatatcagctcaagctcctaaatcagatataaggatgattgcctcgcaacactcggaactgtggatttttagcatcttgcgcaggttgcttgctgcctctgctactgctaagtatttttgtcgtttgatgttacatgacatgcaaggacagattgccttgtataatgattcttgactcgccaataacgccttgtttgcttccttaccctttgtacagtcccatatactcacccgaaga

SEQ ID NO: 90150 - DNA, 629 bp, Eucalyptus grandis
  Intron number 1 from transcript Egrandis_v1_0.026846m (loc us Egrandis_v1_0.026846m.g) derived from phytozome v7.0 (c hr-ID scaffold_6; pos 7586025 to 7586653 reverse strand)
cgtggctggttctcgtaaggcttttggtctgagttgttacttgttaatgctgttgactgggaccggatgttcgagaaggaaagcgaacatctggtccacctggtatcttctctgctatgcttggctattgcacgataagttgttgcccaaaagaatagttcttaagataagaagctcttttttaactgcccccttttccctccctttagattgtgtttgagtatgtcagcttgtactattgaaatgcttggatggtaattgcagtacagttccttgagcataccttgatgaatgataagtaactgcttatgatatgctcgggagaggcgtacatgaatgctcaagctgtgcgaaaattttgaaattttgcttgctgaatgcttttttttcatttccagatggaacacaagtgtctttggtttttttttttttttttttttctcttatagttttatttatttattttcgctaaggcatttttatttagttttattctacaaaatatgcacaagaggtgttgttgattcaatgattcattgatgcctcatgaatccataatatgcaatgtaaacttccttaatgaatcatatttgttagggaagttgctgcgagaagttgaacccgagtta

SEQ ID NO: 90151 - DNA, 679 bp, Eucalyptus grandis
  Intron number 1 from transcript Egrandis_v1_0.043880m (loc us Egrandis_v1_0.043880m.g) derived from phytozome v7.0 (c hr-ID scaffold_6; pos 53015678 to 53016356)
atttcctacctttgttggattttctcgacttgcaggtcgtatttaagataccgcgacatgatttgattgatgcacaaaatgaaatttccagttttgagcaattaatttagcatgccaaattacttgatacgatttgtctcgtaaattttttaggtttattatcggtgtaataattaacatatgcactgaccatcggattattgacatgcacaataatttagctacacaattaagtttaacattgaacatgtaaggaggatgcaacagagctggaaccttagcccatctatcttttcttgagctgaggcctcccttgttttttcggtctcttttggatgaggttgctgtggtggccttacttgtttgtatatttgttctagtggaggacgtgtaacttttgggtcttaggtctttcctgttttcattttggaggtcgccgctatttggctccccctcttttccttttcttctcggcacccttccactcgttttgacttgtttgtctttgtgaatgcaagttttgttggtgccgaggctcgtttgctgtatagctttcttggttaaaagtcaatatatatcttacctttacccccaaaaaaaaaaacattgaacatgtaaggtcttcgttactaataacaattcttctctcttattcgtctctttcagggttacatagagg

SEQ ID NO: 90152 - DNA, 556 bp, Eucalyptus grandis
  Intron number 2 from transcript Egrandis_v1_0.009066m (loc us Egrandis_v1_0.009066m.g) derived from phytozome v7.0 (c hr-ID scaffold_6; pos 38199031 to 38199586)
tattcaaggagtctcctgtggcaaaattggttgatgtgagtattaaatcttgctgttggtagaatttacccaggagatagataaggatgtgcttctttggaagatcttgtctataatgtgtctactgatggtttgaatttggacccctcctgagccaatagttgttcaaggaatcatttttaaatgtccctggtggctttgatgtcgattgtaagtgttttctcaaattggcccctctatcttgactcttgaatgtttgctcctggaatcgttacctttgagatgcttttctcctggaaacttgtccattttattcttggaacgatattgcattagtcgcatgtcaaattaatagctccagtctgcatatttgaaaagcatattatttttgcaagcgcgcctgatttcttgatgattttttctttaatgtattttctgtttgattgcatcaagatggaaaggcatgcttttgttgtttcatgtatttgatattttgaggacttgacatatcataaattcactttctatcagatccctctggctcatatctcagaag

SEQ ID NO: 90153 - DNA, 1029 bp, Eucalyptus grandis
  Intron number 1 from transcript Egrandis_v1_0.033266m (loc us Egrandis_v1_0.033266m.g) derived from phytozome v7.0 (c hr-ID scaffold_6; pos 39102950 to 39103978)
cgattctctgaagagcgtctccagaggatttgaaggtctctctctctctctctctctgcatgaattcttgggttccgatattcgagttaactgtgtaattccctttcttttctggaacccattttgatcggtttcacttgattagccgctaacccatcgccaaattcgcctgaattccgctagtttgattttgggttctatttgggcatccgcacgatcgagatttcatgtgctcgcatcgtatgttcttgctcttcccgttgtgtcacgacatgaatctgggcttttgacttgtctggtgttttgagtatggattagttccataggagtaggagtgttacagaattggcttgaagcttattgtttaagcaatgttagacaatagagagcaatataaagaaaagagaccattgagctattaggagttggtgaaacttgagaggacatatgatggtgcttactaccgattaatgcactcgtggcgcaagagaattcatgtaactgaatggtgtgtgcgccagtgagttttcttgataaaacagaagatgatgcatgtgggtctggatctatgcctcactttttggaaccctgtgaaaagaagttgcaatcggaattctcagtctgttacgtgatataatgtgcatatgttcagcttgtcttcgcgtaagcaaggataactgtttgttaaagactattcattttttcgatgataggtgttctttataattatctaaggatttggtgggcaaatttctgtgctgaatatgctgtcgagatgattttctttacctgattttgagttttgagcaaccctagattggtcttgttctcgagaatattcatttgaacaatctcttgatctcgcttgaccttgttcattcttgttctacacccgacattagttgctgcctccttaccttagcatatcctcctggcgagttctacttggtctaagcatgtagtgtagattcaaattgttgattcctggttgcagacaagaaatcttgtgagttggtcttgataagggtg

SEQ ID NO: 90154 - DNA, 790 bp, Eucalyptus grandis
  Intron number 2 from transcript Egrandis_v1_0.001674m (loc us Egrandis_v1_0.001674m.g) derived from phytozome v7.0 (c hr-ID scaffold_6; pos 16639690 to 16640479)
gcccgcaacaacaccgtttcccacatcatcagcatgtctctttctctcaatttcatgaattttaccatcatagattcctagctagactttgatattaatcacacgattgcacaccgatttttttttatgtctttatagagtcaactagctgctgaactgaatctctttgcactatattagtatttcatcataaaaaattaaccgattgtctggtcgaaatcatttatcatattaaaattactcatgaagtaattatgagcataatattaattgttcacagtatgattatataaattttcataattttaattaatacaatcacatgttatgtgcttagaatttaattatataaattatatttttagtgataattggaagtgttaaactcaaagatcatgattgactatcaaaatgatgagagttatattccctctaactttaattgtagggttaattttagaattttaacgctattctctccttattacatatgtcattcatactaatgcacggtagggttgtgctttgagtgatgcttgcttttcatattaactatatattcatttgctttaaacaaaatcttctgtttttttttttaggcaattttcgaagaaattttttttatttatttagaatcagctgagatttatgtatatatttatcaatagatgtaatagagccattttttaacgtcattttgatgcctagttttcaagtaaagatagagtaaagcctttccgtcgttgcgaaaacagaattcttagggagcagtcacttgctggcagtcttc

SEQ ID NO: 90155 - DNA, 848 bp, Eucalyptus grandis
  Intron number 2 from transcript Egrandis_v1_0.009663m (loc us Egrandis_v1_0.009663m.g) derived from phytozome v7.0 (c hr-ID scaffold_6; pos 37251142 to 37251989)
gatcctcggtaatgactcttttactcttctgcagctgtttcttgggtggaaattttcgtcggatgtattgctttggcagtcctctgtggcgcggctatattcctctatcttccctgatatcttctcttttggatgtaatatccgcgcctttggctgggattggaatggaaacgacactgatgaatccacagttgaatctttatccacgtgtgcctgcatatttctcgtgattgatcatattggtcttctgtttatttcataggaaaatgggtcgacttccttttcctaattcgttttcttcaattgatatgcccgaacattgttgatatttgatgaatatgcttgaagatagttagcaatgttaaaatgatcaaatgaatgctaaaaacacggtcacgaatagaccgtcattcaaatttttcaagacacacaaaaacacctgggagctagtgacttccaaaaataattcctctttaacaacgtgtaattatgatgtgaattgcatttgggcatcagattctggataattcaggtgctagtccttgacaagacatgcttgatgcataatggtatgccaacatatgaagtttgcctttttgcattctataagttgtcctttggactgtcaggataaagtttagctgctctttctcatctggatacatgtggcagtttttttttccctgaaaaagaaatgtgttggattcatctattgcttattgcacagggtgtcttttttaactctttgtcatatcggtctggtttcttgtatataaacatttctgaactttttctataaatgaatttctgcagccaatctaaggacgctttgaaggtattgaaaaagc

SEQ ID NO: 90156 - DNA, 390 bp, Eucalyptus grandis
  Intron number 1 from transcript Egrandis_v1_0.044373m (loc us Egrandis_v1_0.044373m.g) derived from phytozome v7.0 (c hr-ID scaffold_6; pos 18192609 to 18192998 reverse strand)
cttccctttcttgcatcaatcctcccaaacatgtatgcacttcttcatagtatcactccgtgtggcacttatattttccttttaattaacactcgcttggcttcgtcctttggtcgaagctgttgctgatggagtttcagaacatttgaatatactattctttatcttggaaattcatacttccccgttttgcgtttttgcgaccaaatgtgttaatgcatctcaattgctttaaataattgcttattttgatatgcacacaataaggacatcttactttacaaagcgacattaaataaaaattatgtgaccgtgtcgtgtgacagcataccatgtatttcatttggcgccgtggctcttaccaagtgcattgcaggcaaagactcgttc

SEQ ID NO: 90157 - DNA, 652 bp, Eucalyptus grandis
  Intron number 3 from transcript Egrandis_v1_0.010521m (loc us Egrandis_v1_0.010521m.g) derived from phytozome v7.0 (c hr-ID scaffold_6; pos 17682703 to 17683354)
tttgcatagtcaccgttgtacaaaaagtaagttaatatgctacaaagtcattgttgtagaataagtaagttgatatgctgtatatcctatgagattttatgggaccacagctaactgttctaaaagtttaagttgttagatgaaatgtgaacatatttaatcagggagacaaatggggcctcaaaagatttgaactcatgacatccagctctaacaccatacaagattttatgagaccatagttgactattttaaaagtttaaaccgttagataaagttgtgatttaatattaaattattctaacatatcctatgattatcatcatatcctaatttgcatcttactctctctgtaatttctcatcaaatttatctccttgtcaactctcctcttggctattgtgtcgatctttgatggttaatgcataattactcaaataacttcaaaagccacccaccttcatgaaataatgggttgctcataaactggggagtttctatgtaattttccaataagtgaattctagcttatttagtgtgtctggaaagtccactccatattaacaaaaagaagaaaacttgatttttttctgtggctgcttctttactccatccagatcggtataacctcttcataaattgtggtgggaac

SEQ ID NO: 90158 - DNA, 918 bp, Eucalyptus grandis
  Intron number 2 from transcript Egrandis_v1_0.005097m (loc us Egrandis_v1_0.005097m.g) derived from phytozome v7.0 (c hr-ID scaffold_6; pos 52970518 to 52971435)
tggcattcgggatcagcttccttctcaagaggcaggtaataaaattatttcctttgcttgttttcgaatcggcgttcggcttcatttgatctttgtcgcttctttcttttctgttatttacatggaagacttcattatggtgtgctggccagtagaatatgcatctttattttaaggtgaaatgaagtgcttcgtacatgtttaacatatgtgactatggaacgatgttagatatgaagaagccaaaaaccgagtgattgaacttattgactttgagcaatagaggaacaggtaagaataagcatgcggtgaggtgtaaaatcatggactgacattgcttaatattttgtcttctgggccaatttggtagacatatttggatttttgtggatgaggagcgtataggattctggaggtacgattgattcacacaatacttctgaagtttttctggatagaatgctatctaatctcatcatgactgagaaggggttgttaagctcaatagatatggggtagcaagatgttagcaaacatgaatcatgtgcatagccttgacagtcttctgttgcggaatgttcatgcatattgctgttccaatggaggataaggttgagggaaatgtgattttgacagaaggccagccaggaagacatttataaagatgcttcgaaacagaaattaatggaaaactcatcgaggttcacgtttgttcatacactaaatatccttgaaccctttgggtgcttgttgcgattgaagactttgtattagcatagttcttcctgttgagttttttaaaatttaggcatgatttgagcgaggcgtgaaaaactatatttccttactttcatgcttctaattgtacaaccacgttttgcagggaaacttaccagttagcaccgtatttggtggtaa

SEQ ID NO: 90159 - DNA, 831 bp, Eucalyptus grandis
  Intron number 1 from transcript Egrandis_v1_0.015733m (loc us Egrandis_v1_0.015733m.g) derived from phytozome v7.0 (c hr-ID scaffold_6; pos 38023301 to 38024131 reverse strand)
tgaaaggtactttagtaactgtgtttcttgttgctgttttcagtttgggaaaagtgtctcgtgtctgttttctctatattgataaattgtgcacaagattgaatggttttagcccttaccaaatcgggaacctaccgctttgggtgaattgcatcattttcggtccaaaatttgtcgccgatccttcttagaaatggcacagctttttgaagagggtccactcctgaggttgtatgttctgagaatctgtgaatatcaagaggattagctttacgtcaggccccaagaaatggcattgagtagacagctgtgaaacaaaaagtattaacaggcggaataactagaaagataggtgccattcgagtctttcatctgtgcttggacctttagtcctagaaactcaaactgctaagagatggatgaacaatgtgtgctcaaaacttggcccattccaaggggagcccaattggacaccataaatggttcctttgtttttcatcaaacatatttcacaatgctgtcatcctcgagcttggtgatgatggaatttcactggtgacatcattaattttaaattggcctagattttcactggtgaataggccactaataaggtgttatgatgtggaattcattgttaacgtaaatcattggttggaagtattggaaagaagtgaaagtcaacttctttttctacgatgtggctgcaattaagctgtgcaaaaatagctttgtcattaactaggtttctcacatgttgctgcattgatcagcttatcccaattctaatgtgatctgcatattttcttttaggaaaagcggttagaggta

SEQ ID NO: 90160 - DNA, 715 bp, Eucalyptus grandis
  Intron number 1 from transcript Egrandis_v1_0.038656m (loc us Egrandis_v1_0.038656m.g) derived from phytozome v7.0 (c hr-ID scaffold_6; pos 22621734 to 22622448 reverse strand)
gtctgttttctgtctggaggtcatggaggcaatgcctagtctccttcatatcttaatcttctcttgggtttcatgaggtaacagccaacaagatttaaagagttcaagcatgtgaagattcttcactcccaaggatctagtttagtgtcacttggcccaagaacaatgctaattctactgatgtaaaatgcaaatgattatctaatgggcaacgacggccttttgagcaggtttgagtggagtcttttaactggagcacatgaatttataatttgtgctcaaggttgggaagattctaattgttccctccctagctaaatgctgcgaataggatattctgtgacccacatgatcaagttcagactcagatcaacagagaaaagacaattaatcatccttctgtttcggaatcgggacagcaataccatccatgcgcatcaataattaaattcgttcgagctttcttttctgctctaatctcattgtaataatgacgcgtttgtggagatgtcggaggatccatgacgtgctagcaaacaaagactggaaggatggtcttttttgataactttagcccttctatatatacaaggtaagagattgctcatgcttcgcaagccctttcaattatcaaagccaattaaaattccagattagtgaaagactcaccgtgtcaaaatggcctgagaaaccaaaacttttatatccgttagtc

SEQ ID NO: 90161 - DNA, 564 bp, Eucalyptus grandis
  Intron number 2 from transcript Egrandis_v1_0.029751m (loc us Egrandis_v1_0.029751m.g) derived from phytozome v7.0 (c hr-ID scaffold_6; pos 39942210 to 39942773)
tctgcgtctcttatctttccacggcgaagatccaagtacagtctctctccctccctccctctctctctctctctctctctctctatctagccgtcgatactttttcagtttggtgattggaaaatctctttgttttatttttcagttttatgtttttgttaaaagctgttttcaccatgtttctctagctggatttgaaaagaaaattgaaattactcgaaacaccttcctacattttcatcggtttcactttttttattgaactttcaaatttaaggcggatatcaattctcctttagaattatcaatgtaaactgaaacgaaaaataactttatgaatcaaatgcaccctttaaactatgtagttactctttcccctatatcgaaatatttgcatacgaaacgtataccgataaataggtgaaaataacatggatgatcatttcccaaatgtcaattttcccaaaaagaaagaaatctggagatgacatcttggagcaacaattggagctttctttttatgtggcaggaagaagtagagatagagtcaaaggtggtagggcc

SEQ ID NO: 90162 - DNA, 716 bp, Eucalyptus grandis
  Intron number 1 from transcript Egrandis_v1_0.018191m (loc us Egrandis_v1_0.018191m.g) derived from phytozome v7.0 (c hr-ID scaffold_6; pos 6265860 to 6266575)
tttttcgggttcttttccgttcctcttcgttccgggtaagatcgaattttctcagtgttgttggagagattttttagcttgttgaagcattcgttgtgtgcatttttagcttgcttgttgtggggaattttcattttcagttactcggaaatcgtctggcttttctggggccatcactgattcgagttctggagctgaaagctcaatatggggaaaattcttggacacttagttctgttatatggcagaatcttttcttgatggcctattgatccgggtatttggctatagttttgatatgcccatccattagggagctccttccggttcacttattgcttctttggaagttgtctgtgctgtccatttcttttttttgttttgtggggtggggtgtgggttgtttctgttacatgtgtaaattactgcgcagcgtatgagcgacgactttgatctctgttcattaggaaaatacccttttgaggatcacttgttttaaagttttttttcttttcttttcttttcttttgagtgatcatacttcaacagcagcatactctgtactagtgctgtctaagaaacagaaagagaacgacaatcatgacaattttgttccacacttggttcttttaaaacataatgcttatgattttgcatggtaaaagataattctcctatgtatacttatgtcatgatggttttctctgactttcaga

SEQ ID NO: 90163 - DNA, 301 bp, Eucalyptus grandis
  Intron number 1 from transcript Egrandis_v1_0.024598m (loc us Egrandis_v1_0.024598m.g) derived from phytozome v7.0 (c hr-ID scaffold_6; pos 33518070 to 33518370)
actgcgagcagctccagaaagccttcgcaggttcgctctatcttcttcgcgctgcctcctccgattctcttatcgcgtgttgttcggtcgtcgatggtcgtgctccgttcttagtgttcggatctgcgatctgcttggagatcgtggtttgatcggagtgatctttcggtggatcggttgttaagatcgagctatttctgggtttattatttctcttgaattcgggaaaaaaaaatcaaagtttattgtctaattcaatcttttctcttcgttggatgattatcatgtacgatctggaagg

SEQ ID NO: 90164 - DNA, 753 bp, Eucalyptus grandis
  Intron number 4 from transcript Egrandis_v1_0.024906m (loc us Egrandis_v1_0.023303m.g) derived from phytozome v7.0 (c hr-ID scaffold_6; pos 23511347 to 23512099 reverse strand)
tgaacaagttcaagatatcgattcctcaaggtgaaatgaaatgacccgttaatctgaacaccaaattgcatactttctcatagcttttttcacagcaaaaggaaaccccgttttttcttttttccaaaatttctcatctaattctgtgatctgttatggttcatttcacctttttattgtttggtgcattagtatcctgaaagttgaagccctcgctgaaggcaatgaaataaatatcaatggcagcaaacccatcaagttttaattttcaatgcacggtctgagtcatgaatgatacagtactaattttgctgatacggatcataataaaggcattttcctagattcttctgtctcaatatcaagatgcaatatgttggagagtcagaattggactatcttcttgcataaaatcttcaccagagcattgcctgctttacttttctgcttggactctttctaatggatgagatgaatggtctttgatgtgatgatagtttgaagtactaaatcctgttttatttagattggctggtgggtaaaggtgagcctaatggattcaaatctgttactgctttctatcccaaagaagattcaacctcaaacagtaatattttactctgcttcccagtagatttcatctctcatcatccttcggttcatatcttaactacttagaatcctgatgatttgttgaattgcaacttttttcgcttagtcagtgtagctatcactggcatcggcccggacttc

SEQ ID NO: 90165 - DNA, 827 bp, Eucalyptus grandis
  Intron number 1 from transcript Egrandis_v1_0.005791m (loc us Egrandis_v1_0.003635m.g) derived from phytozome v7.0 (c hr-ID scaffold_6; pos 15539213 to 15540039 reverse strand)
ggcagcctcagggtcttccctgttggaaagcttctgtatgtatgcaatctccttttgttgttacttctttaatggatgattttcctctccaatttcaaatatttccatgaaaatgtgtggtttttgtgagctcggcagtaattcagcatatgcgatattcttggctactatattggaatatagactagtagtccacgttgttgctggtaatctcatcatggcaatagcagttgaaaattagactgtacaacaacggaatgaacccagataggcagtggcaaagttagctcttttcaggtttctctttgttggtatacgtgcttgatttatatatagacttcaagcagccaataagtttacttgggttggatgaattgtttgatggaaagaagattccgcatggtagagcttacactttcatggtacaaaaaatgagtgatttattagaaacaagtggacaactttgaaggccttccttggctagaattcagtaattacttatggcttagtgccatcagctgctgaatgagtggttttctccaagtttgaagcacttaaagcaaaagatttgcctcaagcaagctgaaaatcagcattggtccatctaggtgcaaattcctctttactgagatttagattttaatgtcactattttggtttcaattctgcaaaagcatctcttgactcctgtatgtagcaaatggtttggttgctaatttagtatgtgacaatctggttccgttcttcgtcctgtgcaagtgcttgtggttctgtgtaactgattactcaaatggttaaattttctgatttgcaggggtttacgtttc

SEQ ID NO: 90166 - DNA, 643 bp, Eucalyptus grandis
  Intron number 1 from transcript Egrandis_v1_0.031829m (loc us Egrandis_v1_0.031829m.g) derived from phytozome v7.0 (c hr-ID scaffold_637; pos 48157 to 48799)
cctcctgcaggaggttctctctcggcttttaccgggtgagtgatgatgttctgctccgattctgtgccggtcgctttgttttgttcgcgccctgaatcatgggttgttcttggtcgacctaaacctccctggtttcgatgttgctgaggtcctaacgttgaaacatttgatgggtcgtaccgaaattcctctcccgtttcttcagggagttaaagaccaaaccttttaggattgtttgattggtgggcgttgagttatggggcttgaaacttgacaaattgcggaattttttacattttcttggtcgattgtgattgaaaggagatgggatgttggacagattgtattcccggtcccgaccttgttccgaggcgataatggttttcatggtgtgttcgtgatggtttgttcttttgatggccagcttgagagagcttattaggattgcactgatggcgggttgacattttcatgagtaacttagtgttcatgaagtttagtaatctctcttgagctctattaatggggttgttgtgggagtttggtgtcttgattctgatgagatgcagaactggcaattaagtctgactttattttgtcatctgcaggatttgcctcgttgaatattgggtcaagtctcact

SEQ ID NO: 90167 - DNA, 423 bp, Eucalyptus grandis
  Intron number 1 from transcript Egrandis_v1_0.023928m (loc us Egrandis_v1_0.023928m.g) derived from phytozome v7.0 (c hr-ID scaffold_6; pos 47005463 to 47005885)
gctctccattctcaagctcgacggctccgtcttcggtgagcagccctcttctcctcttttgtttgcttaaagacgataaagcaaaaaacgattcgtcggcagctttccaatgtttagtgggttcccgaaatttcatccttccggcttgaaaaatgtttactttttcttgcatttcgattgacgagtcttttcttcttctcgtttttcttgttttgcaaccgacttgggccctggaccgtatttcgttactgggattgatggagccgttgttttgtcagacaaagcacgtgattcgtctagaataatttattgcttatgcatcggtggatgtcatgtttgtcgccgatctgtaatccttggacagggttccgtttcaattggttttttcttccgtttgatttagtcgaggtttcgattgtacag

SEQ ID NO: 90168 - DNA, 549 bp, Eucalyptus grandis
  Intron number 3 from transcript Egrandis_v1_0.010163m (loc us Egrandis_v1_0.010163m.g) derived from phytozome v7.0 (c hr-ID scaffold_6; pos 23409974 to 23410522 reverse strand)
cctgaaactgcaaggtatatccatatccttctttgcttaatttatcttcttaatcaattaatcaaatggtcgtttcattttgttgataaagatttgtttggtctatggtctttacggctatgatcaagcatgtctctctctttggttgctgggattgtgttagtcctcctagagacatcgtccccatagattcttaggagcatttgctgggtgctgctgaatggactaagtttctcggccaacgacccaaaagacaaaacagagttagcccagtcgtgccgaacaattcgtgtcgaccatggagtccccacatttttgtggaacgcgttagaaggagtgatgtatttgaattgaattcgtgtcgttattgaaaaatttgctagtatcggtttgcatatgttaaatttgtgccatgatcggtccctctaagaaaacacttgcaagaaatgggtttcgtgaattattgttgaagaactttctaaagatgctgacacatttctatatatatattttatggtataattaggtacaccgctttggtagagctaa

SEQ ID NO: 90169 - DNA, 786 bp, Eucalyptus grandis
  Intron number 1 from transcript Egrandis_v1_0.007397m (loc us Egrandis_v1_0.007397m.g) derived from phytozome v7.0 (c hr-ID scaffold_6; pos 23236184 to 23236969 reverse strand)
cgcgttctgggttcctcgggtgacgtctctttcaggtgattttggagagtctttgagtgtctgatgggctcgatctaatgtgggtcatcgctcgttgctgtcgcttcctcttgtcgctgcgatccgggctctctttgcgcccccgtccatgggttgaaatttgtctgtagggaatcgttgcttaagaccattaacttttgattcggaggcatgtggcgtggatttgaatgttgttcatgtgggttgggtttgattcgtagcttcggatctgcggatctagtttttggtggtatttatggaatgtttgttcctgcatttcctcttcttggtttgtgttgaaattcaaacttttttcatcggcagtaattaatgtggtcatctagttgcttgtcgaaaaaaagaaaaaaaagaaaagaaaagaaatttagctgtgaaaggatgaagaatttgaattgttgttttcatttctggatttaatgcctggggtgatctcagtaccgacataaggtacttcatcacctgaactttgagtgtgtatagttctcaaaagttgtttgtgcagtgtaggggtgtccgtggttgctgcattcttgagactgatgtgatttgctttcctgtgattgtggctatgatagattgttcgaagtgtttcttttcagcttaatttcttcacgctttgcttttggatggtggttgatgttataacatgaatggatcgtcgtgtgatacagtgagacgatgattgcttcgacctgcaagacgactggagatcagcatgctgagtag

SEQ ID NO: 90170 - DNA, 665 bp, Eucalyptus grandis
  Intron number 2 from transcript Egrandis_v1_0.029219m (loc us Egrandis_v1_0.028988m.g) derived from phytozome v7.0 (c hr-ID scaffold_6; pos 43654929 to 43655593 reverse strand)
cagcatttgctatagcggtggtcctggcctgtgttgtatgtacttgacaaccaggtcttgttcagtttctggtgatgcatgctgtaacagtgcaaacaattggaagcttcaatctcatttaacttgttgcactatttttctttaaaaaattgtagtcataacaactgctggaggacttttttagctgagtcctgtttaattttacgtcatatcaaatgagcaatgtttcacttctttcaggattgttcaggttgcttgttcagctgcaaacctctgttttatgcaacttttgcttatattatgtttgttttagacatggctattgccattaacgtcagttcataaagagaaggagaaaaattggaagcatttgttacctttgaacttttgcttgtcagtctacatatatcgagctcaactgttagggctgatagcctgataacttacccatcctcaccctgccactgagggttttggctgtgtgcatggaaagtctgttttttggtcttcggagatttttttttttttttaaggggtttggggggggcagggttctgtttgtcattcttgcatgtgttgcacatttctttggagttgagctttttgaaacataatgagttctaatttattagccatataaccatcactacaatcatttacaggtt

SEQ ID NO: 90171 - DNA, 754 bp, Eucalyptus grandis
  Intron number 4 from transcript Egrandis_v1_0.032747m (loc us Egrandis_v1_0.032747m.g) derived from phytozome v7.0 (c hr-ID scaffold_349; pos 31054 to 31807)
gcggtctgtctttctttcccttttatttcctgagttctttctgcaccttccttggcttgaataagctaatggataggaaataaattaggcgtataaatcactaaagattcatagctgatgaagagtgttttcttgtaatcttatgaaaagttctttttcttaaagcagctcaaaagttaagtaaataagaaagcaagggcggcagtctctctcttttgatagtggtgatgaagcaataaaactacaaagacaaatctatagtatgtgttatccttgtaggatctccctgtgttataactgccaatcattgtacgtgccacaaccaaagaataacaatagcaataagaaaacgacattgagaaactgggttcaactgtgcaaatccatgttttcatctttgttgagatgaagaaaagcacatactgctgttgtctagtttgctgattgtttttggagttggtgtcctgatatattcaggtactttatttttataccttgagagatgttaaagttatcagatgttatgcttcatatttggttgacctgagagtcgagattcttggcattgtataattctaaaagctataggtgtcatagtatagctgtcgtgttgctgtttaagttggccttaagtgcaatcataactacgtcgtcacttgttcttatttgtctgatatacattgatatttgtttgatcatggtgcattatgtttggagtggtggggttgttgattcgttttccatttgcagtgac

SEQ ID NO: 90172 - DNA, 800 bp, Eucalyptus grandis
  Intron number 1 from transcript Egrandis_v1_0.054644m (loc us Egrandis_v1_0.054644m.g) derived from phytozome v7.0 (c hr-ID scaffold_292; pos 66341 to 67140)
cctagtgaggttgacccttgctcaagtgaggctaacccctgcttaagtgaggtcaactatcgcttgtggttggcacatgtcacataagatatgtctacatcaacaattttttgccaaaatttattggatggattgtattaacaatttgtcaaaaggtttaggactaaattagctagattaaaaggtttggagttgaattggcacaaatgcaataaatttaggacgttgagaattagccatggatttcacaagccgccaaagtcgaccaccaaaagaaaacatagaatcttgcatgtgaaggactttgagaattagccatggattttctgggtttcttgctgagcacattgatgttgctcctttcctcaattcttacttcacaagttatggtggaaaccaattaagtacaaagggcaaaggcttcacgaggcacggaaggacctccctacttttggttgaaccttttgattatagtatagcaaatggatatcttctcaatatcaaacgcaaatagttttctttttaagtatatgtgttatatatatatatatatatatatatatatatatgtatgtatgtatgtatgtatgtgtatatgtatatatgtttttcacttgtaattagctagaattagcacacttaattggtcacagtcaggtaggttcaaggttcatctagtataatttaatattaaattgttctatattcaatctcttgttaacaacatgccttcatttgttagtggaatttattcttttccttttcttgatgatatgtaggaggaatttttctattttggc

SEQ ID NO: 90173 - DNA, 1070 bp, Eucalyptus grandis
  Intron number 1 from transcript Egrandis_v1_0.020411m (loc us Egrandis_v1_0.020411m.g) derived from phytozome v7.0 (c hr-ID scaffold_6; pos 41319716 to 41320785)
atttccccgataacaacttcgcgaataataggagggtattgatcttttcggtctgatctcacgaattctctattggtattggattttttttttctttttttgggtttgcgaggagtttcagctcacgtccgatgtgcattatttggactggttttgagcagctggaaaatgagtctcccagttttttttttttttttttggggggggggggttgtctttggcgtgaatgttgtcagctcgatgcttccagctggatattgggaatttggtctgaattatattatatatatagcgattgcttattcaatgaattcgtgttggaagatttacagtgattcgggaggcaatcccactggaaattaggatgtattctctaaaagtaaatgcttggtggccaggtcaacaactacaccaccgatctcgcatatgatcctggatttttctaattacttttccattgccattgatcaaccccgactgtcatgtgtttgtgatccggtctgtaataatagcttccccgtgtggtctgatgaccattcttttgtccagaaattcttggtttctttgaagtcgtgttttggtctctgttattcgtgcagacaaatttggaggttattcttcattttgataatttgagccattttgatatgttgagcatgagaatgtggcagtcatttctgctgtttactggtcaatttaggaccttgttgtctagaacctcatggtcgtggtgtatgaattgagttctctgtaattgtcaatctctacatgcatagttattggtttaattgtcatttgtatatgtttttctgctttgagcacctgcaccgttcatggggttctgaattttgtatatttggtctctgaagttattaatacactcttaggttcccataccccgtggaggatgatgatgtaatggagcatgtcctctgttattttgcagatttagactatttaagcctgtcacctgttctttgtctttagttcattgatacttcattctgagctgtgcctcctctttatcaatttcagagaagaaatagcttcaaccaaggcagaagaaggtt

SEQ ID NO: 90174 - DNA, 890 bp, Eucalyptus grandis
  Intron number 1 from transcript Egrandis_v1_0.026587m (loc us Egrandis_v1_0.026587m.g) derived from phytozome v7.0 (c hr-ID scaffold_6; pos 46949447 to 46950336 reverse strand)
ctcacggccgctgcctcctcaccgtcaggcgcaaggtaagcaccgattccttcccctggctcccgtaatccgttcgcgtcgcttctcgagaatatcgactcggcgtgtgaaaccagctggaatttagattaaagaatgaggtcgcgatcaggtcggtcggttatccttgatcggaaagaggacaagattctcagatttcgggtgacgattgtgcttaccccatctgactccctagcatgggcaaatctgaatcgattcgtacgttttcgttttccaattttcgggtcagtgtggtgactcagcgcaagctcggacgagggaggcggtcggggtgacgatcgagccgagtcgactcggatattcaaattcgattttcgatttttctttttagggaaaccgtggtactcagtctctgagatgcattctgctaattattgcaagagacgcctggaaataaaagcaccagacatggaattaaatcttttccaccgcggaaattagcattaaagaatcataggtggatttcgagttatttagtgctttgattttatttttatttttattttagtgtgtaagattttatctatgtttcggttctctaccaaaatctatgtaaaattgagcattttgagggttattaaaattcttgtcgaattcttttcataggtaaaattaataagtcgaattcttttcgaattcttttcataagtttcttgaaagataacggtaaaattaataacaggtagagcttatattccaaacaataatttaataagtcgggcttgtgtcgggatttttcatttcatttgccttttttttttacttgtttatatttatcgatgttttaaaaaacagaggccgagcttgcatcaacggtgggaaggattcca

SEQ ID NO: 90175 - DNA, 905 bp, Eucalyptus grandis
  Intron number 3 from transcript Egrandis_v1_0.019836m (loc us Egrandis_v1_0.019836m.g) derived from phytozome v7.0 (c hr-ID scaffold_6; pos 39359089 to 39359993 reverse strand)
atcttgtgcaaggggcattggtgagttagatgaaaattcttgatctcctttctaaatatgaattctgcagcttaacatggctgaaggaaggtataatgtgggtaagtggcctcagggctgccatagaagtgaaaatttggggtggttaaattctttttaaggttttaatttaggaggcaaaatgctcaactctaccactagttttgaattgggtaaagaactttccattaggtcaaattgttgtctactgctccttgtatgtttgatttttacactgagatataaatcatcgttctatataagatagtaagttcgagacacttttgtctgtctgtctaagagtaaattcatctattttagagagatgctacagtttcggctatacttgtttgtctttgagtgagttcatctacttcagagattctaaggaatatttggtgtcagattgtcataccctactgaagatgtttcttcctaaagttttaagtgaaatgaaactcaaaactctatcagtttagagaaacttgaatcttactatgttatttgcgtgtttgtttcctttctgttgttagctatttgcttcccaatgtatgaggatctcaaatgagctttctcctggttataaaaagaactgcacatgtgatttttattaatatggtggtttctcagactttattgtgcattgaattttttgatcgctcaagcttagagtatctaaggagtataaaccgaagcttgattcagtttcttcaattatcgaagaaaatgtattaaaggcaaagttcttgagactttttttggctccttggacctaaactgaagcttacggagtggacctttaacagttgttatttccataccatgcatcttattttttgcttttgacttttaagtttccaggttag

SEQ ID NO: 90176 - DNA, 799 bp, Eucalyptus grandis
  Intron number 1 from transcript Egrandis_v1_0.041704m (loc us Egrandis_v1_0.041704m.g) derived from phytozome v7.0 (c hr-ID scaffold_6; pos 23635348 to 23636146)
tgccaaatttcgagtcttgcccacaaccgctgcaggtaattctattcccctgtgatggtcgcttaatgaactattctattcttgctgatcgcgagtccacttgctattgatctggtttatgttgagatgttctgaaattgtattcgatcctacttttcaaccgagagatcattggtcaccaatcgatgaccatcggaaaaaaaaaaggtcagtctcgcccagtgattgcaaagtcagtaaattacgatccgttataatccgagaatccattccaagtaccatagaagtgcccctcatctgggttttttccttttctttcttggtgttcaccaagagacactcccagccgcaccgtgtttttctttcttctggtcgtatattcactgcacacaccacactgcctttttattattcacgtcaaaaacacaccttagccttttggccaaaaggctaaaaagtccaaccttcatctaaaaattgcaagtttactaacatgaccaaaagtacatcaacgaactcaattgagtctaactaaaaaaattaccgacaaactccaatctaagagtcgaaggttgaagaactctgaggtccaagtatttaagggggtcaagttaacattaaaatttagttcttaaatttaaaaggcccaaattcatcgtataacctaagtcaaattttttgggaaaaactaattaatttattactctattttgtgtggcagtcattgtatcgataacattaagcgtagttgttagtgggctagtctttttcatatgcaagaggagagccaaagagagat

SEQ ID NO: 90177 - DNA, 503 bp, Eucalyptus grandis
  Intron number 2 from transcript Egrandis_v1_0.007306m (loc us Egrandis_v1_0.007306m.g) derived from phytozome v7.0 (c hr-ID scaffold_6; pos 40753671 to 40754173)
aaattctcagatccaagtcagtttctctctctctctgtctctctcacccatgatttgcttagtttctttatttcttccccctaattattttacccgtttcttgatgttaactcattattctatcataccaaaaccatcaaagactcgtacttgcgaatgaaatatatatgacttgaaaatctaaggaagatgcagcagcaacacacaattctttatgtctttaaatgtttcactctattttctgtcgcactgatgaacaccatgtctgttctttaactcatgaattatcatactgttggtctttaaatcttgggaaattacccgctaaacttaaagcggcgaatactttgtcttgtaggactaggaccacagaaattgtttattttgattgtataaattatgacaatcttgcctggtcactttacatcacttacgacgtttaaattatgtgaaaatgacctgctaaagttaaaaacaaatggacaattcgcactgcagggccg

SEQ ID NO: 90178 - DNA, 999 bp, Eucalyptus grandis
  Intron number 1 from transcript Egrandis_v1_0.030896m (loc us Egrandis_v1_0.030896m.g) derived from phytozome v7.0 (c hr-ID scaffold_6; pos 42806614 to 42807612)
ggagccagagcccaacaccaacctatttgtctcaggtgactgcttgttctagtgtttttatggatccctcgcgagcattgtctcgactctttgctctcttccgttgccaattattatgtcgcgtcttttctcctgacgccatgtccggaagtgctttgtctcggtggcaatttgttttcttcttgctcagtgagacgagtctagaaatgttccgagtttggtgcgtattttgcataattgggtcttcggaaagtccggaacttggagctatttgacgatgcttgggcgaaaagaaagtgtcggatcaattgattttgagaatggtgtgaatgggcatgcgcatgattgagctgcaacggtttattagaccattgttacttgagaggtttggcaagcggatgcttgatgagcatttagcctggggtttctactgggtcttccagttaaggcatattaatcaaatggattagttataatcaggaaactcgaatgtatcttcatttccaaagaaacgctgggtaaagttgcatatgcttgcaaatcaaagaggtattctcgagtattttagacttgttgtatatctcttcctaagaggggcagactaaattctaaattgtaaattggaagctttcagccaagtgaaaatatttggactacagtcatcatcacgcattttgttcactctggatgagagagtaatggatgattgtggcttgtatgttgaaaagcaggtagattgttccctgttgttgtttcttgcttcatacttgcttctgcgctgaaactctggctaccagttataagtggagcacacagtcatttgcttgagcatattgttgtttaattaagtcatctttacacgcaatcttgaataattttcatcgactatttaattgggcctggcactgatatataattgattctgctttgctttatctgatttggagattgacaataatctcagggctgagtaaacgtactactacggagaaactacgg

SEQ ID NO: 90179 - DNA, 825 bp, Eucalyptus grandis
  Intron number 1 from transcript Egrandis_v1_0.043019m (loc us Egrandis_v1_0.043019m.g) derived from phytozome v7.0 (c hr-ID scaffold_146; pos 40553 to 41377)
tgtggtgggattggcggggagtgagggtttgattctgatcagggttaccaaatttgtcccacatcggccataggtacttcaagtgacccactttttgttcgtccaaatgaagcggatgaccagctgcggggttgctaatctgaaactgagttgttttctcatcacgcatgctagttttctcccttgtaccttttactttagtaagggagtagcctcaaagcagaagcttttttagaaagctcgaggttagagcagattggtccctgtttataggtagatagaaaagcatggggcattccaatccaatggaagggtagaggaagttacttgaactagattagtatcactttatggatagcttacggatgatttcctacacagaaaagacttccatgtctcgaatatgattgtgcaaatgcggatattcaccacacaggcaaagttttcactctttgggtgtttgttatcggcaatttttgtaattgtactcaaccttggaaataatagattttcctttcgtaggatccaccagaacatctctttgacatcactgaatttgtatctcttgctttggtaaagcactaatatcttttaagtgattgaaaatgacaagtggagcatttgttgttggtgcttcaatatctgcaattaccatcattttcacatggaaggttctactcttcaagaacaagaaagattgtggaattgagcacctaatgggaatccatggatctcttgttccaagaagataccgatttattgatttgaagaaaatgacaaaatcattttcagagaaacttggtcaagaatgatttggtgtagtgt

SEQ ID NO: 90180 - DNA, 761 bp, Eucalyptus grandis
  Intron number 1 from transcript Egrandis_v1_0.000049m (loc us Egrandis_v1_0.000049m.g) derived from phytozome v7.0 (c hr-ID scaffold_6; pos 47676150 to 47676910)
cctcccgagcacgtcaggaagattattcggtgtgttctcttctacgtgtattttccttgatatatactttttcgttgttcaggtggaattttgtttttataagccacgtgttccattgatgatttttctcctcgaaagttggcggtcctttggtggggcgtgcgatttttgggggtctctgggaatgatgttttctgagttgtacggggcatccttatctgtcgctatcatttcattatttgcaataaggataattatgtttcacgatgcttactagcgaattatgtcatttctaagacggccttcaagtttgatatggtgggtccatttgggggcgatggagatgatttcgcgtttcactataagaccatactagataaaagcttcatagaacaatagagtgacaatgttgttgttggcacgacgcgtgacgttctatttaaaaatatctttttgaagctactctcatgtcaaatcaagatattaatttccctctaccacgcccctgtatttcaaagggaaatgcgtcgcagggatctagacgggattaaccctgtgaaggagggtttcccttgtggccgggcctcccgtggaggttccatttttatcgaggggaacccctctctctatcatgtcttcttctagaatgtcaaagccttttttaaggtcttgcttaggacctgaaaatttggctctagctttcgttctatctcattgaaaaatatattgctaagaggtattttgcaactgtggcagggacc

SEQ ID NO: 90181 - DNA, 845 bp, Eucalyptus grandis
  Intron number 1 from transcript Egrandis_v1_0.016696m (loc us Egrandis_v1_0.010249m.g) derived from phytozome v7.0 (c hr-ID scaffold_6; pos 47027786 to 47028630)
gcgccttcctcagcgccgacatccggttccagctcgtccgcgacatgtaaagcaacatcaagagcatcgtcagcgttgacgatcttgctgccgccgggcacaacaagcgcaggatcatccacagcaggtatttgtttttcctttttgattttcttttttgggaattcagtctctctctctctctttttcttttctttttttgggaattcagtgtctctctcttttttcttctcttgtttggggcttgaggtatccgtgcattggcatgggctttgatgaatttttgctgaataaattgcatataatttgatgaagtttatatagaagattgtcctggattgaattcgaaaaatattcaaccccgatgcgtaggaaggtgcttcatgatatgagttattggtatgcctatgttgacagtaagctgtgagctcagtgttattatagaattcgaggtgttccactgtgtgtatcagcaattgcgattaagttttctttgataaaagttggatgattggaatttgtcgatcttgaggatgttttagattcaggactccaatttgataggctctcattctgaaaaggtgccttgatatgaagctttgattaggaaacgccctattttccttcctagatatgtagttaattttgatttgctctatggagatcaaatataatgtgttcctttgagtggcatcgcgtgtggaagaatttttgttcattagacattactgcaactgtaaatgctagttcttatttttagtattgatatgatctttgttttcagcatagctctattccaaatgcttttttttgtgttttggggatgggtggaataacccggagat

SEQ ID NO: 90182 - DNA, 947 bp, Eucalyptus grandis
  Intron number 1 from transcript Egrandis_v1_0.025061m (loc us Egrandis_v1_0.025061m.g) derived from phytozome v7.0 (c hr-ID scaffold_6; pos 14906997 to 14907943 reverse strand)
gccactctgttcatcctcttcttcgcttgcgctctgtaagtggcatctctctctccttgatcgcgtgctcgtgctgtacgagtgcccatggcgatagtttgcgcctgccagaacttcttctttggagaattgctgatgaaatatggcaaaaatcaccgattcataaggataatgaatccaagaaagaacagtttgatatcatgattgttgcttttggaatgtagaacagcctctgtcagccacctatgcgctcctgtctagtcatttcaatttggctctttagagattgctgatgattcttttttcctgaatggaaagatgattgaactcgttttagatgctcgaatgcttcgttctgaatcaatatttttaggtgacatgcctcagttgagcacgtaatttcttcctcttcttgggtctattatgcaaaaaatgaacttttttgtttctctcttgaccttggtttggctaggaaagttatcgtgtcagaaaagaagttggggaagattactgatggcaaatcactggttcatgaggataattactcgctccccccaaaatttataccacgaacacaaccacttgattaatatcgaagtggaggtatcaatttgatggcatgacttttgctcttaacatgtggaacagcctcagctacctcattgtcttgttgagtgatttcactatggtgcagacgacagacaaaattttcttcttgaaaggaaagacgattgaactttttctatatgctttttagcttcatactggattgagtttttccagtcacatgttgtagtggagcacactatatctccctatcagtgtctttttttttttttttaacgaacttgtttgtctctctcttgagcttggttttgctaaataagatgttccaagagctgatgtgttccttcttttcttatgattttgggggctgtaggtaccag

SEQ ID NO: 90183 - DNA, 500 bp, Eucalyptus grandis
  Intron number 1 from transcript Egrandis_v1_0.030364m (loc us Egrandis_v1_0.030364m.g) derived from phytozome v7.0 (c hr-ID scaffold_1083; pos 12858 to 13357 reverse strand)
tgagggctccattaggaagtggacttattcagttggtaagcatcctcttttgtgctggagaggttccgttttagttcggcctagattaatcatgcaccgaatcaattgcaatttgacaagcccatgtttcgtttcattctcattatagtcattccattccactgcatcgaaatgcatgaacatagagctgaatctgtcctgcgctgtgtatggagctagcacttgagattatctacatgccatgtacttagtccgccaccaattaaagtgatcatggaacacgagaagagacgcaggaagatatccaagttctctttgattggtccaatgattaatgcatttcgatgaaacatggagacttggatgtatataacctcaggaatatatataagaaaggaaaagaagaatcatcctttactagttcgttcgttccaattttcatgtgggagtgtggaacttgtgcagaagggaagaaggagacattcaaggagaagatacag

SEQ ID NO: 90184 - DNA, 308 bp, Eucalyptus grandis
  Intron number 1 from transcript Egrandis_v1_0.017433m (loc us Egrandis_v1_0.017433m.g) derived from phytozome v7.0 (c hr-ID scaffold_6; pos 4735741 to 4736048 reverse strand)
cagtcttattgacaagggtcttactccactcaaaggtatgcattactaaagaactgtccaatttggtttaattaagtaatctcacttagcagatttacggctaatgatttttcttctcttttgtggatttgattagcgtttatatcgtgtggctttgtttgttccttatttacatgattagcaagtggcggactgtgtcgtagttttctaagtacttaacaaagtcaattgtgaaaagtagaattttagatgtaagaacgttatcatgaatggttaaacggtttaattgattgactctcaatttgcag

SEQ ID NO: 90185 - DNA, 863 bp, Eucalyptus grandis
  Intron number 4 from transcript Egrandis_v1_0.003558m (loc us Egrandis_v1_0.003558m.g) derived from phytozome v7.0 (c hr-ID scaffold_6; pos 44989475 to 44990337 reverse strand)
tggggaagaaacaattatcggcaacctcgacacaggcatctttcattatttatgggatagcgcagttcttttttaattcaactatggaattattcttcttttcttttgttttggctcaaattggtttatttccaatcatcatcatatctccgttgacccttgaatttgctttatttgcatgagtttttggaacatgatttgatggccgaacgttttcaagaaaattctattttactgaccatttaatgagttcatgaagttgaccacagcatttccgctacgtcaagcattactgtgctgccttgaccatattatttctagatcagcatcttctgcacacgggtctacaaaagtgagaacgtgaagcttctttgctcatatcagaaaaattagctgccaaaacatgaaaatgtccctttgttaatatcttccaaagagtttcatgagtttgggaaattggtgttttagttattatttaattttagaaaaaaaaatagagagaaaatatgattgagaatatccccagggataacctttcaatgtcattttctgacaaagtaatgaaagattcatattgtatccgtgctttgcaacttttcttggttttatccactaactcaaaacgactgatctcgtcgttcttgaaaatgggttcatgactttttcatggaaaagcttcatggaatgatggtagggtctgaggaaatgaatcttgacagttcacaaaatgattttgcttcctttatgcatcacgctgtgaatttgtcaaatgatttcctttttgacattttgcaggagatgcttatggtttctcttttcttttttctctacaggtgtttggccggaatcgaagagctttagcg

SEQ ID NO: 90186 - DNA, 364 bp, Eucalyptus grandis
  Intron number 1 from transcript Egrandis_v1_0.003558m (loc us Egrandis_v1_0.003558m.g) derived from phytozome v7.0 (c hr-ID scaffold_6; pos 44990875 to 44991238 reverse strand)
gtctagtgcattcacccaccttcgctttgaaaaaggtgatgctcactttttgcctcgttgaatgcaaaaataagattcatagaactttcgctgttttcggtcaggaaaatcttcagttttgataaccaattcttttggcagaatggtttaattttctggtcttttatctgggttgtttctcaagatcttcttatttatttttttttattttttacggtgctttctttgatttccaagcgtgtcgtctctcactctgcctctcagtttgatcatttctgggcgtttgcctttcaatagcctcattatttccaactttctctgtgctttagccttatatcgtgtacttaggatctcctgcacacgg

SEQ ID NO: 90187 - DNA, 649 bp, Eucalyptus grandis
  Intron number 3 from transcript Egrandis_v1_0.041620m (loc us Egrandis_v1_0.041620m.g) derived from phytozome v7.0 (c hr-ID scaffold_1312; pos 4772 to 5420 reverse strand)
aaaggagagtccgggacgccgtttcccccaaaaaggttttcctttttttttttttttttttttttcccccccccccccccccccctcatgtatacaccaattacatgtcgcacttatgatttgcgtctcaaacacgacctccgtccacaatgaaagaattagtaagaaatattgcaacatcatattgagatgttgtgccgtagctgatttatcttggacaaaattttatacagttagatgtcatgatcactcagaagaaattataatatcaattcaataaatccgtgataaacaaaacttattatacatgatacgaactagggtaaatttttctttttatccttttgtgactaaccctactacctatatatttacatagagtaaggttaacaactttttgaatatactcaattggatctatctgctcactaacgagattcaagttcttcttttccatggcatccaagtccacttccatatcttcatatcacctccatttctttcttacatatcatccacgccaggaaaaagaaaaacaaacctaagctttcactgatcaattaagctgattttccgcttttataggtgcgaaatcagttgaagtgaacagaaagcaaagcaaggtgtccgtgaccggctacgttgaatc

SEQ ID NO: 90188 - DNA, 400 bp, Eucalyptus grandis
  Intron number 3 from transcript Egrandis_v1_0.054233m (loc us Egrandis_v1_0.054233m.g) derived from phytozome v7.0 (c hr-ID scaffold_6; pos 29671436 to 29671835 reverse strand)
atcctgcggtaagggaaacaatcaatgtgtcttttctgccttttattgactaggtgcattaataatttgcatgagctttttaactgtcacaggacaatgtcctggccacaccatatgccccccaccccacttaaaaggaggggaaaaaacagagaagaggactataatcaggcatttcctccatacaactgaattttgttttgggtttttgttgggggagaagggaaggggggggtgtttggggttttgtgtttgggggttgataaaaatcacaattcaggctgtttggcatcccgaaacagaagttctcaatacgtctaatgtttcttatttctgtcattaatctgattgtcatgaaactccagggaaataaaagaagtgctggattttcaattgaaga

SEQ ID NO: 90189 - DNA, 696 bp, Eucalyptus grandis
  Intron number 1 from transcript Egrandis_v1_0.026046m (loc us Egrandis_v1_0.026046m.g) derived from phytozome v7.0 (c hr-ID scaffold_6; pos 7859430 to 7860125 reverse strand)
atcagctcgctgccattcaactcggaaagcaactggtactgttaccgagtttttttttttttttttggtaaagaactgttaccgagtttctgatctagagaagagagaattgtttgcatgcatgaaaatggaaagatttatacttttttgggctagacatgtgtagatagaagttggacttgctttgtgtcgtatatctattgggggcatgtcccggttctgttccatagctgtatgggtttaactgagcagtttgattagataaagtccaaagcatgctctaatgtcctttccgtcaaaccgagaagctatgcaaccattacttatctgtatcgtatgattcgtgaagagtgaattttaatcaggaagggtgagagcaaaacagagaaacaggggggaaccctgtttttcaggagctcttgtttgtcggagctttcctttttcttgtggagcaagaagaacggaatcaagtggagttgaaaatctaggagtaggaggaggagagtgggactaaaataagaggagtgcgctaggaggaggatggccattattgatgtaattattccggggggagcgctatttttcgatcgaatggcagagagcgtttcgcaggggcggtgttgcgtttgagtcgaacacgtcacttcaaccattttatatactttttgcaggtcgaaagggacattgacctggtgt

SEQ ID NO: 90190 - DNA, 459 bp, Eucalyptus grandis
  Intron number 3 from transcript Egrandis_v1_0.024562m (loc us Egrandis_v1_0.024562m.g) derived from phytozome v7.0 (c hr-ID scaffold_6; pos 26136013 to 26136471)
ttgattccttcaggttctgttctctgggttgcaaggtaaattcgtctgattcatcttcctttcttgcgattgaagtacatttttgggggggtcgtatgattgatcgattcatggacaagttcttctcattcattcgttgttgaatttgagtgtttctgatcgattttgttttagtttgactaatgaatgattgatggatcacctcaaaatttgtggcgtatattggattaaccgcccaggttttctggttcttattaatttaattgagtgcaagttcctttttgactgatattttgtctctgtggcaatgtttcttcacctactctgctgatcgaatctactgaattttgcttgctttcaagtcattcacattggcatggcgtctgtttctgagcaagcgtgtgttgaccaaagtttcgacatttcatctgaatccgtcctttcttcttctgcagctca

SEQ ID NO: 90191 - DNA, 583 bp, Eucalyptus grandis
  Intron number 2 from transcript Egrandis_v1_0.003757m (loc us Egrandis_v1_0.003757m.g) derived from phytozome v7.0 (c hr-ID scaffold_6; pos 47947381 to 47947963 reverse strand)
ttgtggatctcctagctgttataccagcaccacaggtctgagaaacttcgaatccctagttactggtttttgtactttaagttctttttgtcataaagtttccaacttctctcacctatagtttccctttgtattttcattcaatcttcacataccttttgaatttatggttaaatttcgttcctaaattggcctgtgttccttcatggtttttgtttctcctcacttggtttgtattattaaatgcatggacatgataagctttattaacaaaatataatattggtgtctttcatcttgaaaattttgagattgaaattcataagatggaaaagggcatgtaaaaaatttaaccatttgattttcttttttaacttctgctcttgcttccacttaattcatgatgtctttatattgcagtacgatgaagggatgagttaatcgatatctttcacttcccatgttgttctttttgcttctaaaagttggttgtggttcactagaaggcagtttttcctttcctaaaatagctcttccaatctgttcagattgtggtgtggaaatttcttcagagatcaaaagg

SEQ ID NO: 90192 - DNA, 895 bp, Eucalyptus grandis
  Intron number 1 from transcript Egrandis_v1_0.010249m (loc us Egrandis_v1_0.010249m.g) derived from phytozome v7.0 (c hr-ID scaffold_6; pos 47033309 to 47034203)
ccgccggccacaacaagcgcaggatcatccagcaggtctgtgcgtgcgtgcgtgtttttgtttttgggaattcagtttttttttttttttttttttttttggggcctgaggtatcgatgagttacctgtgaattggcgtgggctttgatgaattttcgctgaattattgcatagaatttggtgaagtttatgtagagccttgtcttggattgaattcggaaaatattcaattacgatgcgcaggaaggtgcttcatgatgtggttattggtatgcctgtgttgacggtaggctgggagctcagtgttgttagagaattcgacatgttccgctgtgtgaatcagcaatcgcgattaagttttctttgatagaagttcgaatatataatttctttttccctttatgtgattggaatttgtcaattttgaggatgttttagattctggactccaatttgatgggctctcattttgaaaaagtgccttgatatgaagcgttgattaggaaacgccctgttttcctttctagatgtgcagttgattttgatttgctatatggagatcagatataatgtgttacttcgggtggcatctcgtgtggaagaactttagttcattaagacattactgcaactgtaaatgctagttcttatttttagtgttgatatgatcttctctttcagcatagctctatcccaaatacttgtttgtgttttggggatggatggaatttcctggagatgtgtatatcatgttattcgatctgtttggtcaaattttaaggacatatctgtcactggcactgcatgtcagaattttgtctcacatgcggctgaatgtgatcaagaagtactcatgtggttcacttgtggcggcttttgtttcaggccatattta

SEQ ID NO: 90193 - DNA, 305 bp, Eucalyptus grandis
  Intron number 1 from transcript Egrandis_v1_0.028098m (loc us Egrandis_v1_0.028098m.g) derived from phytozome v7.0 (c hr-ID scaffold_6; pos 33916904 to 33917208)
actgcgagcagctccgaaaagccttcgcaggttcgctctatcttcttcgcgctgcctcctccgattctcttatcgcgtgttgttcggtcgccgatggtcttgctccgttcttagtgttcggatctgcgatctgcttggagatcgcggtctgatcggagtgatctttcggtggatcggttgttaagatcgagctatttctgggtttattatttctcttgaattcggaaaaaaaaaaaaaatcaaagcttattgtctaattcaatcttttctcttcgttggatgattatcatgtacgatctggaagg

SEQ ID NO: 90194 - DNA, 649 bp, Eucalyptus grandis
  Intron number 3 from transcript Egrandis_v1_0.028098m (loc us Egrandis_v1_0.028098m.g) derived from phytozome v7.0 (c hr-ID scaffold_6; pos 33917627 to 33918275)
acgtcgctcaccacacaactggagattttcgtaaggtactgcttttacgcttgcctcatgttgttccatgacatttcccaacgctgatggttgttcttccgagcaacttaggttcgtacattttgcaataagtactctgtacaatcaagtctatgtagcgttgtgatactcagaataatttcttattcctgtctggaaaatattctttgtcattgatgaaggcaagtaaactcaaatgtgtctctgattcagcatattacagaaagtttgagaatataagttgtcaggtgttcaatttttaagacagttttggagttttgcagagaatgcttgttggaatggtggtgggctttggagcagttcctcatattttgatctgtcaatttattaaagatggtttcatgaaactctagagaccatatacgctacttcattggacctctttctattgtgtcaaatgaataaccaagtccatcatcaaaagattagtcctatgacaacctgtgaaataattctcatctatcctaaatcatttcaattttcattaggtgttgatgtaagtaatttccttgcctgtagggaaagaactttaattgatatggtttctttgtctcctagttgctggtacctcttgtgagctcctaccatt

SEQ ID NO: 90195 - DNA, 829 bp, Eucalyptus grandis
  Intron number 3 from transcript Egrandis_v1_0.009166m (loc us Egrandis_v1_0.009166m.g) derived from phytozome v7.0 (c hr-ID scaffold_6; pos 15706428 to 15707256 reverse strand)
ccatatcaaacttgtttctgggcctaaacttgctggtcagattttattttgcgttgcctgttgcctaatatttgtattgatttgatgcttatctgacctcctgagatgtgttatccatgcactggagatgggtcttcctgaaataaccaaatggaattttactatattcatatagttacattggttttgaccttgattcttcattttatgatgtctcaaggagctaaaatgtgcaatgactgatagttgtttctgacatctataactaaaaacctgcctttcagattttaagaagagtacttttttgcagtttcttttccctttcctgaaaacatggattgattggcaacatgctgcataggtaaataacggttggttttgagggactactagatatgtaggtttaaattattttttaggggctactagcagtatgaaatgagttttgccatctgagttaatcaataatgtcatgtcaaaataacatgcccgatggccatgcttgagttcgaacatttgttatgaaatctccatgccaacaaagtgatgccttgaattgaggtttgaataggcccacttgttgcgtggatgcctatacagctcgatttgtggatagaactttgaaattgaacagggatcttgttgacttcatggttgttcatttgcacagttatgagaatatgtgagctttattcccttgcctgccacatattaaatgtgtattcctagaagtttcatggtttgattaattaattattttattaagtccataagggatatttactttgcttgatgtctatgcagacgccagggaagaatttgacggtga

SEQ ID NO: 90196 - DNA, 931 bp, Eucalyptus grandis
  Intron number 1 from transcript Egrandis_v1_0.021678m (loc us Egrandis_v1_0.021678m.g) derived from phytozome v7.0 (c hr-ID scaffold_6; pos 35797603 to 35798533 reverse strand)
ctcccccgcacgatttcggatctccgcgtgctcaagtaggctcgattgtctcgtgctccgcgttttcttatgtcggtgtttgttttttttttttttttttttttttttggctttgtgcttcgatttgtggatggatttggaatcgacgggtcaatgtgcgcgttgctcgacgactgaatgactaatgtgacgagagatcatgatacgagtgtggccgaacgctgttcgtgcttaattttattgcctgtggtgcgccgtgaatgagcatctgctgaaatttggggcttgaatttaaactcttgtggtttgatgtgtattcatggtttcgcgagagggaacgagtgatgagagagggaaaaggcataatgtagaaacgagaagacgacttctccataattgagttttgctcggttgtgttaatgagaaaatgggggggtgtctactgagttttgctcctttcacgctctagtttgagctctaggttagagtctggagcatttgttggaaggagctttagcgccggcattgctttcatgttcactagtcttgagataatagagatgactacattgtcttggatggatgatcattcttgaaaatctggaagtttagtgtgttctggcttcttgtctgcatactacatgttcgttatagttgtggccatgtcgtagttctatattgtcgtgactatgctctgacagatatgttataaagctgcaaacacatcgcaaaagttacagcacccattttatagctgtaggtgcctttgaatagcttactaaacattagttcattaatgcatgtatgcttcagttactgttctttcattcgtattaatgtattccaagaacagaatcatccattcagatgagttctcaaatactgcttatctgattcagcttctctaactaatgctcatgttgatccagag

SEQ ID NO: 90197 - DNA, 956 bp, Eucalyptus grandis
  Intron number 2 from transcript Egrandis_v1_0.041594m (loc us Egrandis_v1_0.041594m.g) derived from phytozome v7.0 (c hr-ID scaffold_6; pos 52746486 to 52747441 reverse strand)
agtgggctccatttgcctattgcatttcatttaaggtcagctatttgcaatctattcattctggtgcaaccataagtttcattagaagttattgaagtttgctgtccaaaaagcatcataataaattcaatagcatgtatgtcagaaggacaaatcgtccaactctagtgaccaaaaaaccctatccatggaggattctcatccatttaccaaaaaaccctgtccatggagaatactcttagattttatggatgattgttattgatattgagtaaaacagcattaaacattattgtccttccagtttaatgaagataattatctaaaaaaagtgcagtcaaagtgaaaacaatgctgtgtttgtccacaatgaaaaccatttccttgccacatgccctgtaaaaatatcgatcttgtaaggtttactcgtggtccagttaatgttgagaaaaaaaaaacccaaagttagacatactgactgatttatcttccttgggattcaaatattttagctatgccatcatctgaaatctttactgattcagggaaatataattgcctgcagcataagcttctaccatagtagcatttgcaactaaaatgtaacttgttaccagcaagagtattgaatagatgatgaaggtcctagaaatatagaaaataattcaacaaatgcatgttggagtaattacacaagctccctttccttgttatattaacaagtagagttggtaatgagtggcaacttggcagctgctcatctgagccagctgcaaattttccctggcagcgatgtgaactcttaattggacattactttgttctcctgtttaaaatttgctgaaggtatcacccagcgtatctttgattgagacttgatatgaatccctgatacgaattttttttatttctaaatgacagctagagactgataagaacatcctgctgaagaaggc

SEQ ID NO: 90198 - DNA, 934 bp, Eucalyptus grandis
  Intron number 1 from transcript Egrandis_v1_0.025683m (loc us Egrandis_v1_0.025718m.g) derived from phytozome v7.0 (c hr-ID scaffold_6; pos 46675370 to 46676303 reverse strand)
accactcgccatccatacaaatcctgcaggtgaaggtaagaggataggagcatgttaagggaaaaagagagagagagagagaactggaccatgttattcgtttcaagtttaatcagatgagtgtcttgtgttcttgcatctcaccgtgtttttgttttttttttcctttccttctgttaatatcgccaaaaattaaacatggcgcgatagatcgatttcggatcagcggcggtacttttatttgtttttgcttttggtttaaataaggtttataagagcggtcattgagatctgattaaattcgaagaaatcccgacaaaaactgtccctgttacccgctttcatgaggaggcatcccttcttccgagattatggggttatcttgccgagttttcaaaagaaaaaggatctacagtaatacaagagggcgtcagttatatctccttgggagaaaggctatattttttaggattaatactagaaaaaatctcaaattaatatatttgtgataaatttattagtttatcgagtttatcttttattagtttactttcaaattattaagttaaatgacacatacagttgattgatatatcaattcgaggttttatattccgtttgtcgacgtttataatttttgtgatttttttgtaatattaatcaaatttaacatatggtatatttgtcacaaatttactaatttaaatttttttatgttcgaataaattagattgaaataaattggtatatttatgatcagttgagattttttatgataaaagaataatttagaataaatttgtcaatttgaaatttttcagaatattatccttatttttatgttcctagttgcacggtagattcatcgacgtttgcgttctcttttacaggtagaacaggttcgagagccaaactagaaaggccaacagcatag

SEQ ID NO: 90199 - DNA, 420 bp, Eucalyptus grandis
  Intron number 1 from transcript Egrandis_v1_0.029861m (loc us Egrandis_v1_0.029861m.g) derived from phytozome v7.0 (c hr-ID scaffold_6; pos 32535857 to 32536276)
aggtagctattcaaagtatgatgacattctgtgaccaatttgttggttgatgatcgatgcttttggattatcacgttaataatgtgaagctagatatcagaacatggagggacaagaaagagggttctttcaagttcttacttcttgagtggaataatggtttgattctaatggtttagcttaagtatttctgcaatttaagggacaacagatagaaacatgcatgattcctggcatttctctatcatttcacatgctcgttcttatttatgatgtcatcatagaaaacctttggagtcttttgcttttgcacagacacattaggactagcagcagaaggtcgttttgagagagcatgtttgactaataaaactgtcctttttgtctgctttctataggtaattgtgaaagagtggaact

SEQ ID NO: 90200 - DNA, 781 bp, Eucalyptus grandis
  Intron number 2 from transcript Egrandis_v1_0.029861m (loc us Egrandis_v1_0.029861m.g) derived from phytozome v7.0 (c hr-ID scaffold_6; pos 32536305 to 32537085)
tttacccacatctgcagaatcgaaatcaggttaagtaatgtctctctactttttgtttgatactttcttttatggtggatcaaaggtcaagttctggtttttgagggattattaatttggccaggacaaaaaggtgagtagaatgttctgcagcgatttagcttttgttggtacagtgtaagcaaaatatcctgatttttgggcttcagtaacgaatgtatggacctgacttgcttgattactgaggaaactgggtactgaacatcttatatatgaaacttttatctgcaccaaatatcagttctgcaattgacaatgggcagtttttctgtcttgggggattgttactaatttctgctattggagttgtttgttcacagatttctcagtttcttaccctctggattggaactgggtctgggaaatagaaattctaacttgatttagctggggccttagcaactttttaatcctctggtttggatttgggtctgggaaatagtagttgctcattttaactggggcttataacattatcatgctggcctactcaataaaccacatcataaagtgtctgaccaaacagtttttttttttttttggtgaacagtaattgtattaagctcagccaatatgtctgaccaaacagtttatactttcagaattgagagttctttgttattgtcagttgacattgtacttctctattcatttgtgcactgacctatcttcgattacgaatataggatctttatctgagaagcgcaaagatcgcctgcaa

SEQ ID NO: 90201 - DNA, 534 bp, Eucalyptus grandis
  Intron number 1 from transcript Egrandis_v1_0.051907m (loc us Egrandis_v1_0.051907m.g) derived from phytozome v7.0 (c hr-ID scaffold_6; pos 45454392 to 45454925 reverse strand)
tctctatctctgcatcacgattgtaaagaagaagagtacagagacgaagaagataacagagatgaggaatagaaaagaaagaacagagagaaaatgcgaagcttctgtattcaacaatgattagagagggattacatctgagagcatcttatcacgttttcctttcaactctgtatttatactacaagttgacgaagaacaacaaactgacaaaacaatctaacagaaacactaacagaaagtattcaattacaacttaaaactgaatatctattctttaatgagcatgtgttgttgctgcagatcccatcgtcttcattccacttgtctctgttcataacagtagagctaagcttgttatcttcaattttgattgaatcagtagtagtgttcgtcgactcagcatactgcctcacttcatttcccctgtttccatcagaacccaattcttcaatagcagcagcatgtatattcaacccttgtcctttaacaacgatagccaccatcataggctatacggtgcagtggagcaat

SEQ ID NO: 90202 - DNA, 835 bp, Eucalyptus grandis
  Intron number 1 from transcript Egrandis_v1_0.010008m (loc us Egrandis_v1_0.010008m.g) derived from phytozome v7.0 (c hr-ID scaffold_6; pos 38271018 to 38271852 reverse strand)
ctgacgtgattcactccataatcttgcaggtaattggattggtcaaatatctaattctttggctttggtttttggttgactgtgcagcaagtcaatgtttcttgaactgttgaaaacttcacttcacttagcggtgtagctctgactcagtttttttcttttttttttggggtcaaaagctctgactcagttcggctgttgactttaggtaattgttgctgttatgtcttcagccaattcattctggagttctgttgttgttcactcttttattcgagaatggagtttctggtggtccaactcttaactttcggtaccatgagaaatgatagtcatattaggctttgtaaattaagaggacatgtatatatcttcgtgaatagatgttattgtgcctaagttgtgcctaggcaatttttctggcaacccagtggcaattttcagcctaaactagaacactgcgatgaatcccttgagaaaacccaggagctatgagagtgatgtgtttgtttgttgtatgttggctcatcttgatcccgactgaataggagtaggtaaacagttggttctttttagatactaggaagatgttgatctcaattctcaaaaatttcctatagaccatctgccaatattctattgcatcctaagtagtacgatgttgggattcgggtttacctaaaggaattgacataggaaggagatcggaggaatgtcattaagcaactgcatctgcttttcctctataggcgtttgaagaaaggcaatggtctcctgtagttactgaggtttcttttttggtaaagtgaccctgctgtcatcctgtttgtccagg

SEQ ID NO: 90203 - DNA, 210 bp, Eucalyptus grandis
  Intron number 1 from transcript Egrandis_v1_0.040916m (loc us Egrandis_v1_0.040916m.g) derived from phytozome v7.0 (c hr-ID scaffold_6; pos 38802988 to 38803197)
ccacgaatttttacttgggtcagccaatcatccttcttttatctgctttctccatacccattattcatttcctttgataacgttacggatttttctgtgtttcttcgagaaattcatttggttttgagtcggtataatctggtgaagttcttctctgcttattttgcgtttgcagggacattgctcttgactccggaaaggcgaagagca

SEQ ID NO: 90204 - DNA, 541 bp, Eucalyptus grandis
  Intron number 2 from transcript Egrandis_v1_0.003992m (loc us Egrandis_v1_0.003992m.g) derived from phytozome v7.0 (c hr-ID scaffold_6; pos 27348079 to 27348619)
tgcattcgggaaggtaacgtgtctttattttcttcacagaggttgctctgaatgctttggattacgtttgccttgatatgatcgtaagttcatgtgatacggtagctctgaggaacatatagacatattttgggtttttagtaactagacctgcacttgcagtcgagtgtgcggtgccttaatcatggaagtttttgttttttggtaaaaaattattgaaagttttaatgggtgattgcctagttgggtatcttcaaggagttgttgatcgatgaaccggaaggaatttgtggattttgattcttgtttgggtagctataaataattcaaacaagtcaattatcttgagtctgacctccaatttattgttgaacttgataaataaggacttaggatgttattgtattttcattgatagattttgtcgtgttcttgcccaatctaaagcattcacacggtataggcatgtacagtcttaaatctggaaattcacaatgttaaataatctcaggaatatcttatttatccagagaacaagaaa

SEQ ID NO: 90205 - DNA, 1064 bp, Eucalyptus grandis
  Intron number 4 from transcript Egrandis_v1_0.003333m (loc us Egrandis_v1_0.003333m.g) derived from phytozome v7.0 (c hr-ID scaffold_6; pos 46775964 to 46777027)
tttctctagtcttgggttgtctgctcctatatcaggttcttctctctgtctctgtctctctctgtctctcagtcacacacacacacacacacacacacacgatgttaaagatttctggctgctgctaatcaggcttttgagtgtatctgctttatctgatccttacacattccactggatatgagcaacatcaaagtttctggcacctcttcattatgtgctcatatgtgatcatttttaatattatgttttagttttgacaaataccatcattcagtgatcctataaatagattatgtctcacctaaagtaagcaagcgtaaggaaaatggaagtcataaagattgacctagtccttattgcttttgtgggagactggaggattggaagcaccaatatacaggcgaacttgcagaggatatctttatcttggaatcttcaaatctaactcttctcttcttcttacagagattattctaggtgcatacacacattactaccatcacattcgaagtgtctaccccacgaagagatgggatacctagtgaaaccctgactcttgttttccaacgtattttagaataaactatctacctaatggagcatattcaataagatgttttcatcaatgaggacataagttttggaagtgtgttgctaggcaggaagttacaagtgaatagagttcttctccgaactaaatagtgaaaatgcaactttgttgtttgtgtaggcctcatgttgatggggttagggtagtgacacttcatttggttctgtgcataattgttgtttcgagccagcacttcatggagcggtggagggcatggcattcttgtttaagtatcttgtctccattactcattccagtacttttggaatttatttcagtgcatcttccatgatctctgatgctttggtcccttatcaattattgccaaccataactataaatcattcaagctgccctttctagggtccttcgcgtttactcttttgttgattcattcaatcttaattcttttccaggagcatttcctttagactttggattaaaatcagtt

SEQ ID NO: 90206 - DNA, 610 bp, Eucalyptus grandis
  Intron number 1 from transcript Egrandis_v1_0.053800m (loc us Egrandis_v1_0.053800m.g) derived from phytozome v7.0 (c hr-ID scaffold_6; pos 49354448 to 49355057 reverse strand)
aaggtaccacaacttctcgcgtaatcagctcacactagcttttcttgatcaattcgaggagagtactgagcattattatcctaggaaacttttaactagacatctgcagtggaaagacattagccacaatcaccataaacatgatgacaaccatgcaaggttctataaagcagtaaacctaagctaaacgtttatacaacgttctctattatataatttaatacttgtgcaaagattttctttctaatagttagaccttacagaattccatacaattaagcagataacaacgaggtcttatactttacaaaaagaatgttagaattgtgaaacttcaattgtattgactctgctaacttagagttcaagaaaagtttctggctgttctaagaattctggaatgcgttccttctacccttgtaccaatatttaacaaggttcgcccatcgcttctatttttgtagaacggactcttgattttccttttcagctgattacatactctaggcattgcaatgttgagcttgttctgcgataaattctttggttctatgtaaaggagaaattagtacccaagccatttgaatttgctcttctttgaacagaacaa

SEQ ID NO: 90207 - DNA, 736 bp, Eucalyptus grandis
  Intron number 2 from transcript Egrandis_v1_0.008605m (loc us Egrandis_v1_0.008020m.g) derived from phytozome v7.0 (c hr-ID scaffold_6; pos 4900797 to 4901532)
ttggatttcaccgaacacagcgagcaaggcgataggtgaattttcctaactttacccttctcggataaaacatttaacgcattagtctggtcggattaggttttggtagctctattcagcttcaagtagagggtttcctaagatggaatctttgggctaattaatgaaagggtatttgaaaaagcagtgagctctctttacggagggaaaaggaatcacaactggatggtccatttttggcactgggaagcatttgtcgtggagacaaaaagaatggaccgataaaattaacctctgtttcaggccacgtttctgttctttgtctccacagtttctgttcggatctagcaaggtggatcaatgaggaaatttggcatataatcagttccacggatatgatttaaaagacttgaaattgcgtttcatttgatgattttttttttcccgaagattttgattgatgtgcatttggttggtatcaaatgaaaattagtaatctggacgaggtttaccggttccctcttgtcttctatgtttgtagttttctggtggaccgagtaatctggacagattctgcttcagcagtacacatgtatctgttttgcctgcttgttgtgcggttgtttattgtgagaatcgacatcagggaataatatacagatagatacttgataatttgcatgttgctgagtttcttttgttatccctaggtaccgggagctggctcaccgagttg

SEQ ID NO: 90208 - DNA, 872 bp, Eucalyptus grandis
  Intron number 2 from transcript Egrandis_v1_0.014041m (loc us Egrandis_v1_0.013951m.g) derived from phytozome v7.0 (c hr-ID scaffold_6; pos 41448437 to 41449308 reverse strand)
acttgcagacactgaatcaaaatcttcgaacggtaagattcgtttgattgagatggttttgcctgttttgcaacattctggttaaaaaccctggcaatgttttgtgtcatgctcttttcactggagatgatatgatcttgtcaccaacacatgcattcacagctgggtgtttttggttgaagggcgttttcaaagactcaattgtaatagttggtcatggcatttgtggaaaattgcttgctttcaaagtttagctaagttgttgtgtaaagcttagcatttctttgtgctaataatgatggttttagcggcctctgctgttggttgctaatgtctgactataggcattttggcaaaagggcatgtcttgaaaccacccatgtaatagaatatctgttgtatatggtttttcgatcttcagatgaataatctagagtctagacgaagcagtctatacatcagaggacaaaaaagagttaagggttcagaagctaaaactcctcacattgtcctgaacacattgatcggaaaattacgaaagcatgtttgggaaacagatactggttcctactctctgtctactcttcacggtgtcctctcttttctgttctatggcttgtgttatgtcttgcctcgggaacgtgaagtgatgtcatctgttgccatatcattgaatcctgcacatgcatatgaaaggccaaaatgtatgtgtcacagtcatcctgcattgccttgtatatagtaaacttaaagtttcttacagtggtttgccagcttaaataaaaactttcaaggtttcttcttggcacttagttcaacctattctgattatatttctctggtagatcgtaggtgcagataatccagttttg

SEQ ID NO: 90209 - DNA, 803 bp, Eucalyptus grandis
  Intron number 1 from transcript Egrandis_v1_0.008756m (loc us Egrandis_v1_0.008756m.g) derived from phytozome v7.0 (c hr-ID scaffold_6; pos 45758766 to 45759568)
atccctttaaccttaaagctattttatcttatgtaattctcttcacaatcccaataaggttcttccgggaaacaggctcattttgtccaatttccctttaaagagtgaatcttaatctaatttacgttcaagcttgaaattatgtggtttggtaccatttccaaatttccccatttttatcacaatttattccgcatttggcatatttttgagtttggacattggacaaaaaaaagagtaattattacatatattatgagtgttaaaagaaaaagtttgcacaagcaaccacatacattgattgataagatcgacaagaaaagtggatagctgtaatttttaaatcaatggcgaataagatcacttgcgtaaagtttctttctcattgacaagatgcaatcaattttttggaaaagttggggcaaatatcatgttcaaaactaaagtatgcaaatactagagctctacgtatatctaatccatactattgtttggaccccaaatcttgattatagttcgacctgttcttttattcggaaaacatacctcattgaaaaatttgtagaaaatgttattttatcaaaattcaacgagtgttacagtcttttagtacctttagtattttccttttcttatattctcaaccaaatatctgctaccgaaaaaagaaaaatactgcaaaacgacactcttgcggtgacattaggcatgtccccacttaggtttaatcaattattgctcctgatttttttttataaaaggcaacagaggagcagaattcaagcagaaagagcaaaagaagg

SEQ ID NO: 90210 - DNA, 339 bp, Eucalyptus grandis
  Intron number 1 from transcript Egrandis_v1_0.032564m (loc us Egrandis_v1_0.032564m.g) derived from phytozome v7.0 (c hr-ID scaffold_6; pos 32027864 to 32028202 reverse strand)
ctcaagttgaaggccgtgttctaccggctcctaaggtgccactgctagtttcccttttgcattttgtttgctggataaaaaaagaaaaaagaaaaaaaagaaattctgtttgtttgcaatggactgttagacaatcatctgcaataacacaaacttctgtggcttccttcccagctaaacgtgggcaatggagaggatttcttcccccacaatggacggtggagcttttagaataaggttatttgaattatccgccaccaattattgtgttcaataagtctgtttatgctatcttttcactcttctgcagaaatttgttgagccagctaagatacagaa

SEQ ID NO: 90211 - DNA, 964 bp, Eucalyptus grandis
  Intron number 1 from transcript Egrandis_v1_0.011456m (loc us Egrandis_v1_0.011422m.g) derived from phytozome v7.0 (c hr-ID scaffold_6; pos 52736254 to 52737217)
ctctcgcttcttcccgtggcgccaccgagtcgttcgtatgctccttcttctctttgccctgctgcttcgtatgtcaggcttggtcgtgattgatgcgttgctgtcctgttttgcgatgagactttgggctccggtgcatatgaattgctagcgattctgttggttgttttgtgacgctttgagtctcgggaagcgtcgcgatagttctagttaacaattcaggggtctatagaagtacgctctgactttttataatatgggacttcgctgtagagaattgaactggctaattcttgtaatggtttctgtcatttgcagttcttgttttttgatttcttcaattcgatatatctgcaccgatcatttggagtggctatcagtctacctatgaactagctgtctttgtttatctacttctccttccagtttgacacttgcacgccgtttgagatgcctaaaattctcaacttttaatgcgaatactgctttttagatgtagggaagtggacggtagtaggagggaagtacttccctcatgactattttcatatttgtatcttgaagcgagagcattgaagtgaaatacaactgtaacattcccaaagtataaagtgcagcgcaaagctcccgtttgagtacaaaatcattttaattctcttcatttgttttgatgcgtgtcttcacttacagccaacaaaacaacggatgaaagttccactttcccatcaacagccgtttccctttgattgatttccttgataatgtggagaaagcttgtgtcaccctatttcctttctctttgatgccttgctgttttttgatgtcacatatatttttccagttgattagtggtgattgtcctctttttgaagttgcaacagagattcagttgcagattgagaaaaaggaagaatgatttactttttttgactaaaagcttttggaaaagttctcaggaagccaa

SEQ ID NO: 90212 - DNA, 797 bp, Eucalyptus grandis
  Intron number 1 from transcript Egrandis_v1_0.012122m (loc us Egrandis_v1_0.012122m.g) derived from phytozome v7.0 (c hr-ID scaffold_6; pos 38223022 to 38223818 reverse strand)
ctgacgtgattcactctataatcttgcaggtaattggatggttcgaacttctcatggctttggttttcggttgactgtgcaataagctgatgtttcttcaactgttggaaacttcactcaacttagcggtgtagctttgactcggtcggctgttgactataggtggttgttgctgtaatgtctatagctacttcattctggagttccgttgtcgtttttccctcttttatttgagaacgcagtttctggtgtggtccgacttgactttgggcatcatgaaaactggtaatcatactgggctttgtgagttaaaacctcatgtttatgtcttcgtaaataggcgttatttaggcagtatttcttgcaacccagtggtaattttcagcctaaagctagagcgccgtgatgaatcccttgagaaaactcaggagctaatagagtgatatgtatttttgttgtctggtggctgtgcacctgtggtcatccccgcacccaactacgtaggtggtgggtaaacaattatttcattttagatacaagtaagttgttgatctcaattctcaagaatttcctatggaccacctactactattatttcacatcctaagtagtacgatgtgggattcagctttaccttgaggaattgacacaggaagcagacctttaagatcagaggaatgtcattaagcaactgcatgcttttcctctataggtgtttgaagaaaggcaatgctcttctgtagttactgaggtttcttttcgggtaaatgatcctgttgtcatcttttttgtccagg

SEQ ID NO: 90213 - DNA, 880 bp, Eucalyptus grandis
  Intron number 1 from transcript Egrandis_v1_0.031275m (loc us Egrandis_v1_0.031275m.g) derived from phytozome v7.0 (c hr-ID scaffold_6; pos 45432982 to 45433861)
gctggaagaagcagagaagagtaggagcaaaagtagagaaagatgtaaagaaggagcggaagctagaagacaggctctgataccatgtcagaatattagatggaaacaaaccgagaatcgagaattgagaaaaatgcttttctttctctgcaattcaattgtacagtttacagccctattaataacgtacaagcttgatctaattagagaaaataaatatacaagaataatttcccaaatatacaaaattctaattttccctaaatatacaaagtagatcaataaggatcaattatgatcaattatgggcaacgctatcttcaacaatgggaatggtggccaaatgcaccataaacactgcgaatccaatgggcaaaggagccaaaacctgcaccatgcacaaccactgtactaatatacaaaagagtttgtgaaaaagacatagcagatcaatttgactttaggagatctcgatcgggatacatacgggaacaccagaatcgcggacactacgttccgggtcggtggcagagaagacggtgtacacgagcacgaaagtgacacgctgttgatcttcatttggttcttcaaaacaacagcaatgcagatggttttgaatggtttgatgcaattccacctatgcacttctctttcttgtgggttcatcgggtcatatttgaggtggatagatttttttttggtcataatgaggtgcatagatgtcaggcataattttctaccattttgtattacttcggcagtaatgaagatgtacattgtgcagaataaaatgataatctgtgttgcacatgactctgcctttttaatgtcctgtttattttggcatttgagcttttctctttctttttcttcctccaga

SEQ ID NO: 90214 - DNA, 620 bp, Eucalyptus grandis
  Intron number 1 from transcript Egrandis_v1_0.021553m (loc us Egrandis_v1_0.021553m.g) derived from phytozome v7.0 (c hr-ID scaffold_1520; pos 1065 to 1684)
aaggtggacccagccaacatttaatctgtagtaccggagtcaattttcatcttaatctttcacaagatcgagttgatggagtcacgttacaattcagcgtgctttttctcttctctgatatttcggcctcataagttggcgaaaccagaaacaatctccctctcgtttttcacactaattgacgaatctcctcagcttcgcatgctgaaacgaacgagtacatttctagacgagtctgatgaaaatttccgtatgtttcgtactgtgtagatgaatttttatacagaagaacacgccgctgatctgtaattcagatgtcattgcaaataccttgtcgtaacctttcaaaagattggcaggtaatgcatggacaagaattatgtggatagcggctttttttaaaaataaaaagtaaaatattcttcacaacagtttttctcatctggtggaggtattgaagtcttatctgcattagatttcgtatttctcctttttcatagtcttcctactggccaaaattagatcggttgatggtttctgactttattgattgtttgtccatgttcttggttatttgattctcagggagacatatacgatcaaaagagtctgttgagtgc

SEQ ID NO: 90215 - DNA, 313 bp, Eucalyptus grandis
  Intron number 1 from transcript Egrandis_v1_0.015852m (loc us Egrandis_v1_0.015852m.g) derived from phytozome v7.0 (c hr-ID scaffold_6; pos 34948393 to 34948705)
attcccccgtaataatcccctccctttctcgaattatgtatgtttagatttcgtgacaaatcgacataacgatgctagttaattacattgcattacacgttcagtagtagcagtcgatgcatgtgtttcatttttttttttcttttggtgaagatgatgtgtttgtgtttcttcacgcgaagacttcgtttcgaagaacatcttatacgaaaaacattttcctactccatctgttacacataaagaaagttacagacaacttggtggtattctttgacttggaatcatatgaattgtaggctttcctggaggc

SEQ ID NO: 90216 - DNA, 236 bp, Eucalyptus grandis
  Intron number 2 from transcript Egrandis_v1_0.015852m (loc us Egrandis_v1_0.015852m.g) derived from phytozome v7.0 (c hr-ID scaffold_6; pos 34948825 to 34949060)
ttctggtaagtcgagactctgagccttccctttcattccttaatccttaatcactcattgcaagcgacatatttatgcaaaacctacactagatggcatggaccgtgctcaaattctttgaatttgcctgatttttgtagcttgttgtacggtacggtttcttcaaatgctaaatattttattttctcaatttcactcgaccaaaggtctctggcaacattgctgcgcccaactca

SEQ ID NO: 90217 - DNA, 778 bp, Eucalyptus grandis
  Intron number 3 from transcript Egrandis_v1_0.005641m (loc us Egrandis_v1_0.005641m.g) derived from phytozome v7.0 (c hr-ID scaffold_6; pos 38727504 to 38728281)
accgtacaggtattgtcatgatcttcattcatgtaatttcgtcttcgtctttgaatttttcgtgctttcttgttccccctgcggcagtcgattttctcagttattcttatggttggtctgtgaagattgcttaacctacccagaaatgtacaatttctcacttttgttctttttaagagaaaaaagaaaaaaagaattggaatttttttcgaagagagcgacaatccttttcactgaatccgtcgagacagtagatctaacaagtttcgtggctgaaaatttcagcgtttcttggggaattgacgattcttatgaattacggtttttatcatgcatctatttttcatgagggaagttagtgtctggattctcgtaaaattgtgacctgatgctattaatattcctgattaaggtgaaattcgccaggctgctgttgctcgtgaattttggttcctgcgcttaattgatatatttagtagaagcaaagtcattctcgcagtatatcttttagggtttcttacaaaattgtctgctccctgcaatcgagcatttttgggttgtacaaagttacgtgggccaaccaggaagagatgaatgagtgaaacaattgagagccacgaattcatagatcaaaattctaaggggggaagagaatatggttaatgtagagatggatatgttaaatgcaagatctctccctctattttaagttttagattttcaagattatgctgcagggttcattattaacctttatctctactaatgcaggatcaag

SEQ ID NO: 90218 - DNA, 1005 bp, Eucalyptus grandis
  Intron number 1 from transcript Egrandis_v1_0.051849m (loc us Egrandis_v1_0.051849m.g) derived from phytozome v7.0 (c hr-ID scaffold_6; pos 48659547 to 48660551 reverse strand)
ctcacttttcacttgttacatctttcctttaaaatgtgtgtaatctcatcaatttttttgtcctttgcctctttgtaagacacattttcttccaactgcttctctatttagactttcgcatttttaagcctagggtaaaagcactaaaggtgactcaattttcaatatttttttcattagcctggcacaaactttttacttgttgaaaatttgaggtagttgtctatgtggtttattttaatattgttttagtcttaattgatgtggcttattaaatgtgcagcgatacaattgcagcatcacatagtatctattgaatactacaactgcagcaataaatgatgttgccgagaattacttgcaactgtcttgagtttgagataatgtcttatagattatcattacaatggtgaaacagcacccaaaaagaaaaaggaatgagcaagttttcaacaatacaagtcccaaaatgtaatggtgttgcttaattaggtcggttggatacagaaccagcaaggtcccgtgctaacatggcctttttagtctatagagttgcatgagtgcatgaaaaggccacggtatggacaattgagagtttttcatatttggatttgggtgatggtgagggactggaatttggagatgtttgtatgtagtgctcgattacaaataataagtttaattttgatttgtggaagttcggtagaccgaaatgagaaaacttatgtttttttttttttttttttttttttgtggtagatttatgttgtggtgtgtgaagtcgcaacaatctttaagatgaaataaacgacattggttcttggctcacaggtttagtgtttttgacttaagatgtctgctcttgcatcactaaacagcaagtgtcgctcaagaggaaattgaagcagcggaatagcttttgaagcataggtaaggggttttggctccaaaattgccgatttgcctacagatcttcaggcaaagatagttcttgaacattgccgg

SEQ ID NO: 90219 - DNA, 979 bp, Eucalyptus grandis
  Intron number 2 from transcript Egrandis_v1_0.008318m (loc us Egrandis_v1_0.008318m.g) derived from phytozome v7.0 (c hr-ID scaffold_6; pos 43150303 to 43151281 reverse strand)
tggtatgttcatgaatcatttgtgaatagtccatttaattggtgtatgtctaccaagagaatataaataagagaatcggagtactaattaatgtatagatgtttagggtatacgtttgataatcattttctgggaacaatttttactcaaaaatagttttatttatttattctgtttcttgaagagtttatgagcattcaaaaacatttgataattacaaaaactttctatttttggaatagaaatgtgtttaatatgatccttaaagttttttgtgacttagaatttattctattttttaaataattttattatatatatatatatatatatatatttgtttctttttccttctcttcttcttcttttggccaaacgagagctggtgaggtcgaccctcgcctagccaccgtgaggttggccttgccatatcttgcaaggcgaagccttgcttggccaaggtgaggctcgctagaccttgtttggctagtcatcggccatcgccatggcccgtgactagctagaggaagaagaagaggaagagaaaaagaaagaaaagaaaagagaaaaagaaaatttgttttggcttgattccatagtggttcctgagaaaaaagaaacaactttctttgtttttattttttgattatgttccaaacaaatttgttctcgataataaaaatgttattaaacgaatttttattcttttttttattccgaagaacaaaaatataaaatcaggcaccgttgatatgttaccaaataagcttttagttgacttagattagattcttcaccgttttttttcctccaaacttttcataatgaatctaataagagaaacccctttctatccattcaaattcgaggagaaacatttgtggatctatacaataagctccgtaaaaatgatgaccaagaaaatctttcagtatctagctaattgcttttttctcggattttgtttggcgaaacagag

SEQ ID NO: 90220 - DNA, 331 bp, Eucalyptus grandis
  Intron number 2 from transcript Egrandis_v1_0.017960m (loc us Egrandis_v1_0.017960m.g) derived from phytozome v7.0 (c hr-ID scaffold_6; pos 15343400 to 15343730 reverse strand)
ctctttgcactgctatcgctaaatactgccccagtgtgagtataatcaaattcttgctggattgaaaagttgaaaagaaatcttatgcctctgtcctgtttactatgtagtttgcctctgtgggaatcgcagatagtagatgatagcatgtagattatacctagttgtaaacttgtttctgaaatcaggtccgtgtttaaccatgggcacgacagagtctcccctatgatattgccaaattccctatttattgaatctgattcgaggagacatttattgcttggttatctgactaaaagaaaattactcactcgatcaggcaattgtgaat

SEQ ID NO: 90221 - DNA, 442 bp, Eucalyptus grandis
  Intron number 1 from transcript Egrandis_v1_0.010288m (loc us Egrandis_v1_0.010027m.g) derived from phytozome v7.0 (c hr-ID scaffold_6; pos 39998460 to 39998901)
atcgcttgctgttccaggtctctcccactccttcggtaatttatcatttccccttcttctccttcttcgccttctcccgtctcgtgattttcggtgaaagtaggaccgacccacgttattcttgaccggaaaaatgcgatctttatgtcgtcgaatgatagttaatggaggaatttcactctgctaagttcagtcccacgtacgtttgacaagggattttgaatgaggaataataaacgtttctcttggatttttgtttttcgccttatagctggatgtgggtaagtgctgcattcgagtgggagtgaagtttcttcattttgtgcttgattactcgacagttccagctgtgccctcttcacttcatctattcgaaagctctgtacatgatttatcttttgttttcacagattggatcgtgcgctaaagcttgcgggctcgt

SEQ ID NO: 90222 - DNA, 947 bp, Eucalyptus grandis
  Intron number 2 from transcript Egrandis_v1_0.031737m (loc us Egrandis_v1_0.031737m.g) derived from phytozome v7.0 (c hr-ID scaffold_6; pos 28959390 to 28960336)
tgcaggtgaatccctcgcgacgtgcgattcgaagttcgtctgcctagtgtggatttgcatagcgtttcgttgcgccaagctaatccgtggggacgcatttgctaactgtgctaaacactttgctgaagtcgttgttcgggaactccgacgcttttcgcattagccgaacccatttggcactcctgtttcggtgcggtatgattacggcacggcagcatgacctgattaagttgtccattcgagcctaccgttggatgctgttccctaatctctagttaaaattccatttgccacgcttccctgttgaatcttagtctccaaggtcattatgaattcaatgggatgctgttcttttggaggtttctcatcgtagtggttggttatgcatctggaatgctctttaagtggcttggaaagtacactgcctcagctataaaaccgctacaacttcttgttgcatctttttggtgcatggtttgtatttgatgtcaaaagaaacttctttgtctccccttttttgtttcgagcacattctattctttgtatttctgatagcttaacctgttatgcataattgcaaatgactcttattggatgcgaaattgagtattaaagcgtgaatggtaggcttttgtttattttttatgtgcatagatttgatacgttgtattgtggatgtgaagagtcgagttccagtatccttgtatatcttgttggtaggatttatatgtagcctctgtagttcaaactgattcgatatcggaatgtcaaggttgtatatcagtaagatagcttcaagaagaagaggccaattattttttcgtttttgacaatgagatgggtattggggaaatatggagataaattgagcaagttatctatattctgcttatgatgaatatgttttgataggtgtagactacattgagttaaggaaattatacgag

SEQ ID NO: 90223 - DNA, 718 bp, Eucalyptus grandis
  Intron number 3 from transcript Egrandis_v1_0.021338m (loc us Egrandis_v1_0.017808m.g) derived from phytozome v7.0 (c hr-ID scaffold_6; pos 53643752 to 53644469 reverse strand)
taccagctggataacttctaccaaaatcatcgcaggtttgtatcagtcgccttggtaacctttgcattctcagcatatttttcgtgtgaaggagtatctgaaatcaatggttagttttatctaactcagtcagaccctggcgctaataaacatggagatgttgtgtctccggtagctttttggatatagatgcacttattctctcctgccacatggtattttggatatttggtctgatccatgccttttattttcgtattttgagtagcatgagataatatggactgagccgctgcattttccaatcttcgcatgtatactttgtaactaatgcttgataaaaggagatgttttccattttatgattggaattccacttcatgatgtcttggtctgcctttagtaatgctttttaggaaaaccataatggatggcttttaagcaagggaaccaacatgcatttcatgtcaggaaaaactgttggttttacaatctcacgtgatcccaatgggatttacccattatttgattgtatttccatggacaattggtatggtagcatcggaaaaagggagttggtatggtagcaatgatgtccgctactcacaatacgataaacaagagagcagatgtctttggccatattttattgcattaactgtgatggctttgtttaatttcaggtacgtgaagagtcgaagtgaccaacagttaaggg

SEQ ID NO: 90224 - DNA, 783 bp, Eucalyptus grandis
  Intron number 1 from transcript Egrandis_v1_0.010608m (loc us Egrandis_v1_0.010636m.g) derived from phytozome v7.0 (c hr-ID scaffold_6; pos 13917490 to 13918272)
ttgtttaaggctccgagcacgtccgtgtatgtacagatggtgattaatgagtctgcatacgtctgcacttatgctgtcggaagcccgagcttactcggaattcgtttctgtccgtgacgagttcgccgggtgttgctgtcgttttgtctggaaaattgataatcttcactctttccggagtcgtctgatagttgacgcgcattgattaatgcttcagaagagagtgcttctttactcatttgagatagaattactttctcatgcatgctgcaaatatcagtggaagagaagccaagtcattgacttgacttatccccaaattgaagagaatgatgatattcgtggaagataagtcaagttattgagcaaatacttggcttatccttaatttgctcaatgacttggagaatatcataattctgttcaattacgttcaatttgctcaatgatttcagtggaagataagctaagtcattgagcaagtttcacgtaagtcttcttcagggaaaaaaaaaagaaggtttttttgagatgagattttcagagactaacaaaaagtactttataccacgtaatttgttattttggttttgatttccaacgttatcctcttttactacttctctttatttctttccagtgatcctttccccagggatggaagatacatgtctcattcggattttctctatgaatgacagagttctaaatgataccttaggttagttactgactgtatgtagtgtttcttatgaattgctcttttgcagcttgaaggttgtc

SEQ ID NO: 90225 - DNA, 754 bp, Eucalyptus grandis
  Intron number 2 from transcript Egrandis_v1_0.009132m (loc us Egrandis_v1_0.009132m.g) derived from phytozome v7.0 (c hr-ID scaffold_6; pos 42117001 to 42117754)
ctaagtgtacggacagcactgctgttttcttgaaggtattttctgatcccataataagggtggatgtgaagttgggtttctgttttctgccattgctggtgatcttgattctgtatagtttttccctgtcaatgctctcttgcactatgctgctaacatggcttattgtaccgctgtatgtgatgcttcacttttttattgattttgaaatgcgtagaattttcaagctactctggaatgagggaaaggagaagattatagagtgttttaaaagttacatattaactcagctgacaaatactcttttgagttcacttacacttcctccaaattagtgctgctctgtacttcagtacctttccctcgatgtggttgcaatttgaaatagtactttttggaatctgtatggtttgttttgatccctaccgaagaatatcgggaacaagtagtctaattgaaggtcaaatttgaaaacagtctggtttcaggagtcgctttatctccatgattgaatatgtggaagaaacttgttgcaagaatgatgctgtctatttcttaagtaataatttcttggccactgcatacttggtagtattatgctagtatcactctgattattcccataatgactatgactttccccctccctttacacttactctcctaaaactctatatatgttgaagttgctgactcatacctcctcctttatcctcaagatatttgagttacgcaatccaggagctgccatcca

SEQ ID NO: 90226 - DNA, 293 bp, Eucalyptus grandis
  Intron number 2 from transcript Egrandis_v1_0.010545m (loc us Egrandis_v1_0.010545m.g) derived from phytozome v7.0 (c hr-ID scaffold_6; pos 3303283 to 3303575)
ctttcgttgaaaccaccgtcagagatcgttggaaggttcatccctcactaaccctcaatatgatatcgacagacaaacatatagttatcatacatcattgaatttaatcatagagaatatgaaagatgattgcaatatgatattttttcatctaaacaacatggataaagctatccactgacctgtttagtcatctggaaggagttttagcttaatcaaaaccatccctttgtgcttggtgatgactaggactgacttttctcctcttctttttgtcttttttatggctttag

SEQ ID NO: 90227 - DNA, 486 bp, Eucalyptus grandis
  Intron number 1 from transcript Egrandis_v1_0.003200m (loc us Egrandis_v1_0.003200m.g) derived from phytozome v7.0 (c hr-ID scaffold_4; pos 12126956 to 12127441)
ccggttcacctttgatagagaaaggtactgtgtgcttcacttccaatcaaaaatgatttttctttattaacaccgactatggccattgcaaatgtgatttttctctgggataaaatatattttggtgagtagattactaatcaaaactccacacataactttcaaataaacacacaattttcaatcccctttcattaggctactcaactatattctaactttcaatccggtgatttgagcacttttcgacacataaaatctaatttggcttatagacaaaataaagtcaagtgatgattaaagaaattcgaacttaggccaatacagacatgatatttccaacaatgagaaagcttatgaaagacgttgcaagtaactattgcatttgtttccttactgaaatgcaacagtcatataattcttcacatactcttctccaatacttctcgatttttcacgttgcaggactaaagttcattcacaaaa

SEQ ID NO: 90228 - DNA, 558 bp, Eucalyptus grandis
  Intron number 1 from transcript Egrandis_v1_0.049240m (loc us Egrandis_v1_0.049240m.g) derived from phytozome v7.0 (c hr-ID scaffold_2895; pos 426 to 983)
aagtggtgatacggcaatatcataagagacaagtaagatctgaagcctagtccacaactggcatatctcgagttcaatttcaattgctataaatcatgcctcgatattgtgttttcccaagttgatttggtttgtatcgaaaacttaaatgacataatatatttcttaaagtgtccatggagaaacctaatgatggagtaacgtggaaccataaaaagatgaataagtaaagactgtaactggatcgggactgtcctttactgggatgccccacgagctgctctattcactatccaagtgaaaagatggaccgtcactttaatggtaaactaactgaaaatagctattaatggatagtcacttctttaataatgcttttgattgcaggttaagatcgataactttcataagccccttgatgctgttgattaaaactcttgaactagcaattatcggcaagaatatgcctcatgtgcttcttctttttcacacgagtttattcttatgagatgtccttaaacatacagtggtttgttcatgcatgtacgaatgtgcagt

SEQ ID NO: 90229 - DNA, 522 bp, Eucalyptus grandis
  Intron number 1 from transcript Egrandis_v1_0.002143m (loc us Egrandis_v1_0.002143m.g) derived from phytozome v7.0 (c hr-ID scaffold_9; pos 36092517 to 36093038 reverse strand)
ctgagcgcattaaaggagtgaaaagagacgttgaggttggctatgggatagctcactaggttttttattctatcatattccactcatggatctatgaccatttatacaatcctcttgccttgtaggaggtaaaacgaaaaagctgtggtactgagaacagtcaaaattgaactgattaagtttttcccataatttcacatattaacatctgataggatcatatctcacaaatggatggattttagcgtctaacttatttgatgtttttttaatgtaacattttaatcttattatccatctctccgggattgacttgtttaaacttatttgcatttaccttgcaaattgtagcaaaattaatattcttgttgctagaagttatatggctatctgtttattttagactataacatttttcatgaattatggtacttctgttctggtgtattttttcatctctcacttcttcccaacgcttaattgacaggtctggcaaggcctcttggctgttagagcacttgc

SEQ ID NO: 90230 - DNA, 1044 bp, Eucalyptus grandis
  Intron number 2 from transcript Egrandis_v1_0.025255m (loc us Egrandis_v1_0.025255m.g) derived from phytozome v7.0 (c hr-ID scaffold_9; pos 11100768 to 11101811 reverse strand)
accagaaactgtaagccgaaccctttttctggagggtgaaaatgtcggatgttgttgatgggttgtggcttttcttatgcggaatgctttgaaagctcttagtttgttgaattgatcaagtgggtgttggcccctgttcagttccttgtgtttgggcgtctactgctagtgttctgtgtattcgtagatggaactattgctcttctcgctcgtgtaatgttgagactgatatgaatgtttgttctctgattggaattacttacgacatcggtttgagtgagcatgcttataaagtgattacacgatttacaggaatggaaagaccgctcacatggtcttcaacatttgattcgggttccgcatttaagtatctgaagcacaaaaattgatatttattcctttaggtgctcatttttcatggcctctctatctttctttggtgacctgagtgatgtatcttgttggccagaacagcatatcaaaactgtaggatctaattcccggaattagcaattttagaatactgaatggattttagggatagattgtgggatggggtaatcactagggagtattttgggggtactccaaattaggtgggaaaagtcgcttattgttgatttaactctaaactagggaaagaaagtgcaagttgcagatggtagatacacttctgagttgtctatcatgttgcgaatgtggaagcataggtaactgagattttttttttttttcctgatattttgagtacaatttggttttatttggctacccatgttctgagggaccatgctgcggcactagattttattgtatcgaaaccagtatctcttgcatttcatacttaaggattggatcataacaatttaatgtatctcctaaatcttaagtcttattttattgtttttcttcaaaaatatcattatttgtagaggccaatggccaattgtctctctagcaaaagaaaagggatgttgagtaatgactctttatgatcttttccatgcagtcgggcatttttcgacaagaggatctcacaagaag

SEQ ID NO: 90231 - DNA, 978 bp, Eucalyptus grandis
  Intron number 1 from transcript Egrandis_v1_0.044108m (loc us Egrandis_v1_0.044108m.g) derived from phytozome v7.0 (c hr-ID scaffold_4; pos 9602148 to 9603125)
gaaaagtaggactccaaatttccactttaaaagcaaccgcccttatatatattgcaaaccttagtgcaaatagatacaaggcgaattgttaagttaggttttaaaccacaagttcataaaacaaggtctgcaaaaaggaatcgactatcatcaaaagagaattgtcctatgactaactactccaataggatcatcaattcttcaggcttcaccttctacacttcgggcctccgatccttcaccacagtcatctaaggaattgaaaatagttattcaataaccagtgaaactacatctcagcaagttctacctcctaagacttgattaggaagccaatacactcaagaagttgcctaagcacaacacgagttagaggacttaccttggcctcagttccttcctgcaagtcagtatatatcagatatacatgaatcacattaattcaccgcatcagatcaaatcattgatcaattgacctagtcgattacatgtcaacaatgaccattcctcggctatttcaatcaatactaccgacagaagaacagcccaagtgccataacttggcactgggggacacttaagtgccataacttcaaaacggtacacttaagtgccactttctttttctagtgggacacttaagtgccacctccggcgacccttgccggaaatcctacgtggcaatatttaattattttttattgcgtacgtggctcgccggagagctgagttggctctaactcaccagaaacgacgtcgtttgcataataaaagccccaaatctttcaaaaacgatgttgtctccccaaatgccctaaatctaaaaccctaaatcggccaaaatccctattgaagtgctcgaatctaagtcttgaaccctaattttcatttgcccaaaattccttcgttgaatattgaaaatagagagcaggactcacaatagcgcctcaatttcctctcaccgaagcgaaggagaag

SEQ ID NO: 90232 - DNA, 746 bp, Eucalyptus grandis
  Intron number 1 from transcript Egrandis_v1_0.027808m (loc us Egrandis_v1_0.027808m.g) derived from phytozome v7.0 (c hr-ID scaffold_4; pos 36839396 to 36840141 reverse strand)
ccgtgctgggcgacctacgtccccatttcatcgaggtacagattcgtttaagatggaatcacgggctgcccttgagaaatcgcgactctgtcagcagacccgtttgttttgaagttttgggagcttgaacttttttgaattttctcttcttcttgttttgttttttattttattttaagtctctgttctggatcttcttgcttgacgtattcttggacatacccaggtcgaaagtttgtctcttttttatgtgaagtccagagtgatagcgcgtcgtaagctggttatgtgttgtctgctgttgatgggaacggaaggactcgagatcagatgcctgtatctatccgaggccgtcctgtctagctaattcattgttcttttttggcgaaactttgatggttccattttaatctttagctttcactaaatcatgctattgcacttgcccattgggttgcggtagttccgactcttggtcattttgtgggcagtttcgggaatcttgcgaactgaaacttgttgctaggactctgtacttgtttagcaactgaaacaattatcgagcatgttggttttcctccctccaacttgcgaaggattatctgggcatgcttttggatttatgttgaatgctggcttatcaaaggaggggggaagaaaatcttgtgtagccttggacctaacactttccattttcgataccctttgaaggtgcttcggaccccagattttcggaacagcgaggc

SEQ ID NO: 90233 - DNA, 880 bp, Eucalyptus grandis
  Intron number 2 from transcript Egrandis_v1_0.005141m (loc us Egrandis_v1_0.005141m.g) derived from phytozome v7.0 (c hr-ID scaffold_9; pos 23614739 to 23615618 reverse strand)
agttttttgcccgttctgtggtataccctcaactggtataggccttcagaggttctcttggtttccaatgatcttgacttttctttctctatgctgtcttttctccatccttttctgtggatgaacaagaattttccttcctttcttgtttttatttatctttgcgtgtgcttctccaactatggaatggagatgatcaagctaacaacttgttaaacttctcttgtaattacccttctattctagcaagtccttatagagctactttcctatgaggcttactaagcagacctcttgcttgccagttgctccaagctcgttctcgagattgttttgtccaacatagcatgtcttctccgacttgattggattgtttcatcgtatttattttgttggtgtttgggcgtgcttgtttgctggatttgacttcttttcttacttagtttaattggacgaagcgggacttgtcttaaatttatcaaaggatcgtccttaaataattgatttttgtccgaaattcctgtttgcatctcatgcctggaggtagtcttttgatggttgagtttctatgttagactgcctatttgctttgtaaggcgtgaccttcaattttcccattgactttaagccagtcttgcaatggcatctccatcgaaatttccaaagctaaacgtagttagcatatggtaaattgctgcagtagtcatatgcaattggacgcagcagggttgatccctcatcttgagtagttatcttgtcaaattagctacctggcccatagtgatacaaaaacttaagtaattgaatcttgggttcctatcgtatctatataagctctactaaatgttctctttcccatttttcagctctctcggtcatt

SEQ ID NO: 90234 - DNA, 745 bp, Eucalyptus grandis
  Intron number 2 from transcript Egrandis_v1_0.006096m (loc us Egrandis_v1_0.004636m.g) derived from phytozome v7.0 (c hr-ID scaffold_9; pos 11838695 to 11839439 reverse strand)
ctgtggtgctgcattgtccgttctgcgtcgacccagttaggttcttctatccctctctctctctcaacctgtaattatttgataaatgcgcgacaaccatgggagaaagctccgcatcagacacggtccagagagagaaaagagggagggtagggaggtactgctgtcttaggtcgttctgtggctgtggccacagcagcaaaatccatgtaatgcttttcttttcatccgcgcatgcccgtgaagttcgtacagtgcaataaagtaattgcagagaatccgagcaatgcttcccagtgagacttcgccctttcacttcacttcatttcacatgaacccattgcttttgtcttttttcctgttttccatttcgacagtgtttcgtaccatctgaagtgtttcacgagagattcttgtctaagcacaaccacacaccggtgctcttttacattaaatattattctaattatccgagataaatacttttcacaggcccctgtctgcaaaaacaaaattagaaaaggtgaaaaaagtagaccatatagcttggaaagagcccattgggcaagtcaaaaaagcagatcatgtgctcatgtggtccctttctttcaacgatacaaataattactacatgacttttttgtgtttttatttttttgggtaatggtattgactaaaagtttgccccctctttcggtctattgttgaagccattttccagggggcagaaaacccaagcctcctc

SEQ ID NO: 90235 - DNA, 851 bp, Eucalyptus grandis
  Intron number 2 from transcript Egrandis_v1_0.023281m (loc us Egrandis_v1_0.019949m.g) derived from phytozome v7.0 (c hr-ID scaffold_9; pos 33720564 to 33721414)
tcggagcgccggacctcgcaggcttgaacacacaggtatgtcgcagggttcgttcgcccggaaaaatcctgcctttctttctattcgtctgttgttactaactattgttgtcgtgaagcgatgaattgggcatgttagagtagaattttccgccgcctcggcagtagttctctcgagtccttcgttcgcgagttgatgatgcagcgacattgcattctgcaagacgtaggatgatgggttgggggtgttttgtgaagtgcctgcctgagttgtttgttatcggcatccgcgttatctgcggtggcaatcaagttctggttgaattcatgcggttttctccacggacgggacggcagcggctcttcttcttgttcccgcgattgagatgaatgagttgaattgtcacttgatacgacttgtgtatggttaatgcaacatgatgtatcgtggccgttatatctcctctagatctataactcaactcgtgattagcaaaatgagaattagcattgactcatacgatagttatacatggttaattatacaaataaatgcttcggatagtactgcatctgaaattgtggaaccagctaagtctgccattcataacccacttagttgactagaggagtattgcattcgggtccaatttgtatgagccataacatgctgcgttatgaatctagtcatctttgatatcttacgttgcaaactagttctcattgctttttcacatttcaggcattgtttaggttgtttcgatgcattgactgatgagtgtgaagtaacctcatttgcattttgcattgatattagttaaggcagcgcctcaacaatctgaagttaataca

SEQ ID NO: 90236 - DNA, 816 bp, Eucalyptus grandis
  Intron number 1 from transcript Egrandis_v1_0.044726m (loc us Egrandis_v1_0.044726m.g) derived from phytozome v7.0 (c hr-ID scaffold_53; pos 17591 to 18406)
ggaattgttaaagaagcaagtcggtaaatgttgtaattatggttataattatggttaatggatcaacggaagccaataaattaagatacgttttttttgttcatgtatctctttttggattcatgaatttcctatacttttatgttcacgtatctattgaattcatgaatttcttagatttatgtatcatttagttcatgtatttattgagttcatgaatctcttgaattcatgtatctttggatacatgaatctcttggattcacgtatctctttattcatgaatctcgtggatacacgcgtctatttaattcatgtatctctttagtacatgaactaaaaatctctatatatagataggaacatagagcttcatgaaaggttttttggttttcccgattcgattccaaaaagagctttgatgtccttttctactcttctgtttttcctgagtgtgctggttcaattgaacggttcgacagagtcttgtttgcatagtgctaatccaaataggttcgaggtgttgtatcttgggaggcatagttcgtgaatctgcggggcaccattggcaggaactatcgcctttaaggagattcggttatccgtacctcacctccaattttatattattttttaatgatatcttattttattattctccagagttgtaagtttacataaaaaagaagaatattatatagctgttatcgtcttctttacattgaagttttgattacaacaaacagtgtgtattctctggatataatttccaacagtaaatgcgaggcggaattgggtgaattcgaggacaggatc

SEQ ID NO: 90237 - DNA, 588 bp, Eucalyptus grandis
  Intron number 3 from transcript Egrandis_v1_0.008532m (loc us Egrandis_v1_0.008532m.g) derived from phytozome v7.0 (c hr-ID scaffold_6; pos 18742086 to 18742673 reverse strand)
tcgtttttcctcgagagcaggtggacttgcagaaggtaaaaatctttggccctcgtcgaagttcgacgtttgtctacagacagtcgatacaaatctattgatccaaatgtcgatgtaacatccgagtattctcgtcagctcgtttcttcaattatattgatgctgtataccatttcatttctccatagcattataagctagtacgttatattttctattcttgtctgtaaagcattcagaaatagacaactaccatagcaacttattatgtgtagaaaccagtatacaggtctttttcattactggcctcagaagtagtgtcagccaagaatctcacatgtcatgaaaaactatttggagagtgcttctttgattcatatttagcttgacttagcttattctcctcctgttgatttcatttttagcattgttcatatccattaaccttgaattttctgtcagttttccctatttgaatttattaccctctttttcctcggatttagttctgaaacaggtgctcatgacattcatattatttcttttgttgcagattttccccggtttgactgtagcttcacttggtag

SEQ ID NO: 90238 - DNA, 976 bp, Eucalyptus grandis
  Intron number 1 from transcript Egrandis_v1_0.019826m (loc us Egrandis_v1_0.019826m.g) derived from phytozome v7.0 (c hr-ID scaffold_6; pos 44489315 to 44490290 reverse strand)
gggctacgccgtccacggcaccgtcagagatcccagtaagtccttcgcttccttcgcctcctctccttagattgtcagctgattattttgctcttgatttttctcagtccgtcggtttgtgttactttctgtaagctttgattgtctacatccacgctttgcatgttttcggcaataagttttctccgctcctcggctctttttaaaggtactgtctggactaagggaggcggagggaagtggacggagatcgttgagactggaaatgtttcgtatgttttgggtagtttacctagaaggatgtggatacacataggagggaagcttgcctttttcttttatagctgcccgcctcacgagcattggccactctgaggttattttgagtgggagaagccgagttgaacacggcatctagcaccctgcgctctcccatcgaaattaagtgcatgaatactcaaccaaaccaacccttgaaaaaatgactgcgaataggggcaggagttaggtaattcgtgcttgagcagaggcgaacaacattctttttgaagatgtgggaagggcaaggcatgtctttcggattagataacccttattttcctttcgacttcatccaagcaactgaagctctctaacttttctcttacctcctcttttccctttgaagtaatatcaatcaatggggctgtctccatttcagatgaaatttcgcaatatgtgatgctaggaaatcgaatcgttgcatattatcacgagatcaaattaaaagtttgggtcactaaagagcaaaagaagattgctgccttaagaaatggttttggctacaaaatttgtctgttggggggcttgatttttttgatggggttgggctaagtaactaatagttacagtacctttatctaggcccactatagaacaataaaaccagtgctcttttaatttggagactaaatttgtaactttctctgtgcaggtg

SEQ ID NO: 90239 - DNA, 503 bp, Eucalyptus grandis
  Intron number 1 from transcript Egrandis_v1_0.022194m (loc us Egrandis_v1_0.022194m.g) derived from phytozome v7.0 (c hr-ID scaffold_6; pos 44478333 to 44478835 reverse strand)
ataagaacagtggacgatccaaaggctacggttttgtgagtgctttatttctcttctttttggatatgttgatcagtttgtatttgtatcggatcgaatatgccttcggatgaagttaatgattctttagtatggcctgtctatcatatgaaagggcactctgttcagtaagcttcacaaaaacatgggagtagtgagtgctttgaaaaaaagggggaaaattggtgtttggattcatcggattagtaatttccgtgggaagtttccaaagggagtcctggcacgagtgttttggtggattaactgcgcattgacgagagccctgagagcggccatcgcctcagtttcggttctgtgaagtgcggacttgtatttttatggccacagacatgctttctttcttgcctttttattcatttgaattggggaatgaatgggtttctcttctttttcctcttgagggtgtaggtgactttccgagatcctgagagtgccaggagagc

SEQ ID NO: 90240 - DNA, 923 bp, Eucalyptus grandis
  Intron number 1 from transcript Egrandis_v1_0.026469m (loc us Egrandis_v1_0.026469m.g) derived from phytozome v7.0 (c hr-ID scaffold_11; pos 44482841 to 44483763 reverse strand )
ttcaagtaagtcgtcgccgtcgccctttttcccttgttgtttcgtgcttccggccggcggagacttcgatgtgttccgagtagtcacgcgagaaaaaagtaatcggaaacctaggggagatcgaatcgacagcacttgggtttccttggacgttcgcgacggaagatgttggcttaatcgaactgattcgtggaattgtgtcccgccggctgaggatttatcatcgacatttctacatattttatttggcgatatatgtgaggagtgatgtgttcgtggctgtttgaactctggaatttcgtgatcgagtccttctgattctgaagataacaacagtggtcacggggttgcgtgttctggggtcgttgaaattgatagaatcgttggctcgatgatgtcttcttcgtttgcataagatgcctgggtagccaagtggataaaagatattttcctttagccatttccatgattctttctttcagcatcatcgttgctaggaactgaacttgcgtctgggctgttttgagtgtcagtcttatgatcatagtaacagccaacggtggtccttggattttggttttctcggggatgggagaatggaaaatttgtattatcacaaagcttttgggttaacttggtacgacagcataatcgacgtagaaatcaagttgaactgcgtatgggagggctccggcagcttggtcccctccagccttcttgagagattagtaaacggaaaaattcctgcgatgactgcaaagtttttttgtagttcgtttcatactttgcatttctgcgatgattcttgagaaacatcatgaagtttataacatcaactgggaaaagcaaaatgtacgagatgcattagctgatgtctttctttgaaagcagaaatcttccgagacaccagtttggtaatttgc

SEQ ID NO: 90241 - DNA, 864 bp, Eucalyptus grandis
  Intron number 2 from transcript Egrandis_v1_0.007471m (loc us Egrandis_v1_0.007471m.g) derived from phytozome v7.0 (c hr-ID scaffold_9; pos 33439850 to 33440713 reverse strand)
ataatcggcctgcgtttgatattcgacctgtccaagtaaatgctgacctgatctttatgcgactctttctctctagcactctgctaatttccatttggtgtggtattggtagtcttagtgtcccaacacacaccgggcaattgtaggtccgtacttgtcgtccccagagaaagcattgatctgaaaccaaacattgaggaaaggaaacacgtttaccacttgggtaatccctaggttgatcagaatgctgctctagccatggctatgatggacttttccactgcttgcctgttttgtatatacatgagtggtgagaactggagataaaccctacgtaaatcatgtagatatacagcacatgactagattgttacgatcacattatttggtcttcttgtgtgtacatttaggaaactgaaatttgatttatatatattctaaattctggttttgcaatgctggatgaatgctttggagctctctcaagcaaacaaaggggaaaagcactaatttgataaaaccactttccagggaaacaaaatgtgacatcagtaattttacaacttgttatgtcagcaaatttttcaagagtttcggttttgcagaaatcatcttcacttgatttgactcgactgggttctctacacctttatgttgttgaagatgcattcgtgatattaatgagcatttgtgctttatgtttgtatttccctgtctatggcactattaatggctttagatgttcctagagtaagctataaaacatttgaggtgaggggccaatatgtgatgagtacacccgaaaagattctgcatttatagatctttcttgagcaatttctcttgtggtgtaggtttatccca

SEQ ID NO: 90242 - DNA, 661 bp, Eucalyptus grandis
  Intron number 3 from transcript Egrandis_v1_0.016737m (loc us Egrandis_v1_0.016737m.g) derived from phytozome v7.0 (c hr-ID scaffold_9; pos 31233963 to 31234623 reverse strand)
gtggttggcaacattagcactgtccttgaggtaagccatatccataatttcccttcaattgcgtagcattacagcactattaaatccatataaacaagtcaatagggttgcaattattgggaggattttgttttttgttttttgtttttggtcggtttgaggattttgttgtccaaagcattttcttctttatagttctgtcgctccctgactttttgtttgatgctgaccaataattccttattaaaatatatatctatgatcttatgagatattaaagcgattttcatgtcggtggttctgtagtcaaaatattttcttattgtttgagtcatattaagcaaacacgctttcacactcaagacacttaataaaagttttcaatttctatgatgatttcattatattatttaattactttcttaaggggtatttaaaggtcagttgcacttcattatttgttttttgcccatgtatttttcacgttctactccgaacctcttataaatttgattttattttagtttgatattaaattaaaggttatcacacatctttatcaaatgttgcaattgatctttatcagtagattgtaataaatagatcaatcttcgatttttttccagggtatatataaagttggagcaagaaaatttgggtt

SEQ ID NO: 90243 - DNA, 990 bp, Eucalyptus grandis
  Intron number 1 from transcript Egrandis_v1_0.043778m (loc us Egrandis_v1_0.043778m.g) derived from phytozome v7.0 (c hr-ID scaffold_9; pos 20358207 to 20359196)
agcattgtcctgaaatatttccttataaaaagtaagttatagttacccctttttccttcttttttttcaactataattgttcaagtcatttgaacattcatggaataatctacactggaaagttccatggagaagtcgtttcaaatgtctgtagtcgaataaactagtaatatgctcatacgctgggcaagcttaaattttttcatttgaataaaatagaatgtgaaattcggtgtaaattatttgttatatggtatactattatatataaatcttcctttttcaaacaaaacgaggaggatttattagaatataacatattagcaatttaaaatatcggctcttgacaataattggaaagttcctaatcgtcattgttatataggatttttttttttgtaattaaaaacattattttaatattgagagaaagttaattaaaatcttccaaggaaatatttaaatagacagatttaaaaaaaatgttagaatagtcaataattgctaatttgagacattaaaactaatgtcttttcatcaaaacttatggtatgcaataagactatcacaaaatcttggttggaagcaaaataagtgaagagtaaaaaaaacatggactccttgcaatgaggattaccggttccttataagttaaagtcctatgtgccacttttagagacacccctaaaattaaaggttgctattatatatttaaatgaatattgctactataaatattagtaccataaaaggaaatgatagagatagcaaaaaattagagaaaattgatgtatcaactatcaagctgtatttggtaattaatcgaacatatcaagtgaagtcactctctactagataacatcagtattcgtttttattgggtggatttgtttaatgaattggactcgacatttgatatcgtgattctaacgtctcttattcaacttttgaatagttgcgataactttatattcaaacttagaagctccg

SEQ ID NO: 90244 - DNA, 927 bp, Eucalyptus grandis
  Intron number 1 from transcript Egrandis_v1_0.050018m (loc us Egrandis_v1_0.050018m.g) derived from phytozome v7.0 (c hr-ID scaffold_9; pos 1880543 to 1881469)
gttttggaatgaagtctttttgctctcctctagttgttgactgtcaatcacataaatacttgtagtactttaaaaaaagagaaagaaaaagaaagataaattattagattacttggaaaaaatcaatacaacttcggacatgaggatctcaaattggattgagtatcgtttgtggtcgaactattgaaagcccatgccacaactagagaaaaatatctcttttatttcagggacaaactcgacgtgtcatcggaatttccacgttccttttctctcttctaatggaagtgcattttgaaataatataaacaatttgcgattgtccctacagattttgcaaatcagcatttattaaatcacaaatttgaccaaaaaactcaaaaaaaaaaacataaactatattaaccattacacatttatcctaaattttctattgtgacattgtatatccaaatcaatactcgtaaaatatatttatcttccgtcaaaattctacttgtaaatgattttaattttttgtattaaaaaatggtttggtttttttttttttgtgaaaaattaagtttaggtaaatatgtcacacgtgtaagatttgcacgtcacaaaataaaaagtttaagataaatgcgcagataatttgcataatttgtggattgttttttgggctttttaacatttaaaataaaaaaacataagcaaatcccggtcgagggcagccacgtcatctcctctttccgattctggcgggaatgctgcacgtttgcaccttccttttctaccagattccctcaaaaaagattcctcctttcttctccagatttctctttgttgacgtcgccactcgcgaatgcaatctctctcgacggagcccctcgcttcgatgccgccgcagccaccgccggaccggacgggggaggaggagatcgg

SEQ ID NO: 90245 - DNA, 519 bp, Eucalyptus grandis
  Intron number 1 from transcript Egrandis_v1_0.020113m (loc us Egrandis_v1_0.014230m.g) derived from phytozome v7.0 (c hr-ID scaffold_6; pos 36411007 to 36411525)
gcaggactctggcgtacttgttgcctctcgttcaggtactcttcttctttcgccattcgaggcgtgtcatcatggttgtgctcgtgctcgtgctcgtgtcggtagttcgtgtctttgcgctgtccttgagaggttgatttcaattgaaagacagggtcggaggctgagcctgggcagtagtttcaagttggtcgtgtttgtatcatacgtgggtttttctcatgccatgttatgttctcatttctcgtcatgaattgccaccccttgccgaattagtttatggaactgcatatttgcgagctcctagatatggagttataatgatggccattgaaatgaagtttaagtcacggaaaagaactctcttttactggccttttgatgtctcttgggtttgtggtctttcggaattgggatgcgccatttatgaatgcatacagactttgatccaagcgatcgtgctctcttgattgtagaatgtaagacctggctctctttcttttttgattgattcagtag

SEQ ID NO: 90246 - DNA, 978 bp, Eucalyptus grandis
  Intron number 1 from transcript Egrandis_v1_0.020730m (loc us Egrandis_v1_0.020730m.g) derived from phytozome v7.0 (c hr-ID scaffold_244; pos 7773 to 8750 reverse strand)
tctcgtatttgccaaagaaaggaatagcactcctggtagtcttttctcctgtgtatatctctttggctggcagagaaggatataacatccaagatagttgttcttttgctagacatttgcattgcttgcataagtagttacctgatgtgtttatccttactatgctatgttgagtaaagggaaggaataattgtgagattatatatgggttttgcaatgtctcattccctcccaaacaatgcggtaggagctgaatgcatcatttctaagttggattcttttgcgtaaaaatttggaacttgtcttagttctttggactgtttgtgtttgatccgcacaatggaactataatgtgcaggaaagaaaacttaggcaagaacattctgcatgctcttctacatgttttcatgaaagctcttttttcccccttctagtgcctcaaaaccatctagtaattgttggtagaatgaagagtccagctcagccattcttatttacattttatatattcgaaattgtctagtagtcttatttgctttacttcttctgcgtttcaatccttatcaaaccctttgagtaaggtcttgtgaccatacttcttgggtggagcgtttcccatgttagtcatctccttccgctacttgcactttccttttaacattttgaattgtgtggttcatatgctcaatcttcctaattgtctcgctttccatgtgaatccttccctataaaagtcaacgcacattaccttgcttatttcgtggtttacatggtcctgattgtatggcatgtgccatctgaaaaatcaagttatgcagcatgtccctggtctttgggtgcactgatccttcttttattgacagtttgttgcatggtcatttgggcatcaatttactttttgttgccttcgtcttcgtaatgtttggatctttttcgacacctcatttgaatgagcaggtgttggtgaaatcagatttc

SEQ ID NO: 90247 - DNA, 827 bp, Eucalyptus grandis
  Intron number 1 from transcript Egrandis_v1_0.007626m (loc us Egrandis_v1_0.007626m.g) derived from phytozome v7.0 (c hr-ID scaffold_4; pos 37731290 to 37732116)
ctgaactataatcaggtaatgtaagtgcagtcggattcatctgtcctgcttgttcatgcatattactgttcagatagattagtggctctggtcattctttatggtgaatatgcatgtgtcttttgtttccttgttcttgaattgtttcatccgctcaagaacaatctcttgctttcaccccctattttatggtgtgactttcaacatgaacttctctaggtttgaattcagtgatgaccaagttactgggtatcatttaggtgtaatttgttgcagattcgaactcataatgagcaactctttcttcggcaggatcagactctgtttctcttcatgttgcagttacatgggcaacgcttatttctaaaactatccagtgcagaaattctattcttagtcctaaccttcattgcccttcttcatcttcacatcatattctaagcacatactgagaatcagttgcatctaatccgtatttggaagaatagggtctaccctgtccaagaaagactattgctaccttggaatagtaatcgtatggacaacaattttatccaactttgtttctgatcttggtattttcatgggtataaagattatttcaaatagttacccaagccatgcttttacatcttatacacaactgatttggcatgacagctccccttgaatctgttccattcggcttcttgtttggtctttgctgccatcagccgattttttcatcggcacttttgcatttgtctctggagcgtggtttcttgttgatatttcttgatgtatgaacttcaggtctttgttagagattttgtccctagtggattggc

SEQ ID NO: 90248 - DNA, 611 bp, Eucalyptus grandis
  Intron number 1 from transcript Egrandis_v1_0.014336m (loc us Egrandis_v1_0.014336m.g) derived from phytozome v7.0 (c hr-ID scaffold_4; pos 40796032 to 40796642 reverse strand)
cccaagatccttgtcattgagggtctgcacccaatgtatgtttcttatctctctctagttacgggagttgggaatatcgatttctgctattatgtagtagaaaaagcaaaataaaattcaaatttggtgttacatggactagttcttggagagaaataacattttatgagtagttaaatggttagaaaatttcagtacagaccgagaccgagaaaaatattagatagagactggtgttactgtcgatttatgtgtatggggttgataattatgctatatcctcctctctggagctaaaaaaaagaaaagaaaaatgctctgacatgcctcacaatagattttaagagccgatcttgaagctgcattttatggtcgaggaattgtcgttttctcttcaatggctgggccatacactggcccatgtcttccatgaaagtactaggaattgacattctttgacctggaagcgtaacaacaacttccctcatgggcttggcctattaaacagctgagcttgaccctcattgagtctggaccacacatctaatctttgtcacaaactgggggtatttgcaggtttgaccaacgtgtgagggaattgctggacttca

SEQ ID NO: 90249 - DNA, 918 bp, Eucalyptus grandis
  Intron number 2 from transcript Egrandis_v1_0.023688m (loc us Egrandis_v1_0.023688m.g) derived from phytozome v7.0 (c hr-ID scaffold_11; pos 5420575 to 5421492)
tccagtccaggtgatttttgttgataatttgcctcctctcatatcatttccatctcacgatacaaaaaaattataaaattaattgcaaaagacaattggggaacctagtgtggcgagttatatgaggaggagacactgatttggcttgcaaacctatttgatgaagtattactaagctcaaccttgattcaatttgataattaagctttttgaactcttgaacaatcaagtcattcatgtagttaggatttagaagtgaatccaagtagctcagcaagttcgcacttatatcatggatatttttaatgcatttgcaaacattgtatcttcttattgcaagacaggaaaattgaaatgagtacatttaattctactgctttatcttgtaatttgcgctgttcaaaatctacttaggttggatttatggtgtttaatagtaatgggagtcaaaactcataatagtatcagattgatgcctaactaaagaatctatacatgctgtatgaaaaatcaataatttcggtggggtcaatcggccccttctctcacatagaggcatggtctttgtctccatgttagctattctaatgtctgatagtgaatttttttgtcctgatacttagttacttaaaaatttctcctctataaatttagtgtagtataaaatatttgaagagtgcagctgcaacttgaggtgctttttagttctgtttaaatgatttgtgctgatcgtacgacttgatgaagtaaaccctaaaagctggttttgtgttgccctaagagatttgaaaatattattctggatctcagcttttgtcttactttggacattattgaccattgatagcgggagctggatttcgtgtgtttgtgattttctctttgctcttacttgaactattgtattgtcactgcagt

SEQ ID NO: 90250 - DNA, 953 bp, Eucalyptus grandis
  Intron number 1 from transcript Egrandis_v1_0.003416m (loc us Egrandis_v1_0.003416m.g) derived from phytozome v7.0 (c hr-ID scaffold_4; pos 34918519 to 34919471)
agtcttcacttgcaatcttcaatctaagcccgcaggttccatgggttttcatgggttttgatcagcgcccgtaacgtagctgaccagtgatatgctatcggcatgaattttaaatgtgcagatcaattcgagtcttaagtgtttgagatggagcaattaatgagcaaacgcctatcgacatgtcaattgaagaagacaagaataatggatcgacatgagcaccgttctaccgagtggttgtgccaatattcttaggataaaaaataaactttactattaaataggagattgtgtctatctatttgaaatttacataaccccacatgggattagggagttactattggatttaaattcagtaatttattgtataaccgtagaaatatacaagtatgtgtatttttttgcatgcgccccaatcaatcaacagaattcaacattcttctgcaaatttatttctttagcaatttacatgttggcgataattgttttttatgtttgtaactttgattccttgccaccatccatattttaataagtatttccttattgataatttgatataggcaaaatagtggattatttacatgctttgactcacatagatcattttaacccgcacatctccatcgttcaaccttcgaccatccctctctcaatcacccggcaaattttgaagcagcaccaagctgctccccgtgatagagctcaacttcgtgcaggctccatctagtttactaacaaagtggtggcattatgttatgaataaaatcgaatcgaaccgaaccgaaccgaaccgaaccgaaccgaattcatgattatatatgtactagtgcgcggggaagcgaaattccacgagacgggcccgcgacttcctcgagtgacatcgggcccggagtagcccggcccgacattcagaccctccgccattttcgcctccccgggaactcctc

SEQ ID NO: 90251 - DNA, 1005 bp, Eucalyptus grandis
  Intron number 1 from transcript Egrandis_v1_0.026143m (loc us Egrandis_v1_0.026143m.g) derived from phytozome v7.0 (c hr-ID scaffold_9; pos 35948247 to 35949251 reverse strand)
gaagcaagttcccttcttcttttttcccttttcgtcctctgtttctcgtgttgaaagatgcttcctttcgtttctgggcggtttcctcgcgcggcttgattcttgggctgcctttgctcattcttgttcgtttgaatttttgcgttttatgggtatgctctgcaatttcatctttcaagctacactcacgagacatgtatctcgagcgtgacgagattgccccgttggatgaattgagactatatgggacaaattctttgttgcatgtttttttatttcatctgagaagttctttttgctgtcttgctttacaagtgcagtctctctcctgaaaactgcatgttgtgtgtgttagaaggagccactgctcgtacagctttccacaatggttgaggattttgaaccgactcaatcttgtagtcttcgggggatgcgtgaacctggatgcgagtggtgctggtgataattagttcttgagtggattcatttgttggaattagtttatttgaatgctacagtgcgcttttggcagctcatttgtggatcttaaaaaaattgcttgctgaatcagagtctaggagcaaaaggggtcttagttactcagattaagcaggatttcttgtcatcactgctaattgatggaaattgaggaactctcttgggatttattaagttccccccttgtccaaaaagaaaaaggagagagaacaggggtgttgtggggagagaggagaggagagatttcgtcgcccaccatttactttctgaagctcgtaaaagacatctggagatcaaggtttccttctttaatcttgtcagtgaagcctgattgtgaatttgtgatgcctcagtgagatgcgttgattcctgaccagtactaatcctctacacattaccttttcttagtttaaaattagtatgaatgcataagagttgagctgctccaattctttatagtgacattataaaattactgcaggtgaagaacctcctgaatcgttgttc

SEQ ID NO: 90252 - DNA, 806 bp, Eucalyptus grandis
  Intron number 2 from transcript Egrandis_v1_0.020786m (loc us Egrandis_v1_0.014782m.g) derived from phytozome v7.0 (c hr-ID scaffold_6; pos 53591268 to 53592073)
gtcacggcgctattgtcatcctcgcctctcacttggtaacactcttcttcatccaagtttgttcctttctttctcttttttccccttcttttggcgtcgaaagtcgtttcttttgagggttatcgaagcgatcgcgcagatcgagctgtgtctttgagctgtcgatgctgtcttcctctctgacctgattcgcaatgaatagatctgtgtactcgggctggactcgttatggatcttattctctgtagcacgtcctccgtgatctgttccctgctttctcgctcggatgaccgttctcgtgtcaccacctcctgtgcttgcttgatttcaatgctttattgcgtgaccgtcgaacttttcagtttcttgcttcgtatgttgcacatcttttagtctgatttttattttgtttttcttcgggggaaaggggattcatttcataaggctatcttgtttcgtcgtgctggttttttattttcgatccttcagtttgatgaccgatgttcttcttcattagggatgaaatcgaaattccctttgcagtcgaccttagctcttgcttcacttgtttctttcttctcatcatccactgggtattggcagtggtgactggggatgatcatatttgtccaactggtcgtttttgtaatctctttgcaagtagcgtgccgatatcaatcgcatgctctgctgcttctttatatcgtgtgggttttttttgtgtccacggcagagatatattaatggttcagtattctcggtgcttttcagggacgtcccaagggtgtcacgcccaagtacagctt

SEQ ID NO: 90253 - DNA, 716 bp, Eucalyptus grandis
  Intron number 1 from transcript Egrandis_v1_0.023123m (loc us Egrandis_v1_0.023155m.g) derived from phytozome v7.0 (c hr-ID scaffold_4; pos 34952872 to 34953587)
cgtcgcttcctccgaatccagtcgcctgacccgtggtatcattgcttgctactcttcgagtttcagtgcttgtacttgagtgctggctgtcgtttgagtttctgtccatcttacctgcttgttgaaatgtctctgtgaaaacaagacgagttctttttgggtttgctctagtggttcaagcacgactgatgcttttgggtggagtggtagttgcagtaggtaccaatttcctgggagtggtgagagagtgagggttgtttggtgtcccgagtcgactaggttcttagtttgtggcacgaaccctataaaatttagctgaacatgcctcccaaacatggacatcagcatctgatgatagcatatggacacctcctctgtttcctcaacgagatgaattagtttgctgctacttttttgccgatttctttttcaccaaatgcgcttttctgtattttaacttattttatcattaaagaaaaatgcattcaaatttctacttctgcattaggcattatctgcttgcaattatgctctgatcacagtggatttaatccttttttccgaaattgttggtgtttttattctgtttagctggcttttcttgtatgctttttacacgatggaagtaaaatgaaatcttgggccttctttccctctgttgattttttctcatcatagcaggtacgctcagtgggacattgaccaactctcttgtc

SEQ ID NO: 90254 - DNA, 693 bp, Eucalyptus grandis
  Intron number 1 from transcript Egrandis_v1_0.045099m (loc us Egrandis_v1_0.045099m.g) derived from phytozome v7.0 (c hr-ID scaffold_6; pos 29718835 to 29719527)
tagtgtggccaagcaggagtctgccgtgctctcgggtatgcgtcttgaaccttgaaatcattcactgagcttttcaatctcgattaccaccattttcctgcttgatatgttcaaatatgttctgattagaaaattaacttccatccagatgtaggaaataccgatgatatgttactgtgcatatttattaccccatgttgcaaagtgaatgaactattttaaagagtaaactaaaggttactagtagtgcattctacttgtatggtgttcttcgctaatggttatcgtgatatttggcataagtagatgatagatgattgatatgttcgaattttaggagcctctccttcatcttatgcaccaacatgtttgttttgaattagcaagattttgtgttgaaggtcatcaaatctttgaagtcatcgtgagccgtttcaagcttttggttctttcgtttgtcaagtagcatagtcttggtcagttataaacattctgtgtacttggttgagccacctgctgtttatcagttcctagaaatttcctctcctccttcatggaaggaaattgaagagaaatttatgatagaacttagcatataagtttttgctgctatgtttttgcatgtcgcctaataccaattttaattgttgtgttgcagattccctgccgttgggttccctattttggttccta

SEQ ID NO: 90255 - DNA, 409 bp, Eucalyptus grandis
  Intron number 1 from transcript Egrandis_v1_0.045834m (loc us Egrandis_v1_0.045834m.g) derived from phytozome v7.0 (c hr-ID scaffold_104; pos 8079 to 8487)
cgttcgtcctaacattatgtcacattggtcttggaaatactccttatcgaaatgatgggaattagtgttctttgagtgcgataatacagatatctacactaagcaatctttagattaaatattaatgattgataatgaactcattcgttttttattgtaccaattccattgcttgcgtccatagactgttactaaccttagcaaagcgttcaaactattgttcacagttctcattgagaagattttacgagtcgcacccaacgtagggaagatcttcctgctgattaaggcaaaagacgagcaagctgccatggacagagtcaaaaacgaggtctgcatgtgcatcttgaatttgaaaatcgtcgtttgacttttattcggactcgtgtgcaggccacgtgctctgttc

SEQ ID NO: 90256 - DNA, 870 bp, Eucalyptus grandis
  Intron number 1 from transcript Egrandis_v1_0.023402m (loc us Egrandis_v1_0.023402m.g) derived from phytozome v7.0 (c hr-ID scaffold_11; pos 17995919 to 17996788 reverse strand )
aacacttccgtcgacgacttcgataagaccttcaggtgatggctctttaaaaaaatggggttcgtgtgggatcgattctttgcttttcgtttggaagctgctaatgttttttaagagtttgcttctaattctaataaagagtagagcggcagagagatggagatggttgctcaggcataaccggccaaatttttactcgttttattcttttattccctaaaaaaaaaaaaaaaattctactcttgatagcatatgagtggccatggagtaactttggaatagaaataattgtttctggaaataatttttgaaacaaggcactcttttcctttttttcctttcatctttcttcttctctagctggttattgggccttggcagtactttgctgaatctaggggaggctaccttgcgctaccatcagtgaggctgcctgaggtcggtaaggttttgtcaaggcttagggactaactagagaaggaagaagaagagcagaaaaaaaaaaaaaaaaaacttaaaaattatttaaaaatttaaagaaattttatatcataagaaaaattgaggatgatactaaacgtatttcagttcattttctattctgaaaataaaaattttatacagatagaatcagaaaaaaaatatttctaagcagaaatcgttttcggaatagaatagttattaaaaacaccatttctcgatgaagtttttttctaaaaatttctcataatttgagggaatagaataatcacatcaaccaagtcattgagtttttatttttattttttttattgttgtgatgatttctcgcaatgatcaaaagaatatttttagatctgatgattctttgcaatgtctttcacagtgtca

SEQ ID NO: 90257 - DNA, 759 bp, Eucalyptus grandis
  Intron number 2 from transcript Egrandis_v1_0.011406m (loc us Egrandis_v1_0.011406m.g) derived from phytozome v7.0 (c hr-ID scaffold_6; pos 15087489 to 15088247)
agctcattccttcggcacggattcgctgttcacatgtgaggggcatccttttgctagtttctttatttgagctcattttgattgctttttgtatgaccgattcctgcaagtggttcatctatctcttccttaatcatgtgattttgttggcgttattgctctttctttgataccaaatgcttcaagaatttacctataactgtctaaggacccactatggaaaccctgttgctagaatccgtgggagggaggagctttcccagatttcattgtctctttggttgggctcatatcatgaggaaggctagttacatactctttttcagtatttatctgacagaaaaatggacattaactttgcattacatgttcagttgttaaaatctgcattctttggagtttacgactgattatttttcctcttacccttcaactaaggagtggataaaatggtgcttgtaacttggaaaaacggctgcggtgctagtttgagcttggcagtacttgtgttttcctggtgatgtgtctttgagccatggctgtagttaaaaagaacatgacacacgatgcacttctcttgtactggctccctttaaaactacatttttctgcgcatttggttcctaatgatgggagattggttaacgagttgtctgtgcatattccgaacttgattaacctaccagatctagcatggagtatatgtccgcttctgatgaagaacttgtcttccattgcaggtacactgccaataaatca

SEQ ID NO: 90258 - DNA, 844 bp, Eucalyptus grandis
  Intron number 2 from transcript Egrandis_v1_0.022284m (loc us Egrandis_v1_0.022284m.g) derived from phytozome v7.0 (c hr-ID scaffold_4; pos 32864090 to 32864933 reverse strand)
aagcgcgtcatcgacatcttgtttgaggtaatctaaacttctctctctctttctctctgtgtgcgtccgtgtgtgcaggagcatcatgcatttgtatgcgtactccattgtggtcgcattctagtgatagttgtcttttatcactcttctattggctactaatgattattgacacgtacaacaaattgaataagttttggaacggttggcttggctctgcaattgatttacttgacatagggtagcatgcatgatggatttgtcattggttggacttagaggttcattaatcattgcttggagaatcggtgatatatttcttaaatgttgtgtgatggtatgtactgattttcctggagcagtgaattttatctgtttgatagaggacttgggcagtcttagtagttcgggtgtcaaacaacagccatgggcaaattgagcacctttctcgagtgccatcttattgaatggaggcagtcttccaaagttgtcttggtttaataatggaattattaacaagcaattttgtctacctgctgcacatacttccagatgttttgagtcttgaccttccaaattagattgcgtttatggtaccagaagtccctcgcacccttcaatggcaaaaatctctctcatctaattctctttttgctgtttttgcgtcttgtcatttttttcttttggctgcccccttcttgtctttccttgttgtttcccatctccctccataatgactcctcaagttcggtaaaacattaccaaacaatgcttagatctgagacctagagtacatactatctgaacgctcttcactaattgaaatgaatgtttccagacaagg

SEQ ID NO: 90259 - DNA, 659 bp, Eucalyptus grandis
  Intron number 1 from transcript Egrandis_v1_0.020829m (loc us Egrandis_v1_0.020829m.g) derived from phytozome v7.0 (c hr-ID scaffold_11; pos 32211700 to 32212358 reverse strand )
tccgagttcttgattccatctcgcagcatctccaggtacttggtcgataggctgatcggtttttgagtcgtacccacttttttttttgtcgggcttcgtgtgctgctagttcggaattcaagatcttccagtgttttaatctgacgggcgaagaagtctgcgtgctgattttctgtagttcttgataaaggcttcgagagaaccagagtcgatcggctttttgggttttgtttcttgatggttttgacttttgggttgttccgagagtttcttgctgaatgttttgccccatgtggtggttaagccttgtttgtgaatcctgcctccaacccaattgctagcagcgtcgtttctgatttgccttcgtacccattttcttttcgaaattggtgcttggtttttgcccttccttattgcagtgtctttgggtaattagttgttactttccttgttctttgtcttgaagactttgttgtgattacgcgaagctccttaatatatatacctccttccgtgtgtaatatgccgactttccttgctagcaatctcatttgatatttgctctgtatctgtagaaatataagagttattcccaattgttcaggtttctgcaggtaaccgttgcgtagcttttttaccgaattttgcagctgaagcaa

SEQ ID NO: 90260 - DNA, 458 bp, Eucalyptus grandis
  Intron number 1 from transcript Egrandis_v1_0.023901m (loc us Egrandis_v1_0.021894m.g) derived from phytozome v7.0 (c hr-ID scaffold_4; pos 32375317 to 32375774)
ctttgcccttgtgtactgcactgctggtatctcaggttagagcctctcttgaaatgtttttgagccaacgcatggagcccaagaaagaaagtttgcttttttatgccatatgtgggcaaattagttgtgttcttctttgttttgcgtatttatagatctagtcatcatagagagaccttgggctaaagcatacttgtgttgggtggtggttcttgctcggtacaggcgaatacattccttaactcatctgcttagccaatgcaattcggttaagcccagtaaaaaagttccctttttatgccatttgtggggaaattagttgcgttgttcttgttttgtgataagtacagatctggcaatgttagagagaccttggatctaagcatgtgtatacttgggtggttttttgaatgatcgatacaggtggacacatcaacccggcggtgacctttggcctg

SEQ ID NO: 90261 - DNA, 368 bp, Eucalyptus grandis
  Intron number 2 from transcript Egrandis_v1_0.015407m (loc us Egrandis_v1_0.015407m.g) derived from phytozome v7.0 (c hr-ID scaffold_9; pos 23808325 to 23808692 reverse strand)
gttgccacttcactggccagacgggttagtcttccatgctgttgagaggtatcatcatttttaacattgaatcaatttaagggtctccagtaatatattatttggttttgaatttgtttagtgaacattatcaaggagttccccctgaaaaatccccaactaattgttctgtaggaacgttttatcttagttacatctacactaattgaagtccatttctttttctttttttgtttctttggcttccaaggtctatctctttctaatttttcattattgccacaaaagaacactagcaaaaaggtatgatggtttcagatgttaccgagtaagattcacgcaccagttaatccttatgtaggacaaaa

SEQ ID NO: 90262 - DNA, 934 bp, Eucalyptus grandis
  Intron number 1 from transcript Egrandis_v1_0.033697m (loc us Egrandis_v1_0.033697m.g) derived from phytozome v7.0 (c hr-ID scaffold_9; pos 12988520 to 12989453 reverse strand)
gaggtatgtgaactcatttgaggtgttttctcctatggattgcataggtctgaagtttgggagtgatgtcaatgagtatatgcacaaacacaggaagttcttgtgatcttactagtcttagtaaaataagagagaggattgtccaaaacaaaacagaaaatggacacgggttgttcccatgattttgtttgggttgattaaggcaggagcaaccatatttgatgctcaattttgcggttctctgctttggaaacatgttggaaaaaattgggaatttggcttgattatcatgccgcccctttgaaatggtctgaaatatcaatttcaaattattatgaatctatcttttggactggggagtcaaaataaaggtttcatttttactcaaagtgctttctgtagacttagaatctccagaatatccaatgaatgtatgatttctttaatattgtatttgggatattttcaattcagagcttgatctagcctatgtaatttgacgatccaaagtgttatctatttttggagtgccgattttcaaggacaatctggtctgaggtgctgaagcttttactggtacagcaccattggtgctatgcgttaaacaagcaagttttcagtgttacaatcattagcattagatggagacttagggaaggtggtatttgttttcttctttcatgttgccaaatttgttgcttggagcccttcggacaatgagacaaaaatatggataaaatgcgtttgtttgtgagtcttaaaattggtctagtcagttctttgtcaaatcaaatttgagtagggctaacatgtggtaattaggtgtccttcctctagtgaggccacgaaaatggtgatatacaatgcccagggtttgttaatgtctcccctttttgcaggaggaaaagagtgtgctggctggatcaacagaccc

SEQ ID NO: 90263 - DNA, 941 bp, Eucalyptus grandis
  Intron number 1 from transcript Egrandis_v1_0.032350m (loc us Egrandis_v1_0.032350m.g) derived from phytozome v7.0 (c hr-ID scaffold_6; pos 24183275 to 24184215)
agcagctccagacaggagccgaaagcaagaagctggtacgtaatttcgcttgctctgtcttctgattgattttgtagtatgtgggtttgatgggattccgatgtgagctcgtgttctgtttttcgttccggtgctatgcttctttgtttttcttcccgcgactccttcgcgctcgatattcctgcgatgggtttagcacggagttggttttcggtagttgctatgagagattgtgaagggcggaggcaatggaaatggaatggtgtttgaatgaatcttgctttgtttcgagttgattccaccccccctatcaagtgttggggagactcgcgttcttgcgattctttatggcgaagcggatgaaccgaaaggccaaattaagtgtgcgcttcatcgatttcttgttttgccagatatcttcgtacactgatctgtacaatttgcaacatgtttcgtgcttcctagtacttttcttgactgcctgatatccaattccgggttcttaatctcttcttcggaccttgggtgcggaagtttctgtgcccatcgagtttgcattcttcaaagagagcaattgcattttgcatggaaagaagcttccgtgtctgggttctctatgctgaggaatgggcttaaacatcggaatgagaactgctcactcgagatgacgtttcgaagcttcataagtaaagttatctctaaaactggatatatatattcactaacaattgtagaagcttgcagaagctcaaaccaaaatcatcccgttgttgttttcgtctataatgtctgcatttgtgccactatattgtcagaaacatgttggatagatataaaccgcattgtggttaacgcttgtgccacaaattgtgtatgtacttttgagtattcatgtaaatgatttggtccgtttgataggtggtggtggattttagtgctac

SEQ ID NO: 90264 - DNA, 984 bp, Eucalyptus grandis
  Intron number 1 from transcript Egrandis_v1_0.039551m (loc us Egrandis_v1_0.039551m.g) derived from phytozome v7.0 (c hr-ID scaffold_6; pos 12584986 to 12585969)
cggaactaacacagaagacccattgtcatcactaggtatgccttgaagtgatccttctcttttctgctaactgtctccttatttcacttcctaattacaggcgtatccttgaatgtttgatatgtgcactttcactcattttttaatgatgaatgttatatgagaatatcaaacagatgtaaatgttagtttcagtgtagatgttttgtgggattaagtctagattttgactctacttgcactcgtggcttgttttgaaaattcaatggttgattgatcaggattgttaataatgattttaatgctttacttttgcgaccagcttcccggcaccctccattgcaaagtcttccagatcaacctcttaatcttgagacaatgaacatggagcatcacccaagcgtgtcatcaccatcacagaataaccagttcttgattacatgtttcccgcaagctccgatggacatagatgcgagtagatgcgagcagtccatcatcattgcaaggtacatatttattcatctaaattgatccttatgtatcctgatgttacataattagggagaaggatgaatgcttacattaggatgtaacacgtagaattcttgattcacaattaggtatatacagaggcgtgccaatcacgagtcatccaaacactggcattggatcaaatcttgaagaatcttggaaatcttggtgcaatttaattatcttgtcaccaaataattgaccaagtcaatttatgcatatctatctctgaagaagtagagaatagaagttgtgaattggttgacaaacgtggaaaagcttaggaaaaatttccaaagccttgtaccagcaagcgcagaaaatttgccaccacaacaacatgtggatatgttgatgaaagaagcagaagaccttatcataaaaggcaaatttccagaatgactgtttgaggtgggagacgccaaagtcaatatattattagaacgaaagttg

SEQ ID NO: 90265 - DNA, 699 bp, Eucalyptus grandis
  Intron number 2 from transcript Egrandis_v1_0.032276m (loc us Egrandis_v1_0.032276m.g) derived from phytozome v7.0 (c hr-ID scaffold_9; pos 29739048 to 29739746)
cctcttagtccttggaattctcacttttcttccaggtaaactgaaactcttggtggtagtttatgtctgctacttgttatgacctatttgaataacttaattgcgatgaggtggttttttttttttttttttcatttataagagctagcatggataagtacttcttttacctcctgaagcgtctgtgtgtgtgtgtgttcaagtaaaatttgccgagactcagtttggcagagttaatatggtcaggtttatatatcatgtttctcatgacatggaaactgggaagtcccataagtgcggcgcaacctatgagagatctgaaaatattaggtagaatggcatgaattgctatggtggaacttattaagaagcaaagacatgaattgatttagttacctggaaagtttttcatcaattctgctcctactagttagatatttcttctttttttaacctgaaaaagaaaagtgactttgcatactggatcttttactcatcgaactacattgcagataattttcggggttgatgcttgggatttttctttgacaaaattgtagcatacacttttggggtaatacatagtccacatatactcttgtctgccatctgttcataaagtaaaaacttcttaataaattgttttgattgtgcactatggtttgttactgataaagacaataatgtttacaggttttt

SEQ ID NO: 90266 - DNA, 508 bp, Eucalyptus grandis
  Intron number 1 from transcript Egrandis_v1_0.051029m (loc us Egrandis_v1_0.051029m.g) derived from phytozome v7.0 (c hr-ID scaffold_9; pos 37709129 to 37709636)
gttttacgcccctgaaaggtccgcactccatgttatatttgtcaaagaaggatttagtttttttcttaacttttttcaccaaaaaatatttgccgctacatattttggaatttggacgtttctcagttccctacgtacttctcttgcttagctttttgtttcttcccgtccttcgtttacatttcgaaagaagactaattttatttcatacatggcatgagcataaaagagaaaaatatttcattttagttaatttagtcataaaccccttaataatttattaatttagttcttcatgtcaattttgattgagagacacttcgcgattttgtatacaaatcttacctacggtttggacccctagcatgattgctagggaaattgaaaggcgattctgtgataaactgcaggtctatatttgaacagtattcttgatagttctatctaccctttgttcgtggcgtaactctttgttttatgatgatgacagacccaacctacttgtcga

SEQ ID NO: 90267 - DNA, 591 bp, Eucalyptus grandis
  Intron number 1 from transcript Egrandis_v1_0.004529m (loc us Egrandis_v1_0.004529m.g) derived from phytozome v7.0 (c hr-ID scaffold_11; pos 3874398 to 3874988 reverse strand)
gagaattgaaagaaagattgtattttcgattgtgggtattttcctcttcctcgtgctgtgcgttgggttgttctgtttatggtctcttaggttgttgtcgggtcgtatcacgcgaaagctagtggctagagtgaacctgcatgctgttagtatgtgactgaaggcttcattttttcccacaacgaagccgatcgatgcctgccctcccgtttgggatgcgccttctctttaagcttgtctcatccgaaagagtctactgctctttcgccgtgtgaagcggttgagagaattgaaagaaagatcgtattttcaattgtgggtattttcctcttcttcgtattgtgcattggtttgttctgtttatggtctcttaggttgttgttggatcgtattacgtgaaagctagagactagagtgagcctgtatgctcttggtatgtgaccgagttatttagtgttaacaggtatgtaggattttttttttgttttatttatttatttatttcagaattgccccttcctaataggaagcttcggatgttaatcttggtgtgtttgatttgttgaagttgaggagacaccgtgattccat

SEQ ID NO: 90268 - DNA, 977 bp, Eucalyptus grandis
  Intron number 1 from transcript Egrandis_v1_0.026028m (loc us Egrandis_v1_0.021340m.g) derived from phytozome v7.0 (c hr-ID scaffold_6; pos 17897859 to 17898835 reverse strand)
cccaagtgcgatatctgccaggtatcctctctcgcttcttttttttttgggctgaatcggtttttctttcttttttttgggggggggggggtgttcttcggtgaatttttggtgacgaatgatttgtctgtttcttgcgtttgtctttgttaacttctgggtagttctcgcggtctgtgcttcttctttccgatgacgatctcccgatggagggattgacagattatggattgttttgtagctgactggtggcaaagtactctggaaattcttaattcattaatttcattaatttgattagaaatttaaaagagaaaagatgaaatctgttaattaggagcacgttttgaaaatttctcatcatttattaaaagtgaattctttgtaaataatgcggcgtgtaatgttttctcacgcaattgatgcccatcacccttgatttgggtggctggtcaaattttcaaattatgactacctatgtcaaggtgactggaggctgcccgcgtaacaaatttgtgacgcaggctgtgtgccatacataaatcatttgaacattgtcattcgcagatcaaaagatgtagtttcagctcagctgaaatgttcagctctataagctttttgtcccctctacacagaaggattgccaactggtttattcatttgatgaatgatcagttctcatccattgagtgagtctctgattgccaaatagtatttcatgtgtggatataaagaggatgtaatcttctctctatatgttagaagaagagaggttttatgcatcctgtggggaaagttgatgtaatttccattccttttgaagatggcattgccacgacgtcagcttgattcgcaattttcacttcttggatgtcttttaaatgaaaaagggagcattttctttgtcaaatttaattgatgcaatgtgcattctcttgacaggagacggctggatttttcttttgtctagaggatcg

SEQ ID NO: 90269 - DNA, 1031 bp, Eucalyptus grandis
  Intron number 1 from transcript Egrandis_v1_0.051821m (loc us Egrandis_v1_0.051821m.g) derived from phytozome v7.0 (c hr-ID scaffold_9; pos 5500073 to 5501103)
gccgaactgagcctcgtactgagatcgcgatacaggtaacttaacaaggggccaaacaagtttgttgggaaaagatagcttgcttgttatgtagtttcggtcaagtacgtggcatactggtctcacaggttttacggggggatgtcgtcactttgtagctagtatcggttgatgatgacgaagttatgatgttgggtcatgggtagggaccagctgacctgttgttcggtttgaatacttttgtaaacctggtttcccatccaaaacgaattaagagtgcatttccatcttggtccaacctgatcgtaacgagcaggccaatttgtgtggctcccaaggtgattggtccggtttctgattccaaaattttggaacttggaataatcagcccgatttctggttcttggggaggaattggaccggtggaagcagcctagagtatgttatttttttatttagcaagggcgaaacaaaaccctcattgagcctttctctcttttgcgcctccctcggtcatttttgcgcttctcatcctgagaagtcagaacttcgcttctcatacagagcaagttatcctcatttttaatgcctagtattaatgaagtaaacaatgtgtgcgttttcactgtttggtttatgactctgaggaaccatgaattgtgggtaaaaaagagaggagagttttaagccccgatgtgattcaataccttgtcggtatggttacgtatgttgggattcattggacgggtccggtctggtccagtcattttgcttgttggagttgtctgataggtttctattttcttcttcttcttttgacctttttagaatgatatagatcaaatcaaatgcacaagaccaggaggtgattaatcagattacgcctaatctacaatatatacacaatattgtgctgttttgtagctttttgaaaccacttgtgtagaatatcgtacccacctacacttgatttgctctgatcgatttgaacatcattttccgccttagggatacggctattcctcaggcgt

SEQ ID NO: 90270 - DNA, 972 bp, Eucalyptus grandis
  Intron number 1 from transcript Egrandis_v1_0.002717m (loc us Egrandis_v1_0.002690m.g) derived from phytozome v7.0 (c hr-ID scaffold_6; pos 20677060 to 20678031)
tcgaagcttccgaggtatcggtatcggtatcggtcgaattcggggctccttttttttggggggtcttgacctttggcattgttctcgattcagctcccggaattggtcttcgcgttcggtccgcggcttttgagttggatcgtttctattgttgtttttgcatgctctgtcgagtcgagtcatcgctgcttgtgcgcttgcgccccgggtcggcggctgattggaatccggatgctcgaacttactaattcgagtcgcggagatctgattggatttgaaattttcctgatcggcgatcggcgatgtcgtcggacgcgcgatatttatgtcggacttctgttccgagaatagaacagggaatgcgagatctgtcttagatgtttggtttccgggggctttttgtatcggtaaatctgttatcgacgatgtagaaagtgcggtgacttgtgcattgaccgttgctgtgggttggcaattcgtgactttttgtggtgtcataatcaaattttggaatcgtgtcgagttgggttatcggaaagcactgtattttttgtttcttgtgctataaaacttacgtctattaaattcgtgtcaatttgtattacttttgggttttccattgaatgatctataaatgggttaatcgtgtcgagttggcaaattgccggcacttgaggctcttgtcttgtagcctttttaagattgccgtgattaatgtagtgcacttgacatttgagttggattagaatttagaagtcaatacatattcaaacaattacaagaatggaagattcataagagagattggttgaggtccatcgaatgccaggattgttgtctgatctgtcatgacttcttttcagggaatgtatcttgcgtaattcctaggttacagtcttttgtctcatgtggatgatgccttgtaattgcatttcagataaagggcgacaaaaagggctggagtttccggaa

SEQ ID NO: 90271 - DNA, 458 bp, Eucalyptus grandis
  Intron number 1 from transcript Egrandis_v1_0.022716m (loc us Egrandis_v1_0.015581m.g) derived from phytozome v7.0 (c hr-ID scaffold_6; pos 43754566 to 43755023)
taaggtactaaaaaactacgctttatatgagatacgagcttgtcgaattgaggttttagctttttgcgcattgtccttgaggatgcactcggtttcggtgatcagttatcgggtctgttgattgcttttacgaattttttcagagtcgtttgcaatatttatctgtgtaatttgtattgctgtacggaatgctcgtttggattattgggttgtgtctacttgtctaaattgaagcggctcaattgtctacccacaagcgttggtgcttcattaggagtttagggttggattaacattgcttgctggcattcagctagcttagagttgattctctttatctgtggggcctattttgagcttgaagtgctatggaacttggcatactcgtcttctctctgttttttattgagttactttttgcaggctctcgtgttaaatcattcaacatttagttcttc

SEQ ID NO: 90272 - DNA, 675 bp, Eucalyptus grandis
  Intron number 3 from transcript Egrandis_v1_0.006136m (loc us Egrandis_v1_0.006136m.g) derived from phytozome v7.0 (c hr-ID scaffold_9; pos 35842117 to 35842791)
aagcaggtgagactgctctccttttccaatttgcttgaaatgaactgaattcacttagaaatgaaaagagaggttcacggtcgatgcggtaatctgattttttttgaagaggagtatggggcaactctgcatttcgcaatgtcaaaagtttctgagaaaaaaattgttccatttcctccagttaaaaaaatgactatagttagattaattatgtttcactgctaatattgggtggaggaccatgacgactattagtgatataattgttgatcgttagagaagttcttctttcgagtcaacattttgcccttttttggatttggataaaaaagctgtccagcctcttcttcaaacaaggagtggcgttgagagtgcgaaccaacaagaatagtgtcgggctgtcaacacgagtaatcgaatactcaaacgtcaatggggtgtatcaatcaagactcatgtcggttgtcattgtcaaattctctgtttctgaacccctgatgcctaattttgcttcttcacttgacatgattaagtattctggaagttggaacttttgtgagctgagaatatgcgaaatgctttacacgttcacgatcatctcgtttctgtatcacaaaagatgttgccttagtttctaatattagatttgttaaatctcttatcagggcttagttc

SEQ ID NO: 90273 - DNA, 436 bp, Eucalyptus grandis
  Intron number 3 from transcript Egrandis_v1_0.009645m (loc us Egrandis_v1_0.009645m.g) derived from phytozome v7.0 (c hr-ID scaffold_4; pos 3935511 to 3935946)
ggcaaacatatatctagaaaggtaagcagctatgctatttgttcaaaagcttttttccttgcttatttaggttaactcatggtgtaatacttatggaattgattagatcctctgatctgtattcctccagtttgtatgtttaagagtgatacttaaggtgtgatagttatggttttgtatcttctgttcataagcttaagagtgaagtcaactgtttaatgcgattgtggagagcttgagtggctgcatttaaattttagttaatctattagtttcagatacatttattattggttttgagttttttttttttttaagggaaaaaaaaggaaacctacttgttcttggctctaagttttgcatgcgcccatttagtattccttgttttttatgtttaacaaatgaaatggaaaacttctttaggttcaacacgtgg

SEQ ID NO: 90274 - DNA, 587 bp, Eucalyptus grandis
  Intron number 1 from transcript Egrandis_v1_0.017587m (loc us Egrandis_v1_0.010916m.g) derived from phytozome v7.0 (c hr-ID scaffold_4; pos 5163479 to 5164065)
cagctcccagcctcgcggcaattgacgttcgtgcggtgcggttggatcccgttctctcccgatctctctcgttgcccatgattctccctctttccgtctgcatgtagatcgaaattcgacggggttgatgggtttttggtgaattctgatgttctgaacttggtttcatttgaatctgagagagaccctgtttttatttttatttttattttttggctcttttttctcgttgggtagattgtggcaaaaaaaagaaaaagaaatgggttggatcagggatatgaggagagagatgaggaggcgtgaatagatttgcgtacgcttttggatgtttctggacgtgggttcgcgtggaattttcgaacttgtctgttatattgcataaacgagtcgtttgaattgttcgtctttgaactttcaaatatggctgcttgactctatgttaatgttctccattttaagtggtttggtctgaattgctttgatgggaagttttagacggatgtgggcgattgatttcattgtgaaatacaggagttcgcgcgggagttgtgatctcttctccgattacatttgattcggtgcag

SEQ ID NO: 90275 - DNA, 642 bp, Eucalyptus grandis
  Intron number 2 from transcript Egrandis_v1_0.032359m (loc us Egrandis_v1_0.032359m.g) derived from phytozome v7.0 (c hr-ID scaffold_11; pos 35264100 to 35264741 reverse strand )
ctgttgtatcctttgtaagcaagtccctctctatactattcagttatttcatgattcttttatataaagaaaacaatagaatcaataagactacttagtataaagtaattaatactaagtacgttattatggattcaaaatttgattcatgaagtagtaagacaaattatcaaacagacagttatgaaaataaggtcacgttcagttgtgtagacatttttttggcccgactaggcctagaatttctaggatcaatgtttaaagaattgatttatattgaactaaatcgtggtcaacatgaaggagggttacatagaaatctccaaatttcaagatagctcaatgcctagcgcttgagtgcattttgagtctcgaaatcaccatgtttcttcctaatttaatgtttaattaggttcttcaacttttttatgacttcctagagtacctagtgaattatcatgttcttcaactttaatattttgtgcttaggcttcttgggcacacgtctaatgaacagagtttgccacatcctctacgaatcaaagttgtaaacgatctattttgatagacaaagcatgaaactaacgactacttacaaacgtacgtgggtgtggaaaacgccttttcagacaagcatcggta

SEQ ID NO: 90276 - DNA, 434 bp, Eucalyptus grandis
  Intron number 1 from transcript Egrandis_v1_0.011357m (loc us Egrandis_v1_0.011357m.g) derived from phytozome v7.0 (c hr-ID scaffold_11; pos 8415986 to 8416419 reverse strand)
tccagaaatccgaggaagccttcagcgccgccaaggtaaattgaaagacattcaacagaaagacgaaaagcctgcgtttttccgggaatccgatctttttctagtcgaccctttacgttagaaatgcctccggaagaagatttgggctcccccccattcgtcggctgctggtacccatttgattgttttgaggctggcgactttttatttgtgctgaaagcattgcccggtgtgttttgagttgatgtgggtgggatttggagtcgatttgatcactttatccgatgctagtcctactccatttgagatgcggatgttatgcttctctggtgctttacgtgtgccatcacaagctttctttgtattttgtttcggtggtggtggtggtggtgatgatgaataatggcatgtgtttctgttgttgataggaattg

SEQ ID NO: 90277 - DNA, 313 bp, Eucalyptus grandis
  Intron number 4 from transcript Egrandis_v1_0.029083m (loc us Egrandis_v1_0.029083m.g) derived from phytozome v7.0 (c hr-ID scaffold_30; pos 289525 to 289837)
cttgacaaattgtggctttaagtctaacccttgaggtaagcagttttattcaccatctgcctgttgcagttgaatggggtgtggctgacattcgtgaatatcattgccacatataatgtaccttttatcacagattgtctgtgtcgaagactccatctactagttggaagtacaagtttttatatctgtaattttccctgtcatataatacaaactaactccgagaagaatatttttaatgctgggggtggttgacaagttccctgaatgctctcatggatttggttttgtgacttttgatgagaagcaagca

SEQ ID NO: 90278 - DNA, 643 bp, Eucalyptus grandis
  Intron number 3 from transcript Egrandis_v1_0.006980m (loc us Egrandis_v1_0.006980m.g) derived from phytozome v7.0 (c hr-ID scaffold_11; pos 40859148 to 40859790 reverse strand )
caaacagcacggccaccgatccttgcagctcaaaggtagagcgttgatagcagtttatatattgtaccgttattatcctttttcttgctagagtttaagaaatatttataaatgaagaagtaaaatcgatctctcttgatgaatgaatgaatgaatgagagagagagagagtacccagattcaactaatctagttaataacaatatgatggaaagtattcgaatgctcatgttttttcaatcgcattttcttcgttgcagtacaataccccttgtaagcgatgttcccagtaactctcgtcccttgtgagttatatataagtttgggatcatcttcattgcgatgttcatcgtcatgacaaatggtcgttatgtagttcaaagattgatgaagtacttattcatgaacatcatgtacaggtcgctcgtcaattattcgaagtcccaaggacatgtaaaataggactaatcacttcataacgataacgaaaccgtgtagtcaaatcgttaggcatgacatccgttgaaaagtcatgcatggaaaagctaccgttctgggttttattctttcttgtggagatgatttaacataaacaaaaaacaaaaaattgcaggggaaggtgtcattggtgacccaagaaggg

SEQ ID NO: 90279 - DNA, 996 bp, Eucalyptus grandis
  Intron number 1 from transcript Egrandis_v1_0.010367m (loc us Egrandis_v1_0.010367m.g) derived from phytozome v7.0 (c hr-ID scaffold_4; pos 16227249 to 16228244 reverse strand)
tcactgagttaggtactcttgcttttgtaacttatattactagtactacttgtgttaatgtgatgtgtatccggcaacctcatttgttttattaaattagcattgtcaagcaaatgattaatcgaacttcaaaacagattaaattcatgagcataggaattcacatccacaattctaagaaccaagtttgagcttttggatcgcataaactgtttatcatttgagatccacttggtgatatatggtttcaagtcaaggttgaaagaattttacttcctttacttggcacaagcattttttagctcattgaatctgaaatactgggtttgtactttcctttcagctcgtcacaggaagacaagatccctcagccaaaaggcaatggttgcgatcattctagtttcaattttgacagctctactactcgccggcttcttcttgtatggcttggtgatcaagaagagaaagggtgcgtcacttggtcctcaacattagtgcgctctttattatattttccagctaaaatccatcacctcttattgttcaccacttaataaaggacgcacattttagtcggttcaatcttggaactattcttagctataggaagtcagttacggagtgaattctatgttttatttaatcaattccgaatctaagaaccttgagcaaaagaaagcaagattatgccaattcacatctcgacgcagcatttcaacaatgaaactaaaccggcacaaggccagtttcagggtacaagagatgaaatcataaagtacagcaatatataaaccaagaagatcttttcaagcttacaactttcattcggttcaacgaaatgaattactgaatgaggaatctcacaatttctccgaggttgtaatggcatttatgtggttgtcttggaaacagatcgcagaagccgtaatccacaggtgagtgatatgaccaattcaacgtatttcaacgagccccagagtgtggaagaccgcagtg

SEQ ID NO: 90280 - DNA, 967 bp, Eucalyptus grandis
  Intron number 3 from transcript Egrandis_v1_0.027088m (loc us Egrandis_v1_0.027088m.g) derived from phytozome v7.0 (c hr-ID scaffold_4; pos 26723073 to 26724039)
gaacaaaaaccctacgaaaaataaggaaaaagaaggtacttttttcttttctttttctctgtaacaactgtgtctagattgagtttactttccttttcctttttcttttttacaaaatcaatcttttacgatgcacacacttttacttattgttaatcaaacttcacaacatgcaaatgtttgctggtaattttgcacataacttttgcacgactttttagaatttgaatgatatatatttttccttcagtttgcttaatccaaaacaaacgggctaacgaatatatatgtaagtattaccatatataaatcccgcaaaaataaaaaagaaaaccatgcagatttttttccaagatcttttataaatgaattgcattcttatttaaaggaaaatttccgagtggcttcctggaaagggctcaaagcccagtccatttgacttcccaaactttgagtatcatatcaacaatccagataagcacatgaatatctcctttcgaaagaataatgctatgtctcgtcatcgttccacattgagtatgagtatgctatttagacatggctaactgtataatttaaccaacaaaaaaaaagtgaatactctgaaaagcttcaaattgatatgcccgtgacaaatttgattcgaactacattttttattgtcaaaatctctaaaccggtacattagcgataaattatcacaaaaaccccaaaatggtcgcttgttaacctctgttaaattttactatgaaattattgagttggatgacacatggcaactccgcacaaaatttcatataaatttgcagtaaattagccacatatgtattaatttgggatttttggtgatccaaaaataagtttttggctaaatttgtcacttgtgtatgaatttgaagttttttgtgatgttaattttcttttaaaaaaaggattaataagcatttcttttggggcatggcagtta

SEQ ID NO: 90281 - DNA, 1012 bp, Eucalyptus grandis
  Intron number 1 from transcript Egrandis_v1_0.038122m (loc us Egrandis_v1_0.038122m.g) derived from phytozome v7.0 (c hr-ID scaffold_11; pos 5498342 to 5499353)
ccacgcgaaaagcagaggtgctcgcggacaatgtctagcatcactgtgagttctctctgcattttgtctcgctgaacccggatatagaatttgatgaaaacatcagttcctaactggtggagacatatctgattgatgattgcttgcttgcatatattttttctccgtttctgcaatataagcgaatgttatagaactaaatattcaatccatagagtttggcacctcgtccttcattgacctcgtacgaccggcatggtggcctcataccattttaggaatcagagcaaataagcagccatcggcttctttagctgttacctccgaggaactaggatacatgcttcatagtctgtgtattcaatcggccaattagctgttgagtggctcgagtcccttgaatatttatgtaggggagcttccattctaattgcactgctatctttggtgcttattcttttggcaatctatgtcgattcctatttataacaaatttccaaatgcaaaacatggcacttctgtggaggacacggtttgtttaccatcattttctagagccatctaaacccatcgggctctttgcgtgactgaattaggactagataaatgatcatctcttggctttccgtctttttgcccgtaaagaagagaaattagctttgtcctgtaaaaggaagcgctgcagcagctggataagcttttgttttggcttgtcgtctgttctttagtttatttgtgacttgtgagagacaaagcctgtaatttctttgattcttgtctcctcacggtttctaatcgattgaattatgatgttaagaactctatcctcgcttgacctcaactaattggtaattgtgctatgtttttgtgaaacagttggaaccagccctggcatcacagacgcagcaatggcttgacttgctcaggggacaagagttctcgcagtgggggacaggataggtatttcaacagacgtttgagattctgccgggacagaacctcctgaaggctt

SEQ ID NO: 90282 - DNA, 689 bp, Eucalyptus grandis
  Intron number 1 from transcript Egrandis_v1_0.012253m (loc us Egrandis_v1_0.012253m.g) derived from phytozome v7.0 (c hr-ID scaffold_4; pos 10138716 to 10139404)
aaccggctaccagacacgccacaggtgaggaagaggtcactgttggatcgaagtacctacgagtccccggtgaaaataattgagtctaggccctaacttctttacaaccttctgtttctgaaattatctttgatgttcctgaaggtgatagccttgtcttggaccactggtcggaatagtctccaaagatgatgctatttcaaatgatatgacaaagggcaccaaaggaaaaatggcaatgcacttgtagaaatctttacccatcaaataggtagcggcctagcggaggttctccctccaagttttgttgcgccaatacaaattgcattgaaagcccaaaagaataaaatggctagagtttattccttcccgttggggaaataaaaaatataaggggaatcagatgcgcaagacgtgggggcaccggccggcaggtgaatataagaaaacgaatggaagttaagatcacccccttttttttttaaacagacataaatgtaacgaccacaacgggctgggccggaaggatgaagaaagtccagtagggagaatcccgaaggctttgctgaaatctatcgccttatcctcaaagtgacgaaccaataggagtttttctcgaaaaataaaataaatccactgaaaatctatgtgaagccagcgagagaagcgctagctctgcgagacgaaga

SEQ ID NO: 90283 - DNA, 790 bp, Eucalyptus grandis
  Intron number 1 from transcript Egrandis_v1_0.021922m (loc us Egrandis_v1_0.017702m.g) derived from phytozome v7.0 (c hr-ID scaffold_6; pos 26898079 to 26898868 reverse strand)
cggtgcatcacaacaggctcctcccaaaagaactggtaaaaattaacaccaccccatcttcatctcattattagtcgagactttcttggaaaatctgaatccattacttgaaacatgtcttgagaagacttgagcgattgtcctggaccataatcatgtcctgttttatgtcgtcttttttgaattgcttgcatgcatcgagatgaagcaggtcttctgtctgttcagactgtggatttcttgtgattagagagtaaaatgaagaagcaaaagtttctggaacctgtttcttgttatgatccttgttctgtggttgatcaagggagaacgtttttttttttcttttccctcagagccagaacaacttctcttgctgttggtaaacttcagagttggaacttatacactatagttttatggacaacaggccttttgaggcgtgaccccaatttattattctgtatgtttaattgccataaagatgcaatttatatatggacacttctgatattcgccaatcatggttctcatcgtacggtcctgagtatctggcactaggatttaatgctagctgaatgctcattcaaatagtacaaataattattctgcttagtgcttaccgtttgagtttccaagtacttgttgcggttgtagagaacttgcaacgaaatcaaatggaggggctttactaatgcaattagtttatgctttgtgatgttactacttaaatgcctaaaagttatttgcctatgaagggacacagtggaccgcagtggcgcatattataacg

SEQ ID NO: 90284 - DNA, 487 bp, Eucalyptus grandis
  Intron number 1 from transcript Egrandis_v1_0.030564m (loc us Egrandis_v1_0.030564m.g) derived from phytozome v7.0 (c hr-ID scaffold_4; pos 12997248 to 12997734)
ctttggtaatgatgatcatcttcttctcaatccttgcaattattttccattttttatatagataaaattcacatctccactttattgacttgaaccatcatgttgatcacaaacattggataccaaggatctcaattatactaagatattccaattgaacatcatggcatgccatgcaacggatcatccttataaatgaacaatagtttgaattcattcaatttccttcaccaatcaactataggagtaagatttccccacgattggcttaaaaaaaaacatcgttgtaatccataacagtatttatatgaccaaaaactcctgctcaaagtgaataaatgaaccttttttttttttgaacttataccatacttagagcatattttttaaaaatgtaaacgtggtagagagatctttttttcttctttaccttgactcatcttgtttcattcacacaattcctaattaatgatgcgcaacttgcagt

SEQ ID NO: 90285 - DNA, 844 bp, Eucalyptus grandis
  Intron number 2 from transcript Egrandis_v1_0.010149m (loc us Egrandis_v1_0.006602m.g) derived from phytozome v7.0 (c hr-ID scaffold_4; pos 36609043 to 36609886)
atcgattcagtaagcctgcttttccaccttccagagttaattactatatcatgtacatcaagtgtgaggtactcatctgggaaatcgattacgtttaaagatcttctaaataaaagggcatgatagtcgtgagtttgattaaactggagataaagataccgaaaagataatcttaccttttaccaaaaaaaaaaagatactgaaaagaaacttgtggctgctgtagaacaagagtgtgaagcctgagggccaatgaagcatatttttagtttgtgatttatcggcatttaagcttttctgaaataaaatgtggaccattatgacatcacaacagtctgctgtttgttgccaattattttcccatatgattctcattttctaataccatcacctctttctgtgatggtacctatttagagataaaacgatggttaatcatgcttgtggtattgggaatattgatgggaatagaatctttcttcgatgtctaactgcccctacaaaaatcatcttgcactgtcctattccttgtcctttgtaatgtaaaattgttcctcccttaataaagggtaacggagagccttgtttttttttttttttccctaacataaagtgtgcatcgtttcagtcactcttcttccagttcacttcattaggaattacaattttgttaattgcacttgatttctaatttaaatttccttttcagagagttgctctaaccttgaaaaatttgttccgaagctcattgagtttgctgatataattagtagcaaattttgattgatagatgctgcttaattttgtagtgcaatcatatcggtcattagagagaaatactcgt

SEQ ID NO: 90286 - DNA, 840 bp, Eucalyptus grandis
  Intron number 2 from transcript Egrandis_v1_0.003148m (loc us Egrandis_v1_0.003134m.g) derived from phytozome v7.0 (c hr-ID scaffold_11; pos 37997738 to 37998577)
aaagaaatactgtcctcactcgcatcaatcctgaggttagaagatgcttttgctgctatgcttgtttagttttttaattcgtttttcctttttgtgttataacataagttgtctctaatgatggtacaatggctttacgggggataataactctttcaattgatatagtcatgcaccatagtcatatatatatattttggcaaatctgaatcgggaccttttctcttgtgtcaaggagaacatatctagaattgatcaaggggtttgaagcaggaaaacgttgaccatcaactcatttacccttaggaagaacgctggctcatgttatttaattcatcttaaaatatggctggtgcaataatgttccttaaaattgttgtcatctgacaaaagctgggattctcatggaaagacagactaagttcaaatggagatgagcaaggcatgttttatattcatgtgtaaactacaatctaggttatggcgtttaacagaagttgctgatcaaatgtttttgcacattgagaaagtgatgggtttgatggtgggctagcttttcttgtcatcaaaatcaattcttctgtccatgattcactattttgttattgcagacaggttttgattgaagaggttccacttcttgttcctattagcaatgccttgttcacgcaattaagaaaaatgatatcaccagataatgtcgaatgatgtttttttaaggttaattctgaattatacatttcaagaaatagaaagccatgtgtgtgttcttttttgtcagcatctttattttctccttatgcagatccgtgacaccagtgtgctggtgagattacgacc

SEQ ID NO: 90287 - DNA, 740 bp, Eucalyptus grandis
  Intron number 1 from transcript Egrandis_v1_0.030336m (loc us Egrandis_v1_0.030336m.g) derived from phytozome v7.0 (c hr-ID scaffold_4; pos 5043682 to 5044421)
actcgagatctcagttcgacgcatctgcaaccgtgagcggctgtcctgtatctctctcttctatctgtctgaaatctgcacgacaaagtatgaattttgagtgagttcttgatcgattgcggaacttccttgtttcggattctgcgttcgtgggtttcgatcgagaggatgagagcgcgcgtatggacagatccagggctcagtttctcgcattccatgaattaccctcgattgcacttgatgttgccgtgtcgacttggtggaaaaggttggagcttgtgagcttgtagcaatgccgccctctttgtgcgtcgcgaaccgtcgacgatttggcctgtttgctgttcgattgcgtctattcctgttgcgtgtctgagattaaattggtggctgggagttctgtttatccaatttgaagtcttgagccgtgcggatcttagctcactagtgctctagctgtttggccccgtctgttgctatgattcgatgataattgcagtgggtgttgaatggttcgttcaggagaagatgtagttatgtgattatggggtcattgtgttttggttggcactttacattttgggaagccgcaagatgttctcgaacttgcttgctgcctgctgtcttttggggttctttatgttttgaccgtttgattagaattcctttgattatgatacatgtattctttttacgctgtttcagtcgaagaggaaggtcagagagccgaaggaagaaaa

SEQ ID NO: 90288 - DNA, 516 bp, Eucalyptus grandis
  Intron number 1 from transcript Egrandis_v1_0.053505m (loc us Egrandis_v1_0.053505m.g) derived from phytozome v7.0 (c hr-ID scaffold_6; pos 43082347 to 43082862)
gagcggctagaacaaatctatagaagctatttcgagtttcactatggcgataatgatgacaaccttcacactgttgctattctcttttgattattacaacaacaaggttacaatgtttcatgtggtatgtaatgtttcaatttcattgattagtgagttagcgaaattatattgcggatactagcttgataatccatttgattgattagagggaacatataatatcattggtatgttcagtttactttgatgttgatttgtttatttgttaacctgtttatgtatttaattctcatagtttgtgttcttcaaattttctcgttttaaaaggtgactagtcctctcttccgattcctttgtttagtatgtcatttttccattgttttcgattgatctagatattgaacatggtgcttttcacagcatttgatgatagcatcttctcccatattccatttggccatacataaatctttaataggttcaaggacagtgaaggaaatttcaacaaatcga

SEQ ID NO: 90289 - DNA, 911 bp, Eucalyptus grandis
  Intron number 2 from transcript Egrandis_v1_0.022829m (loc us Egrandis_v1_0.022829m.g) derived from phytozome v7.0 (c hr-ID scaffold_9; pos 37867469 to 37868379 reverse strand)
aggtgtgggcctttctcttttttcccccgatttggaagagcgtgtttctcgtagcctttttgggtttcgatgtcgggaaatcgtggtgtctgattgattggtcattatggttaggagcttttgcagcgcaagttcggaaatttctgttcgtttgtaggtcgagttcggaatggggcgaaattgagctgtccaatggcttttttctgagctttcttgcgtgcatgtccatgaacagagtgtagcaagtgtttggaatctcggttttgcgtggtctctgaatgattgctcaatctggttaggagctttcgtggtgcaagtgtgtggcttttggaaatttctgtgcattttgtaggttgagctcagaatgcggcgaaattgagctgtccaatggcttttttctgagctttcttgcgtgcatgtccatgaacaaccaagccccctattcaaagcaagctaattattgatgtgccgacactagctatgatgattaccccgaaagaaaattaataacccgattttgatgacctcgtctatgtgaacgaaattttctctttcagtgtttggttgtgatgttgtgctttcgtctttgagtgctttaaaagttgaagattttgttagagcaccccttttttctttttttaagttttctgagctactttcttgtgcatacttacagctctttgtggtttaaagaattggtgcactattgctgcatctcgagcatagcaacatgaagccaagtgcctatattttgtgctcagttatgaaatttatgtcgcctgcatttttgtttgaatacatttcttactggggcttgggactgtttactactgccaaagatatggcagccagacaatatactgttcaaggggagaaagggtcaattcgttgattattcaattctcaggaca

SEQ ID NO: 90290 - DNA, 792 bp, Eucalyptus grandis
  Intron number 1 from transcript Egrandis_v1_0.026109m (loc us Egrandis_v1_0.026109m.g) derived from phytozome v7.0 (c hr-ID scaffold_11; pos 36269162 to 36269953)
gctaccataggttcttttttctcctcttattagaaaagttctatttttttgcttaattgtggaaaattatagggattgagaatctggaaacttttgttgtagcttaagggaattggccattaattcttgacggtggttgaatcgagttgaatgaacttcgatggagtgactctagtgatacgatgatttggcttcagtttaagttcactggggcatctttttcaggagtgaagcaattgtatctttagttctagaacaaaatagccttcacaagatgtgactaatctgcagattgtggtgtaatgatctgttgcttcctgataggttctcaattctaacttttgattaataagcctggatatgtacgcacatatgtatacattcattgagcatgtgcatcttccatcctggaagtgtgctgagtgctcagttattggcctatactggtctggcggagtgcaattctcccactcgattatttctaaatgattcaaatcaactgtactgctactgcataaatcagtgtacttgccctgtccagggacgtctgcataaaattataattactgcttattttcccacgcaattttcagtttctcattttgaccaacctggtaatacagcttctttcagcaaatatcattggggtctccgtttcccctaatgaattagaacagatcttacctttggccgaagactgcgtataatgcgttctttcctgttgtcaatctttaaatccacttatttcttcttacaggttgtttgagtacacccaaggtgccaatttgaata

SEQ ID NO: 90291 - DNA, 776 bp, Eucalyptus grandis
  Intron number 3 from transcript Egrandis_v1_0.033016m (loc us Egrandis_v1_0.032934m.g) derived from phytozome v7.0 (c hr-ID scaffold_9; pos 23552135 to 23552910 reverse strand)
tcatcactccttccattctctctgatcgcctgagggtatgcttctgttgtcatgttattggttccattggactaatgagccattgttctcttcaatgatatgcccgagtgaatgattgttgggtgagccattgttctcttcaatgatatgcccgagtgaatgattgttgggtttgaaaagttaggttggtattggtaagaggtttctgttttttttttttttttttggtaaaagtaataaagctaagaggtttctgttagtctccacgtaaacctctgaatctgcttccgctgtcatggggtaaaactatttgtgttgggcctggtaagatcataagatcatagaaggaattcattttcgctcttttgagggttcgtatgtgagggaattcgttgtgcttggaactatggttatcatttggtcaacaattcatatatttaccatcaacagcagctgactctttgtatgctgttttcattggtttatcacataattgtttcttccagtgtgaacttttctttgacttgtggcattttcgctggcttaggtaattcagaaatgcaccctgtcaagtgatcatcaaagtggctgtcatatctttgttctgaacagaatttagtttattggtctaatttaatctaatggcggctagttccgaccgttgaaaatataatataatatttgagtgttctataatgggaaatataacgtgcttttctcgttgagccatagaatgcttgcatactaactgctattggatttgcctcaccaggtta

SEQ ID NO: 90292 - DNA, 1019 bp, Eucalyptus grandis
  Intron number 1 from transcript Egrandis_v1_0.042383m (loc us Egrandis_v1_0.042383m.g) derived from phytozome v7.0 (c hr-ID scaffold_4; pos 36344502 to 36345520)
acttctccagcttcgtcgggcagctcaacacttatgtacgcacttattcagtttcttgtcctgggttttcgtgaagtttgcctctttcttttctttcccccggttctcgtaggatgggttggatttggggtgttgaaagaggatctattgtttggttttgcttgtgtgcgtggttagctaacgactatgaacatttctctgtgtttgtccattttgcttatttaggatttcctggtgtgtattggtggttattttttgttgacagcggtgagaacaatctaggactatggcatttttctgcttctagtgtttgtagacgcggtcttagatgaactgatgggaaaaattcgtaagtgggaagttgacgaactgtgttgggacatgcatatttgctagttcttctctctgcttttctcagtaaacaaatggagcagaaggttagttaattggaaaagtaaagagatcacgaagctgttccttcgacctgagtttaaggttgctaagttaggcttcttaattcattacttagctacgtgcagcagaaagcctggacatgccttctgcttttcccttcacaagagggatatgtgatattgccgccacgaggatctattctttcgggttcttttccgcataattcagtgcgattcttaatcgtttcaaagtctcttgttgtgcacttaatcactcgttgtctgctttcacccccttttcccctcaaagtgttggttctattgtgaggttggttcactcttaccgtggaggtttcagcttttagtcacaaaaattgctttccgaaagcatgcgagtgtgcacagtgtgcactccctaaagtccccatgattgtgggccttatataccacgacactgtattgcctcagcacgtcctttgcatgcaacctattaattcagatattgctttgcttcataattttggaagtatcttttttatcattgcttcatccccaactagtacagcaatagtactctgctgcatctgtcaaacaaggtttcagaaa

SEQ ID NO: 90293 - DNA, 857 bp, Eucalyptus grandis
  Intron number 1 from transcript Egrandis_v1_0.019124m (loc us Egrandis_v1_0.017782m.g) derived from phytozome v7.0 (c hr-ID scaffold_6; pos 34049658 to 34050514 reverse strand)
attgcatcgtaactcgttttccgggttgattgtctttttcttcttcttgtccctttctttcttttgggttctcgcctgattggttctctgtacttcgtgatcgtttttctagttggttcggcggtgaattgttgatcgcttgttttatttatgtcggcgggcatgtcgttgaatggtcccttgtgcgagcaataaggagaaaataaataagaatgaaagcagaaaaggaatcatattcggccgcatcatcttaggactcgctctcctcgttttgtcgtcgtacctgaacgatctgtgctgagttccgtttgattctgttgaaaattatcggtgggatcggactttgattgtctctgtgtatgaatcttcgtgtgagtttattttcttggcttgtacttatacaggcttaaagttttttgctgtacttttttcaaggtttcttgaattcattgggtgcttctgcggatgcctcttttgatatgacgatgagtatttccagtgaatgcatgaagttcagaatgatttcagcatagtcgtctttgatggacattgccaggactttgtttattctattttgtcttttgtttaccgaatttccttttgatgaagcacatccatcctattgttagatcttacaagtgggatcttttacatatgcttgactaatgttagaagatgtctgctttaggagatgcctgtgtcggttttaatgtcttctaagttctaatgggtatgtggttcatcctgtaactccagaatggatgctgctgtttgtaatccatctcttggaccttcttcttcttcttcttgttatgtaagtagcagacccagcttttgtccagatttgaggcgcagct

SEQ ID NO: 90294 - DNA, 1000 bp, Eucalyptus grandis
  Intron number 2 from transcript Egrandis_v1_0.007853m (loc us Egrandis_v1_0.007853m.g) derived from phytozome v7.0 (c hr-ID scaffold_11; pos 16260796 to 16261795 reverse strand )
cgcaagggttagcttcttgccctgtcacgatgcttctttccgggattcatgttgagtatatatttatagcagaatcagttgccgtgccatcacatttctcgatggaacagcaaagttacatgtctctggtgttgaagcataaatagtaaatttgtatttccaatgttatacgaatttgtgtcagatttataagtcgtcactgaaattgaagggctttattactgatattattatggtcggtaacaggagaaaattagttctacaacttcatcgtgaaattgtctctctttcatatgatttcagttgcagactcaaatagaattcaaatacttctcttagaaagtaggaaactcgctttgcattatatataggtaattctcatgttagtgtatatcctttgcctgagtttttgggccttataactgaagaaaacaaggatgtgacatgactcggccaacttgcatattatggttgccacaagtttagactaaaaggttaaaagttgatcgttcattagtaaactgactaaaaggaactactgtagtatgggtggccacattgtgtattatttagacatctgcacgttattaattatatccaatctacaaattgagagtgagtaaattaatgaagaaatgtcaactagatttgttgaaccgcgtaaaattgggattatttggcctagtgtaatggatttctagcaatatcacttctcgaaaccttgatattcaatgatctaattgattggaacatttgaatacaccaacttgactgaaatgtgctcatctatgtatgctgcgtgatgcggtgattgtgtctattctagattgagaatttggtcagtgaaatggtagaacaggagattatagcttgtcaaagtgttctgccttcttttattcatgtgctcttggcatcaaaatacagagcaggtacagcattctgaatctcatccattcttgatgcagtgcaaaacttgttgacctagccctagcttctggaa

SEQ ID NO: 90295 - DNA, 827 bp, Eucalyptus grandis
  Intron number 1 from transcript Egrandis_v1_0.021684m (loc us Egrandis_v1_0.021684m.g) derived from phytozome v7.0 (c hr-ID scaffold_6; pos 26409693 to 26410519 reverse strand)
cttcgtctctctccctcgcgtgaaggcgctgaacggtatgttatccgcttaccatgggaaaattccggaaacaattcaatctcatcagttccatggtgattgctttctgaggttctgccgttctttcagctttatttggatgattccctttcgtgctgatgacggtttctatgcttcctgtgttgtgactcgcgcaccaagtgttcgacgaattgcacccttatctgtttgaagctcttcttcttttgccccccgcccccctttttttttcttttcgctactatggggcgtgaactgtttctgtaatgtcatattgctgggctttccaccttataagaaagaaggacgtgaaacgttcttctgttcccaacattaaaggacctagttccttggagcgaaaatgcgagccccacttggtcgcgttgctctaagcaccagccaagcccgactatggattcctaagaaacatgacgagattcaaatttggagatcttatagcacctttgttttcttttcccctgaaagtgtttcttcatttgccgacgcctgtgtatgtctctgtggacgatgccaattcgtttttaactctctttcgctgtcagaggcttcattgtactgaaatgtgacttctttgtaggtggctcaaaagcctagtcctggaaagcaaacattggtcagacaggcagcttgattgtgctcgaaaagatcacgcaaagaaatttgaatcgacccccttataaatagtgtccagttgactcctggtctggcaatatcgttacttgctagacatctattcttgggggacaggatcatagaaaaacagaggt

SEQ ID NO: 90296 - DNA, 819 bp, Eucalyptus grandis
  Intron number 1 from transcript Egrandis_v1_0.007720m (loc us Egrandis_v1_0.007720m.g) derived from phytozome v7.0 (c hr-ID scaffold_6; pos 43954781 to 43955599 reverse strand)
cttccgacgccgtgaaggacctactgtccgcgggggtttgttcccgacttctcgtcactcctctattttcgcattttaagaatattttcccgtcgcgtggtttggacgacgttcgagtttgctagtcattttgagcaactcgatgcggtttacgtcgcctagttgatgcactaagtcgatcaaacgaagatagcattgattcgatgattggagaggatgcggtgatatgtttcgtgctttgtgtttgctgaaattgctccaagaggatgtatgtatttatgtatgtgtgtatgtatgtatgcatgcgggcgtcgcgaatgtatcttctggattcttcaaaccatttcaattcgctgatctctgagaacgcaccgaggatcagtcctcattataatgaacgaattcgactacatgatgcgcatatacctcagacgtgcaatcatttttgctgcttcttcagcttgaagaagaaaatcttcatccaatagatgtttgaatgcttgaactctgcatcatgatccaacttactgcttattgaaatctcaatgtagtaatcaaagaacgggtgttttttttgaggtgatttcaattctattctactaatgagttggctggaatagcgacacatgcattatgatttcattttggcaaagttggaggaagtttgagagcaacagcttaactatgcattatgtctttgagctttttacggtcaaagtgtagatgcagatagattgcaacttgcaagtagttttccctttttctcccaggtgtgcatctgtttaattcttttattttttcttaaatgctgtttcaggt

SEQ ID NO: 90297 - DNA, 696 bp, Eucalyptus grandis
  Intron number 2 from transcript Egrandis_v1_0.021149m (loc us Egrandis_v1_0.015543m.g) derived from phytozome v7.0 (c hr-ID scaffold_11; pos 24232484 to 24233179)
gaggtatgtggatttattcttttttaattactcaaccatcgagtttttcgattttctcttgttcttttctcggttgtgctcttgattgaccatcttcacgtattgttttcatctacctgtgaccaatttacatctgggttttctgtctctcgtttgccctttttgtatttttggctgaattctgccattcatttgtgggggtttctgtccaaagggtatttggattctgattgaattatgcattcacgattttttttggggggtaggtgaaattgaaatgagctatatttctgaagaggtgttgttgagcatatacgaagtgttataagctggattcacactgtatgttgtgatgacatctggaagggatttgcggataataagccggaaactgtgaaggtagagggagattattcatcaggaaaacttgtagtttgaagaatatcacaagaagaaaatacggatttataccgtatagagagtctaggcaagtgtcttggactagtgaatggtggaagacttataactttgaattttgtgaaaaggtagctacagttttatgaaaagaagttatatgggatacagaacttccgagatcatctgccaccgaaagaattgcatatgaattcttaattttaattctggcgtgagatgtgcacaggttctggacgaggaggcaaagagagctggagatct

SEQ ID NO: 90298 - DNA, 428 bp, Eucalyptus grandis
  Intron number 3 from transcript Egrandis_v1_0.021149m (loc us Egrandis_v1_0.015543m.g) derived from phytozome v7.0 (c hr-ID scaffold_11; pos 24233248 to 24233675)
gcctggaggagttttgcgacagtgatccttcaacggtaatacacacgcatgcacgcacacacgcacaagttctatctcctaatgatgatgttgttgcattaggcattaggcataggcatggggacctgaagatgacattgaatatgtttttcgctacttgtggtgcttcttgttatgccaatgatatatctctttcttctttgatatttgagctttagcacatattaataatgaaaaggaaaatgtgcaacatgtgcagaactttaagcatccaaatgactaagtaaggtgtgaacatgatgaatttccctcctaatattttgcttgtttaagttggtatgggtgccttctgttcaattgctctgtttatatctcattataatatgttctctatgttttcccctatcctcaggtcacttgttgcaagc

SEQ ID NO: 90299 - DNA, 655 bp, Eucalyptus grandis
  Intron number 1 from transcript Egrandis_v1_0.044325m (loc us Egrandis_v1_0.044325m.g) derived from phytozome v7.0 (c hr-ID scaffold_6; pos 47735482 to 47736136)
cgtggttcgtcgaactagagagagcacagctagaagtgagttgggcatgagtgatggtttgtgagaaagaggaggggttgggcgtggggttgcagagatggagagcagggcacgtaaaagagaggagagagagacaaaaaatttctgacgggtgggcccgatttgccgcgtgtcaacctctgtttggttcaatgcacatccaacgcggtatatttaatgacctaatgttttcttttctcccccaatctctttgttttctcctcctataaaacgcaactctatgcctcatgttttctttactcaatcctctgttcagaatgaagtcctccgatctcatctcgtctttctcactcatcctgatcggtctcctcttgtcgcccggtaacgattccttcgactaaccatatattctcgaacagcatacgtaatggaactcgtgtctcctatgttctttgtcattgaacagcattttgatgctacatacataagtactttgccaattcatactctactttcgagtatgcacatttcaccacgccaagaatttcggcctacatttatcactgtaattctggtttgcctggtgaaaattttcacgaatatgtaatggcatcatgcagggagtactgtagtggcagaacaagtcaccttcaat

SEQ ID NO: 90300 - DNA, 1005 bp, Eucalyptus grandis
  Intron number 1 from transcript Egrandis_v1_0.025150m (loc us Egrandis_v1_0.025150m.g) derived from phytozome v7.0 (c hr-ID scaffold_6; pos 41825645 to 41826649 reverse strand)
ggcgacttgggggatctgtctccgagccagttcaggcgagttcacgaccttaattaatttatttcctctctgcccctcttaaggctaggatttaaatttctcctaacttgggaaatcatgtgaacttttttattcaagaatattacggaagattcagacagtattacttccttcggacctattgagtaatcttaggaatcgcgaatgctgaaagtaaataaaaggcgctgtgctttgatttcattcgatggtaattagcttaccaaatattgaagaaaaatagcgaatttcctttagaactcgtcactttctcttatgagaggaaatctaaaccttacacaattaacttgcaaaataagtataatcattcctactatagtgcaattgattgggacattgggagaatttagcttcagaagctggacgggtcacctactcgatgctgacttacaccatgcaacccctcctctttccgaaaattatctgattcatgaaattatcatatgaaggagctcagtatggtatacattgtagttttcgcatttcacaagatggctctatgattgaatctagattcgttataagtttggcgatctcacggatacatatgctctaaagtttccgacaatatctactagtaattatcaaatccgtcgatttctatttaacagaacgaaacgcgtgttgccaaatctgtcagtttctatgtaacttaaaaattttaatagatctgacatactagattacggtccgacggaacgaactaataaacttcattaatgacattttggatcgatcgacacatatatacgaccttcttaatagatcgatgtacttggtggataaacagatgaccgtctaatgtaacagaactcaacttattaatgacattttgaactgatcagaagtgtagatacgaaattcttaaccgatcaatttactagatcgatgatcggatgaccaacatgtaaatcaatgtcttcataggggagtgagcgagctgca

SEQ ID NO: 90301 - DNA, 469 bp, Eucalyptus grandis
  Intron number 4 from transcript Egrandis_v1_0.016166m (loc us Egrandis_v1_0.016119m.g) derived from phytozome v7.0 (c hr-ID scaffold_4; pos 39926204 to 39926672)
ccagtggtcgaactacaggtgtgttcctgaattagaatcttatctttccacttaatgatggaatacttaaacagattggtagtttgataaccttgcaaacttttcacctttttaagtttttgttggttaaggaagttgttcattcttccacttgtcatggcctgatgaatttgatgacaccattcaagaacgataaaataactatcttaaataaaacaaaattgagatataaaagagaggaaatcaaaagaggttctgagattgctactcaattgagtaactacttgacaccgaacacggcagcaagaaataatccaatttatggcaagtgaatttggtattgctatatgtgttattgtccacttgcctgcttactccttcgtagtttatctcctcatggcagtcactttattaatattcttttacccgatcaggtatcgtgctggattctggtgacggagtcagtcac

SEQ ID NO: 90302 - DNA, 882 bp, Eucalyptus grandis
  Intron number 1 from transcript Egrandis_v1_0.004403m (loc us Egrandis_v1_0.004403m.g) derived from phytozome v7.0 (c hr-ID scaffold_9; pos 249207 to 250088)
cagatccgtgtactgcgaccagtgccgagtcgtcggtgagttcactcgctgagtcacgattcctcggctttccggtattcttgtgtttggtaaatactgctaccgctatccggcggatggttttccggtccggtgccgagccgcccctcgcgaatgacgtcgagcggctggcgttggtttcaatatgtcgcgccgatctgaactgaaacatcatatcgcgatacgagataggataaaaacggcgagatattgatggcggtgtggactaagcaacggtcaggatctattgggacccctcgaaattagtgggatttgccacggagaaatttgctttttttttttaaaaaaaataataaataaataaatgcggtaaaattagggaaaagaagggacggccggtcactctggtcaagcgacacgtggcggatgctgatgaagcgatggtgagctggcgggggcccaccatcttggacagctgtggtccatcatcggacaccattatggcgacgacttttattatttatctaaaagacttgtaccgagacagctcagctaattgcctttgccacgtcacgctcggtcccccgacaacgtttcttggattggatttgcggacggataaaaatcgtttctttttctgcttcttcttctttctttttctcttcgattttccttgccgggttactgttactggtagagtctcttcctgtcgtttcttggtcggtcttggattcatggttcatacgatgattgctttgacttgaatcatgggttatctgaggtagcaggtgttgatttctattctatcctctcacgatcttgatcctgaattcttgatttttgaaagggtggagcgggcatccggtgtgcgggaagcggtac

SEQ ID NO: 90303 - DNA, 580 bp, Eucalyptus grandis
  Intron number 1 from transcript Egrandis_v1_0.014697m (loc us Egrandis_v1_0.014697m.g) derived from phytozome v7.0 (c hr-ID scaffold_6; pos 43564624 to 43565203)
ctcttctccagcaggtaatttcctttccttggaaatttcatgattgaagtaatcgattttgatggcaagtttcttatttaacctgcagttctggagaactcttctgggctcttaattgtgggttatgatttgtgatttctattcgatatttatagagcattttgggggggtcgttctgtgcatgaggaattgacatgatgcttgaaattgtttctgggttttgagtttatccctgttatgtgattttcttaatggagtccggaatggtgagttatcatgtggaaattagctgcatttgcatcctgttcatattttgtctttctcttcttcatctccacttgtccatttttattttcggtgtcctcaatactcgatgaaattatctaaagattttcccaatcttgcagtatcttgtgctcatggaggcacattttcatgatctagcatggccaacttcttgtttcgattgctatagccttaattttccacctgtaattttgttataaataggttaactcattgctttattgtggtatatactgaaggatcgagacagaaccggaagctagagatattccaa

SEQ ID NO: 90304 - DNA, 627 bp, Eucalyptus grandis
  Intron number 2 from transcript Egrandis_v1_0.006944m (loc us Egrandis_v1_0.006944m.g) derived from phytozome v7.0 (c hr-ID scaffold_884; pos 2078 to 2704)
attgctttggtttgtcatctctatacatcttatgtagcttttcttgtcatgtgtctcttttagtgacaggctgacatctttaattgtaaacaaatgaatgtatgttggtgtgatttggtttttcagtttagattcttcatttaggttcttcatcacttgcttgcattgaaatttatatctatatgcattaggatcctgattaatggatctctaggttcgagaaatcgcattccaagttcacgctacattattgaagcttattctttttgtgctttcagtttgaatgtacagttggaattgtttttttcaaggatcagttaccttttattttttccccctgtggattgtaatgttgatagtggtgtctctagcttatagtgaggatttgtttatcataaagagattcattgttcccgaccctactttaacttaatactatttctcttcatattgagaaacaaatattatggtttgattttgccacattgctgcttgtctgaatgttgttcttatccgctggagaaattggttagatctgcttattactttttggcatttctgaatttataacttactgttttattttgtgtagatccgggtctcagctgtcctaaccaacagaccgta

SEQ ID NO: 90305 - DNA, 1041 bp, Eucalyptus grandis
  Intron number 1 from transcript Egrandis_v1_0.034367m (loc us Egrandis_v1_0.034367m.g) derived from phytozome v7.0 (c hr-ID scaffold_4; pos 358011 to 359051 reverse strand)
ttgctggtgggcaaactgttaatcacgtcttcgaggtgagatccgaatgatccgtctccgtttcccccttcgattgagaagagattcttgaagatgtcgttttcttgtttgagcaaaatcggatcgaagttcgatgttatttcgctgatgcccagttcatgtacggcgataatctaggatctctcgcttagctttgattatatgagcgcccccgtgaagctgctcaccacgtgttcgacgaaatgcgcaaaccaagtctatgccagtttcagtgttcaggtctcggaatcccgctcatttggtctctcagtgtcgcttgttgctcacagtcaacccccccacccttccattttctcgctctctctctagttggccctcaatggtcagcacggatgccaattagcagtgctggtaatttatttggcaatctttaatcgttacacttatgtttagtgagtattttgggaggtaaagaaaattgtgaagaaaatgattttccttgtagttgtctggaagaatggatgtagggtgaagcaaatctggagaaacagactttcatatgctaaagatgaaaagtaagatgacgttttcccctttcatttcaattgtgaatgtgagtgaacatgatcataaaaataccacttaacatgagaattgtgggtattatcatgtcagttgcatgccgccaagactttgatcctagattaatttgaacatagtggattaacagagcaggttctgtccttgtgaacctaactattttgaaggagaaagatgggtactttttatgtaaataaaagtaaaaaaggaaaaggcaaacgtgattccaggtgctaaagtgggcagtgactgggggtatgagtccaaaaactgggaaccggtttcaatgggtgggttccaagtttcaggtggaagttggactgaggctgaactgctcgcccctataaagtagtgggcaattttttttcttctccattgattaagttacattgtcaatcttcctctttcaggtagaggaagcaccagtggaggattaggagg

SEQ ID NO: 90306 - DNA, 919 bp, Eucalyptus grandis
  Intron number 1 from transcript Egrandis_v1_0.043791m (loc us Egrandis_v1_0.043791m.g) derived from phytozome v7.0 (c hr-ID scaffold_11; pos 21626245 to 21627163 reverse strand )
accaacactcacaacaccacccgtgtcactagcatgtctctttctccctcaatttcatgaattataccattgtagattcttcgctagactttagtattaatcaagcaatcgcacaccaatcttttgtttttatagagttgattggctgccgaactgaatctttttacactatattagtattttattataaaaaaaaaacattagccgatttttttggtcaaaatgtagcaacaatacgtaatcacttatcatattaaaatcactcatgaagtaattatgaacataatattaattgttcacaatatgattatacaaatttttataagtttaatcaatacaatcacatattatatgcttagcttttaattatataaattatatttttagtgattaatgggaatgtcaaactcaaagatgatgattaaatatcaaagtgatgagagttatattccctctaactttaatcgtaagggtagtttcaaaattttaattactattatctctttattacatatgttattcatactaatgcatagtagagctatactttgagtgatgcgtgcttttcacattagctatatattcatttgctttaaacaaaaccttctttttttaggcaatttttgaagaattttttcatttagaatcaattgagatttatttatacatatcaatagatgtaatgaagccattttgtaacatcattttgatgcctagttttcaagtaacgctagaataaagccttcgtgtcgttgcgaaaacagagttcttcggaagcaatctcttgccggcacccttccgcctcgactgtttagattgcctttcctccagtacttgtaagcactctctttctccatttcccctttctccatttttcgatcttcttcttcttcttcatcctctctctctataaacagtg

SEQ ID NO: 90307 - DNA, 926 bp, Eucalyptus grandis
  Intron number 1 from transcript Egrandis_v1_0.027618m (loc us Egrandis_v1_0.027618m.g) derived from phytozome v7.0 (c hr-ID scaffold_4; pos 40602977 to 40603902 reverse strand)
aggcctctcgctcccacctccacaagcgcttcaaggtccttcttctatctccttttccgattactttgctgccggatttaagtttagtatatagcaattgcttgatgcttgacgagctctggtcaagagtaagtttaaagtcctcgagttgatgcatcaatcgagcaaatcagatgtcctacgcaggttaaaatctccgatcgcatacatttagctgtgagttagggattttctattgtatgatgcgaattagaatctcttttaggaactcatgaatcatccttaggttcgctgttgtctatttgtccttcctatcagagagagatcttctgtcaattttggacaaactgttgtagtcatagtgaatatattccttagaaataagatttgataatgtctgaggacgattatcattctggatgccaattttttgagtgaactgtcgtcaaatctgttattgatccattgtaggcgaactcttgaggcagtccattatttttcttgtccattttgacgataatggataggggaaatgtgtcacctgatcatgtcatatatttcctttaggcaaagagatccagtcttttgcttattcggctgctttggcttagttgtcacagttgctttcaactgttgtgcttatgaagttcagtaatgatgtggtgattttgctcactgatatcttatcttcggccttcatgcctagaagtttatcaccaataaaaagacaaatatcaaagttaattttgatttgtcaatgatccttgcgttgcctgcttgctttacctttgtcagttcaaaggatgctctctgatactgtgtttccgtaaatgtttctgtcttctagtcgtactgaactacgtcacaaacctaattcattgattttctcactttatatcatgttccatatcgaatgtcacagaagc

SEQ ID NO: 90308 - DNA, 438 bp, Eucalyptus grandis
  Intron number 3 from transcript Egrandis_v1_0.028259m (loc us Egrandis_v1_0.026346m.g) derived from phytozome v7.0 (c hr-ID scaffold_6; pos 3356925 to 3357362 reverse strand)
acattcagggtgaaaaatcttctcataaccttggctgctcaatgtaaaaatggtcattctttcctcatttagtccaattaagtggaagatgttaactagatttatccatttggataattgacattgtttctcattctcaataggatgcagatatgtaagcttcggctgttgtacaatagttttgattaagactagtctgcattttctggtcttaattgaggtggagcaagtgctaaagttagctctaagttaagtatacattacaggatctagcctttttttttttcagaattaatttaataattttccaatgcattccctcaaagtaattgatgtaactgatttatgcctgtattcttcactaaagacacaactatcaatctgagatactcatatgttgcaggctgtgccgctcttccatttctacaagaacggggt

SEQ ID NO: 90309 - DNA, 990 bp, Eucalyptus grandis
  Intron number 2 from transcript Egrandis_v1_0.027445m (loc us Egrandis_v1_0.022724m.g) derived from phytozome v7.0 (c hr-ID scaffold_9; pos 38242403 to 38243392 reverse strand)
tatataccacttcaaaatcaattctacaaactcaggtagttgaattcccgagtatctgtcattaccattgtaattacctccgtttcgttggtatctgttttgggaatttgatccaaatgaaagacgtgattgtaatgattgtctgagtttaagtcagatgtaagtggactaagcgcacggtactaagtttctaaactaagcatgagaaaaggtatcatctaaagggggtcagacagcctgaatccattgtatattgtcagggtaaagataattgctattgtttcctatacttcttcaggagtgaacattttgttcatcattcatatccttgctacaattataggttgaacccaagtaatatctttccttggtctaatctgtctggagcacattttaggtcgaactggaagtaatatctttcattgacgtaaaggtttgaaaagcaaaaagaatgacaatagtaatatcagtggtttgtttgaggttcctcacagtttgtaatcatcactgctcttcttctttaccttggtactctctttctttgatgccttttcacataccacagggaaactaacaaagcttgctttcttagaaagatatgcatgagaagatcttagagatcaggtctttttgtcatgaggtgaaaaaagaaaaattccaacttcaccatttctctcggctgagggtattttaatatgctgttgggtatgtctttttggctgtcggcatagaacatgtctgttttcatatctaatgagattttatggcgtgagtcatttatagagtcgcaaattttgaatgttccagtgtttatcttgctaggttgctttatgtccttccctaagtatccatctctgttgtcatatatggaaacattgcttgattcattactgcctctattgcctttctatatttactcttttgattgaaaatgtttttaagtaattatgtgcagagacccaagttcttgagatcaatcacaaactacca

SEQ ID NO: 90310 - DNA, 661 bp, Eucalyptus grandis
  Intron number 1 from transcript Egrandis_v1_0.017749m (loc us Egrandis_v1_0.017749m.g) derived from phytozome v7.0 (c hr-ID scaffold_9; pos 32063250 to 32063910 reverse strand)
aagtccaagcctttctagctctccgcactcatctggtaaaacagatggtgttttttctctcttttcttttttttgtctttttcttttcacgtgtttgtggattagatttgcaaagtcctcttgaatccagcttctgggtattttatctagcattgaatttgatcgaattgctcgtttttgatgcggtgtattcgttttgtttcagcaatttgtgagcttgatatggttggagcttgttatataatttattttgctgcatatttgatttggaactgtgctggcgtgtttgatgacgatcttaatgacgagaggaacggacgatgatgttggatggaaattgaggtgttgggttttttgtcttctttggtcctttaaaatctttgaacaaagaaatgaaagaagagagcattgatattaaggaaatgcaaccctgatcaatgcttctgtcgatctgtatctgttctccgttaaaaatgttgggcaatgtccagatatgaaaaatcagattttaggttctctttctacatgaagagatgatgggcttagacatggtgtcttgtttttgctgtttgtccagagtgagcgtggatggatttgcatgttgtgctgattgaagaattgttctcgtcgatgcgctgaagcttctgattgtaaggcgttg

SEQ ID NO: 90311 - DNA, 468 bp, Eucalyptus grandis
  Intron number 2 from transcript Egrandis_v1_0.008497m (loc us Egrandis_v1_0.008497m.g) derived from phytozome v7.0 (c hr-ID scaffold_9; pos 37471286 to 37471753)
ggcaaccgccggtcagctttaattttgtggtttctgtcgtgaaagtatgatgtttttcaaaagcgattcgtttgatgggcagggcttcttaagataaaggaatggtttctttcattttctgattctgtttagttcagggaatgttttttggctctggcttgatagatattaagtggggaaaatgactctttgctctttttcattaattgggataagactgcttgatcctattttataggatcgtcctgtttcaatcattttggaagacttttgagttgaaagtgatttggaagctcttgtgtgctcgaaagttgatggcaaatgcattctatactaatttgaattcgtgcaatgtgacgggtcggagtgtggtgttgcgaatgctgaatcacttccgtcctttctcgaatctgatgatgtgtgtttgtttcagagggttcccaatctcatcggaggtgctttcattga

SEQ ID NO: 90312 - DNA, 421 bp, Eucalyptus grandis
  Intron number 1 from transcript Egrandis_v1_0.006209m (loc us Egrandis_v1_0.006131m.g) derived from phytozome v7.0 (c hr-ID scaffold_6; pos 49447429 to 49447849 reverse strand)
tggagttccctagcgtggcgagcgacttgaagcaggtaaaaatgtgttctttttgctggtcttgtttggtggaacgtgatcctgcctgaatagttcagggctatagccttgctttgatggattttgagttttgaggttagatatgagaacagttcaaaaaagaatcacaacagactgaaattatcagcccaaattctggaaaatttcgtttctttgaatcgattattggatatgatacgtctgtcccttttctgcacagcgaaggtcagttgtcctttttatgtatgtcctgggaataagaatgtggacactggttgccgttccctgtgttggttattgcgctggttaaataggttatttcgatgaacctttattgttaatctattgactcctttttggtcttctccaatagcttctgcaa

SEQ ID NO: 90313 - DNA, 832 bp, Eucalyptus grandis
  Intron number 1 from transcript Egrandis_v1_0.039277m (loc us Egrandis_v1_0.039277m.g) derived from phytozome v7.0 (c hr-ID scaffold_1497; pos 1191 to 2022)
gtgagcaaaaaaagacgaagatccgcacatgcgaagtgaatccaagattcacatttgctataaataattgtgcaagaatgggtttttttattattattattattggagcctagatgagttgcacttcttttgaattttgatcttctttaaaaaattatttcaagctaggaatttcacaaaaagaaaaaaagaagaaattacttgggaagagacagagagagatctattggggcttgggagaagcatgtgcttgagcttcaaagaattagtagaagagtgcattaatcatatataatgaaaattatgaaaagattgtatgtgaattcatgtatcaatatttatatagtgtgaaaattcataacatttaagattaacaaaaggtgaaagtatgtccaacccaaactttaaatgaattaaatagtaaaacgaaaatatctattcaagtggttttaattaaatacatgatccttgtatgggtattactattatgctgagatttaaatccaatgtgttggttaagtgattgcctgatgagagaacaaacattatctacttatgtattctgtccatgaagataatcaacagagttgttggaaatcgtggagaggaagttgacgtcaaaaatccattttttcttaaccgtggcttttccgcgccacgaggcaaaattaaaaaggccccacgctttctcgagttccgcgcgaaaatgtcggaactgaatttcaaaatttcccagtcaaactgattattaaaaaaaaaaaaaagattttctcctgcaagttatcgtcaatgagaaggccccatttgcttggaaaacgttgtacagctgtaa

SEQ ID NO: 90314 - DNA, 962 bp, Eucalyptus grandis
  Intron number 2 from transcript Egrandis_v1_0.028335m (loc us Egrandis_v1_0.028335m.g) derived from phytozome v7.0 (c hr-ID scaffold_4; pos 36355877 to 36356838)
tcggcagctgttcagccgtttctctggggtgcccggtaagagttctcttcccctcacctcgaaaaatcgtttcttttgtctgctattgttttgggcgtggctatcgagacccccttgcaatttccatcgaatcggcaaaactcggaaactgaatggggatggaacctcaagagttgggcaacggaggtttttcccggagaaatttaggtttcttcattgaaagaacacgagttcttgcgggggagaaacgtgggttggtgatcgggcagagaatggctaatttcttgggatcttgaacgctggttttgactgtgagaaagcgcatttcgttgggattgtcatgtgggtgttggaaaaagaagttatttgtagctgaattgcttgaggagtcatgttttgcgtctttgccctgtaatggtgttctggttaggttagagtggcccttcttagctttatgtgggtttatgatgtctaaaattcagagtgagaaagagaaagtaaactctatacatgattagaccggaccttcgcagcatagtctaggtcaggaactcaggatgtagacggtgatgcttcgtagaagcttactgctctcctcgagcagttattgaagtttgtaagattgtattggttatatagagatggaattggatattttccctcgtcctcgcaaaagttgaaatacctggttttgcgtctcccgggatttcgacattgcatacgttgattctgcaacgacccaatcagacttctggagaaaaaaaaaatgaattgattatacttggatgcatttggttttctgtttcttcagaggttggtcggcagtttgacaggctatcggttaacaactcattgtgcctgaaatatatctgctctttactgcgaaagtaattttctttgaggagggaatatatgcactcaccatcgcatcttcttttctttagtagctcaaggttaggggc

SEQ ID NO: 90315 - DNA, 653 bp, Eucalyptus grandis
  Intron number 3 from transcript Egrandis_v1_0.016761m (loc us Egrandis_v1_0.016761m.g) derived from phytozome v7.0 (c hr-ID scaffold_9; pos 31316179 to 31316831 reverse strand)
gtggttggcaacattagcactgtccttgaggtaagccatatccataattttccttcaattgcggagcagtacagcactattaaatccatataaacaagggttgcaattatagggaggatttttttttttttttttttttgtggtcggtttgaggattttgttgaccaacgcattttcttctttatggttctgtcgctccctgactttttgtttgatgctaaccaataattccttattaaaatatatatctatgatcttttgagatattaaagcgattttcatgttggttctatagtcaaaatattttcttattatttgagtcatgttaagcaaacatgctttcacactcaagacacttaataaaagttttcattttctatgatgagttcattataataaataagtaatttgttaaagggtatttaaaggtcggttgaacttcattatttgttttttgcccatgtatttttcacgttctactccgaagctcttataaattcgactttttctttagtctgatattaaattaaatgttatcacacatctttatcaattgttgcaattgatctttataaaagaattgtaacacatggatcgatcttcaatttttttttccagggtatatataaagttggagcaagaaaatttgggtt

SEQ ID NO: 90316 - DNA, 538 bp, Eucalyptus grandis
  Intron number 2 from transcript Egrandis_v1_0.019054m (loc us Egrandis_v1_0.019054m.g) derived from phytozome v7.0 (c hr-ID scaffold_9; pos 23800898 to 23801435 reverse strand)
ttcaggttctcttactttttttttttgcaccccctatcctgactctggtatggaatggctatcgtttcaagttaataaattccaatgcactttgttcttctaacctatcacaaaatcataacctgaaagtagaacttgagaggcagtcttactttaaatgtctgccttcttgttagcaatcatttgacagtcatgaattgttggacgtttagcagtatacgttaatggaaaccttgagaactttgaaaagtacatattatttgacaaaacaactactgaatctatcaatatctgttagatgaagattgctaagtgagaccagcttagtttttgcaatcccaaaatgatttatcctgcttggtcaagtcaacctcacaagtttctctcaatcatgctaggtacatcatgttaattatttgccttgttgattttcaaatttgctatacttgactatcgtggtatattagtttgatgaatatgttttctatctcattttaactgaacagaattgtttgaattggtagattcgaggcttagc

SEQ ID NO: 90317 - DNA, 420 bp, Eucalyptus grandis
  Intron number 1 from transcript Egrandis_v1_0.041497m (loc us Egrandis_v1_0.041497m.g) derived from phytozome v7.0 (c hr-ID scaffold_9; pos 25550586 to 25551005 reverse strand)
gcaaatcttctactacaagaagcaaagaaccaaaggttggcacttcttttcgattttactatcatatctagcttcaaatgtgctttaagaattctttttgaatggaatataatgtgactgatcctacaagtctagagtaatagtgcaaagattcctcgacatacctaaccctgaaaatcaactgaatgtaaggaaaaacgaccctggaaatcattttgatataaggaagcaaagcggttacaaaatggccaagtgtgaagtttagtgaggaagaacaatgtaaacatatgagtttttacccaaaaaaaaacgtaaacatatgagtttgccagactgaatcttctgcaactagtgcccttattcacatgtcgacttttcttcacaggagcttttagtgtctgaactgtgctctcttgagga

SEQ ID NO: 90318 - DNA, 636 bp, Eucalyptus grandis
  Intron number 1 from transcript Egrandis_v1_0.050335m (loc us Egrandis_v1_0.050335m.g) derived from phytozome v7.0 (c hr-ID scaffold_9; pos 31981367 to 31982002)
gttccaccattgcaggtatttgtcgctagtgtattgtccgacgtctctttgagatctgaatatgttggttgctgttttcctctcgagcatattttataattagtcgttctgagaaacaatctagcgattcattgaagaataatccttgtcttaattggtttctagtctccgatactccacaagttcttaatctgatgaacaaaccaccatctgccacatgtaccagatctcatctttttcccgattcattctagtcgagcctctcgatcagtcattgtgccacctgagaattcagtggaaacaactggatgtatggcttgctgctgaagacatgacagattgacagagatactccaacacttctgaccgtttgggaccctgctgtagcatagtgcaaggcctaggaaattctgaaatgccaaatatctataccaaacaccaaagtgtcgattgttggttcctttgtattttggataaaaacattcatgttatggctcgttgacatgagttttaagtaagggctacattgcctcgtatctggcaaagggggcgcgaaactcctagagctgaaggaatgttgcttctttactttttcctgcagggtctgttctttacatcaagggggagttcgatctg

SEQ ID NO: 90319 - DNA, 400 bp, Eucalyptus grandis
  Intron number 1 from transcript Egrandis_v1_0.001971m (loc us Egrandis_v1_0.001971m.g) derived from phytozome v7.0 (c hr-ID scaffold_4; pos 18692290 to 18692689 reverse strand)
gtgtgcctccctaggatccacgccctccttgaaaggtaatccctttgctctatatggtaatgattttgattgatgtaatctcttgcgctcatcgttgcgctgttcaatctgtgcctgttttttttcgtctccaatttctgccaattttatgttttgtctaggtttttcttttgtcaacatttgttcaattcatgtggggttgccagtttaattggtactaattaaatgtctttttgttcagtctcttcatattatctttttattaaaaataatcacccttttgttttctgtgaatttgattgtctgtttgctatttatttgtaatctagaatgttatgaccacctgtattctgttttaattctagggtttcgtgtccgccgcagcctgatcttaatcaat

SEQ ID NO: 90320 - DNA, 753 bp, Eucalyptus grandis
  Intron number 1 from transcript Egrandis_v1_0.025861m (loc us Egrandis_v1_0.025861m.g) derived from phytozome v7.0 (c hr-ID scaffold_4; pos 35445421 to 35446173)
caggcattgtccggccgaccatctcgtcggtacgtgcggtttcggttttctgcgttgccattgacgatgctctgttctaaggattcggtttccgggttcacgtacaatgttcttgtcctcttctttcgtgagattggtttcttagatgacgcgtccgtcctttcatgttctgcatgtttgagcgaaaacgtgtagtccgttttgatcgacggcgagaggatgggcgaagtttgaggaacccgaacccagcgtttgagttttttgtttcgttggtgcttggatggatgacgcgagggagagtttttgaagctaaattgtgacagtatgtatgcctgagccctgaattgatcgtaaggctgtctggtaaaagaagtggtttttgatgatctgttgattgaaactttataattatttgataaatatcagcagcagcatcagcagcagcagatagtttcgtcgtttttctcaagaatgtggtcttaagaggctcaggcaaagattccgaatgaaaattatagctcggcgaatctgaaagtttgaatttttcactcgtgataatttttttattctgcattgtttttctagttgtgtttttttctttttctttttctttttttccttagaattagaagaacttggttattattgtttcacgtggtgatctttcgatttggtttgcacttttcaaggttaagatggttttgatgatatgttgtagaagttcatcaagtggctaatagttcgctgcttcct

SEQ ID NO: 90321 - DNA, 709 bp, Eucalyptus grandis
  Intron number 3 from transcript Egrandis_v1_0.025861m (loc us Egrandis_v1_0.025861m.g) derived from phytozome v7.0 (c hr-ID scaffold_4; pos 35447019 to 35447727)
ggctaataaataaggtaatgcgtacatattctgttgacaacctgttgttattcatacttcattttatgtagggtgtttcagtttcataattctggtccaatccacattattttctatacttgtgtgtgttcttggaggattcttcatttccttgaagatgtatttcaacaaagaaaagatccttgcttgcctaattcatttagtattgtggtgtccttgaaatatactggggaattgcggcaatgtctcccatgctttctcagcagcatgattttcttctataaccagcatcattttgtttttcctttataagcagcctcttttgcagcagtaacacttcccacaagtttatctttacccaaaagatggcccttagtcatcacaaaggattgtatatttagatggaagccttactcagcagaaatatctaggagaatcttctttaatagtgtccatgtgaggagattcttccttgcaatattcttgttaacttgcgtgttgtggagaattgatctggtttattatagttgttagagtatattcttcatacttttcttagattttccatgttgtgtatgtgggcttaaagtagatctatacacttgatacgttcactttctcgtttttgacttttgatattatagagaacttgaattcttctgttgtttatgcaggaagagtttcaattggctttattcaagaacagaaa

SEQ ID NO: 90322 - DNA, 521 bp, Eucalyptus grandis
  Intron number 1 from transcript Egrandis_v1_0.017912m (loc us Egrandis_v1_0.017912m.g) derived from phytozome v7.0 (c hr-ID scaffold_11; pos 15175454 to 15175974)
gctttcctcccctccatccctcgtcagatccaccggtgagttcacgttcgcctgtccgatctgacgggcacttgcgtttttcgttctcctgtttgtttgtttgtttttttttttttttttttctcgagtgaatcggcttgcgttatagagaaagagccagtcctttagattggaggcgaaagcagcgatcttgaactcgtttgcatattggtcagataatacccaccatggaagaaggagattgcgtctttttttttttttttttttgaggtcagtctttttgcttggacattgtagagaggtgatattggtgatgaattctggtttttttgcacggggattcattccagagaaatagggaagaaagaagaagaagaagaatttgtataatatagagctgttggacttgattccttggctttcagaaattcatgtcaatggttgctgatgctaagctagtgtagttctccattgcagcggattcatttccatgtaaatcgtctcgttgtgctgttgcagcg

SEQ ID NO: 90323 - DNA, 972 bp, Eucalyptus grandis
  Intron number 1 from transcript Egrandis_v1_0.013413m (loc us Egrandis_v1_0.008212m.g) derived from phytozome v7.0 (c hr-ID scaffold_6; pos 40393818 to 40394789 reverse strand)
cggcgagcgctccgccggcgaagaaatccaagaaggtaatttggacaccaaaagggaaggaaatatcgggggctgaatgtgggcgtgtgcctgtgtggatgggggcggcgtgggcgtagggtttgcctgctcggatccgatctgcgcggggtgtcttgcagtgcggatgctgctcgtttcgagcgatttcgatctgtttttgtcgagtttcgaggactgtcgaattcgattcgcgcgatttgtatgggtgttagtgagtttctgagttgtgattgattcgggactgcgcatgccctgcttcaatggagcctgatttagtttagttttctagtttgattcagatgggaatgttatgggaatgttagataaaactggggaagtcagtgagttgcatgcatttcttttgcagtcaggatgggttcttctcagctctaaagatcctgcctttttaaatagttcctgtgtcttataatccggcactatgtactcagattggtcaagttggcttcctcagtgcgttagaagttgtgcagttcttaactttgtattggtgtatctctaattggttttgatgcggtgtggctggatactagtatatggcgtggtcaaacggggggaaatgagagtggagtacctgaggagcgaggcatagctatttggtcagggatttaagatttcctctatctattaccttttgtaatgacaactgtgcatactatataagttccctaagcttcatcagttttttgggtatctccctaagcattaacagaaatgaaactatcgagcagaaaatatatactttggttagcatcaagagaagaatgattcatgactgcattgatgaaggattaccgtattgtctcatgctcaccattacacatttaacttgtcgatgtatgcgatgatcatcatggactttgtaatatgtctgcagttgatatcatatcagcgattgagtttgataaaacc

SEQ ID NO: 90324 - DNA, 556 bp, Eucalyptus grandis
  Intron number 2 from transcript Egrandis_v1_0.015279m (loc us Egrandis_v1_0.012568m.g) derived from phytozome v7.0 (c hr-ID scaffold_9; pos 5850551 to 5851106)
cgcatcgaggaggagctcaagaagctcgacgagaagtgagtcccgcccgtctcgcttttcttgttgaaaattcatagcttttgttgcccatttttgttccagaattcttgagatttgggtttttctcacgacgcgtcgtgattcgagtgcggtattgttctagtgatggagaatgtgtttcgtatggttctcgtgcaataataaatctgtggagatcgatggagcaagagaagagtcattgctcttttaatttccattgttgggctttgaatctgctgctgggatacttgcttgaatgtggaccttttcagggaatgttgagattgataatgctagatagattttatgactgatagagtgatttgcttagaccatgttttggcacatggtggtgtttggtcacgtggtggctggtaatgcagcatgcgtaataattccgtcgagcgatggtctaacggcttgatcttgtggtcctttagactgaattaatcccctaatcatgcgttctgttgttagtttgatgggttgccatggttgcctttgcctaggataactg

SEQ ID NO: 90325 - DNA, 641 bp, Eucalyptus grandis
  Intron number 1 from transcript Egrandis_v1_0.054384m (loc us Egrandis_v1_0.054384m.g) derived from phytozome v7.0 (c hr-ID scaffold_4; pos 13883486 to 13884126)
acaacgtcaccaacaacgtcgatcagttcaatcaggttcggaatcggaaagttcatcttttgcatgcctacgatcggcatctttcagttgaacaaaacatttgcattgcatttcgattgttcccatgaaagcagagtgcatgatgcttctggacgcgttgacttcgcttacttcatggaaactttccatagttttcgacatggtaaaccatgagaatcctcatctccgcttgatgacgtgcccaacaatgcggatcggtttgatcaagttgctctttgaggataattcatcctggtttagctgcactttttgtaattcatcatagcacttatttacgttatatcatggtgctgattatgtttttgtgttcttgttctgcaagaatgtgttcccccccccccttcttttcagtcttgaattcttgaactttatgtttcctgtatgagctcccagaagcatttgattttaggtatcatccttggacagcagcaagcaattcatgtcgcattaatattgagtaggattttatgatgcaggtcgtgacgaaatactaattcttgtcttcttgtcccgacagtagcttaaagttttggttttgttttctaggttttgaggaatctgatagacagtttgagagaggg

SEQ ID NO: 90326 - DNA, 588 bp, Eucalyptus grandis
  Intron number 2 from transcript Egrandis_v1_0.023331m (loc us Egrandis_v1_0.023331m.g) derived from phytozome v7.0 (c hr-ID scaffold_9; pos 13939402 to 13939989 reverse strand)
caagtcgaagtgtggtttcaaaacaggagagccaggtaacagatcattcatagcacccgcaaacgaagtacaaattttaatataggccataatagatagattcctcatgcattttccaatatattcaagtcaatataggccataacttatactttcctccgagatactacttttgctccaagcgcaagttacgagtacggcacggcaaattgcgttcacgtaaattcatacccctaaatgattcaaaatttcctttacactctttatccattttttgcggtggtgattttatttaatatttaaaaaccataaaatactttttttttaataaaaatcagtggtttaaccttttgataactgcacaagatacaaataatacacggtttcttcataactttcacgtacgcaaacctacaaaatctggaacacttcttcgatcgtgaaatatgtaatcttcatttgctcagtaatatagtgattttttttttttattggggtgttcgttttgatgtgatcgagatgttcatcaatgtattcttggtctcttcctcaggacgaagctcaagcagaccgaagtggactgtgagt

SEQ ID NO: 90327 - DNA, 857 bp, Eucalyptus grandis
  Intron number 4 from transcript Egrandis_v1_0.027764m (loc us Egrandis_v1_0.027736m.g) derived from phytozome v7.0 (c hr-ID scaffold_9; pos 34879287 to 34880143 reverse strand)
atcctcggtgagttctgaaagcacatcaggtcatgttcatgtagttaagcgatgctagatagttcactgctgctttctatgtatgatttaatatgaatatgacatcatacaaaagacagcagcattttcagagaaattttagctggaaagataggggtgtgtcatgtcctggaacctttctgctggtcgttgttggtgccaattgtcgtcatgcttaccttgtataacagccggggtcaatttaggatcacctcttttcctggaatgcaatgggagctggtttatgaatatgatcatatgatatagaactatctgttgatatgtccagtacttttaggacagaaaactaacagggaacttttctgctgggacacagaaatgatttttaactgaaaattgctgaacatagagattttctgctagattgttcaaaggattacttgttatgaatctttcaagcatgttattggcccttcgtagacttcctgctgtcttcttttggcaccgtcagatccgtaaggtacttaagaatagattacatgcattttcttgcatatttggtcggttgaagcaatgtggggttggtcggcaacatggatacttcaagaactggaaaccatgtgcagtgtcatatgattctcagttttggttacacactttattgatatccatatgtttgtagagagcacctgagacatagttttatttcttcccttgcattggttttcttggagtatcattgttgcagactcaaaaggttttgttaagtatttatatatcacttctttgtgagttttctctttttctcttgagtaataaggaagtgtttggacagggaaactttcgtcaacactttt

SEQ ID NO: 90328 - DNA, 816 bp, Eucalyptus grandis
  Intron number 3 from transcript Egrandis_v1_0.004654m (loc us Egrandis_v1_0.004654m.g) derived from phytozome v7.0 (c hr-ID scaffold_6; pos 52453395 to 52454210 reverse strand)
aggttctctctctctctctctctctctcttctcttgcgtatgcacacatgttctctcatacaatgatagtttttaagcatatttgattccctcttctatcgaaggggtcttgaagcaactgaaagaaaattttctgatgtgcattagacaaccttttttttttaactgaaccaacatgtagttgtttgtaggtgataccagaaggataaatgtgggagttgtcatgtataaaggttggatagagctataatttctttattgcgattatagtaatgcgatgatgatgttgtcgtgtatatgagcttgttggttattaaggtcataattaatgcacatgaattttcttctcaacttcttgttgtttcacccatgtgagctgcacctcgcttttatttctaaataactagttttatgattcttctcctgtgtgaaatgattttcatctgattgatatcattacagactctaaatgcacagtaaatgaaactaacctaaaaagctacgcccgtcaggcctaaattaaaatttaatgttcattgtctaaaacccttgaagacagaatggattttatgatcacttctttttctcatccaacattatcgtatctgcatgtgaggtgcatgtgacaaatgctcttctaatttctcattgaagtcctgatggcaatattaatcatgtattgggattccaacatcatgagaggactcaacagttttttttttcttctcttatataataatcatcagaaagtgcttcactagctttttgaatgtttttgtagacggaggtaacgactgtcatttgtggcaaaaaaga

SEQ ID NO: 90329 - DNA, 860 bp, Eucalyptus grandis
  Intron number 2 from transcript Egrandis_v1_0.022402m (loc us Egrandis_v1_0.022402m.g) derived from phytozome v7.0 (c hr-ID scaffold_6; pos 20814404 to 20815263 reverse strand)
gacgtggcttttcttgtcgtcggcgatccttttgggtacggagattctgggttccggctgttttcggttttcgcccctgcccttgttcgaaaattcgaatctggttattctattcagttttgtggattacacccggcttggttatttacgttttgatgttaccttagcttgctttcttccgaattgtagatggcggcggtgaagagttaaacttttgttgcttgagtcgagttttaagtactaatcaccactattttgtgtcattggatatttatctgccgtaggtaactgagcgtcaattgagtgttttttttttcttgtatcaacagtgattagagtaactgcttcgacgtaattgtaccaggctgtatgcattagtatgagagtaagtgctcaaattgatgttcttctccactttatatatcttgggaattatagcgaattgcttttctatcacgggtcacattaacgattgccctaaggatacttgttaagagtacttaataaaaaataaaaataaataatttctaatttcaaagcattggttaacacatgtcatgggagatgtcagtgcatcaacaacccagaacttttcataatcggtcctttaataagtccctgagatcactttttgacgaattcttccttcgttattaataatgaatgtgttttaagctgaaatgtcgagttcttgagcttgatggggacttaattgacagacatagtgtgatcgtatttgcaacctctgtaagctaattccatactaatgtttcatagcaatcaatgggacactcacctcttatttatgtgttacttaaactacagggctacgacgcacactgatcttgttgttcgagcaa

SEQ ID NO: 90330 - DNA, 956 bp, Eucalyptus grandis
  Intron number 1 from transcript Egrandis_v1_0.026644m (loc us Egrandis_v1_0.026644m.g) derived from phytozome v7.0 (c hr-ID scaffold_11; pos 35954762 to 35955717 reverse strand )
cttctctgccgtccacgcttctgggctttattgtacttactttgctgaactcgattttctgccttctgggtttccttcccatgttctgaaaaacaggaggaaggaaaaagaaaggaaaaagccagagacttctgggtttactttggttccatttatttttgcttcttcaagtgggtttactttgtttttgtagtttagtagtttggtgaagctagagctcttgcgatttgtctggatgcattcaatttccagatagcgagctccttcaagatggcgaatctagaactttttttttttttttttttttgctttgggttgcaatgttgagaaagattggattagtggagatatttcttcaataggatgatttttaccgttttaggataaggaacgtgttctcgattggcctgctcaactgttggttttgagtccagttggcttggtctaattagtgctcttgtatgctttaactttgcattaattgccgttgattggaagtctaatagtaattctttctcatgggtacttgagagtctttaaaaggtttctgggtacctgtttatctcattcttgtaaagcaaggtcgttattgactatgattagtccttgtaaagcaaggtctttatctgaggttgttggaattcttgaaagctcctaaaattactaggttaggcaccctctttaaaatcttgttccgaatcatgggttacggatgaaaaacatgagaatgtatcttatgataaagcatcaatgaggaatcaatttgcccctcatttgctctaaatacagcagtcctgttccaagttatgatttctccttatcccatccttcaccatcctgatgaattcttttgttttgttgatacattggtgtttgccatctatacttcattcgtataacattcttttcttgtttttctgttcatctttttgtgacagataatcacatagtattcg

SEQ ID NO: 90331 - DNA, 574 bp, Eucalyptus grandis
  Intron number 1 from transcript Egrandis_v1_0.046551m (loc us Egrandis_v1_0.046551m.g) derived from phytozome v7.0 (c hr-ID scaffold_11; pos 19312304 to 19312877 reverse strand )
gcgggaccctagtacaaggagtagttggagtcaaagtgagtgtgactcaactccataccactctttccctccttctccttctcctctggggtttgctccatgactggcaattcaacgctacaccaacaccctggccttttaccttcaataacgagtttagcttctatgtttctcttcctaaactctatatgttccttttcactttcattcgtatgatctttctttactaatttcctttgattttttttgagatatatagctcttcctttatgcaatgactgctatcttctacatttgtcatcaaattgaaaactagtaactgaaataaaattcaaggcgtcaccttctaatatatcgaattaatggtgaatgaatgtttgagtttattaagaaagttctattgttcgaacgacaattgaaatccaacataaaagtcgtccttagaagacattgataagatcagtcgcacatgcgtgcacatcaatccttatttatgcaagagaatcaaagtcgtcggcactttcattctcggcctgcgtctttcaaatttgtttctctggtttcagaggaggat

SEQ ID NO: 90332 - DNA, 1030 bp, Eucalyptus grandis
  Intron number 1 from transcript Egrandis_v1_0.010771m (loc us Egrandis_v1_0.010790m.g) derived from phytozome v7.0 (c hr-ID scaffold_9; pos 7810144 to 7811173)
aagctcgtctccttcccttccagtttctcccgcaggtaagtcaagtccgttccttttgctgcttgttttcgctgggggcgtttcgagtttttctgcttctgggtttgtgcagaaacgcaatcaccttctgttctgtagcgaagtggatgtgatccttgtgttgtatgattgtgggtttgttggcgtgattttctctcctatcttaaggaaggagatttgttaatattgtaatcctataattctgggatctcttcctttttctgtcttttgttctggttgtttgtttccttagttgtagcaaccttctttgtacatatggttgaacaatggcagatgctccacacaacaaaaataactaaaaaaagagaacgaaggctttgtccgaggacgtaggcacattgccgaacctcataacctttgtgtctttgtgtgatttttgattttcttcagagttggtactggatctccttctgcgaatatgagaatacgttgactgcttgagaaagttgaattttttttaatgggaattgtattgcgtagtccccagcagagatgtccagatgtgtggctctggattttcaaattgctggggcagatgggttaaatcattcgcgtattggttagcttggtgttggccacaatgacaattaaatcgtggcagggggagatggaaatggttgatatcagggtagtcatcgcttatccatagttgatcaccgtgatcttgctagtaaaagaaaagatgaagggggagtttgtaagaaaagagagagtagatgataatcattaatgtttgttaaccaaaagttgcatgaccagcacttaaccggtgtcaatatgatggtgatgtatgatatgtattttgtcgcggtttgcaaaagaaaggctctctattgctgtttaagcagtgcattgactcttgaaaactttcgtcttgccatatttcagtcgggggttgttggatttcactgctgacgatccttgtcacttgccagatctgtagataatacgaaggaattgcagttgccta

SEQ ID NO: 90333 - DNA, 804 bp, Eucalyptus grandis
  Intron number 3 from transcript Egrandis_v1_0.005252m (loc us Egrandis_v1_0.005252m.g) derived from phytozome v7.0 (c hr-ID scaffold_11; pos 42242749 to 42243552 reverse strand )
caggacagcagaaaatttccgatcactctgcacaggttcgtttgatcttaaagtttgtcatgattcaaaagtattaatgctggtatggcgtaatttgtatatgcgatgctgctcgtcattttttccctacggaaattggttagagtttccttgcattagcattaatggtgtgcattcttcttccatgcgataggcttatgttataagggaaagtctgcttaggtcacccaattctgtccattggacgaattacttctttagtcagagttcgaaagtgaactagatttctcatcactggtaattgattttgaatgaattttatgatggctctgtccatgattgagatggatttgatgtggataccatgttgcataatctctgttattaaagttttcatttaggtgaataatagatctctaggtttctaaattctccccattgcttttaacaaaggtttggcacttattgtgagtcttggtttgttggtccaggaaaatatatctaaaagacatgacatataatgtttagatgcaaaagagcatgaaaactagaagctctgatttttcttaatttttttaccaaggttcttggaagtcttgacatcaattgacaagctctatgatgctttgctctttcttttcttgctcacttccactctaatatgagtgtaactaaatgaacactcttttcattctgttggtgttgagtaagcagtatgggttgcattggcattttatagattgttgatggtattttctattcaatttaggagagaaaggagtggggaaaactactggcaagcct

SEQ ID NO: 90334 - DNA, 661 bp, Eucalyptus grandis
  Intron number 1 from transcript Egrandis_v1_0.005252m (loc us Egrandis_v1_0.005252m.g) derived from phytozome v7.0 (c hr-ID scaffold_11; pos 42243779 to 42244439 reverse strand )
tctctctctctaaactccaagttctaaacttgaaggtagtttccgctcttcaacttcccattctcgatcctcgttcttcatccccctctcagattaatttagatgtcacgatttcaataatttacttctcttctgtttcttctcttgtggttatgcactttcgattcgtgaagttccggtagtttcaacgaatgtgcacgttgccatgacttggaatccaaggagtggagtgattagggttttgggtttcgtgggttgtgatgtatgcacttgcaggttggcgaaagatacgatttttttttttttggacgaccttgtgcttccactgcgtgacaattcaaagtcgaaacctttgcggtgaatcttgtgggtttctgtagagacaaagacgagtttttatatgggttgtttatagacttgatgtccattttgtgttttgagctcttggatgacacgttgtgatctttcccgttagagattggtgtgacaattttttctgtgaaagcagtttcatccgtaaagacttcgcatgcctgtgtttatgctttatgccattctcttacttataccttggactgcaagtgtccattatcaatgaccattgacctcactatcttttcctcctttgtattctccttcagcattcttgaagtcgcgggag

SEQ ID NO: 90335 - DNA, 816 bp, Eucalyptus grandis
  Intron number 1 from transcript Egrandis_v1_0.000585m (loc us Egrandis_v1_0.000585m.g) derived from phytozome v7.0 (c hr-ID scaffold_9; pos 33860509 to 33861324 reverse strand)
actacagcgtctttgtggctcgcttggccatcgtcagtaaaagttttaactacatggtctgtttaatggtgtgatgaattagtgatcatgtgctttgacaaaaaagcgactgattttcggtgaaatgagcgactgtctaatatgatattactcattgtccgtgtgatatgtgttgccattatagtgagtcatagtaagtaaaagtagaatttataataagcatgatcattcggttggtaaaatcaacgagcataacaaggagttccagaaaatgtccatttctcagctacctgaactgtgtaagtcctctgttgcctcgattctgttttttgtgccatgacaaaagttcttccgaagcacatggatcggtcaaagttggcatcggtatgcaaaattcattaattggcatgctgcttgttttgtatcaactagctgatcatgcgaatgaacttaggccatacacgttgggaaatgatggctgcattaagatctttgaccatttgatttgaatgaacagagaatataattgatattattatatcatttacttcccggaactgaaaaattgcctgagatcttgtgttccacttttgcgagcttggagataaggattccaaggtgaaattgtagttgacaatagtaattcctctgttctcagtccatttctgagattctttatgtatcgtttcttctgccttgatcagcagcgacttctagtcttgttagagagtctcgtgttttgcttcgaatgtgaacagagagaaaatgcgtgtgttcagctatcaattaaagcggactgtcacattctcgcaggtt

SEQ ID NO: 90336 - DNA, 618 bp, Eucalyptus grandis
  Intron number 1 from transcript Egrandis_v1_0.020176m (loc us Egrandis_v1_0.020176m.g) derived from phytozome v7.0 (c hr-ID scaffold_4; pos 33414723 to 33415340 reverse strand)
gcccttgctctctcctcgccatctgtaacatatctctctctctctctcgtcctctttaattgcgggtctccaggggttcgccgttctttggcttcccaatcgatgctttcatctttgctagcataaacagaatacttggatcaatgtattataagtcataaattctgagaaaagaaggggggtttgataaccattcataattatttatgatttgattttttattcttcataataaactattattcttaccgtgtattaaaaattcacacgtgattattattattatttttttgttttatatattttgtttgcttgattgtgggactggtgttttcattggggatgaaatcgaattcgattgctttccgtttttagttgctgcgatcccaacgtggcgatcatggattctgtaactgggtcgggttgagaaatcggcgagggggagtttggtgtggttcgcgttcgcttcatgacaatacaagaagttctcttagctcgtgcgattttattgggtgcgtcggtgatgtgtgaagagtttattcgtgggtgacggcaagtcggggaatgttgggatcatgtgcaggtaattatcttatattgcaaggcatcagggagctg

SEQ ID NO: 90337 - DNA, 643 bp, Eucalyptus grandis
  Intron number 2 from transcript Egrandis_v1_0.028474m (loc us Egrandis_v1_0.027867m.g) derived from phytozome v7.0 (c hr-ID scaffold_9; pos 27775791 to 27776433)
gctcggagaaatcgtcaccacgatccccactattggtgagttctcgactgcccgacatggtttccaatcgaataaagttgtcttttttatttatatctgcaatactacaagatctacgtgtcagatttataaatggatcgtgatgcaggaggatatactattgtcatttttcatcgttttttatgatctagaattagttgcgaagaagaattggcacctcataggtgcggtagaatgagctaccagcctgtttgtgccaaaattatttgactatgatattatatcaggatttctatgcatcgatatggtctatttcaattgataggttgtattgagtgaatttaagggatagcacattgaagagataccatttgaacacatttagattttctaactggtaggtgaggaaagagttaccggctgagatttgttgtactcgaaactaaatctagtcataagagcagataggatgttcgggtcgtttgggtatccgcccctttccattgagtgttttaacttgtggccttaactctgaaatcttggtttgtggactcttctcattaacccaaggtaaacatgcaacatcttttgacttttttatcactgtgattgatatagcttccttctttctctgtaggattta

SEQ ID NO: 90338 - DNA, 887 bp, Eucalyptus grandis
  Intron number 2 from transcript Egrandis_v1_0.021783m (loc us Egrandis_v1_0.016648m.g) derived from phytozome v7.0 (c hr-ID scaffold_4; pos 36530686 to 36531572 reverse strand)
agctagctgtgtttcgcgaggttggcacgaatttggtatgctgatgaaaatcgagaataaagctagtttcttttgatgttattatgtctaattctctccatctgtttagttatctttcatgcatggaagagtgtgtttagctctccttgatgggatatatgtacattattgtctctcttttatgtatggaagaggatgctaaagtagttctttttggtgtgattggattgtacccactatagcaatagtacctagctgatgaagttacgtggatcggcaagttcattctgataataaagttctatgcaactcattggaaatgggttttctatccattgtgcttggttgatgaagtgtggacattcaattgaattacattttaaggagagttgctttaccatagatggcttttattgctttgtgctgctgtagtgcattgtgaatttgcatgaaatacgatgtgctctggcaaattttgagcatatgctagtgatgtttgtaatgcaaagcggttcatttagaagaggcagatttttattttggcataggcattcaggaaataatacaattaatttgacagagagcttggaactaagttttaagatattgctctgtttatctaatctttctagatatgtagtgacatgattatattccatttttctaattaataattggaaagacctggtagattatcggcatctttttctatgaagcaactgttcatcaattaatttgtcattaatcaattcaacacattttgttgtgttgcagtaacaattatgctggatctttgacttcatttttggatgttaaatcagttcacggatctcgatcatattgtcaattgaatgattttggtttttggctttgtgcagtgatctcca

SEQ ID NO: 90339 - DNA, 764 bp, Eucalyptus grandis
  Intron number 1 from transcript Egrandis_v1_0.021783m (loc us Egrandis_v1_0.016648m.g) derived from phytozome v7.0 (c hr-ID scaffold_4; pos 36531685 to 36532448 reverse strand)
agggtccggcgcatcggcgacggaaggtgggaattccggcgccccctctttttctctgtccgtccgcgtcggtttctgcactcttttgctttgttcagtcggtgcatcgctcgctgaattccgattgggattcgtccctccgcgggctccgaatcggtggtggttttgccccgtcttcgaattgccgttctctctctctctctctctctctctctcgctccgtctctcgctcgctcgttgcttgattgggttcttgaatgtcggtcggggtcgatccccgtctttcggtttttcgattttgtgggattttgcgtgttgtggaattgggagagaaaaaaaggatgaatttttggtcgtttctttaatgcgattgaatttctcccccgcggagtgaattagattctcgcgcatctgtgcgtgagggcattttgtgaatgatcggaaattcgggaacgagaaagggagcacggcctagtgtttgtggtgtaacaaaattacgaacttatgggggaattttttgttcggtttcgactccaattttctagattttcttttacgtacagaggtgtgaactctaaattttttagttttactgtactatgttgaattataaaagtaactataaatgttgtgccttgatgcgttcggtgatctaaatgtcctttttttttttataaaaaaaataaaaattctaagggtgatttgattgtggttgattatgatgcttaggtaggttttgaggttcgagaaggcatctatctgga

SEQ ID NO: 90340 - DNA, 778 bp, Eucalyptus grandis
  Intron number 2 from transcript Egrandis_v1_0.004974m (loc us Egrandis_v1_0.004974m.g) derived from phytozome v7.0 (c hr-ID scaffold_9; pos 13359870 to 13360647)
gaggcgcggcagaagcagcagctccagtccatcaggtattgtaacgtggaagaagcttgaagaagatgacgtacatacctacatacatatatatgcagaaaatcctttggaattgcaggaggcagggagatggggccccacataatttcagggatttgcaggaactatcggataaaattaaaatgcattaacttcggatataaatatcaccttagcaaataaggaaaaaaattcaaattttagtatattaaaatgaagttttcaaggagcaatttatttatttatttatatattatgtgttaggggcactttctgaaaaaaattgaattataatttaccgaatatagggaatttcccctttgttcgtttcctcaaacgcgtgggtcccgccccctgtttcgaagcgcgtgccacttagggggtggatagcagcagcttttatctgcgctcgaccggtcccttagaatccgatggtagggcacatttttcctgggaggaaaataaaaacattttcgcgatgcataatacaaatttacgatttaaaagaaaagagacaagccgaaattacaaactttatttttttagcaaaaaagaaaagaaaagaaaaatccccaaggcgtgttcagtggatcttagtcgcgtgttattattattattatcttttaaatttcacgttctgataaattcgacttttcctaataattttttttttgttgggtttttgtgtgaatttggaattatagtgcatcgttggcgtcgctgacgagggagacggggc

SEQ ID NO: 90341 - DNA, 741 bp, Eucalyptus grandis
  Intron number 1 from transcript Egrandis_v1_0.028790m (loc us Egrandis_v1_0.028790m.g) derived from phytozome v7.0 (c hr-ID scaffold_9; pos 27426374 to 27427114)
ttcagagagtgtctggaggaagaaaagaagaaaaggtaaatatagtactgtttgttcacgtgtgttcacgagaatgaagttgagtctgtgtgtagtatgtctggaaagaaaaacctctctgatgtcttaaatttgtatggatctttagcttcttctttttgttacataacagtgcacggccataggtctgatgcaggattttgccatagggaatatagactcatcatcatcatcatcatcatcgagagagagagagagagagagagagctttgttttcaagtctatgcacgtttcagggagtatcgcgttctttgtaaactttgattaaagagagctcttgatctggaagactaaaaggatctaaccctagctaggatcgagttcaagaaagcaatcatatgttaagacacgagtctgaactgggggaggatatatatgctctttggcagcaactaagaatacttaacttcatgctgccgtgaaagccctagaatattatttaatcagatcactgattagtttcacagtaaattaggactcatcttgcactgactgaaccagctaaatttatatttctcggactcttgttttcccggggaaaagttccaaaagaagaaatcggatgttgtgacattctgtttttttctactttttaattctctgtggattttaccaatgatttgctcaattaataacattaatcatatcctttgactcaattttgtttgcacgcggtttag

SEQ ID NO: 90342 - DNA, 938 bp, Eucalyptus grandis
  Intron number 2 from transcript Egrandis_v1_0.015480m (loc us Egrandis_v1_0.015480m.g) derived from phytozome v7.0 (c hr-ID scaffold_11; pos 11358203 to 11359140)
cacattgctcaggtcttgttttccccccttgaattcccttgacttaagtctgactatgttgatgcgttgcatttggcccatgatagttttatagcgcgctcttgtatagtttgacgttatcactcatggcattggcaatgtctacacacctatcatcggcaaattactgctctaaaaattttgattcatagacgtagcatcaagaattctcatctctcgctctgtacctgccttttatttggaaactatgtgcaattgaggtattttatagcttgcgtctgggcgaagtggcctaatttttgcctcctagttgtttggtcaaagacagaacggtcctgtatcacacaacattgcaattttagtttgtcatccatggagtagcagtcggaaatgtccagacactgtgatgacaggttgcaatgcctgttctgcaccataaatctaaagatgcttggttttgtaattcggcgaatagtagagatgaaaataaacttgatgcaagtcgaggctgatgaaatgtactttgctgtctgtttagtcagtgacatcaagtcatatgtgcttcaattcagaataagcttgcatattgccattccatggtgcataagtcgatttgtttgcctagtgttgcttgttgtgtgcttcatccaatctctgtctgttttattgtagctgtgcttaactattctttccctagtttttcagagagaaaagagatcttgatgtgaaggacttatctgctggctcattgagaggactgatttaagttttggagacattttgctatatagtgctctgttttctgctgctttgcgtatacttctgaagaaagctcagtttttcaattttaagctggagtttactactgaaattttgttgagactggcttttatcagtttcggagtttatatttacattttcctttggagcagggagtc

SEQ ID NO: 90343 - DNA, 676 bp, Eucalyptus grandis
  Intron number 2 from transcript Egrandis_v1_0.018328m (loc us Egrandis_v1_0.016944m.g) derived from phytozome v7.0 (c hr-ID scaffold_6; pos 40775726 to 40776401 reverse strand)
gcgcagaatctcatcaaggctgggtaggggaacttttttgtcttttttacttgatattattctttccctttgctcttttcacttgttggactagtagctgggtttttagtttcattatagcaaaatgtgtttagacttaagagtgactctgtttagatgctgaagccctgcataagccatcatctgtcagtgacaaactgaagcgactagtataatccacaatctgattttctgctttcgttttagatgtgatctgactgtctggaacagaaccaagagcaaatgtgatcctcttgtaagcctgggtgcacagtaagtcgttgctttcggaccattctacctataagcatgttcacaagtgaactgtgtgatgcattttgtctctggaattgagttaacaatgtgattttttgtttctggacatttgattcttaattctgtaagaagatcatctttttgacagtgcactggtattgggaaatttatatctctgcaaatctgctgcttagtattttccaaatggatcatcccaactacaatgggtcaaaggcactggttgcctctatgttcaactgattgggatgcaaaagtcatgtcagggaagatcaaatatgagaattccttgttggcccttattgcagatataaatcctctcctgaagaagtcgccacagctt

SEQ ID NO: 90344 - DNA, 953 bp, Eucalyptus grandis
  Intron number 1 from transcript Egrandis_v1_0.015720m (loc us Egrandis_v1_0.015720m.g) derived from phytozome v7.0 (c hr-ID scaffold_11; pos 6620590 to 6621542 reverse strand)
agcacgaacaaagaggcattctcaattcgattcaggtactccccccttttgcttcttcgtcttcgtcctggtcgaaagcctccgtcttttgcccgttgtggtcacgctcgctcgctttcgttttctgggtgttattgctctgtgctcccgtctgattcgtttgaagtgtcaaaggaggcggcttttgcttcttcttgcggataagtcgctggatctggtcggccgtggtgtttcctgggccttttcgggatttgggtcggtgggtttttggcgaatcgagtcgaggtgggtgtagatctggagtttcgggtggtgggtgtcgggaaatgccgaggatctgagagtcttttgagcggagtgagttcttggtcgtttcccgcgtggggttctgttgaatgtgccgactttctgttggatctggagagggtgctggttctagtgagatggaatctgtgagatctgagtgttttattctctgttttgtcttatcttgtccggtcttctgtttgtctacttgctcggaggagtgaaggattttttttttttgagttttcgaatggagtaatttgttgagggaagttgccgagttgaacgtgtgcgtgtcaatatgtgggcattgttgatacttacgacacagaagatgagtgttttgtgaagtactatcagatcgagactagcccataatttttttcattccatagaaaggaagtccaaagggttaggactttttgtagatccttgcttaacttaacctcttggatttggcttgaacattgttaaagagaatcggcaacttcatttaaaatttttgatctttatgtatatatagttgatgtttttctttacttcaaattggttgagcttcttgaaagttagtttgttgcaagtttgcattttgagtagtttctttgattgatctggtgtatgattctgttgtaatgcagtttgaaaga

SEQ ID NO: 90345 - DNA, 610 bp, Eucalyptus grandis
  Intron number 1 from transcript Egrandis_v1_0.012147m (loc us Egrandis_v1_0.012147m.g) derived from phytozome v7.0 (c hr-ID scaffold_9; pos 30743325 to 30743934)
cagtccctgttgtgcctcttgtccagcgtaagtgctcgatccagttacggttgactagattattctaatcgccacgaactaatcacttcctctattcaaaacatgagaaactacttacgatcgaccttgtttatcatgtgattatactcaagatgagccctggccaatgaattttctcgtctgcagaatttagttttacgtcgatttgaccgattgcttgcagtgtctgagtcgtgggcagagaaatgcgctaagtcaatatgagctgttcttagaatgaccttttcttatttttaatggaagtttaagagcagaagatcgtatgcccacgactccctttctcctaattattgctctaaaaacgacgcaagagcgaacaaaacaaggacttattatattttcgggaatgtcataataaatttttcgactataccttaggaaaaatatttgcctagatagtgatgagtgtattcatatcgatcataacttatatatacaaaattctctagtaaggttgacttttaagttgtaatttcatctttgatcttaccgcgttttatgtgtaaaatcattaggtagaccaaccggaggacatatctctccggtacac

SEQ ID NO: 90346 - DNA, 863 bp, Eucalyptus grandis
  Intron number 1 from transcript Egrandis_v1_0.043342m (loc us Egrandis_v1_0.043342m.g) derived from phytozome v7.0 (c hr-ID scaffold_731; pos 8132 to 8994 reverse strand)
gggtaggcagctaaagatcttaatcatgttatgatatcctcacgaaagagatagttgggcgtggtattaaaaggatgggctctattacttgaattacttcaattctgagagggtgcaccaagtgcgaggcttatctaatagtaaggagaagcatatctggctatggcatcgccgattaaggcattcttcatttggctatatgagacatttagttcttgaattattttctagtttactagattcagtttttcaatatcaaacttgtattttggctaaaagccatcgtgtgccatttctaatcagtttgaataagaatactgttgcatcttgcttagtccattttgatgtttgggggccttctcccgttattgtagttttaggaagtctttggtttgttatatttgtgaatgactgcaccgaaatgacttagctctactttttgaaacatatggatgaggtggctaatgtttttcaagtgtttcataaaatggtgcaaacacagtttgatgggaagttacaaattttgagaagtgatcatggtggagcgtaaattaatgcgtaacttaagaaatattttcaagaacatggcctaccgcataagacgtcacattctcaaacaccacagccaaatagagtagtggagcaaaagaacaaacacgtcttagagatggctcgtgtccttctcaccaaaggtcgcgttcctaaatgcttctaggataatgcagttgcaacaactattcacctcctaaaccgaatgccatccaaggtattggatttcaagacacctttgcaagtgttgtctacacatgctaccttaccatttgtcttgtttattttccctaaggtgtttgggtgtgttgctt

SEQ ID NO: 90347 - DNA, 835 bp, Eucalyptus grandis
  Intron number 1 from transcript Egrandis_v1_0.052885m (loc us Egrandis_v1_0.052885m.g) derived from phytozome v7.0 (c hr-ID scaffold_2229; pos 3785 to 4619 reverse strand)
ctcaccgaaggcgatctcctcgcggtttttgcccagtaagtttgcatctattgcatcttctttgtggagtcaaagatcctcgatgaccttcagaacaagaaaaatgtagtaatttcacaaacggtgaccagtaagtggcttgaaacgaccaaattcaagtaaatggctcaagtgtaccacttcgcgaggtgtcatttcaattcactgatttgggaactccttcgacacgcgaagcttgattggaaaggactggacttttggacttgtgtaaccacattttgcccattcatctttatgttttttctgagcatctacacatatcacatacatattatagctcttacctgcattcttagctgatttcgaggctctgagatgtggaattctgacctgtgggtagggaaatcaccagctgctatgatgtttcaattctttgtattagttggcatagtcagtccaggctgcagagactgtggagtagagaaagttattagcattgggtgcatatctagaagcctaaggtctcgaatactttgattttccaaatattgcagtatgtatagttttttaagatttattcatatgtttgtggaattgatgtcttgctctttgtgaaatcaagcttttagtaaactgtgattgatatttgctcttcttcagctcctttatcaaggggtacagataaagctgtttcaatggggtctcttgcttcatcatctttttaatggatacatctgttaatttgaatcttcattgcggcttttgaaattgattttgacatttttttcattaaatagtatcctaatgggtttctgaaggtacggagagatcgttg

SEQ ID NO: 90348 - DNA, 920 bp, Eucalyptus grandis
  Intron number 2 from transcript Egrandis_v1_0.024071m (loc us Egrandis_v1_0.024071m.g) derived from phytozome v7.0 (c hr-ID scaffold_11; pos 958972 to 959891)
ccatcgagatccgcaacttcttgggcgagaagaaggtgagaaatgccccctttttaatttttttaataatttatttgaaagcgaagagatagtcgcggtgtgactggtagggttgattgtgaaatttcagtgaatctgacagcacgtagatagctttcttgtatcggatttcgatggtctgtggattgaagtattatactcactgggtactgagatttctagttcaaaagttggaatgagatttctgtctgtcgttaaactctagttcaaaagttggaatctagagactattcgaatgcatcgatgtaaattctgcatatgaacagcctcacgtagttaggagtcctagagataacttttgttctgttctgttcagacctgttctgttctgttctatttgttctcttgatgatggtttatgcagtaagtttgtttatgtgcagatgtttgtttttgcagtaagtttgtttgtgcagtaagtgtgcagtttattgtgctttcaatcgattgaggtcaaaaggttgcctttttgtctattagcgtctagtgatttctggactgatgtaatgaatgagtactgattcgttacaaactcacatcagtccagaaacagcagacaaaagctgatctcaatcgattgaaagcacaataaattgcaccacttactgcataaactgtgctatacagttgctatatatgcaactgtgtgctatacgtctatgatgaatggaggctgccggcccggtactttggctttccagttaggacttatattctgataataagtttttccgaaatcaaattatttgatgattttgcccactcctattgtttttttcactttacttatcttgtgggtctagatgaaattgaaaataatctttttctttgctcgttttactcaggtgaggaaggtggaa

SEQ ID NO: 90349 - DNA, 614 bp, Eucalyptus grandis
  Intron number 1 from transcript Egrandis_v1_0.015265m (loc us Egrandis_v1_0.015265m.g) derived from phytozome v7.0 (c hr-ID scaffold_6; pos 24481526 to 24482139)
aactcccattcttggacacccaacaccagcttcttgtaagtacacaacctctgtctctctctctctctctctctgtctctctgtctctctgtctctctctctcacgcacacacacacacacaaacacacgcagacacagacacagacacaaacaacttttgcttaatgacatatgtgccatcatgaagttggtacagcttaatcttcttggaatgtcttcctcttctctttttcccccctttatttgatgtaccaatcgagattttactggggaagtttttgatagtggggttcctacttccttggttagctagtgattctcggtgaaaagaaatgaactttactactatttctttggcattatgacacttctactccaaaacaagcagtaacactagcttcattgctgttccattttcactttccttggcataacaatacaatcttagataaaataattgggaatttcctggcatgctaactagtgctaatcattatttagcgcttaatgtactttgtttcgggatgcttatatgcgcaggaatactactggaaactacttgaactccaatattatagtagccaactctggagctgatccaactccgaaacat

SEQ ID NO: 90350 - DNA, 787 bp, Eucalyptus grandis
  Intron number 1 from transcript Egrandis_v1_0.026567m (loc us Egrandis_v1_0.026567m.g) derived from phytozome v7.0 (c hr-ID scaffold_6; pos 27296574 to 27297360)
gcttcgcagtgatctcgctctgaacgagttctaaggtagaactgtctctctctctctctctctatctctctctgtgttttgggcatgtttcgatctgtctgatgcttctttatagatcgttcctcggttttctttggttctccccgctcgaagcttttcgacccatgtccccatctgcgccaattacgaatgggatctgcgtggacgggttgtatgcctccgcgtgtgagatgggttggacgcgctcggtttcgatcgtgtcgtcttcgttttgtttttggttctttgaatgagtcgtcgatgtgctaatgacttgggtttttttttttttccttttttaaatttgagggtttgggttgtgtgtgtcatcgcggatgtattatgggttcttttagttgcttcctatctagagcttggttggattgtttttgccgtttactaattgtcgcgaaggtagaatctgtatggaatcttgcctctgggtttgtctcttctctcgtctggtttctgagttgtgaaaacaacagaagacattaagatgtttcgagtgtttttctgggaatacataaggtctttacagctccatccgtttggatttctgttgtgcaaaatatgtgccgctgtaaatccatgtttgtgagtgctactgtcgccaaattttgtaattgccaccctcaatggctgaattgggtttcactgtaaaatagtttcttctttaatttaggactctctagattctgttgccccatgtgctgttttcttgatatgttccatatgtaattgacag

SEQ ID NO: 90351 - DNA, 971 bp, Eucalyptus grandis
  Intron number 2 from transcript Egrandis_v1_0.026567m (loc us Egrandis_v1_0.026567m.g) derived from phytozome v7.0 (c hr-ID scaffold_6; pos 27297557 to 27298527)
gcgtcgatcttctggtaacctccatataagttccttggtttagctaagtttttcattagattaattgcatggtcatgttctgcaaccttgattggctgtgatgttatctctctctctctctccacagtgcacatgtattgatatgcgctgcacctttgtctaatgctttagagtgaatggctaatctgactgctaaacttgagtggttgcattatagcaactggacttgcactggataacattgcaggatgtagatgctccagcactctactgaaatgcattttagatttggttgataaaatagggacagaaacagacataattttttcctgcttatgacgccgtaatatatgatggatatatataatcttttgggttcaggcttaattagttgtgtgggtgaagtttgttttgtgctgatgcctctggtctttggattttaagaggtggaaattgaaaagagtgcacatttggtgtttcttggcgggttgcctgagaaaggggtcttggagtagctttcagtccttatgctcgcgccatatgggacaagggccctcccaatcattctttctcaaagacttctgtattgttggatggcttatttgtttgattttaacctgacgtaatctattggcatgaagaaccaacaatgggaattgagaagggtctttcgcagcattgattgttggaaatcgatttcccatggatgctacatttagacttttgagtagttttttctcttcatgaagtgttatatcacgcaggataggatgtagtatgttcatatgaacaaaaactacataaattgattgagcttgaaagttgacaatttcttcatgggtaccctctcatatttttcctgagtggcttctttctgtgtgcttcattcatgtggaagtgccattgccaattggttatctttcaattttcttgaaattgctaggtgaagggaccttctggtgatcagatcc

SEQ ID NO: 90352 - DNA, 659 bp, Eucalyptus grandis
  Intron number 2 from transcript Egrandis_v1_0.052677m (loc us Egrandis_v1_0.052677m.g) derived from phytozome v7.0 (c hr-ID scaffold_9; pos 21361534 to 21362192)
agataggtacgtcaagaatgcattatttgtcgcatgttgcaagaaattatacgagaggagtgtaataataattgcacaatactggacagatgatagaaatgagacaatttttctttgtcaataaacaaacaacgatcaaagtaagactgagagtagggaagagaaaattgaacacgaggtttatagtggttcggcttatttcaagcctacgtctactcttctgcattgacagcccactggctggattccactatgaacaaagagatattacagcactgttcttccttgatttctcggtgtagaatatctaccacactctctcaaggtatcactaagtataaactctttctgtgtgtacagtttcgcttaatatgaattgactagtaatcaaggagcttcagactctggaatttctctattgagcacttactagaataactgggacgttttctttttatactcctttatgccatcatactcgttggcacttaccaaaggaattcttccaatcttcccgttggacagaatcaattaagaatatcattcgagctatttaaaggaacatgttgatatcccatcaatcatgttcgcccatacaatcaggatcttggtttccaataatagaaccttccaagaatatttcgtcaatcatcggatct

SEQ ID NO: 90353 - DNA, 416 bp, Eucalyptus grandis
  Intron number 1 from transcript Egrandis_v1_0.034875m (loc us Egrandis_v1_0.034875m.g) derived from phytozome v7.0 (c hr-ID scaffold_9; pos 10064450 to 10064865 reverse strand)
aaaactttggagccagatcaattgtctcccatcatgtacaaactaaaattacatcaacttttttcagtaatatttggtggtttatttcacgcaaataggaccatcatcaaaactttccaggagcaactataaccataaaaagcatgtttcaaagagttcaaagagttaaattccaagaatccaagatccatagaagaacggcaaagcatatgatcaacttagtggtgaaatagatgataaagcacaggctgaaaagcattaagtttcaaataagacgaacttgcgaagactgaatagttgaatcttgctgctgtatctgcggcttctgagcctgctccagctgtgccagttgagcaagttgatttttgagctgcgcattctgctccttctcaatcttatgcttatctgccagcatt

SEQ ID NO: 90354 - DNA, 375 bp, Eucalyptus grandis
  Intron number 1 from transcript Egrandis_v1_0.035027m (loc us Egrandis_v1_0.033263m.g) derived from phytozome v7.0 (c hr-ID scaffold_9; pos 23854922 to 23855296 reverse strand)
ctggtctcggagaacctatcgccaagcagcagcaggttctctctccctctcgaaagcacgtcaagacaggaaaattacttctttgtgcacctactttttgttacaacaatttcaggttctaagaatttctaaaacacatgctgttctgatttctttagcttcgcataatcggaatttatataaactcatagatgcagggtccttttttgaaactctcgtttacgtaggcccgtagaatctgccaaggacctgatctttttatgtgtgtttgttgttagaatcaaactggaaatctcacctcttttaccttattctcaggtgtgttaattgacctaagttcaggacgatttctaattcttttcctttaaccgacag

SEQ ID NO: 90355 - DNA, 922 bp, Eucalyptus grandis
  Intron number 2 from transcript Egrandis_v1_0.031034m (loc us Egrandis_v1_0.031042m.g) derived from phytozome v7.0 (c hr-ID scaffold_9; pos 6096342 to 6097263)
ctgccgagctcaaaattggtggtaataaagcatttccatgaaacttaaagtgtgtattgacttaacatttctttcttgtgagattgattaaactattatctttggccagaactatgcagatgtcataggataaatgaatggaagattaaataggatgcaatacgtgcgaactatagttggactaaaaaggatgtaatcggatatgttcattgcatatttagatatcattctgagtagaaacgatctctaaccatttggaagtgaatccaacttattgtgagctagcattaggaatttattaaaggtgacaatagcatttgtatagaaattatcttgtccatctgtataaaggtggcgatttctgagcaaacctggaaaattcgaataatgtatgtggcgaatgaacttgaaattaatctctccattaattttgttgacgttcttaatcattcatttttagagaatcaaagaagcagcactagggtgattcgtttaatttttctctgtggtatctctttataatagtctttatttggtagattcattttccatttgtctttatttgattggatgcaactttcaaattgtcaatcagtactgatgaaaaatttaccaaccatcagtctttcgttcttgatttttcttcctttgacttgtagtgagcaatcgtttttccaatcttgagcatatccctcattaatcatgcctttctgttttgatgaacaaagctgcggatattgttgtttttggtagaattctgactactaagttaatggatggctttctcaagtgacgaatgggagaacatggcaattttagcagggctaatggattgcctattttccagtatatgttgcatgatgtccttttatcattgcttctgtttctcttatgtgcagaatttctgaaggcaaagtgttta

SEQ ID NO: 90356 - DNA, 680 bp, Eucalyptus grandis
  Intron number 2 from transcript Egrandis_v1_0.022021m (loc us Egrandis_v1_0.018413m.g) derived from phytozome v7.0 (c hr-ID scaffold_4; pos 32553521 to 32554200)
tggaagtgggcgaaagcaacgcttagcagcaactggtaaggtctttaaactcattctgttatgagttctttgtgcgttcttgtttttatttttcatatggttggtttttgtatggttaatgcagctattctagctgcttataggaagattcaatgttcattgattttaaagagaatttataattgcaatatgcaacgatgatgactaggtaggtttcattgttgtagtgggcttgaattaattagaaagatgtaggttgatcttgttattgggtagaaagaagtcactggtgcctgatagttaatctgagcaatgcattgttggcgtgctaaatttggtagtgccaacaaaataacattttggcgtggattcttatttgtcattttgacatttcaccaacttaaagctcatgattcctttgacttatgtcttgttcatggctgaatagatcaacaaacgtgctagaatagctaccgacatgcagtagtctgatcaagttaaagttggtaattcttcgattgatgatttgtcacttgtatgtcatgtgtaatgatgcggcttgtcgctttgacaacatcttggtcaacttgtacatatttcttctccgttgtacacattgtaattgaattatggggtcatttaagcacattaaaatggtaaaattgttctttgctaggtga

SEQ ID NO: 90357 - DNA, 441 bp, Eucalyptus grandis
  Intron number 2 from transcript Egrandis_v1_0.026284m (loc us Egrandis_v1_0.026284m.g) derived from phytozome v7.0 (c hr-ID scaffold_9; pos 23652283 to 23652723)
tccaccggcgcgtttaatcccgacagagtggccgtgtaagtttggtgtagaaatttcgggttttttgagctcgtgcctcgtttttcttatatggttcattgagtttaggtttgatttttcgttgaattcctttggttttgccgtggaaagcgaaaatgtccggtctttttttgtttttccttttacttcgcgaccattttcatttcaacttggcgaacgagtttcccttatcggcttatgcggaaatagataagcaaatattgatcttggtgcagattatagaaatgattggttttcgtattttattatcttcagtgaagaatgcattgacctgggatatacatgttcgtcaatcaagttctctttagtgatttgaatgttagtgctggactgagacgggaccctaaattctggctcgtgtcgacttggcaggtattgcaa

SEQ ID NO: 90358 - DNA, 517 bp, Eucalyptus grandis
  Intron number 3 from transcript Egrandis_v1_0.026346m (loc us Egrandis_v1_0.026346m.g) derived from phytozome v7.0 (c hr-ID scaffold_6; pos 3356925 to 3357441 reverse strand)
aacaatcagaggttgcagagaggcttagaataagggtagccttcttgtgaaattcttttgatcttagcatcgatagatgacattcagggtgaaaaatcttctcataaccttggctgctcaatgtaaaaatggtcattctttcctcatttagtccaattaagtggaagatgttaactagatttatccatttggataattgacattgtttctcattctcaataggatgcagatatgtaagcttcggctgttgtacaatagttttgattaagactagtctgcattttctggtcttaattgaggtggagcaagtgctaaagttagctctaagttaagtatacattacaggatctagcctttttttttttcagaattaatttaataattttccaatgcattccctcaaagtaattgatgtaactgatttatgcctgtattcttcactaaagacacaactatcaatctgagatactcatatgttgcaggctgtgccgctcttccatttctacaagaacggggt

SEQ ID NO: 90359 - DNA, 592 bp, Eucalyptus grandis
  Intron number 3 from transcript Egrandis_v1_0.021755m (loc us Egrandis_v1_0.015645m.g) derived from phytozome v7.0 (c hr-ID scaffold_6; pos 24043636 to 24044227)
gctgccctactcaggtgatcatcattaagctcaattaagccagtctctaaaaattcttcaatccattccctttatatgatataatttggcttctataacctcaaggctgcgaaaatcgacatattaggccgacagctcacattttacatcttagtagtcttcttttaagccctttggtggattattttttggttggagaaaaatcattggtcaaatgagactgaaagaatctccgcagaaaggaattccaacagctcatgaaaatggattcaaccgggatccaaaacggaaagagagagacagagagatagaagaaacgaaagacagaaaaggtgggggggagaagagaccatgttcttcaaaaggaactacaaaaagaacgcgaaaaagtacataattgttgataatgcttctaggaaataagaatctcgattctcatcaacatcatttgagttcaactggcttaacacttaccatgcgtaatatccatgaaataaagaaaagtcacatagttgagttagctaacacatttttttggcaaaaaacactgacgtgacattcagaatagaacaagttcggcttgaccgaaaag

SEQ ID NO: 90360 - DNA, 763 bp, Eucalyptus grandis
  Intron number 1 from transcript Egrandis_v1_0.010305m (loc us Egrandis_v1_0.010305m.g) derived from phytozome v7.0 (c hr-ID scaffold_11; pos 11029810 to 11030572 reverse strand )
gcgattcaggtcagttgatgatggtctggctctcccgtgttcctttccagttgtttttaattctcattatttggttttagtatcaatatcatttgagcagatcaaagtttctttttcggaagatctgtttgaaatatttacgaattcagtataataatgctatgctataacttgagctcacttggcaacacaaagttgatgcaactcaatgagtcagaaaacagagatagaataccagcgagaaagttatatcatacagacataaataagaggcagatattggatttgagcttatgtaacgtgtacaaagataaaaagaaaatgaagagagtccaaggtttacagccggatctcgtcatttagatttaatacatatcacaaaaagtagagattaagcatcatgttgttgtgtccaaattaaacatttaaaggcaatttgagctttttggttgaaatgatacttagagatgaaactgtgaaataagaagttgagaacgagttatgtgtttagaagaaccagtaggattatgataaagatttcgttaacaaatatcttcagggcacttgtttaacgttcatacaaagaaattgtgactttcaatatattatctcctgcgattacgtgtaatcgatatgtgagagtgatatacatccaactcaaaataccagctgtataaataaaagttgagctcgaaacttattgtcgattttattggataacaatttaggtgactctgtttccaaacaagggcatttgtattgg

SEQ ID NO: 90361 - DNA, 656 bp, Eucalyptus grandis
  Intron number 2 from transcript Egrandis_v1_0.004830m (loc us Egrandis_v1_0.004830m.g) derived from phytozome v7.0 (c hr-ID scaffold_11; pos 25239253 to 25239908 reverse strand )
ccgtactggtccttcggtatgctggtttttgtgattggctttcgattgttgatgctttcattttgatgaatttgattcccctatcgtggttcggcttctctagcttattctgcagtaaatgtgagattttgagcatattaatgtgttgaagaggatggaattgaagattctgagtttattgcccttgccttgctttatgagtttattctctcgtggcgatgacactagtcagattgtgcatgttattctcaatagggaacaaatcttaaaggcatgtttcctgacccccagttgatccctaccacaatgctcactgatgttgaagaaacgtagttgctttcctggtacactagtcgacgctatttgactgattaatcaacaaattgtgtatgttatgctcaatagggaacaatactcagagacattgcatgttattttcctttgaaaaccactgcttcccagcccccagctgatcctaccactattactcactgatgttcaagaaacatcatcgctttcctggtatatggctagatgtagaacggttatagagtttgattcacggtagttaacttcttctgcactttttacttaacaggtttggaatgtagctctactgataatgtatttgtgatttaccttctaggatttcatca

SEQ ID NO: 90362 - DNA, 908 bp, Eucalyptus grandis
  Intron number 3 from transcript Egrandis_v1_0.021561m (loc us Egrandis_v1_0.021538m.g) derived from phytozome v7.0 (c hr-ID scaffold_11; pos 13374529 to 13375436 reverse strand )
tcgagagtacttcaggaagtcgggaccttcaggtaattgttgttgctttataattggtaatacactgtcactattaggcagagtaggtatttacgttagtttttcctttcaactcatttatataaggccaccttgtgatctgagaaaagagaacctgtctgactatgaggaaattagatctttatgaaaagtctggcaggcctttcctaatcattacgcgtgcatcagggactgtcggaatcttctacatgggcatcttttagttggtgatagcagtagaagtattaacttctattgcattatagatatgaattgattaactaccagccacaattatcaatgcatatgtcgtgattgcggagatacattggttttcatgtgacattcacctcttttgaccatattcttctttttcgtgtcgttgacgatagtagatggtcgaatctggtctatcactctaccatcttatacatgattgttcttctgggagataactctcatcttccccaatcaaataaggaaaggcaaccaattgttgtcctgagggcatgtagaaccttttctcactcattgtagctgaggtagaaaattagtcgtgattaatgccagaaatgaatatcacagatcatttttgcttgacttgtgctgattaagttcccacaagattgctgacgcacacaattgtgggagcttctgcagcaatgttcaattgcacgtgactgtcagatttattatattgttctatgtttgtttggcaaccagtagctgttgttgcatcagattggttgttcacccaaatcattaccctttgttagaatcattttgaatgttaaagctcatgcccattgaaattgagcatctcttttcatgtaggtcaaaattggacttcgagtcctaactcgtcctgt

SEQ ID NO: 90363 - DNA, 733 bp, Eucalyptus grandis
  Intron number 2 from transcript Egrandis_v1_0.021561m (loc us Egrandis_v1_0.021538m.g) derived from phytozome v7.0 (c hr-ID scaffold_11; pos 13375498 to 13376230 reverse strand )
ttcaaccgcctaagtggtgttaaagagaaggttacttatttacctccactactgcttataattctctttaatctaacaggattcatgttatagttttatgagagtagttttgtgctaaactctctctctctctctctctctctctctctctctctctcttacatacatatgtatatcaatgggaacctgtagatagaaaactggtcatgcctttagcatatgctaatgtgcttactctctttccctaccttcgacttgcattcaaaaatgtttcttcatatagtttgttttctcaacttttttttttctattgcattaagggcgcttgtcgtattttgttgcgcatgcacgtggttcttactaggaaggtgttctggtcattctcaggaattcttggtactcatttgatgaaatgtgatactttactgcttgatcatgaaatggatgatggattatatagtcttcaaatagggagatatatcattcaaaattgactctcttttttttctagtgcttctactgctgttctcgataaaaaaattgttccaggaaggtaacatgcatgggatcaggagatggtgctaaagctagtgaattacaaatttatgactaatttagaggagaggagtataaatgatagacctatggttttctaaatggaggtttgtttggataattcatcatgctgaactcactggtaattttacaggtttatcctgaagggacgcatctg

SEQ ID NO: 90364 - DNA, 903 bp, Eucalyptus grandis
  Intron number 1 from transcript Egrandis_v1_0.021561m (loc us Egrandis_v1_0.021538m.g) derived from phytozome v7.0 (c hr-ID scaffold_11; pos 13376378 to 13377280 reverse strand )
acagagctcttgcttttctcaccaccaagccgaaggtacaaacgagatcgtgcgttgcctctcgtcattctgctcaatttgttaattcccgtcgtcgtggtcgtcgttgaaatttgctgaaagtgagttcggttgtgtttatttgacccacgtagcaaatttgagggtcgtgcgattttggggtctccggaattgagtcgcaagttggttattttctcgtggaatctttttttcaagcgttgtttcaatttggtctttcggttactcggtggacacggtaatagcatgtgctgttggtggcatttctttgctgaccgttcccttttttttctcgccgggtcgatcaatgtgcgtcggaatttctctctatattgtataatggatgtgggcaagataagtcatgtcatgttatgttatgttctgtgttatgtcatggttgtcggttcggcaagttcgtacatcttaggctcatgatgctgttcgccgaatcggttgaaagggggtgctggcaatatgccctttacggttgttggtgcgtggaacgttgggcatttgagaatgtagtcgaagaggatacttttaggaagtggtcttggtactctggattagcttagggtcagaattttgatctgttgcctggaaagatctttggcttcactatattagagtgcattggggtgttgtcatttggtttccttttgtgccgggatttatgatcgaaagacattgtgtaatcatcgcgtctgctactgattacaaatgggatttattttggccctaagtggacttttcttttaattgcaccgtctaatctatttgttccttatatgagaaaagtaaatggatatgaggtttgtcatctttgcaggaatttatggttgactttttcgtgcttataggaag

SEQ ID NO: 90365 - DNA, 602 bp, Eucalyptus grandis
  Intron number 1 from transcript Egrandis_v1_0.008649m (loc us Egrandis_v1_0.008649m.g) derived from phytozome v7.0 (c hr-ID scaffold_6; pos 39962643 to 39963244 reverse strand)
tcaccatcgctctgggctccatctcgagcctctcggtaattaattattgtcagcttttcttaaactttttgttgtttaacttgcttaggtatcgtgggtcttccagtctcacctcgagttttttgaagatacctttgtttcactatcagatctggaaattatttggggggatggctttaattatttggctgccgatactacctctcagccgtcgctttctgctttttctttttgagtttccttcttcctgatgtcgagagctcctactttctgactttatggtgctttctcaattatgtcctaatcagtgttcctgctgtcgtcgcctcctttctggtggacctaaaaagtttgaaaagacttcaatcaggatagacaagagtaaatttttttagcagcaagtaatgtaatgtggtcaaagatcaacttaaatcgtcggcatctgggtaaagtcagtgtggactctatagttcttcaggaataggtgttcgataattttggcagaaagaatgcagttggtttttcatagcaaaatcaacattctccttcatttatgcggagagaaacaccatcaactaaagaacactcacacattgtaggga

SEQ ID NO: 90366 - DNA, 652 bp, Eucalyptus grandis
  Intron number 1 from transcript Egrandis_v1_0.029762m (loc us Egrandis_v1_0.027090m.g) derived from phytozome v7.0 (c hr-ID scaffold_9; pos 11432966 to 11433617 reverse strand)
gaaccggtccctggccttcttccctcgtaaaagtgggttcttgttttcccggcgccgcttctcttttcttggtgttgggtctttcccggctccgtttcttggtcccttcttggtgggttttgccgggttggtctttcttgggtttcgccccgcgccgcttagctgcggtctccgtgatgtcttcttggaatgtgttgggttttagtgggagtgagcggcggtgctgaactcgtgtcgcggagactgtcgtggggggtgaaagaggagaggggcaatgttcagaagctccggaaaatgatttctttcgagggtaccatgttgttcgtttgatttgattgtgatgttagttattcctttgatggcttccgtatggagagatgtaataacgaaacctgtgctgatgttggcctcttttggtttagtctatgttattatgcttgaaaaggtacatcgtttgtttattgaggattgcgtccttttgaagtttctaagcaattagaagaaaattattggaagcactaccagttttagatcccatcacaatagtttaaaagacaaagtgtacgcctagtggactcatggctgattgaccctgattttccccttttcctctgcaggatttgaacgttgcagaaagttagttaggagagca

SEQ ID NO: 90367 - DNA, 982 bp, Eucalyptus grandis
  Intron number 2 from transcript Egrandis_v1_0.032688m (loc us Egrandis_v1_0.032688m.g) derived from phytozome v7.0 (c hr-ID scaffold_6; pos 39419255 to 39420236)
agacattgtacgactacttgctaaaccccaagaaggtacccatgttcatactgattgtttagttagcctctgctgccacatactcgtgttgtagttttgcatgtttggttgatgaacattgatgcctttggagctgtcatgcctaatgctttgtacttatttggaaatttgcatgacttatagtactaatttattctttgtgaaatcatttgggtactttttcttttcatactccggtagctatacgttctcatatgatctcggagaaggggggccataaacacaatttgagtatagatatttgtataacaggggccaagagtgttattctagcgtaggaactatttttaagggatgcaccggtgctctgaagcattttaaatcgtttggtttgttataagttcaaagagtccaaaagttatgtctttattatggagaatgccagattggagttgaaacttttagtttgtccttgtgcacagcctattgttaaattgtaggttttttggtcatcagttgccaatattacactggcagcagttgtactgtgagatgcaatgaggaagcctgagttatattggatgctacacctgactctgtcactatagatggtctatacatggatagggagacatgataggatgatctctattgactgtcactttgacctggttgttttggtaatgcaattttgttaactactatgggctggtgcctatccttatgttatgcctgtggaccatagccttgggactgtgatgcatggttgaaccagatgtgttcctttttctgcatgtgaactatacaaagatgctataggttaatattattctgttgggagttactggattatataaatatgtaggggtaactgtggtgccatatctatgttagttgcattcatctccttttcatctctctgtatatcttctcactcacgtctcattcgtctgtgtttctacagtacattcctggaactaag

SEQ ID NO: 90368 - DNA, 810 bp, Eucalyptus grandis
  Intron number 1 from transcript Egrandis_v1_0.000394m (loc us Egrandis_v1_0.000394m.g) derived from phytozome v7.0 (c hr-ID scaffold_6; pos 26602550 to 26603359)
tctaagaatccaccacgtcccaacttctctataaggtaaatctatttccttctttaatgctctctttcccttcacttctcatctgcaagaacaagattgttcatgaaacaagtctttctttgatgatgtttctggctggcttctaactgcttgtgttttcatagatctcaaggtcatgtgggagcttcttgagtcagacccagttccagattttttgccttttctttgctgcttggataaacttttgttctttattgatcttttggcgctgttttactgatccacggctctcatgatggcagtagatggagctgtgtgctaagtgggttttaaattcgtgtctctctctttctgatattttatatcctcagtccgctgttaatcactcgcccttgtgccctggatgtggttggttgattctgcgtcactttagtacatttgaaattctacatgagctcatctctgggcggtaaactttagccatccatctctcagactgtacttgtaccgatttcacgatggagcagattaaaggactccccccccctcccctcccctcccctcttcagtcagctggataccggatcttgatgtaatatgggcatttcttggctgtttcttgattcactgttcatatgggttctacatggtgcatatgatttctccatgagttgacatacaatactataatctagcttactctcttagatttgctcaaaggaagattttccgttcttcagattctggcactctatttttggattttgctgcattaacgtggacccctttctttaatttgctgcagagagt

SEQ ID NO: 90369 - DNA, 1058 bp, Eucalyptus grandis
  Intron number 1 from transcript Egrandis_v1_0.023431m (loc us Egrandis_v1_0.023431m.g) derived from phytozome v7.0 (c hr-ID scaffold_6; pos 34382123 to 34383180 reverse strand)
cgattcttttgctcttccgcaaatccctagtcgaggtaaaccccgtggctcctccctctctccctcctcgatcgaccgcgaatgttcttcgtcctgtcgattcagattcgtcatttgatgttgagatcgagattcggatttcgcagcgtcgcgtattgtagcgatcttcgcgtttagatctggctttcggcgtgatctgataccgatttcatgcgtgcggggattggatctgtcgagactgtaatccgcggggaagttgaaaatgcttgtcgaatgggccggaacatatgcatattctttttgactttttgtgctgtgtttttcgattttatttttcgctcgtggaaatttgtaaaggatgagaggaattatggatggggaagcagaatgctttttagcagtgatgattttcagttctgacggctgacttttttgtgtagccgggggaaccgagtgtgattagacgtagatggatctgttgagagactttcatccgccgggaagttcaaaatgcttgttgaatgggctggaatatatatgtttttttctttttctttttcttttttaaatttttgctcgtggaaaattgtaaaagatgagtggacttatggatggggaagcagaatgattttagcggtgatgattttcagttctgactgttacgtgtagccgatgggacgggtatgattcggacttttggatggactaggcgtatcctcttttgttgttgcgggtactgtggtttatggagttgattggtatcatagagcggacgatgatgtagcgatgtcggactttgatagatctgatctggcacgagcttcattgatttaatctgcggcgatgattcggcagaaatgttgtgctgtgaatcaagggttcgtatttgggctagttgagcatagctcccattgcatgagtgaaacaacctaagtaatctgctgttgtcgtgagaaatgatttgcctacagtttttgattttgcagagtttatgttttgatggttgagactaatgtgccctgtgttgcagagttaggtttcgtaacagtacacggaag

SEQ ID NO: 90370 - DNA, 860 bp, Eucalyptus grandis
  Intron number 1 from transcript Egrandis_v1_0.013324m (loc us Egrandis_v1_0.013324m.g) derived from phytozome v7.0 (c hr-ID scaffold_9; pos 14183814 to 14184673 reverse strand)
taagtctggcacaccaaccgatcgtaaatacgccggtactcagttctccgaattgatttagctgtgttttactagtatctcaccccaaggttgtagaatgcaccggttcatgtgagcccaatatgaagttgaatggatcgaacatcaaatgcgctggttcatgttaggcatgtttttagctaattctaagcgaaacatgcctatcaattttcaccatcatgtgaagaaaaatttattggtatcacttctttgagggctggacctcctttttattatgacttcgacctggtgactatagttcgttaatatagaaaaaaagtcgaaattgaagtgttaaaaagcctctcacaggtggcgacatcgacatgaaaaacaaattgtcccagcaaagtgtccaaattctggacccttttgagctgagtcctagatttttgttttggcaagtccaacatacggatctgtgtccatatccaatccctaaaaccgagtctaggtaacataggaaaaatgaaggtactgtgatcggctctgtctgatctctgtctgataaaataatgtttcacaactattcttagtgttgctaaacctttgtggagatgctatgcgaagatacaacctgttgcctctgcatgtcgtttgtatggacacaattcactttcccttagaaaattataccctggaaagtggagagttgtgcaaaggaccggtagtctgactattaatatccagaaagacggattatctgtagccagacttgcagcttttgagatatccatcatctagctgttaccctattgaccaaagatcagttctttttcgttatagaaaagatattgccggttgttagaagacaacatttg

SEQ ID NO: 90371 - DNA, 482 bp, Eucalyptus grandis
  Intron number 1 from transcript Egrandis_v1_0.045669m (loc us Egrandis_v1_0.045669m.g) derived from phytozome v7.0 (c hr-ID scaffold_280; pos 25521 to 26002 reverse strand)
gtggagactaattcctcctcagatctatttcaagggtactccaaatctaaatgaagaatttcccgagattttatatgttgagtttgtaaatggaagcttatcttgtttctcaaattctacctcaaatgggatctttatttcagtcccccaagcttcttctactcaatacatgaagctgtgctcggatgggcatttgaggttgtatgactttaatggatctatgtggctagaagtggccgatctttttgaaacggaactcagcagcgactgtgactatccaacagtgtgtgggcgatatggaatttgctccgatgggcaatgtagttgtccggcttcaagtggggggacaagctatttccagcaagtaaatgatatggagcctaatcttggttgttttgaaaatgttctattgtcttgtggggcttcaaaaaatcaaagtcttctagagctcgaaaatgtctttcagtctcactgaagatctc

SEQ ID NO: 90372 - DNA, 937 bp, Eucalyptus grandis
  Intron number 2 from transcript Egrandis_v1_0.032020m (loc us Egrandis_v1_0.030844m.g) derived from phytozome v7.0 (c hr-ID scaffold_9; pos 35119183 to 35120119 reverse strand)
gcaaagcgtttatcctctattccacactgcggaaggtgatgctctaattcgaggtactaaaatcatcttaggcattgagttcaaatttgaattgtgcagagcataatgcaagtttcagacctcgcgtaactcatacaactaatgccatatatacttgggatatgggaaccgtattagcgtgaattttaatgacggtttactgtctttggagatactatgaaaaattctagacttttcaagaaaagtccaggaccattggaaggccagacaactataagagctaccaccacgttctgataaaaggtcaaacatatgtgctcagtgcaatgcggaagtagtatgttcaccgataattgattcagtgaggttcatgaatagtcaagtttgctcagtagggctctcgtcataccagaattggcataattgttctcattttatgaggaaaaaaagaaaagagcaaataacatttgttgtatcgcattttgttatcttgcttgaatcatagctgcatcaatagtatcatgaattagtcttttttgatttatgtatacctctattgaattcagtattatgttgataacatggcggcaagcaaataggattgacattatgattattaattactggtaagtgctatctgatttttgcgcctcggtgattcggtttctgcatcgaccttgcctaacctctgaggatacatcaaactgcaatatctcacattgttaattggttggtgatcttgtacctttgatcgagcaacaccaattattgtttcgtgctttgagttattcctagtttagttctgtaagcttggcccctgcatgcaaagtacgtttttttagcagtcatgtaatcatctatagcagatgtactggttctctatgggtgatgaagaccatggtgtttgtattgtcttggtttccttggcaagtagccg

SEQ ID NO: 90373 - DNA, 828 bp, Eucalyptus grandis
  Intron number 1 from transcript Egrandis_v1_0.018462m (loc us Egrandis_v1_0.018462m.g) derived from phytozome v7.0 (c hr-ID scaffold_4; pos 35130579 to 35131406 reverse strand)
ccccgggtcgtcctcgagccgcgagaggaagaaaggtgatggcttcgggttgggatcgttcggtgtttatcgattggtttttctgtttggtttgttgttgttgttgggttgtcgacggagtttcggtggtcggtggaaatgggggttctgggattttggatgttttggtttaggattaggcggtggtgtttaaggtttgcccgatcagtgggaaagctgttgggttgatgatgacctggatttattgcttgatgccgatggaatcgtgacgtgcaaacgtctcgatttttgttgatggccgggtttttagttgtctcactatgttctgctttcctcttcggggaggttatcggatggttatcatgtgccacgtgatcagggggaagggtcggtcttttatgtgattgccaaatcaatgcggcacttcgataataattgcagttgttttgatgcgtgaattgtgataggatcccattgatctgttagagataatcggactgagtgatcagtcggttactgagatatgcactgtgaagttctgaagaagcctgtccttgtatttaaggatgggaaacttgtctcgcacactccaatgatatctggagctttgtttagccaaattgacttcgttattcaaatggcattcctgtgtctattggatgacggagcagtttgtctatccaatttgtgatcaatcagtactatgctgatatctaaggttttctcagaaattgagaaggtttctaagtcctagattaatgtgttcaggatacatgttttgcttttgagattcttgaaattgattatgacttgtgatgcaggtgtacc

SEQ ID NO: 90374 - DNA, 925 bp, Eucalyptus grandis
  Intron number 1 from transcript Egrandis_v1_0.009858m (loc us Egrandis_v1_0.009858m.g) derived from phytozome v7.0 (c hr-ID scaffold_6; pos 2169213 to 2170137 reverse strand)
atcgctggaaagaggtaccgcgagaatatttaggctacgttgttttgcgaaaaataatttccaggaaaataattttcggattttctagcattcatttccaaaaaatgaatttcttgacaaaaatgttttctacgaaggaaaaaaagtcttctaaattagggaaaagtgaaaaatatttgcctcacttgatccttcttatctcatacctctacaaattctcacttcctcctcccatttcttcttcttcttttcttttttttttatttgaattatattttaattttctttttctttcttaattcgaattatttttaatttccttttccttttctattttctattttctttttctttttatttttttcttttttttctttgtttcccatcttcttatttcttggttagtcatcgattgtcgctgggtgaacctcgagctcgtcgatctcaagctcgcgctcaccaatctggtgagcagcaagccttgtgctcgtcggcgagctcgaggctcgccggtggctggtcatgggccatcgctgtggccggcaactagccaagaaagaaggaggtggaaaacaaaaaaaaaaaatgaaaaaaattaggaatagattttaaaaaatttaaataattaaaaatcaaaatttaaaaaatatgaaaaatcatttttaaaaaataaaataaatgaaaaagagtatataaaggaaaatattttccttacggaacattgaaaaatattttccacttcatttttaggtttcatctaaatatcgaaaaatacttttcagaaacgccacatttttcgcgaaacgaacggaacatcaaatcgccctttcatatttaacggtttaaacttttaaattgaaccgaagttcaattaatccttttccatgcaggtactacggagagaacgtgggggaggcagaggagg

SEQ ID NO: 90375 - DNA, 910 bp, Eucalyptus grandis
  Intron number 1 from transcript Egrandis_v1_0.017196m (loc us Egrandis_v1_0.017196m.g) derived from phytozome v7.0 (c hr-ID scaffold_11; pos 1803857 to 1804766 reverse strand)
ggattctaggaaggtcggtcagtcaaaaacgtcattcgctcatttgtgccgtcgacgttagcctgctgtgaaatctcgcggcgtgtctccgtgaaattaggtttcgggaatatcgaccttgtctgcgaatgttcttgctttgactgacggatgatcggattttcggtcctacctttatctgccagatttgatagaacccgctcatcgcctttgtgaactttttgtgctggttgccgtgtgcatctcgaacatttgtgtttgaagaaatttcgcggacgctagtcgttttatgttggcttataaggctttgcttcgtagttggaactgggagctattcccttctaatctatgcagctttcccgttttcttccttcgttgagaactggctcaatctgcaaattgtcttctgtgtgaaatgccatcataacaatatgcttgcgggggtatgtgctgaatctacgcccctgtgggtgacttatgaaatgtatttctttttaacgtcctctagctctgatcaaagtgattactttcatatcctctgatcaaagacccaaatcacgggtcatacatgtaatagaagtaagttaatcagctactgcttctcgaacatcaaacttctttaagctgcaaaatgtggtttttctcatttaagtacgaataggttaggtttgagattacaaaaactgacggtagtaagttctttgaagaatgcctatccatagaatgctttgtgtaaataaaggtaaatcctaggaaactgaaccttattgtttcgaataagatgagacgactaggtgaaatattaataattcttggctagaatggtgagattattttctatctggaagtgctaaactgtatgtgatactttgcagtgcctcagattggaaatttgcggcagagcagtttg

SEQ ID NO: 90376 - DNA, 497 bp, Eucalyptus grandis
  Intron number 1 from transcript Egrandis_v1_0.003637m (loc us Egrandis_v1_0.003637m.g) derived from phytozome v7.0 (c hr-ID scaffold_11; pos 13862063 to 13862559 reverse strand )
agaggagaaagcgccccaggtaacccctcaactgttttggtttttttcacattggattttgtcgaaggatgttcgacaagaatgaagatcttggagtgatgcagctatgatatactcgtcttttgaatcacttcatgacaaactcgtattaacacgctcatcacatacttctataacaaccatgtagaacaaggtagaatgaaaaaggctgcgcaaagagaaagagagcatcattgaatagacttgaatcaagaacgatttcgttttagtttcaaagtccagacgcggttgtttagaatgtagatagcataaattagtaacagttatccatttgtcatagaagttcaatcttcgtaagttgggcggctcaaatttcgtttggtttatatttcatttctgtttggatcggccttacgagcagacactatgcgaatagatgtcactttgactcacttggtaatgcttttccagaaacggaaaggaaaggtggcgaggag

SEQ ID NO: 90377 - DNA, 752 bp, Eucalyptus grandis
  Intron number 1 from transcript Egrandis_v1_0.009309m (loc us Egrandis_v1_0.009309m.g) derived from phytozome v7.0 (c hr-ID scaffold_9; pos 27232861 to 27233612 reverse strand)
aggcgcactgcaaactccgcagctttcataatcaggtacgtgtttcgatcgcgatgcttcgtttcgtccgcagaagttttgccgccggtgtttcttgcgtcaatgcttcgttcaaatttgtttaacatctctcgttttcatgtcgggtgtttccctcgtttctgctctccttcctccggaagcatgtgacagcttttttaataatgacaaatgagagtcgcgtcgactgaggatcaggtcaaaacctgctgcatggggcgatgtgtcctctggagtcttgtgggtttggattggggggcaatggcgtggaaacttcaaaccaaaaccttaacattaaaaaaaagaaaatgggttacggacaagttattgcaggctctgcgtacgtgcgttgaacaaaacctcccttctcttccaagtcggtttgttttattgcatgcggaagtcgtgcccgaaccagcctctcttcgtcttccggtcttcgcttggttcggtcagcgtgcctaaatctggttcaacgcctttatatacacaagctgtatcggttttcttcatgtttttccctgttccaatctcttgaaagttcgatcggaagggttgttgttgttgttgctctttttctgatctcccggtgttttgggatctcgagacttgggttttgcttgctttttgattgtagagcggaatagaggagaaatttgcgatcttgtgttgagattagttagaattgttgcagagtttcttgggcttgattg

SEQ ID NO: 90378 - DNA, 673 bp, Eucalyptus grandis
  Intron number 2 from transcript Egrandis_v1_0.030774m (loc us Egrandis_v1_0.030774m.g) derived from phytozome v7.0 (c hr-ID scaffold_4; pos 2014745 to 2015417 reverse strand)
ccgagatttatccgaataaatttccagccaatgtaagtgtatcgccaacaacgtccgtctagtgtttgatctctgtttttgtgatcatcgatccctgaatccttgtttctgtatggaataagtttgcagttgtcttgcttcacttacgttagatgtatatgcattgacaatgtgatctgtatagcatgcttttctttgctcaatccacgtcatcttacgtgcttaatatgtgtcacatgtatcgtcagacatttgcatgtatttccaactcttaatggaaatatctatcaaacttcttagaaagagcatgatttactggtttgctgattgtgtatacattgttgataaaattgatagtacctcaatttgataattcggaaaggtggatgtgctttgttgtatatatcattttccatgtggtttctcgattcttcttaaaagtaagactgttgtactttaaatctcacctctacctaagaatacatattacagagtttgtttcctattctctgtgcaagtagaatattctttcaggcgttttggatttggggcgaccataagttgtgatttactatggaattatttttgttgtcgaggcctagagaaaagcttacttaaaagtttgatttgaaatgcagaagaaaagattttctgaagaatctccgaacaagcc

SEQ ID NO: 90379 - DNA, 779 bp, Eucalyptus grandis
  Intron number 2 from transcript Egrandis_v1_0.020446m (loc us Egrandis_v1_0.020446m.g) derived from phytozome v7.0 (c hr-ID scaffold_4; pos 12609793 to 12610571 reverse strand)
caacttgcaaaatagcagaggtacgttcactactttcttttagctattatgattcattatcttcgatgtctggtcctttttattgatctgcttcggttgagttactgaattcattcgctatgatcgtaatttgtcctttataaattaaggactgtcatgatagcataagttttagcatcgattcgccttctccagtataatgttttccctgcagaccagttagaagagttggtttctatagataaaagttgtgtctttggctgggtggtgggctacgctgtgaggaggcttttagctttctccttgattaagttacttaatttttaatgagtttggttaagccagtctgctttcggactctagttggtgcattacacggatatatcagttaattgaaaactttggaggtggctgcacggagaaaggtagagtttgtggttaatagattcagaaataacttttgtgaggtaaggaaaattgcaatagtgtatgaaagggggtgtttggaaggtaagttgtatttggatctgactttaattatccaatagattgcattaatttgatatcacatctgattgaagataaaggggcgattcactcggttagatgggaagaggtgggattgttgaatgataatgggttccaattgctataatcatatatttatttaaatcaatgtgcatcaagtgatgaaattggagtgtcattggtagttcttttttcagttggaaaataattgattttgactttttgaattcgtaaggagtatctaactgaag

SEQ ID NO: 90380 - DNA, 777 bp, Eucalyptus grandis
  Intron number 1 from transcript Egrandis_v1_0.049806m (loc us Egrandis_v1_0.049806m.g) derived from phytozome v7.0 (c hr-ID scaffold_4; pos 38740842 to 38741618 reverse strand)
aacaaggtagtctcgcaatgatcgggtaacaataatccacgaccacgaactgatctctccttgggccggaaaaacacggccgcgctgataccaggatctaaaattttcaatcgatgtaaacaccgagtatatacaggcgcttagcatttcggaaacacacgagcgaaactattgagagaactgcgaatctgatatgacgccgacacggctcgtttcgaagattttcttggaaaagcacatcgttcatcatgtcagctaaaacataagctgtgggacaaacggagggtgcgattcatattgtcaccaccatgttgcatatgcagtcaacaacatagattgtttgtatttggtgaattcttttggcattgttgataggcctcggcaccgagtctaagtcgcaaattgatcgaatacacgtcggagttgcttggttgatgatgaaatagcctatacaatggacaaagacgatgatgtccggaatagcgaaaatatcgaaggcattatgcatctgatcaccggaaatgaacaataactactgtcaggatggttcttggactttttgattaatggtgcatgtagtatatccaatttctggtgacttcagatacaagttctcccagcttttgcagtttaaaatccttcgaactcgagcaaaacaacctgtttcggtttatctgattatctcgaattttttccagcttcaatgtgcatcgttttttctgatgctccagctcttttctaggtgattgtcccgactattgattgggtgacgcgaag

SEQ ID NO: 90381 - DNA, 623 bp, Eucalyptus grandis
  Intron number 1 from transcript Egrandis_v1_0.040091m (loc us Egrandis_v1_0.040091m.g) derived from phytozome v7.0 (c hr-ID scaffold_9; pos 1471527 to 1472149 reverse strand)
attttgtcagggcttgcattctacctgttccagaggtacattgctttaattaagtcacgttccttccaactttttgactccttgttgtccttggattttctccttcagctttctgttcttcatttgttgtgggaaaatgtctattggggccaggaacagcatgttactcaaaatatgacaagtaaatcagcactcctggaaatcaggttgtatcttggtgaccaccctttttctattttaaagtaatcatgcaacaatgctaacctgttcatactgaaatcttggttctagattgaacatgcttgcaaattttttgtttttttattgagagatgtttacataataaacattctgacgatgcaggcaaacttatgacttgccaaacttgccttcttgaaaggcttagatctgttagtgtcatgtcacattctttagcagctacaatgaggacaacgttctttcttcttagcttgatttttcatcctttctcttttaggttaaagcgtctgcttcgaacctggttcatgtttccgtcatgcacttgatcaatttgcttctgacatgatcttccctttgagtcaacatcaaagatacttgacttatcctctgcattttaggtctcc

SEQ ID NO: 90382 - DNA, 897 bp, Eucalyptus grandis
  Intron number 1 from transcript Egrandis_v1_0.014502m (loc us Egrandis_v1_0.010889m.g) derived from phytozome v7.0 (c hr-ID scaffold_11; pos 27825030 to 27825926)
gaggtgatttatacagagagggagagggagggagagggaagaagaagtcaattagggttttagagggggtgtaaaatgggcctgggcctgggcctgatttacttgaacggcccaaaaagatggcggttagagaatggtctctcggcggcaaaaagatttgacatttatcgagatgctaggggaagtgatacgactaaattatctctatcattaatgctcgataggcttatccaaaacccgacatccacccaaaacacctcattgtggaattagttccgtcatctagaaactccagcattgcgctgcttgatgtgcatttattttggcatcatccatccacgagactatcgtctttgaaggatgcaaatagattatgctaacatatcaaatcacaaataaacaccggtagtcactataatttttttgggacagaaaacaattgagttttttaaagctcaaaaaacgatcaatcttcgaaaaataacaatattaacaatcgcattcacttgacatttttttgccccctagatctaaccaactaaggttcttattattccgacggaaaatctgaggtcaaaagctatttctacgtctggtgggacccattaagacgcgctgctatcgtcgccgtccatcgtcggcaatcgaagcgagccgtgagatctcaaagtccgaagcgtagatggtgaacggtgttggagcaaacacgtcggcagatttcggaaaataaaataattagaaagaggagtcactttctttagataatcattaaaaaaatcaatatttgaaaatattaaaaaaataataatcgcaaacgcaatctatctcttccatctgcattcggacttcccaccaccaacagtcctttccctctctcaaaacctcgccggaatccac

SEQ ID NO: 90383 - DNA, 718 bp, Eucalyptus grandis
  Intron number 1 from transcript Egrandis_v1_0.005932m (loc us Egrandis_v1_0.005932m.g) derived from phytozome v7.0 (c hr-ID scaffold_11; pos 32344023 to 32344740)
caaaccctcagccgccggaactggactacctctccgtaagtcgtcgatcgatttctctcgccttctcttctatctccagtcagcgcaattcgcacttgttcgtgaggattgggacgagattgaacgttttcctgagtaaatcggcgatccgtctcgtctgcaattggaagattggttgtcctttgtcctcgtcaattggtttattctccttttggaggtgctagggttttgagtttattgcataccaggtcgtttcgattcagctgtggccctggtgacgcgatatgcgattcgaagattaaatgagttgcggggtaatatgaagtccttttcggcgaggacgcgctagggcagttatggtctagtcccttgtctaatgtatggtcttttgtaattggcaaacgttgttaccacgtgaggagtacaaagaaggtaatgaattaacataaagcgaggattccgaaagaggtaagaatggacggtcaagaacacggagagtagttgtttatttttgtatcatataaatgcacgggagactttttggttaattacaattgagggtgttaggaagtcgtttcagctactgaacatctgcatgtcttcggttctcatgcctcttagacgagcgttgatgaatgaattgaaaactaacatccaaaagcaattagtgttggtactttatgcatatatcaaatctcactatgatgatatttgtagg

SEQ ID NO: 90384 - DNA, 894 bp, Eucalyptus grandis
  Intron number 2 from transcript Egrandis_v1_0.026163m (loc us Egrandis_v1_0.023863m.g) derived from phytozome v7.0 (c hr-ID scaffold_11; pos 37601614 to 37602507)
ccggcgtcgccaagctcatcggcaagcccgaggccgtacgctctctctctctctctctctctctctctgggtattgactgttgaggctaatgggatcggtgggtgcggtttttatctggagatcgatcgattgcccatgtcttgatgcgtcgccgtagtgatttcggcactgctgtctgcgattctggttgttcctccgggtccttactaggggattatcctttcgatgatcttcttgtaaaggttcttttttgctaggtttctgattagcttatgcatgtctggctgactgaattggtgtcggtcggtcttgatgtttagcttttgtatgagctgaagcgactcccaagtgccggaaccgggccctgagtttttaaagtgatcctcgctccgaatcgtactgagttcttttgattaggctgcttaattgacgaaatgacgcgatttctagtgcatgcatttgctggcctttaagctcgcggctcgtacttagataacctatacggtggaactcctggagtattgtggcagtcgaatgtgcacttctgcggattactatagggagttaatggtagtaatgattttctctctttgcatttttttggttcttgaagtggcccgcattaaacaggaataataatctctcatatggcaaatgcagcatcttactggttcacctaaacctttgataagcagcctttctagatcttgtcggatagtggtctccgagatacatccttagaccaagaaagttttattcttttcttgggatgtttattaaccgaagcttattctcttgtattttggttatgtaccaaaacatgatgcatcatgtctaagttttgatatttgtagttaagaacgtgaatcaacttatgttttggatgtggcagt

SEQ ID NO: 90385 - DNA, 563 bp, Eucalyptus grandis
  Intron number 1 from transcript Egrandis_v1_0.003763m (loc us Egrandis_v1_0.003763m.g) derived from phytozome v7.0 (c hr-ID scaffold_6; pos 5697182 to 5697744 reverse strand)
tcggcgcctcctggattctcatcataactactcaggttctgattccttaattccctcttcgttattaataacgtgaaaatcaattataatatatataaatactttttatgatataaaattgtccgtctcttcaaaattttgaaatttaattgtgaatctcagttattggtagttattatctaagtaagttagatatacaataggtttgtgagatatctagtagatgatctgaaagactcattatttttgtcaaattataaatcaagcctcaagtttttataatgaattttacatttttttgaatccttcggctaccacaatttgatttttatggatgtcaaaggccagaaagattccaaagtatacaaacaccataacgtatagatccgtaaataattttacagaaaatgaaacatttattttttttaattttcaattattcgaatggaagtaaaaagtaggacaaggtattttctttgtgttactatgattttcacatgtacgtaaacatatttactaaattgacacgttatccaatttcctattttggaaggttttggggt

SEQ ID NO: 90386 - DNA, 697 bp, Eucalyptus grandis
  Intron number 1 from transcript Egrandis_v1_0.006484m (loc us Egrandis_v1_0.006484m.g) derived from phytozome v7.0 (c hr-ID scaffold_11; pos 36149080 to 36149776)
tgggacgaggcatcgcggttgtactttcaccccaggtatctcccgctctttggcaattcaacgcttccttcgcgtatcgattcccggccgcgcgaggaggactcggcgagcagcgcgcgatcgctcgaccggatgccgagattctcggcgttttccggttcgatgtggagaactcgccgtcgattccgttgtttccgtctcttggacgttctttgccgcttcctttggcgagattgattgatctaatgaacttccgagacgaactgatttgactgttgaactggagctctcgtttggagagggagagagagtaattggtgtaaagagtcaacattgcgtcgacgtggttgtttttcttgaccgcgcgaccaaggaaacgttcatagggtttcatagcgtcgcgcttggcgtagaattgtgcttatatgaaagtgtaagcataaggttcttgttcagtagagtgattacttccattagacctattagataatccacgtcccacgcaaagtaatgtgatgttgagaaattcccatttgcgttgccgcgaatgtaagttctttcggttttgagagaggtactggtatgattatcatgtatccgagatttccttttgtctatatccgaagttaatcgttcaaacttttcgtttctccgtcacagttttgttcttgtacctttcgcagaaccggattttatc

SEQ ID NO: 90387 - DNA, 880 bp, Eucalyptus grandis
  Intron number 1 from transcript Egrandis_v1_0.027786m (loc us Egrandis_v1_0.023713m.g) derived from phytozome v7.0 (c hr-ID scaffold_6; pos 41052934 to 41053813 reverse strand)
cactgattgaagcgtcctcataggtatctctctctttctccttgtttgcatgaatagagggattttgttgcttcagaatttgtgtgcagaggagcttattttcgtgggttttgaacttcatccgcatcacgttctttgaggtgctttcggggattcgaatcggaagatgggctggtgtgaatggtcattttatagttccgaagccatcgttttcgttttccttttttccttttcttttggagatggaagatcgagacaggaacttcgtgaagcgagattagaaccagtttcccgtgcactctgcttcgccagctcttctcctttcgcctcttccagggcgtgatgattctcatatccgctgtgtttagaactagtatctatctgtttgttcatctgatcttcttttcagtagtattgttcattcgactttgcatagtggacttgccttgcatgcattatggacataataagttgtgtcttcgggatgcatatgccgaaaatgttgttcctggattataacctttaagaggtgcgacaaagttacttttactggtcaagagaaaaggcagcgaccctttagacaggatgagtgacttgttcctatgatcttagcacgacttgtcgaaagctcacttgttggtgaatattttgtacttgagttatgggtctagagagaggaaggtaagctcgagagacttcaagattttaccggagagttttaattttgtacttgagttatggacccatttcttcgtgtcggccttcctgtttttcttgtggacttttacctttttgttttttgattatatgttgagatgaggtattctgttggagcaatcaatcatggattgaatcctgtttgctgttgcaggcttgtgag

SEQ ID NO: 90388 - DNA, 991 bp, Eucalyptus grandis
  Intron number 1 from transcript Egrandis_v1_0.000655m (loc us Egrandis_v1_0.000549m.g) derived from phytozome v7.0 (c hr-ID scaffold_4; pos 292198 to 293188)
gggatccatccgcggcacggccgaccccctctcaggtacaatcttgatcctccgattcgccctcccgttgaccaagtttgaatctttccaccttctttgagctcgatccgtgtggtcctctgatgggtcttcaccgcctggggctgcggaattctcggggtcgtcgtggagggggtggggagttgctgattgggtgtgttggattcgatgctctagagctccgcttagggtagctgtgtgctcgattgttcggtttcttgatgtcgagtgagctcggatgatgggcgatgtcgggtcgaatccgttcttgattcggaggggatcgcgtcgccggggggtcgagttttcggttcgctgctctttcgtttagtggcgatcggcatcggatgctgaactgttgggcttttggtgggatcagtcagtgaagttatccccttttgattcaacccgtgctagataattcagggatcggtgatctttggcttgatgttatggttctttgaaactgggtgtgtttctgttttgggttggatccaaccattcatgatcctgtgccttggaaaatgataatcggatactgaggctcactggaatgaaatgccagtttgaggtggttctttcccgaatcgattgtaggaggtgtacactacgaaggatgagtttatgattttcaattaaatattttgacgtgagccccttcttatcttttttttttttgcaccatcatttttaagattcaataaaccattcgaggagctctctgtctttactgtattagcaaacactttgctttctcgggttgattttctttttcttctttttttgagctaaaaaaaactaaaacggctcttctccgttatcgatctcaagatttagtgcaagcttcagtaccttgttaattccattaatccttggcatgagaagtaggctgtataaagtatgcattgcagttagctggatctgaaatttttctttgtatgtgctaatagag

SEQ ID NO: 90389 - DNA, 787 bp, Eucalyptus grandis
  Intron number 3 from transcript Egrandis_v1_0.047352m (loc us Egrandis_v1_0.047352m.g) derived from phytozome v7.0 (c hr-ID scaffold_64; pos 116252 to 117038)
agtggccgaccaatcctccatcattcaggtaataaacaaagcttattctcatcatgtgatttgtttattttgactcaaatgttcaacattaactgatgtcttcttttaatatatcttcttgattgggatggcttagtggttagagaatgagcttgtgcgcctttataagatgcccaatgagtttgattattcccattatcacacgtgagcaatttctattaggatcggatcttatttgatccaaaaggtttctatttcataggccgaagataattaccatatgagatggggcttccttctaaatagaaaatagggaaatatgtagacgcacatgatctttgtaatattcaaccgttggaagattcatgttgatcatgaggatttcacaagctttctcctgtgaagtctggaaagttaaaagcttgctcgctgtagtttctaaagtctgatatttgccaaacaaaaagagagcaatatcaagaatctctcaacagaaaaaatgtaagaccgaagaaaataaggggtagagcacacccttcaccaacagacaatactgattcaaacgaggcgtgggccaatcagaattaagaaaaagagagtggtactttcgactgattttttatgactaccatgtcgtggaagtacgaaacagcccacctaaaagttcccgatccgaacttcaagtgtcttgaccgatataatcagtgggcacgccttaactgcatcgctggttcaatctttttgataagcaggaaggaggtgggtgagtattgcacaagagtgagag

SEQ ID NO: 90390 - DNA, 694 bp, Eucalyptus grandis
  Intron number 3 from transcript Egrandis_v1_0.024139m (loc us Egrandis_v1_0.024139m.g) derived from phytozome v7.0 (c hr-ID scaffold_9; pos 38040388 to 38041081)
cttttagttactggaagttgggacaagacattgaggcaattatcccgtctttttcatctatataatattttatgcgtgaatgcggcatttggtagccctaaagcagcaaatgttagaatagggaaaattttcttgctctcaactattagcatgactaattgatgctgaaattatacacgactttgttgctcatctgaatttccaggaatgatggtttatgagtgcctgctgaactagttgcacaaacgacgtctcccttacaattgtggcatgtcgacatgtttctttcacattaaatgtcacataggcaacacttgtgggtaacagaagctagaagtcggcgacctaaggctgctgaggttctagtaacattccaaaacgccagataacccacatattttgattgtgagattgtagactttgcctctttcctagttcctgacttttgcactgtcttgcttttaaatcgcccagatccaaacagttttactgggcatttacatagagatgaatgctttaagatcacatttatttatctttcaataagttctataacatgccacagttaattagttgctctcatgatcaaaagtttataggttgccacagaaaagaatttcttgatgtattgttattttttttgccctttgtatcttcagatactgggacacgagacaagccaatccagttcata

SEQ ID NO: 90391 - DNA, 602 bp, Eucalyptus grandis
  Intron number 4 from transcript Egrandis_v1_0.024139m (loc us Egrandis_v1_0.024139m.g) derived from phytozome v7.0 (c hr-ID scaffold_9; pos 38041154 to 38041755)
ggaatctgataatctacaatttgcaaagtcctcaggtctttttctcattatttttccagtttatactaccataaatgacatggaatagtgtcctatttcattcatgccatctcttagatattttgactttgcagttaagtaataatatgcatgacatggaagacttgggatgtttgcctgtctagacaattgatggtggtggtactttagctgttatgcaatgtgttcttaatcatctatcaaggatacttattagtatattctttatgaaaaacgcaatggatagcctgaagggccacattctgcaaataaagttggagatagctccattcttatggtaaaatgtactatcagttttttcccccttttgtatggatttgcaagttttactgggtcatttctgttcttaattggtctcttgtactgcttcgcatctttctcatgccttttcatcatcaagcttctcatgtggttttgcgtaaatatttggattcttgctttccatttcgtgaattggttttgctagttacctttctagattcttacgtattctgtggacttaaatagactgaattcaagagaatcagttcgcccctcaagta

SEQ ID NO: 90392 - DNA, 381 bp, Eucalyptus grandis
  Intron number 1 from transcript Egrandis_v1_0.040486m (loc us Egrandis_v1_0.040486m.g) derived from phytozome v7.0 (c hr-ID scaffold_9; pos 19289310 to 19289690 reverse strand)
gagtcattctcgattacctcgaagcccaacttcaggtaataacatgaacagagcacacaaacaaagtggaggcaagagttacattcttatgtaacgatgattagggttagagtcctagaagattttgataaggctttctttttcttttcttcttcgtttcttctttcctgtgtgggaggaaggaagccatgccaaacattcttctctttcgctctgcactttcatccaaattttgattatggtgttcgatgagtcatgcaactctctgacttacatatttccttgtcatttttcacaacacggggcatcgccggtgtgcaaaccatctcttgattagatactaatccggaatttaatgagtattttgagtgaaggagctgg

SEQ ID NO: 90393 - DNA, 762 bp, Eucalyptus grandis
  Intron number 3 from transcript Egrandis_v1_0.007775m (loc us Egrandis_v1_0.007775m.g) derived from phytozome v7.0 (c hr-ID scaffold_12; pos 151838 to 152599)
ctattaagattcaagctgccttcagagggtatgtgaggatctgattctttctagttggtctgatttaaaatgtatttataagggaaatactctgtgtctgcactcgtgtgcatgtgtgcttgcgcatgtgtgcttacgtgcttgcatgggtgtgttcagcatgcttgcttgctttttggggtgagaggaaaagaaggggctcttacatggcaatagcaaatttgttgactaatatgatgttataagagaatagattgcttaggatgttgttattgagtgaaacatggaactgcactagagacgaattgcaaataccccagtggagtggatcacagtggcaaaagatctgcagatggctgagaagcctctgagttgtgactccttttattcgattatttgttgtcgtcgacacgcctattggggtcgaacatttattagcttcattttatgagggcctcagttcagctatatacgtgacctagtttcaagagaaccaatgcgaattgtagcgttgttgatttatagaaactataaggatagatattgactgcttctgttatatttttcacaccgccactttcttttttaaagtttttgttgctgaagttaggcctagtttctgcagtcagcttgcctgagtcggtgttagcaatagagtttgtttgattttgacattcttttgctaacccaagtgtccatttgatgtgattttgttcttctaatgaaggcaagaaaaagcttcagagctctaagaggcttggt

SEQ ID NO: 90394 - DNA, 543 bp, Eucalyptus grandis
  Intron number 1 from transcript Egrandis_v1_0.003540m (loc us Egrandis_v1_0.003540m.g) derived from phytozome v7.0 (c hr-ID scaffold_9; pos 29554785 to 29555327 reverse strand)
attattggggaccaacactagcatcgctgccgttggtatctcgccatccccagcctccgtttctgtcgacattacaacatcaggtaaggttgtgtgcacgttgactttcagctgcttttcttgtcctggtatgaaagttctttatgtctgttcacctaccaagtagaaaataaaatgtcttcatcagggcatctagcacaaatgccagtctggatttctgtatttgtttaagtttgcctccagcaaatcggtgctccaaattcgttttcttcagatgaaaatttttggaaagctgcagtgcaagtatcattaaattgaatctgtttgaatattggccagtggcgaaaatttggaaaaaaaataatatggcatctacatgaccgcattccacatttagcctccgtgatgatgtgattttagtgtaagacgcttcgaccttgcaaattggaggacttaacatggattccccttacggccttgtgaggaaaacctcaatctaacaatttcatgattcgttctgttgtttgtctaggagggacacga

SEQ ID NO: 90395 - DNA, 890 bp, Eucalyptus grandis
  Intron number 1 from transcript Egrandis_v1_0.028191m (loc us Egrandis_v1_0.028191m.g) derived from phytozome v7.0 (c hr-ID scaffold_9; pos 34225382 to 34226271)
cagtgcctgcgacgacaaggtctctcgactcttttatgaattatttcttctttgtgtggttcgtgaatcggggtgatgcgtttagatgcccccgtcgtctctagggactggtggtggttttgcatgtggaatcgatttgcaagcgttgactgttgataggtttacgagcttagagatgattatggatggtggctcggtaaatcagtcctctctcagacattgctgtaatttgtctccaaatgaatttgtcagtgggttgttcttaaagagttaatgaaccggatcgagtgtgaattcgtttgttcaagtgcttgaccggaatgattgataatcttgtctgttgggaacgtggatgatgatggttggtaagtttctcctggcatacgccttccccaagccaaacccctccacataacatcagtatccaagcaaggatgcgcataaactgccttgtccgcttgcatcttgtaatgctccatcaacatggtgatgggcgtggagctacggttacatcgggtacatcggggccagtctggcccgactggctaggctgtgacttggatatggttctgtcatatcgagatgggacgcttcaccgctaagatctcttcatggttgtaggtcaaaataagcccgtgatttgtaggaaactaagccttggtttttccttctgcctacttttgaatgtgtttctttctgcatcctttcaccattatcagtgtaagaatcatcgttggagtgaacttaggcttagatagtttggactctgatcttgcatcaatctctctcaaagtttgatagaagaaagcttcttgctttttccatgctttctacaattctgatttgtgaactttaattcgttaatagctggtaatggactgcaggtgcac

SEQ ID NO: 90396 - DNA, 893 bp, Eucalyptus grandis
  Intron number 1 from transcript Egrandis_v1_0.008140m (loc us Egrandis_v1_0.008140m.g) derived from phytozome v7.0 (c hr-ID scaffold_11; pos 28698910 to 28699802 reverse strand )
ttcctgagcacaaaaagcagaagaaactcttgctggtaagcattattgattttgcattgctttggcactcttgtaaataattttagctaagtgccttgattgtaatattcatcttttgctttatgtacacggtggataaataatattgattcctagagtgttatgcacaaaatttggacctcaaaactaatgtttgaaaattcatttagtgatactttgaaggagttgatcgtctgatcaagacttgttgctaaacttgttggttgaagagaagctttctattgaagagattatctagctgttaatattctctgaatttgttctcatgtacatctttggtcagtttttcatttcattatcactttttccttcctttcattatcactttaacgttctcatgtagtttctctatgttgggctttgtttactttcacacattctctaagtccacatccaccgcactactgttgcatggaagatggcctgaaagaaaagagagctacttaaatgttgaaggaaaaaagtcaatttgtctgcctttgttattagttctagactctgtagatgagaacactgcattttcttgctctttttcaatgtgcaatcagtgtattgacaccagccaatgtatgttaaatccatgctgcactgccattccaattgatttcatgtttgatgctggatagtggatagttagttgtagggttttatagtgggagatgataggttattaaacacagattgcactactataatgcttatgaaggaggcctttcaagtatgctgcttcaatttcagtttttggtttcttctctctttttcctgtcaagtcagctgatacagggttgttgtttgcaggaccaggaacttcttgattgttctgaacagcatcc

SEQ ID NO: 90397 - DNA, 749 bp, Eucalyptus grandis
  Intron number 1 from transcript Egrandis_v1_0.007765m (loc us Egrandis_v1_0.007765m.g) derived from phytozome v7.0 (c hr-ID scaffold_6; pos 47606573 to 47607321 reverse strand)
tcagtcaaaccgtccaaaacctcccttactggctggtacgtttagtctctctccctctctttcatttgtattcactgtagctgatgctgcttgggacttttctattgtttgctgtgaatatggaattgggattattctcttgttttttaggaccgaggagttgatggggttcattctctcccgtgatttttggaaagttctttctcctaaggtgtaacctttatgaggatttgataacttggctttagaaatcggtgtagagtttgtttgatgaatgttacggtgatgattcttaatttttccgtgaatcaaaggaaactagcctctgcttgtcacctagagaatttggtgcaatttgaattgcaccaaatgtcattggttgagtacgtcttcatcaatcatatctcatcataagctaggcgggataaatggagaatcgcttgcaagaatcccatccagtcctctgcttcctagccttaggtatgcaaaatctgctggaaatggcttcttagcggcattgctctgaaatgtctaagctcttaacataaaacaaatcaataaccagtgttatctgcaagatatttttcttctttttggtaaaaattcctgctgctttttgctaattgcctctgccaagtaaacatgctttcacctgggacaatatttttgttttcttgagctgcctcttatcgtttctttagcacgtgacatgttgtttggcttacttactgcttctgcgtgtggcagtt

SEQ ID NO: 90398 - DNA, 955 bp, Eucalyptus grandis
  Intron number 1 from transcript Egrandis_v1_0.000432m (loc us Egrandis_v1_0.000432m.g) derived from phytozome v7.0 (c hr-ID scaffold_9; pos 27391179 to 27392133)
tccactccgaaatcagtactcccattacagaagaggtaaagagtgtcattttctttaatgtcatcatacactagatggaatatgcagcttcaattgcaacttggaaattgatgactgtttaaaggatctgcagcagtaattgaacacatttcccatctctgaaattatatcatattaagaagcttgagatagatgacaccacacttcataagacagctaaattatacagccaaaaatttatttcacatcactactcgagtgccaatatgcccacaacaaatgcgaagatgctgacataaattagtagagatgactttttgttctctgctactaagagattagagaaaatatttcaaccaattatgaggatagatacagcacttaattaaaaaaaatgtatgaaaaatgaaaataaactgacagaaactactaagaaagcaatctaaaaatttgagaagcatgatttcacacattgcagtgactttaacatcacaatcttatgtccacatggcgggacaagaataggactaattaaggaaaaaacaaggagaacatgaactcaagactagagacttgttctacattgagatacaagatgccataaatttataacatcatgtcaacaaaatgagtcagataatgatgacagtttgtgagaataagaggtgaaaaaagtttgaatttctaattctatttccatttctttttgtctatatcttgttgaacaacagaatagtgtcatgaaaatgctaatgaaaggtaaaagaatggcttatagaggaagtgaccaacatagatgaatataaactccagatgaagtcattgttgaagtcaaagcctactacgcatccacatagtactaaaattctactagtgattatttattgtcagagagtgacttaagctaccataattaacagaaaggagctgctgacacgacatccactcaaaatct

SEQ ID NO: 90399 - DNA, 669 bp, Eucalyptus grandis
  Intron number 3 from transcript Egrandis_v1_0.043408m (loc us Egrandis_v1_0.043408m.g) derived from phytozome v7.0 (c hr-ID scaffold_11; pos 623871 to 624539)
ttgccattttatcctcttgtagcctcttgtagccatgtgagtttgatttctgatggatggaaacactttcggtcagtgtacagggaacatggaatcttgcctagaattaaacatatgcatgcatgggggacatgttgggcggtcaggatcccttgtcgatgctctccagtttataaattctatgctttacaggctgatacacttgtctggtgtacaattcttggagcttgccgagttcacagcaatgctaaacttgcaaaacaagctgcagcaatgattttttagcgggaaccggatgaccctgcttcttatgttttgctatcacttatgtaatgcctcagctagtctatgggaagatgcagcagcaatcagaaataagaagaaactgaaatatcttacatgtcggttgtagctggattcaaatgaaaattttagttcacaagttctatgtgggagacaatttacacccaaaggcacgggagatctatgacaaactggactgattggctagctgaatgaagacactagtattgttctgaataccgagtttgttctttatgatgtgggggagggacaaaaggaacaaaatttgctccagcacagtgaaaaattgctgttgtttttggccttataggcacccccagtccaaaatctgtcggggtgtttgag

SEQ ID NO: 90400 - DNA, 615 bp, Eucalyptus grandis
  Intron number 1 from transcript Egrandis_v1_0.009375m (loc us Egrandis_v1_0.009375m.g) derived from phytozome v7.0 (c hr-ID scaffold_9; pos 23242526 to 23243140 reverse strand)
gagtagtgagtccctttttcccctgcttttcctatgtaaatttttcgtgttcgtaggtggtataggagttagaggctcgaaatttgattcgataaatatcgattgtcatcaaccatccattactaatgaacctttgggcttcgacaaggagaatatgtccgatttcagatatcgcggcagcatggtgggggacatttgagaaaagtttggcttttgatcatgagacttttgtttttcaaggatatatgatctgttttgatgtccatgtaatctgtttcgatcattccctttctctcggaaaacatcaacattcgccttctttgaacaaatttcattgtgaccgcgaattcttgtgcttgacaaacttggaattcccactagtgagactgaagcctaaatttactgtatttaagcgaatcagtctcttcattgctgcagccttatcctttaagcttgtatttcatcatgcatgtactgcatccttcttgtatcctattgatttttggcctaaaagaagagtcaatcctgagattccaataattacaatatttagaattataacatttccctttgtcccaatatgatgtgttgttgaactttttctaatagctaggg

SEQ ID NO: 90401 - DNA, 439 bp, Eucalyptus grandis
  Intron number 1 from transcript Egrandis_v1_0.033802m (loc us Egrandis_v1_0.033802m.g) derived from phytozome v7.0 (c hr-ID scaffold_11; pos 6559525 to 6559963 reverse strand)
cgaacctaaaagtgagctctcttccgttttcttttccttttcctttttatccagttggagaaatgtcgggtaaggactacaaacaggggggttttttgtatgatcactctttgatctttatcataaaggtttataagctatttgaattgttgggattgaagaccgtatttgtagaataattcgcggacaagaaatgtcgataaggtatcaataccacttagtatctcgatattttacggttttagttatttaagttggtttcttgatgcaatggtcaatttcagccattgcattcggactaacctccaacgtcatacttcaataattccacatccttttttattgagaaaaagaaaattgctcaattaagtgacatatcactttgagtcaaatatgatgtttaggtgatcgaacgctatcgacagattgagcccaattt

SEQ ID NO: 90402 - DNA, 910 bp, Eucalyptus grandis
  Intron number 2 from transcript Egrandis_v1_0.030109m (loc us Egrandis_v1_0.030109m.g) derived from phytozome v7.0 (c hr-ID scaffold_4; pos 8841042 to 8841951 reverse strand)
ggagaatataaggaaagctctcaacaagctcgaaggcaagtctcccagccactcggaaaatctctccgacatgcttattcgtcgctatttcactttcttgctagggtcgtcgtcgtcttctgatggaaatatttttatttgcatcggagtgccacttcttctgtccaccccagcccatcatagaacatctagtattaagtatttcgtgatttttcattcgaacaaaaacatatctttattagcctgaataaacaactaacagtaggtgactgatctatattttgttgggtcaatgggatcggtgacctggaacaaacttgtgaagttcctttcatctttcttcaatataaaaaacatgcaagaaaccttacggtcatcgctcccgaaaaaatatggttcttctattccgaaggaaaatgaagttttaagatggatcgcacaaactaagaactcaaatcttgcgtggtcttcaaacaagttattttccttttttttctaataatcgggatatcctgcatcaattggcaaccgagtacgctccaatgagcgtggtagaccgttgttccaaccacaccggataactgcagagccgcacgggtccttaaatactcgagaaaggtccaagagaccagcaacggaggggtccgagcttaagacctctagcttctggagacagaagactcaaccgcttgtccaacagcactgaccaacttggtctaaatcgtttatcttttcaaccaaacacatatatagtgcatatttgttttaatgctctggataagctcgaaaactaaagtttcttcttatgcatcctttgacgtgtgcacatgtaattttcattgctagacatctcatacatatttgcacgtaaactaacaattgtattttgaatcgtgcgcaggagtgcacg

SEQ ID NO: 90403 - DNA, 716 bp, Eucalyptus grandis
  Intron number 2 from transcript Egrandis_v1_0.049980m (loc us Egrandis_v1_0.049980m.g) derived from phytozome v7.0 (c hr-ID scaffold_4; pos 717906 to 718621)
ctgattatcaagcttcaccgacttctcggaaataagtaagtttgcacaatcatacctctgcaaaaacctgataaaagagtagggaaaaaaaaattgacctctgtaaatttatttagcatcgcgaagaggagaagcacaaacttaaatcaccattgcctaaaacacttcatttcttttctcacaaacgactttcaattccacaatgatacactgaaagtatttctggattaattgttgttttggaatgttgcctagtctttttcctcttcttttggaagaaaacccttctttcgcatgatctttggctcaaatgacccgcacaaaatcacactggcgcatgtacatttatacgcaccaagagagtgctaatgctcttcagaaaaacatctatgaacacacagatttcagagatagaaaatcaaatataactcctagaaagtcccagtttgatggcttcggaaacaatgattgcatagcttgatgaatcgactaaccatgttaagctaccactgtcttcaaatacggaagctagcatctacagaagatgaatattatccgaatgattaagcaaaattttagcgtgagatctgtgtgtgtgtgtgtgtgtgtgagagagagagagagagagagagagagaagtatagtacttgtactacacaaacataagttcgtacttgtaaacaattatatgattcctgattaaattctcctcgcag

SEQ ID NO: 90404 - DNA, 926 bp, Eucalyptus grandis
  Intron number 2 from transcript Egrandis_v1_0.019123m (loc us Egrandis_v1_0.018738m.g) derived from phytozome v7.0 (c hr-ID scaffold_6; pos 40230141 to 40231066)
gcaactacagctgtgcccaacagctctcagaaaaggtacacgcaactcacatcagttttccttttcccccttgcccctcttgctaattgtctccattggccgagcatattcaatctcaggacagtgcgtttttattctatttgtgtatgccttaaataacgaaaaatagaaaaatcaaacactcatgacattatgggaagttaattttttctatctatgatagatctacgtgatgtggtccatggctcgtgtattggcttcaggactttatgtttgctaagtgtctaaagaaatttgtttgcctctatgcaagtgtcaactaatttatatctttgccttttggaatattagaatttggagttttgctccattacctggatagtgatgctttaatgctgcatctttctgcgcattaatgctggcgtttagcttgtttcggctaaaaagatttttatatctcgggcttgtcgatatcctcttctgatgtaagttttgccctttctttaatgactttgtgtctgagttttcgtgtatttgtttactcactttcttggctttttcctttgtcccgggactcttggggctattgtatggttgattttatcattaggacaagtcatgaaaggggagaataaacattttaataatctgaaaaattacttgatcatgaggacagtggtcatctgaagtgttcactactgtattatggaaaaattctatttgatgttggatgatggatatactttctttttctttggtactgtgacaatataaacgcctcaataattggtactttgctggttcagtttcgtctggtattatctagactctggatgcattttcatattcctacttatgcaattctgtgccctcgtgaatgttcctcaataggactgctccagctccagttgttgggtggccgccac

SEQ ID NO: 90405 - DNA, 924 bp, Eucalyptus grandis
  Intron number 2 from transcript Egrandis_v1_0.055060m (loc us Egrandis_v1_0.055060m.g) derived from phytozome v7.0 (c hr-ID scaffold_9; pos 16656146 to 16657069 reverse strand)
atcaaagcgctcgtccttgtaagtcttgctttgttggctcttcctacgctaaatttgctactataatttggagcattagaagttattttacctattagtcatcgcatctataaaattcatgaattctatttctgataaaagtccgtgtagaatgtgtttgtcacatgccagttagtggacctcgcatattttaatctcacgctataaaattaaaaacatttcttgaagtgcaaaatgaaaaacagcaatagcattcattgaggatagtcagtaatctgcgcaaatgaaatttcacgcctactttgaatacaagaaaatcaatttttctaacagccgtcgtgcccaagcaatgtttttgggatcagtatacgtacgcagttggctaaactattgggttcaaaaagtctggtttggtctttctctttgcttacaaatctttttggagagttatggtttgtctcaattttggacgcgatcacacgagcaaacgcaacttttgcgagcacttccgacatttccttggcttgcatgtccaaagtaacccaagagggtgctcaagtgataagcggattttcctccttgctcaagttttgggttcaaatcatcatacttgtatattctcttaaggccacctcgatgtatgaaattgtggaccgccaaacgtggggaaaaaccaaaaacacatgcacactcaaagctatgtgcgcgcttccctccgttgggaaatttgagtgcgttgggcggggttagagtcaagcccataatgaacaattcatgtccaaaacccaacaaattgtctagtgtaaaggacgtattgttatgtgaagtcctaatttcttgattcttgaaataaatttagacaataaatttatctacgcaggttatattagtaggatgaatagatccatcatctctgacattaga

SEQ ID NO: 90406 - DNA, 739 bp, Eucalyptus grandis
  Intron number 1 from transcript Egrandis_v1_0.028148m (loc us Egrandis_v1_0.024716m.g) derived from phytozome v7.0 (c hr-ID scaffold_6; pos 46866612 to 46867350)
ggagaaaagattagttgattggatttcgttcggaggtaatgtagttcctcttgagaaagcgaacttcattttgggaagggaaaagttcgtgacttttgcggataggagccagcctaaattgaaattaaggcagtttacatatctggaatcagtgtttgatgattccagatatgagaaggttgttacttggacgaagcgaatgaaggttctttgaacaagttttcgttgcaaagtgtggtgacttttatcgtgaccgtgggaaacgactgacgtatatctctttgctagtagccatatggctgttactgtgtccttatgtagtttttgatcgcaagcgatgattacttgatttggaccttagcgggtgcaggattttattagtaaccccagagggtgtaacagtttgttgcttctaccacattatttcttagccaaaagaaatggaaaactaagtgagatgactaaattgaaatatatcgaagctccagacaagtggtaaatctagaatttgatgaccagttcagtgacatgtactgcggttcacctctaggaactgtatctcccaggagatgattagttcaggaaaatttggtatcctttgaaaacgttagtctaatgcatgtttcattcaggtgtctctgttgtttatctagttagcaactttctcagttctagtccttattgttctttgaagcatctctttacttttacaatgctgttgtcatgttggctttgtagt

SEQ ID NO: 90407 - DNA, 956 bp, Eucalyptus grandis
  Intron number 3 from transcript Egrandis_v1_0.028148m (loc us Egrandis_v1_0.024716m.g) derived from phytozome v7.0 (c hr-ID scaffold_6; pos 46868168 to 46869123)
ttgaagcaattgctgcgaagttatcagctcctttggtgagtgtacatgacctttaaatctttgtgctggttttctataagacagctgagattcaattattgctaattctctacatgtctcttggacatttttggtttggtccatagacttatatcacctttcttcttccttccattactgaatattgttagagctgactatccttactttcatcttcttgattgccttaagtgcaagtctataagctggaaataaatggatggattaaatctccttgtccccttacagatatgggcctgggtttcgtagttcttgatcatttcatggttctaacagagtatgtttgtgctgttgtggatggaacagattctttaatggcgtagcaaaccccattctaaacttttgttcaaaatgagttatactttcaagtatttggcatacagaattagaacagttcggtgtgtcagtcagagcttagacggtcctcttatcttgttatgtatgtaggtgaagcccctgggtaccttattggctagtttttttgttaatttaggaagacaaaattatgacaggtttgatggagatgcatgaatagccctctagtcacgatgttttaagtttttttttttttttgatattttacatgttcgtgacatttcccatttaatatagtgagcgccaaagaatgctttgattggaccatggagttttttttttttttttttttgaaggtggtgagaagtggggtgggggggattatagtagatggttgctgattgctggtgcgcgctgcaaatctttcagcttgtcttcttgcaggcatctattatgtgcctatggaagttgtcaactcacttgtctagtccttttcaagtgcacttttaactgaaaaagtttgagttgctttccgtcgggtatgaggtttcatgatatgtactctgcttgcatttctcagc

SEQ ID NO: 90408 - DNA, 904 bp, Eucalyptus grandis
  Intron number 1 from transcript Egrandis_v1_0.017854m (loc us Egrandis_v1_0.016598m.g) derived from phytozome v7.0 (c hr-ID scaffold_4; pos 37566886 to 37567789)
cgagcattttgggaagttgaatcgcttcgtggtaggtgagtttttgctggatcttgtggttttcttctttgtctgcccttgtagagtggattttcatctgtcgtatgatgtcttgttctgttctttctgttcctttgatttatgggtgagctgatgctgacgtaaaggactgaattttgcatctgggacgatgtcctggtttgttgcattgttattaagatagtggtaagatggtcgagcgaatacatttcgttagagcctcagttctgctttgtagattgctctatgactgaggcacgcggaagccggtggagtttgaaactgttaaaagagaaaggcaaattgtggggacaacattctactttgcatctggtttgcgcagtgtttatttgttagatgttgaaaagggtacttttatctcatcaaaattactaaacaggttgtgcttttcggttgtctgcggcacttgtgaagtcttttcgggaatgaagttccattggaaagaaccttaatgtgttgtggctggattccatgtgcctagataacttaacgttcatttaaagttgctagttaaggtagaattatcagctgtaaaacgtgaaggtaggtgtgtgacagtgtcaagattcgaatactcaattagaacattgtggtgtctgttatcttgttctccggttaactttctaaagcttattcttttcagttcctatgttttaggccgattctttggttatgcagggtttgattttctagatatgtttgttcctctattactgaaaatatgtggtgttgttcttcgatcttggagaccctcattctggttatgttaaagtactttactgatgattcacttgacccatattttccaggtgaaccctctactctgcaagtgaagcagaattag

SEQ ID NO: 90409 - DNA, 666 bp, Eucalyptus grandis
  Intron number 2 from transcript Egrandis_v1_0.017854m (loc us Egrandis_v1_0.016598m.g) derived from phytozome v7.0 (c hr-ID scaffold_4; pos 37567872 to 37568537)
aagaactcacaggttaatagttgaccatacatctctcacacctctcttcactatctgtctgtgctacttttcatgagctccttcgttcatttcatcttgcctctttgctttacatagtggaagaactatttagtgtctttctatttcattgactattctatgccacaacctcactgttgtacctgctattcaaagaaaaagaagaaagatagattctgcgaaccttccttgcactttcctcactgcctctgaacgaataatgatgcagtcctgcagaaagcaattgtggcacccctggattcatttgcaaatagtgtgtttggctcattttgacaaaaaaaatttcttgtgctaagatgagagcggaactggaataatatcgcgaacacgtgccgtatataggccttgctgatgaccatccaaactttatgatgacatttggactttagctaacttcacaatgctacagtttgcttttttaggttctgttcaatttctaaacagtcagatgtaggttggatacttttgaatagccctgctgcaaatgccatgaatgtttttgagtccagaaacagtcactttattatatttattttttcacctgatcactaagattttgtttcattttgaaactacagggcgtgcaggaaatacaatcttcaaacc

SEQ ID NO: 90410 - DNA, 712 bp, Eucalyptus grandis
  Intron number 1 from transcript Egrandis_v1_0.004944m (loc us Egrandis_v1_0.004944m.g) derived from phytozome v7.0 (c hr-ID scaffold_6; pos 4522206 to 4522917)
tggggctactcagctcttctttaaccacttgtgttagtgcttcttttcgatttgggtgcgggtccataattgtgattccagaatgagcttgttgtgatcctttttctgtttgtggatcttgcgcataactttgatcgggggtgcggcgtatgccttgttgcttttcctgttttgccttgtcgaaaggagtttaggactattagttcggtgtacagtagaaatatgacgttcgaccaatttaactggttctgttgatgtttgttggatttcacggtgacgataaatctaaagttggttcaccaaggaataggatggacttgtgaaatttctactctgctgacattaagggaaaagagttgagcttgtctgttgtactgggtactagctcttggaatatttgaatgacgagaattgataatcagttgtcgacgaagctggatttttcctgtcaacgggtctcaaattcagtctcctttttgattctgcatcttttcatcagttttctggacatacctttaagttcctgagcaaatcattagatcaacaagaagaaatttagtttcctcaaggaattgttttctgctgctttgtatatctgattgctttcagaattagtctagtgctactgtggcagtgctactgctttcggcatttactgataagtcccatgcattcagatcccatatcacttgtcagagatcacagagcaaag

SEQ ID NO: 90411 - DNA, 936 bp, Eucalyptus grandis
  Intron number 2 from transcript Egrandis_v1_0.012331m (loc us Egrandis_v1_0.007551m.g) derived from phytozome v7.0 (c hr-ID scaffold_4; pos 7599431 to 7600366 reverse strand)
ggatcctgcttctttggcaaggtaatcattcataagcaatcttgcatgtacattctgggccaatctactatatattcttggtgcttctcacttacgcacttcaaaccgtatcttgatctttatcacagtaattaacaactccaaattagtttatgccaattccataccctctggtatcagtgcattattaagttttagttccaccttagtgcatccatctttatatgcagaaataattctctgattcatcttctaacattgaataccgatatggagttttccaaatcagctatatcttgaagctttagatacttagtatcttttcttgccatcccttccatgacatttaaggtcttccgcctttctagcacaaatctctgttcctaatcacttggcctgagtggagcattagaaggtctttgttcaaggtgaccaaggcatctcaaacaagctttttccatcttatctttaattgcgttaaatttaagtttattgtgcctttagaacattcattatgagaaacttgtaaacaacagaatgctttttcctccctatttaaagatattcctaagaaccccttgagttagttgggaagaatcgagccatattttatcttttaactttatccgttcaaaagtagcattatatttaaaactagtggatgcctcattacatcatgtgatgaggctttactcaatacatcatgagtttggcttatatgttgactattctaatattaatacttagacagtttaaattttgggtggggaaatgctgaacttccctggtgtccccttgtatccggatctgctacttctattgatgtatttgcatgaagacacaggagcaattcaaattagccaccaacttcctcaccctttgtttttgttttcatcttcagctttattgagaactttggtacccatattgttactt

SEQ ID NO: 90412 - DNA, 870 bp, Eucalyptus grandis
  Intron number 1 from transcript Egrandis_v1_0.002436m (loc us Egrandis_v1_0.002429m.g) derived from phytozome v7.0 (c hr-ID scaffold_4; pos 31078375 to 31079244 reverse strand)
gctctccatcttccgggttcactcgtcgactccgcgtaagttgctctccgctctgcccgctctcgcttttccgcagtaggaactggtgtcgatttggggcgggtttcgaatcgatctgggattacgatcgggggggcgagtgtgcgatcttctagaacgtttgaccgtagcaccgatcgaagtgggttgtttttttcggctcgcgatttggtgtcgaagtgtgtttttgttgggcttttcggcttgctgctttgtgcctcgtcggcgaacagtggccctgagcagcgccactttacagtctgcgatgtctcctgttttcctgaaaaatcgattttttttttgcgttttttgattcgttggaccgtgtgagggggattatgacgcgagatcgaggatgatccgcctcaagtttggggcttcgcgtgttagttgattcccatttcctttttagcttctgggttggtgaatcccgttatattcttggctgcatagcttatgtgccagtcagctgcagtcacagatcatacttttctggttcctttttatgcttcgaatttcgagatatgtcgtttgtaggtttgtcgactgtttggtacagtagtggggaagttggcttgctgtaaatctgtttgcccattccttttgtaattaatattccaacgttcggaccatctttgtagctgtttttggtgcttcttgtgttcttctctgcttaaagcgtgttaggtcttgagttaatttgagtgggtctttcagttagggccatgtttgattagaaaaaggacagcacccgattattttctccggtctttttcatggagctctttaattgactttaccttctctctctctctctctctcttagatagt

SEQ ID NO: 90413 - DNA, 974 bp, Eucalyptus grandis
  Intron number 1 from transcript Egrandis_v1_0.038641m (loc us Egrandis_v1_0.038641m.g) derived from phytozome v7.0 (c hr-ID scaffold_11; pos 27920405 to 27921378 reverse strand )
agtttcacagccccagaaacctcctcttggctctggtagtcttctttccttgctattttcaatcttatatgttgggtgataaacccatccaagtgtttgagaaaattcctgtgctatcactctttttctgtttggtcttcgttctttgcctgtcgtttttgggtatttgctttgtcttcgcgattttgccattttgggtgattaattgttggccaaaaagtcaaaaaaataactcttttttggctgatcttctttgcttcataaaagatcaaagttatctgataaatccttatgcatatctttatttacagttttttcataagcgtgtgaatcagttctgtagacttggagtccaaaatcaatagcatttcttttgtgtcgcttgatcaatggatctcttactcacggacctatcatttggtgtttggcatgattgataaatacatatcgtaatctatgggatttactgggtttttgcatccgtcaccattcgtatgtcactagacaaattgcaagggaatgcccccttggctttggctcaacgatatttactatttatcttgttatctgtttgtcctttcttatttctcagtactacattggacagtcaaagtcgtttactcgtttgtatgtctgataatgaagataagctcagccttttcccactcatctttcgcacactctttcaggactcttatgcgatagacgcgctgtgtaacttttgtccttagtgagtcagttaatcattccttgatcatctttcacttgctgacggtttcagttatgaagggaggcgttgtagtttttttgtttaaattatggggcaaacaccagcccgctgttcatagcataactaaaatacattacaatcaataaggtaaaacagtatcagatgggttcttaatttagtttttctttggtctttgattcctcacacaggtgggtgaggtcggggagctgtcggagatattcca

SEQ ID NO: 90414 - DNA, 600 bp, Eucalyptus grandis
  Intron number 1 from transcript Egrandis_v1_0.050470m (loc us Egrandis_v1_0.050470m.g) derived from phytozome v7.0 (c hr-ID scaffold_11; pos 11710314 to 11710913)
gtcgaggaaggtgccgctcgacgtgagtggagacggtgaggtttttcttctatttattttctccctatttttccagtcatattgttgggtttggtgcaaatgcaatctgatcatttgtgttttgatgattgaatattggtcaatctgtcttattccaagtaaatttttatccatcaatagcagcatatgaagggcttcttaagtccttgacaacttctacatggtattaagtcttcatgcatatagttctgcgtaacttttgataggaacttcttgatagctctattcataagcgttgattttcatttgtaccaattttgcagctgccgttcgtaataaaccaggaaggatttggctttttagttactttggatttttctgtgggtgtttggtttgactgctcttattctctgaaaagcattatctgatctttctgcttagagattgcattgtagccccccgtgacaacagttgcactaccgggcacttttctgttttccattaattttggtagaaaatgagttcagattcgataggagaaaccgtaaccaccttccgaatgcagtcagaacgccattcaactcgaggaaaaggagaaga

SEQ ID NO: 90415 - DNA, 880 bp, Eucalyptus grandis
  Intron number 2 from transcript Egrandis_v1_0.008182m (loc us Egrandis_v1_0.006826m.g) derived from phytozome v7.0 (c hr-ID scaffold_11; pos 8805769 to 8806648)
tgacggtttccattttcgcctccataactgctgtggtgagtatggaaagtcaatttcattcagctccatatctgcaagctccgtcacatatccatatcctaaggctgtccatggtggtcctcttccctttctcgccctatagttacctccctcgccccggcacaataaaaaaggagaagggaaaaaaacaaaatttcgggctttctaggaacctatcagcatgcggaccggtttagactatagttcctcgtttcacacacttggcccctcgagaacgttatcattgacaaaaaagatggacatacaatctctcgaccatctcttctaagtccttaaaataaaatgttaggaagtgttaatttgtactcatcgcatccagctttgccgctcaagctactatacttttgaagtagggattaaaaatggagattacgagctgagattttatggaaagtgtacgagagaaagaagcggtgaaaagaacatgtaaagcaaaagttctgaatctattactattagtgtctgattgtgttgcatgatcaaacaaagcagcctgctccatgtccaaggatctgcctgttctgcgtccccaaagatagcggaccaaagcagactggtcaagaataagttgaaaagaaacgctaagttatcacaatctattccaatggcctgtgctagatgaaattcatggtacaggaacagaaatttaacaggaacttggacaaattcatgaggaatctcaacaggatagacacgttgaaaccctgcctcagaatccattattctagctcagagacaaatgtttcccctaaatttgagtacgtaacactaccttgaacaattaatgaggctttcttttgcctttctgcagggtgtgagt

SEQ ID NO: 90416 - DNA, 542 bp, Eucalyptus grandis
  Intron number 2 from transcript Egrandis_v1_0.020409m (loc us Egrandis_v1_0.020409m.g) derived from phytozome v7.0 (c hr-ID scaffold_2360; pos 445 to 986)
gcacaaagtttggatacagtaggtaagcattctgtttttttaatggcgttgagcttttgatgaaaatggtcattggtttcggcttcttaaaggaggaaagttgagtgaaagacttaggttccttattttatttctaacattactggtgtttctttatacaaatgaaatattgggcagctgaaagaaatatctttcactttcatgtgccttcttgaaacagattgtcccctttctcctaggttttgtactgcactgtaattccatctttaagtattctgcaaatgataacacagcagccaactggctggttcacccttcttctttgttttgttttttccattatgtcatgtacttatgcaagttttctgcacttctgtgagtattcacattaaactcgttcacgactagtgtgaatttatttagttggcttcttttcttgtttcctcccattgtaagctagtaaatgaatatttgtttctaattgtctttctttactgtcttatctaggttggtttgctagggaaccaagcatcttgaagcag

SEQ ID NO: 90417 - DNA, 583 bp, Eucalyptus grandis
  Intron number 1 from transcript Egrandis_v1_0.027341m (loc us Egrandis_v1_0.027341m.g) derived from phytozome v7.0 (c hr-ID scaffold_4; pos 35055679 to 35056261 reverse strand)
gtcgtcgaccgcccatttggctttgcgaatcgcaggtaaagacctctctctctctctctcgcctccgtcgcgtgtcgctgcccgttcttgggtgctcgaatctgtcgggcgaaatcgattcgtggtcggactggcgtgcgcatttgcggttattccgtgtttgctcgacccaatttgtcttgtatgcggtgtgccgagtgtacgtgcgtggggagctaggagatgtggttaagtagtggggattttgctgggttttggtagatggagagatttagaagagtaattgcggatttacttgattctgcaatgttgcttgatctgggttttgatttttaagtgctcgactatatgtcgggtgtcgatttagtttgttttgcgtgcatgttgtctcctatatctggtgtggtcgtgctgaaactcatcgaaaagtctttcgtttgtctgaagaaggagccggcgaggagattggaggcgaatttgatatccaggcggaggcagaaaatgtatgtcgcgctgaggatggtattaccataagactggaattattcgggattttggcgagttgcatgaattgttgtcttca

SEQ ID NO: 90418 - DNA, 903 bp, Eucalyptus grandis
  Intron number 1 from transcript Egrandis_v1_0.030340m (loc us Egrandis_v1_0.030340m.g) derived from phytozome v7.0 (c hr-ID scaffold_6; pos 40351881 to 40352783 reverse strand)
caacctcttcaacctcaactcctacaagcactctggtatgttcccccacttcttttggttcctttttgctctgacgatgtctgcggaatctcgcggtcgtgttggtttccggatcaacaagaaatgtgcgtgaaagtaaggtggaatttgaaaatcgtaggttctccgatcgttctatctggtgtgactagggagggtttaggcggaccgatgaaggcgctgtatctgtaaactaatgtctaaagggaagctatgcttagctgaagatcggattcatctgtttttgtggttgttgagagttatatgtgtatgcataaattggaagttgtgtgatcgtgacctctcattatttgatcggaaagatatcgatgaattatgcttggagaatgtcgatgtgttgcgaatcacttggtaccctttccttgtacgagaatgtttcctttccttgtacgagaatgttttgagaattttatttgaaaagttgtagcttttttaaccctggaaatgattaagattgcgtgaaaatggtgtgaatttggtttcttgattcagttcaattgattacagactccttgtctctctctctctctctttctcatttaaagcaatagaggtttttttttttttttttttttgtcagtcttactctattcctattctacactcacttgcagacttgtgccctgcctcttgcagggcgtgggagtcgcaacccactctcaaacttacgcgtccctaccccctgtctccccctgagaaggtggggatttgaacccctcacctcccccttccatgttggaaggtggccatttaaagcaatagaggcttgttcgagctaaaagttgacatctttgttggtgcgtaataggtttcgcaaataacaagacagtcaccattcaacct

SEQ ID NO: 90419 - DNA, 383 bp, Eucalyptus grandis
  Intron number 2 from transcript Egrandis_v1_0.020187m (loc us Egrandis_v1_0.018258m.g) derived from phytozome v7.0 (c hr-ID scaffold_9; pos 25558588 to 25558970 reverse strand)
ctcaatgtatgtaatttgtacttccactcaatatttgtctaaccgatggtgattgggctacttatataaatcatatcaaattctgtgatatgattgaaatgaatgctactattgttatcttggaattgttacttcagtgtgatgtcgacaatttaagtgtctgctcgataatttagagtaaataacaccagttatgggcatttcccagattcactttttcttcttccctgatgtgtcaagtttcttgatctcctttttcactagttgatttgcaaaacttgctgttttgtcccgtaggggttttgtttataaatcgctattgatggttaccaatatatatttgtgtaggatcctagtatcaaggaattagctgaacagatagc

SEQ ID NO: 90420 - DNA, 901 bp, Eucalyptus grandis
  Intron number 1 from transcript Egrandis_v1_0.008008m (loc us Egrandis_v1_0.008008m.g) derived from phytozome v7.0 (c hr-ID scaffold_9; pos 6659153 to 6660053 reverse strand)
ctccaagctcaacagcacgcagcagtgtattgagagtaatgccaccttagtcctcgccctttctttgtgttcttttccgcatcttggcgttcttcaaacctgttttcttagtgaatatctagtttaggatatgtgtaggataatggctatcgtggttaagatgtcgtacatatttatgccttcatctgtaagtagttggttaaattctgttgtagtggttctggttccaattggtattatagtcttaagcatagtttttgaaatttgcagtttctggttctctatggcaaatgttaatgcacattcattttttcgccctaagtttttcttgaatcccattgttgtaatattgttcaagatggtgatgactgatctaaggaatatagcagatggccaataaagtcttcggtttctctgcatccattgatgggtatatgttcttgagatacggatttataaaagacccatgtaccctgtcttgtgcaatttgaaattttgattgttagggtctaggtattgtctgaagataatgctgagtggtgtaacaagttgatgattgattatagttagggaaatgtaaagcattgtaatacgcaatttagttcattagttgtaggttttgcttttggatcaatttctcttgttcttgcctgttgtcacatagaatcctgaagtgctcagttattttgatctgcaaggacactgtcagttatttgaaatatctcttgttacatcaaggttacattgaacttcagcctagactaggaattctttttactttattgctgtgatttcttctacgtttgtccttataaatcaactgtttgattcttatggttttgttttcctttatgttcaatttacagctttgtcacattggtgtatatttcatcgaagtaag

SEQ ID NO: 90421 - DNA, 693 bp, Eucalyptus grandis
  Intron number 2 from transcript Egrandis_v1_0.026395m (loc us Egrandis_v1_0.026395m.g) derived from phytozome v7.0 (c hr-ID scaffold_11; pos 15498891 to 15499583 reverse strand )
gggactacactctattcggtaaggctctctactcttggattttcaccttgtagttcggagaggtcttgagatcaaaagatgtccatatacagattgtttttcagcatgctactgtagatgctcgttcactctgaatctcaagtcgaatcctttgcgtaaggagcagatgattcaaatcaacgacctggggcgaaatagtctgaatatgaagtatcgggcagctgtgcatctcagcgaggagagcaagtcttccgagtgtttccctcagctgtcacagttacttaggtggcatttaagaaaaaaaatgaaggccggactcatcagctagctatttaggaagtatcacaggatgagttgttgataatctgtttctttttatacgtcggccaaatgctgtagattaactgtttggacctgcattttcattggattattttcctgatcaatgttcgagcagaatgatcagtacatagatgttgaaacgtcctgccacgtctgcactgttactgtggcccgtgggtctagtgtcacgagagtaagactacgctggtaaatttacaagcacagtgcaggtctcttttagtttgcattctagatttatggtgcatttcatctgtggggataaagatttgccttcttctatctgtactatatcttaatttcatacagaatcgcgggccatcataaggtatt

SEQ ID NO: 90422 - DNA, 691 bp, Eucalyptus grandis
  Intron number 3 from transcript Egrandis_v1_0.000098m (loc us Egrandis_v1_0.000097m.g) derived from phytozome v7.0 (c hr-ID scaffold_4; pos 20363374 to 20364064)
cgcatccccgcgacttgacctctctattaaagaaggtatttttcttcctttttccaatgccattgggacgactcctctaatctaatcatcaacgaagatatgtcttgctgctgttagctcgcactccgcattagaaatttcatatgggcatgatgacaagttttgggaagagttattatatatcgtgctgttcaatattagaggtaggaccgaggctaatatgcagagttgggatatgcacgaatatcgctgtatatgaaagtaaaaagaggagacttctataacataaatttgatcaaaaacaagagagaagcttttctgataggggttctcttagatacagaaacacaatgtttgtttggtattattagcttttgatgctgcagtgtctgaggctgccctgtgctagagttttggccattattggtgctcgacagatgacacttacatgtgctgtaatgataaggatttcaggaagtgctaggctagctgaaggtttggcaaatggttaaataaggtcttcaaagtatgatatgttccttaaaataataatatttttatctcttacagctgtgatatcagttttccaagaagtgctaatgttttttgcaccttatgatcctcatttgcttatgtgagtacaattatttgattaggttgctcaataccttcgtagtaagaattgggatac

SEQ ID NO: 90423 - DNA, 991 bp, Eucalyptus grandis
  Intron number 1 from transcript Egrandis_v1_0.042610m (loc us Egrandis_v1_0.042610m.g) derived from phytozome v7.0 (c hr-ID scaffold_6; pos 46476772 to 46477762)
ggcggttcttccctcacggttcggtgaggtctcgggtatgccctcgtgctgcgtctcttcttccttgctcagcaacaccgtactgcctctctctctctctgagcgtgtctctctgtgcattctttcatccatgaggcaagcatttcgactagggttcaggggttcaagtttttctatttgatgcttgcaagggagattattgagcagggaagtgaatattactgatggaaaatcatgaggtcttgagaatttgccttcaacaaagagcaatttgtttatgaaaatgaaattttttgcatcacgctttttctcaaaatgataatgaaacctgtaagtccttttttgtatttctatggttgtttctgaggcttgtaaattgttattgtaaagcatgtgggaagagtacacggaatgactgggttgaaggactagctccctacctactgttgcagttcagaggcattctgatttgttaccgcaagtgcatttgaccccaatgaattgtcatattttgaccaagaatgttggagtctgtatagatattctgatgttttaatctagttaattgatataataatatgcttgtagtagggttagtccatttgctttgtgtatattcgaatgaaatgcttctcatcttaaataaagatcacagccaatgatcagttaagttgcttatgagatataattagcatctcaagtgatgttggatgaataataaaatcggcatgagttgcactttgtatgtcagaaacgcaaaagtactaccttctctctatattaatttgtgtaaggtggataccgtgccttctggttttctcctacatttggcttttttggattattatttttgaggttattactagtattttttttgtgcagataaagcccctttcagttacatatggcttgggcatatcagatcatgattctgagggacggctgtcactgcatagtttgattcattctatctcttgagcggttacgttcc

SEQ ID NO: 90424 - DNA, 797 bp, Eucalyptus grandis
  Intron number 1 from transcript Egrandis_v1_0.027321m (loc us Egrandis_v1_0.027321m.g) derived from phytozome v7.0 (c hr-ID scaffold_11; pos 21207740 to 21208536 reverse strand )
gcccacaacaacaccatttcccacgtccacagcatgtctctttctccctcaatttcatgaattataccatcgtggattcctcactagactttactattaatcacgcaattgcacaccaatcttttctctttatagagctgattggttgccgaattaaatctctttgcacaatattagtatttcataaaataaaataaaaaacattagccgattttttggtggaaatgtagcaacaatatgtaatcacttatcatattaaaattactcatgaagtaattatgagcataatattaattgttcacggtacgattatacaaatttttataagtttaatcaatacaatcacatattatacgcttagcatttaattatataaataatatttttagtgattaatgggaatgtcaaactcaaagatcatggttaaatatcaaagtgatgagagttatattccctctaactttaatcgtaagggtagtttcagaattttactattctctccttattacatatgttattcatactaatgcatggtagggctgtactttgagtgatgcttgcttttcatattagctatatattcctttactttaaacaaaccttcttttttttaggcaatttttgaagaattttttcatttagaatcgattgagatttatgtatacatatcaatcgatgtaataaagccattttgtaacatcattttgatgcctagtttttaagtaaagctagaataaagccttcgcgtcgttgcgaaaacagaattcttcaggagcaatctcttgccggcacccttc

SEQ ID NO: 90425 - DNA, 958 bp, Eucalyptus grandis
  Intron number 1 from transcript Egrandis_v1_0.020958m (loc us Egrandis_v1_0.020862m.g) derived from phytozome v7.0 (c hr-ID scaffold_9; pos 21543581 to 21544538)
tggcggaaccctaatttgcgagacggtctctctctctctctctctcttcttctcaatcgaatttgatgtccttcgcatcctcattcacgtcactgtaaaaccctctgccgaattcaaattctactatcactagggttttcaatgcggaggtggtgcttgatttcttgttgttttgctgcgttttccatgttcaattgaggtggctgcacgttggtagggttgataggttcgtgttggtgaaaagttcaataggttctcacctcagttgatcgttgaaattccggggtgattgctgagtttttatctggttggagatgatcaggtgccttgtttttgaattatggtgaatgaggtgatttctctgaattcggacgtgtttatagtctctcgaaggcgggggatccgacgtggccctcccgccgcgctattagtattcctgaatcggaatggtggccacatcgattagctatgcgtgtgaattggatagagaaaagatggataccgttagtagaatcgttctttggaagtgtgattgaacaacctgttcggccctcattaaaggattggaaatgagccgaaaaactaagctgatcggaaaccataattaaatcatatttttgtttttgatcctatctgcctctgagtattgtggattcacttatctacttttatctttaattgaacggttcattagaattgaggatagcttctctttcccatttagtgcgcttgtgcaagttgaatatatgaatttctatccctttcaagttcttaagtttgcaggttcgtaaatgatgtgctcaaaaatgtgaggttgagctatgatttctttccatattgtcatactagatttttgcgattcttagtcagcccatctttatttggttgctctcttttatcttgcttctcggcttcgtgtgcagatcttttgggtaaatttgtaattgctccttctgat

SEQ ID NO: 90426 - DNA, 795 bp, Eucalyptus grandis
  Intron number 1 from transcript Egrandis_v1_0.036947m (loc us Egrandis_v1_0.036947m.g) derived from phytozome v7.0 (c hr-ID scaffold_9; pos 11306608 to 11307402 reverse strand)
ccaagattttccttattttctgtgagttttcctctcatctacattttaatggtgatggatggacattggattagtcttgatgcttgcttgaggagattctttttccatttgtggacttattgcccatgtacactattttcttttactataaatcaacatgtgtacaaatttattcactctaatcttgatcatggtttacagcaggatgtgaatatgtagtgaattgcctgtttggaagtctgtctttgcatttcgcatgacaccgagagttcccctgttgtgtgatttcatcaatttttgggtgatctgcacaacctgctattattttagtatttgtccccctacctgtcaaaagatattgtggctcctctcgctttgatgctcgtcatttgtctatgtgatgatctgtaaacaaacagtctgcttcacgtgactcaagttgttaagaatcaagcatctcatatttcattctaggatagttgacatgattatgctttagggtctactacttagatcttgggcaggcagcccttttttgacagtactcgtctattatcgaatcgactgatatgacattttccagtaccgagatgacagaagatcgtatggtcattgatcttgcttgccagacaaagatactcttctggattagtatttatcttggaaaggtgtcaattggtatccttggatttgctaaacttgtatccatattctgtatcctgttgaattcaagacattataatctttgactttaccgggcttatgctgaatctgctttcctcataaaatgaacag

SEQ ID NO: 90427 - DNA, 885 bp, Eucalyptus grandis
  Intron number 2 from transcript Egrandis_v1_0.021300m (loc us Egrandis_v1_0.021300m.g) derived from phytozome v7.0 (c hr-ID scaffold_6; pos 40301747 to 40302631 reverse strand)
gcgccagacacaaattcatttggccacacatttaggttctttttctttttttttgggatgtaaaaatttatttatcaattttcggtgtcccaattaccatgacttctattgtatgttgaacctcaaaaaaagaaagatagatagaaagaaagaaatagaaaaaatagaaaaacagcaggagtggtccactgtccgtaccatgatggtgggtggatctggcatgatttcaatttcttcccttgaccttgtctcttatgaacccagatgggtatgggactcaccaaaagtgaaggggatatatgaaaacaaagagttaaaatctgaagtttcatgtcgggatttgcctgatgattggtgaaaagtgaccaattttttaacacatataaatccttcatcaacaaaatttgtagaagaactaaaaagtccttttgcgttggtgaagaatcttaggatcttaaagactttcatatgctcttcaaagatggtaagatgtctcgtgaataaatataaatgtacccattcatctgtttcatgatgaccattgacttttttctggcccaacaactcctttttggactgaagccgacaaggagcttggtgagcccactatgtggcccaatgggcccaaaatgcatgaccaggcccattaaaattcaactttgattggcccaacccccatgaagagttgtgaaattgcatctgtatttttcacgtccaaacttatataggtttgtcattttacatgaccaaaggtgggtctggtgattctcgcttatatcgctgtctatattctacttgacactatagtcttaccagagttttgacgtctttctttttgtctaacgaattctacattgattggaccttgaaatgtgaacaggacct

SEQ ID NO: 90428 - DNA, 991 bp, Eucalyptus grandis
  Intron number 2 from transcript Egrandis_v1_0.011626m (loc us Egrandis_v1_0.011626m.g) derived from phytozome v7.0 (c hr-ID scaffold_11; pos 30424016 to 30425006 reverse strand )
tgaggcttgttgattatttcgctgaccatccggaggtactactgtcctattccagtaatttttgtttaagatcattgtaaaaagcatctgaatatttgacaaatggaatgggacaagcttttaacaaattgatagtggttttgctctattgaatggttgggaatgagaagtaaagttccatatcgtttgaactgaagtcctcaaatcatgctgcagttataggtttgagattttgagagagcaataaagctttagctcacactagctcataccataaatcaattggttgacctgattatatattcttcccactctactaaggaaaatgggttgacttgatcaaataagatggtaaaacaaacaaaatacttctgtaaactccttatttgagtcattattggttcgaaataaaacttcaacttcatcagcatttgtgtaaaaggttcctttttcttgtaaaaagattgcttttatgccagattatacaatgtcatatgtgatgtaaggaaaaccctaaaaaagtgctctaataccagtttgatgtagtcggagaagtaaaaaatagcaaaaggaacaatacagggttaaaatagagtttattttgaatgaggcaaaactaatgatgaagagacttaaagaccttttattattagggttaaagacgtgaggtgatataatttcttgatctaaaataactacttataatctcaatgattgaacataatattcacatgaccatcaatgtgaccacttacaaccctaaaattatattagaaaagacttaataaagaagaaaatcacttaaaactactaaaataggattatgctcctgcatcagtatgtcaggatgagtgtactgtgtggatttgtctgggattgaattttatgtgctcattcaacttctggtaaaataaatggagttttgaacatttggtcattcacccgtccattgtgttgtatcctccaccaggcttctgttgttccagaggcc

SEQ ID NO: 90429 - DNA, 946 bp, Eucalyptus grandis
  Intron number 1 from transcript Egrandis_v1_0.002176m (loc us Egrandis_v1_0.002176m.g) derived from phytozome v7.0 (c hr-ID scaffold_4; pos 40532989 to 40533934)
aatcacttcgtctgcagtcccgtcaaggatcgactgtacgtcatgcgaacgtttctttctttccccctccgatggagtcgcgtgcttttgctgtttgtttatctaattctcttgttcctttttttttttttttcaatttttgggggttactgtgggttggaattggttcgacttcgttgtttggatagactattttgtctccggatatgtagggaagagaagaaaaatgagttttcagttgtcgcaggtgcaaaaagggcatatcatttgccattgatcgttgaagcgatggcttttctgggttaaatacgtttttgaggttggtgtgatcgggcatctaatggttaattaagttattaggggccttttcattaccttattttgaatcgataggtgttggaatttcaactggtctgctatccattgaattctcaactgtacttacagggtgttttggtatgcggattactttgttttcatggcaattggtctagggcaagggaagttattgattatggattagaaaaattatcgatgataaatttggaagatcagctatttagtagataaacaaggtacgctatgagttattgtgattgaatgctctgtctggatgtagtagcaacttaagttgatccccttgaagccttttgcatgtgtttttttttagatgttgcagagagatgaagaaaaatggggggagcttaagtgtttgtgcccttagagtattgtttgaaggaaattgggcaattaattgctgtggttgttgtcactgtcttcatccacattgctgctattatcactttattcaagtgacaaaagtttatttgcttttggtgtacgtgagttcttcagctgtatttcatttttgttaaattagtcctcacgttcactctgatttgtgcaagcaggattattgttattgttgacttggacgtcgtactcg

SEQ ID NO: 90430 - DNA, 787 bp, Eucalyptus grandis
  Intron number 1 from transcript Egrandis_v1_0.053478m (loc us Egrandis_v1_0.053478m.g) derived from phytozome v7.0 (c hr-ID scaffold_1563; pos 6909 to 7695)
tcctcggggtcagcccctcggccaccgagtccgagatcaagaaggcgtattatatcaaccccccccgcacccggccgtcgtttctccccccgggcgctgtaccagtccctccgcggcgggggggaaaaattagggaagcgtcccggtgggtgggtgggggggggggggggggatttctaggtctagtttctcgtggattgttcgcgattcgcgatgtccgtgggttggatcgagcagctggcggcgtgcgatggcgagagcgtctggagtggtctcggatctgtgtgggcgttggggttttgttacgccagctccgcagttgttgactttcggtttctcgtgggaatggcggtagacagaggtttttctttatcgttctgattctgttttttcgtttttccttttataatgatcgactggtcgcttcctccgtaatccatggaacgatgttctggattatccgtctgcctggtcggaagttatgtctgagtgagatcgacgatgttaggtatagtgttccaatagctgtcggcatggcggtgaagcacggtatgctaggcttacggaattggcgtctagttgtggttcttgaagatgatctttctccttttggcgagttttgacttcggcttgttgtttaagaatttgacacggaacatgctcgacatgtgtctttgacagtgctatctagttgttgattgagatggaatagtatataagcaataagctgaaggacctgaattttatgttttgcaggcccggcaagttcatccagataaaaatccca

SEQ ID NO: 90431 - DNA, 647 bp, Eucalyptus grandis
  Intron number 1 from transcript Egrandis_v1_0.030655m (loc us Egrandis_v1_0.029667m.g) derived from phytozome v7.0 (c hr-ID scaffold_6; pos 21166623 to 21167269)
aggtcgaccaggccacgcttttcgatctgatcctggtcagtgcccgtttcgtgggagattttgggcggtgatgctggtttgccttgtctcggcgttgctcgggcgagggcgagggttttgatatcgattttgctgattaatatgtgtttgtgcgtgtagtatcgagtaggttcttcaacagagtttagggtttgaggagatgttgtagtagtaacgaatgattgagatctgctgcgtcgattttgttagaagttgaagtgttcgtgttgcggtgattcttaggtgtaagatattattttttcttgttttataaattttgaagggcgaaaaactaaatagcggatcgcgtagttgatgctcccgagtcctgaacttgtttggatgattggcaattctttgtttcgcgtggcttttgaagaatgaagtgcggtctggtgctcatccctgttgcgttttttattcgatgacgacttatcactcgtgggttttgcaccatcatagataattcatgagcttgtgaagttgatttgagtcttgtctcgttgaggattgcagtacttatcattttctgtgtggcattttacttgatgtgtgataggcagcaaattatctgaacatcaagggcttgctggatttgacctgccaga

SEQ ID NO: 90432 - DNA, 1049 bp, Eucalyptus grandis
  Intron number 1 from transcript Egrandis_v1_0.030450m (loc us Egrandis_v1_0.030450m.g) derived from phytozome v7.0 (c hr-ID scaffold_11; pos 8173689 to 8174737)
ttgcttttcaagtcctgccctgctttttccttcaggtttcgttctttgatctcttgattcattgcttctgttctttgatgctcttcgtgtgttaccatggttcatccgaaatctgcggtttgactgtgctgcttccacagcttttctttgagttctgtcgtttggacgttgtgggtaacttttgaatgagctggtctagatctgcttcttcgctagttgatgtgcattttggggggatgcgtgagagggtgttgacttggatctctgctggttttgctgggaagctcctgatttgagcaggaacagggaaaaagacaaaattaataggaagaaaggaagatattcggaattccggagcacccataagtaggtgttagatctgggttttggccatggttttctcgtctcctgggattgatctgttttgaggatcctccagcattatgactttgctgcttactaaacaacattataactttgctgttttgtggatccttcgaatattcaaattgcctgctcgcaatcacatactattttttgcaagtgcgtttagcttgataaatgttcttttcgtgcacttctaattcgttggattagctaattgggcctgcattttgtaactgctttttctgctttgccacagcttcttgattgccctgaaaatgccggtcatctggatttcgttgcgacttaatttgaattctaagtccacccaaaagagaaaaccttgcatgttcacagtgaaaattgtaagaatctgtcaactgaagacacaggctttattgcccgaacgggttggtaattttcacgttggtaaatttcattatttcgtctgcactttctagaatctagacattgtaataaattatggatttatacagcacccttgttcacaaagatgtgttgttgcttttgacaaatcgacagtggttggttttaataaacccactgtcaattgtcaacattcccattatatatatgagaataagagcgaacattgatttttggaagttataatctgcagagagtaactcgaattctccgaagaa

SEQ ID NO: 90433 - DNA, 969 bp, Eucalyptus grandis
  Intron number 1 from transcript Egrandis_v1_0.018590m (loc us Egrandis_v1_0.018561m.g) derived from phytozome v7.0 (c hr-ID scaffold_4; pos 22282732 to 22283700 reverse strand)
gggaagctcaggcgcaaggccggcctgtgaaggaggtaagttcgcgtttcgggcgctccgttctgatgcgacggaacgagctttctgttttctctatctgaattttttgcactttcggtgtcggacgagtgctgtcttgggtgggtcggggcggagattgtttgggttccacgttttcggattctgcgggacgtgtgatgtatactgctcttctacttcttcttctgcgtttttcagctgggatttctagataaatctcacgagttctcgttctctcttggagaacagtatgatattcgaacgtcgttgtataatttgactcattttccaaccgattagggcggctcgcctcctgggttgagctggttgttcttcagtagcatgatgagcttcaatttgtggcgaactgggttcggctcgtctcgggttgaatgtgtttttttatggttcaattttgatgttggattggggctaagttgtcggcatgactttgatttctctagctgggctgcttctgtttcttcgaaatctatttctctttctgggtttctttcttttaaaatttctttagccagtttagttatttgtttcataccctgctgcccaaaatttattctacttgtttgctagagacatgttctttacccgatttttagttcagtttaatatcatgtgaaaaatatatgttgtgtttcgcatgggacttctttgtaaatgaacgaggcctcatagatggtataggctctgtttatagataaaagctgaagcattaaatggagatagatttagctgttcagcaaggttttactttgacatgttcactcttgtgtacttatcagttgatattggaaacaaagatagtctttgtgtggtcttcgaatcattggcaattctgggtttgcattgattacttatgataaaattgcatgtgcagtgtctttgctttctggaacacacgagcggcgagcc

SEQ ID NO: 90434 - DNA, 614 bp, Eucalyptus grandis
  Intron number 1 from transcript Egrandis_v1_0.048824m (loc us Egrandis_v1_0.048824m.g) derived from phytozome v7.0 (c hr-ID scaffold_6; pos 6360913 to 6361526 reverse strand)
gcaccctggtatgtttcatcatgtttcaattacctagttgtcgattttttgcacatcatataatcatgcatcttaaatcaacctatttaatttgcaaaagagtacttctatctctgtacttattgcttatagatgcttcttaagcacatagtgggccgctgagcccagcactgaataaggaatgatagttttctgcagagaagcaatcttatgtccctcaaaatataatgctcaaagacgtaaaatagcttccccaaagcaccacaccaataccggcttctcacggaagcagctcgtcagcttttgattgatttttagaatatgttggagccaaagaaattgttatgtaaacgaggcatgcagaaatgaaagagcaaaaaggaaattgaggttggagttgaaccttagccattttgcgttgcggctatcgctttgaatgaagaagagcatgactgccaagacattgagtaaattcgctaagaacgtctccacgcatagcttttcatcacctgttggaggaccctttaatagtgtcattgatgtgatgctgttcagaaatttgagttctgaaatgatttaaaacatgcttctgtccatggaacttgcagctcggc

SEQ ID NO: 90435 - DNA, 336 bp, Eucalyptus grandis
  Intron number 2 from transcript Egrandis_v1_0.004314m (loc us Egrandis_v1_0.003162m.g) derived from phytozome v7.0 (c hr-ID scaffold_4; pos 305671 to 306006 reverse strand)
gtcaaggtaaactcatatcccttctgtacttaccccttcaatttttcttcttatgtatctttttggaatctctcagatgcataaaatgttaatctaccctttatgttgatgaaagcgtcacagtccataaatcagtagcttttgtttcttttgcataatcaaattcttctagcaacatggagagtctcacccaaaattttcatattgagcttcaccaaccaaaactgtaaatgcctgtgcttgtgatgtaggttttactcataggatttgtcaaggcgtaacttttgtcctaatggcataggtggaacatttgctctttactccttgctttgtcga

SEQ ID NO: 90436 - DNA, 830 bp, Eucalyptus grandis
  Intron number 1 from transcript Egrandis_v1_0.006450m (loc us Egrandis_v1_0.006450m.g) derived from phytozome v7.0 (c hr-ID scaffold_9; pos 16771852 to 16772681 reverse strand)
atctcagcatctcttagagttaaagtaatctgcacgtaatcatcgttcttgtgtctctatctctatacccatttgctcaatgtgcatagattcttgatctgtatgtattaatgtgcgtgcccctttagccttcttgcccagatctctctttctctctgttcttgttcgtctctgaagaccgtcgatagacatagttatcaatgcttcacaagatcaactcggttgggcttggcctcaaccagataattggcgaaaacctgtgtttatgcagacatttttcctttatatgcttgataatttggccggcagatttcccagggttttttgtttctcatgccaaggaaggcctctttgactgtgttgatgtatgctatagaagttaatctgaatacccacaaatgaattttcgattttaacaaagattgactgtttgatctttgttgtcgtatggaagagctgcttctaatttctgaataggaaggctagatctctggtgatgtaatctcatcaatgaattgtttgtgatgcgatgcgctaatcatacgacagaagtttgttgcacaagtgtcactgcacaattttttctttggcacaatcttgtggcatagctgcttatgagcatcacttgtaattacgaccttgaatgccaactaatacatccacgagtttttttggctctgaaaggtaatgctgatcgtgacatgagtccagcttccttgaactctgttctcttcaattacctctgtatgttgttccatgtgactattaattagccatctgaaattgactgtctttttccatgaatctttttctgccaattatgtcggtag

SEQ ID NO: 90437 - DNA, 903 bp, Eucalyptus grandis
  Intron number 1 from transcript Egrandis_v1_0.023147m (loc us Egrandis_v1_0.023155m.g) derived from phytozome v7.0 (c hr-ID scaffold_4; pos 34952872 to 34953774)
cgtcgcttcctccgaatccagtcgcctgacccgtggtatcattgcttgctactcttcgagtttcagtgcttgtacttgagtgctggctgtcgtttgagtttctgtccatcttacctgcttgttgaaatgtctctgtgaaaacaagacgagttctttttgggtttgctctagtggttcaagcacgactgatgcttttgggtggagtggtagttgcagtaggtaccaatttcctgggagtggtgagagagtgagggttgtttggtgtcccgagtcgactaggttcttagtttgtggcacgaaccctataaaatttagctgaacatgcctcccaaacatggacatcagcatctgatgatagcatatggacacctcctctgtttcctcaacgagatgaattagtttgctgctacttttttgccgatttctttttcaccaaatgcgcttttctgtattttaacttattttatcattaaagaaaaatgcattcaaatttctacttctgcattaggcattatctgcttgcaattatgctctgatcacagtggatttaatccttttttccgaaattgttggtgtttttattctgtttagctggcttttcttgtatgctttttacacgatggaagtaaaatgaaatcttgggccttctttccctctgttgattttttctcatcatagcaggtacgctcagtgggacattgaccaactctcttgtccgaattttccatcacaaggttgactattttacctgcctatcactgtgaacttactagtggttgactttgaatgctatatatacaccacatgtcaatcgtaggattcaaagatataatctaccagttatttttcttccttatcccaaatgccaatgacatcaatataaccttatctggcagctactat

SEQ ID NO: 90438 - DNA, 355 bp, Eucalyptus grandis
  Intron number 1 from transcript Egrandis_v1_0.027544m (loc us Egrandis_v1_0.027090m.g) derived from phytozome v7.0 (c hr-ID scaffold_9; pos 11432966 to 11433320 reverse strand)
atttctttcgagggtaccatgttgttcgtttgatttgattgtgatgttagttattcctttgatggcttccgtatggagagatgtaataacgaaacctgtgctgatgttggcctcttttggtttagtctatgttattatgcttgaaaaggtacatcgtttgtttattgaggattgcgtccttttgaagtttctaagcaattagaagaaaattattggaagcactaccagttttagatcccatcacaatagtttaaaagacaaagtgtacgcctagtggactcatggctgattgaccctgattttccccttttcctctgcaggatttgaacgttgcagaaagttagttaggagagca

SEQ ID NO: 90439 - DNA, 603 bp, Eucalyptus grandis
  Intron number 3 from transcript Egrandis_v1_0.026578m (loc us Egrandis_v1_0.023674m.g) derived from phytozome v7.0 (c hr-ID scaffold_6; pos 53565726 to 53566328 reverse strand)
cctcggtgaggtaatctgctcctcggcatcttatttcagcttttggatgaaataaacttgactccactcagtttgtcattgtcggtttgctcaatgaccttttcatctttgatactctaatcgacacgagcaatcacatcctctgaattccttgtcttgttgaagcaaattaaactattcctatgtgtaatgtattcaagcaaagccacggtcttcctgtatatcgaccaagttaaacgattcttgtatgtagtgtacactcagtttgcatctcctacccaagacattttaatatcaaaaaagcttcgtactcagttcacatatgcttgcaatattgcaggccagcctctaccttttcttgcttatggtgttttgaaacttggccaaaagctataccatcttgcgattacaatcaattaatgactgatgatattagttaatagcactagttgatatcctattgtgtgcgaagtatatgacagcatttcactcaaagatctgcagttttgtcccaagtctttcgtttcctctcttcttctttttttaaagaagttgtcgtgccctgtaggcttgtagcattcaatttgggctatcttcctggag

SEQ ID NO: 90440 - DNA, 870 bp, Eucalyptus grandis
  Intron number 3 from transcript Egrandis_v1_0.023628m (loc us Egrandis_v1_0.023628m.g) derived from phytozome v7.0 (c hr-ID scaffold_9; pos 26207492 to 26208361)
gaaccagttcaccaagaccctcgacaagaacttgggtatgcagtgacaaaaagtaattttggttgtctgcatctgagtttgtggttggtttagaaccttaagatgcacgtgtattttgcagtaactggttcttcttgctttgctctcttgccaaataatatatacgagatgcaattacgagtaatagctgcttattgaatctggctgtgtggctgaggcagttcattgatttgatttctgggactacaacgtgtatttttttggtgctttattttgcatactttattcgtttctgtttggtgcaatgaggtacactttagatttatcagttcagattagattgatttttttttttttttgtgcgtgcgacccaatgggaaaatatgtttttttatttttttcatgatattgggaggaactctggtgaatcttgtgcttgggaagttcatcaatggctgaatctaaataaatctgggatgctattggttgcatgttatattgatggacctcatggcgcttgtgtggttggtgcacttggttgacatgccatgctggtcttgacgaattagttaggaagtttctaataatttctggttgattagtgttggatagttgggctaggcaagaacttttctttctagactataaggaatagttgaagccttctgggctcgagtttcaccccatacttgagataaagactgagttggagtagttatgtacccagttgtattttgtgttgctttcggattttaatctattgttttgtttcattttatcttatttagttgcatctatgacgagcttaaaacaatagaatttgattcccctactcattgaaaaatgcatgcagccacgagcctgttcaaa

SEQ ID NO: 90441 - DNA, 521 bp, Eucalyptus grandis
  Intron number 1 from transcript Egrandis_v1_0.042586m (loc us Egrandis_v1_0.042586m.g) derived from phytozome v7.0 (c hr-ID scaffold_11; pos 44792667 to 44793187 reverse strand )
ggcggttgaccattgatttcctctgtgagttctcgctctctctaccttgtgattttccatcggggacctccctagggagaggctaaagcacgttgtgagcactggttcgaacccccttggttcaatgttctttgaagaaaacacatgaaaaatacttccctttaggtatctctactctaacaaaaaagtatttgagctagagatatgaattattcttacaaactcacacctcattttgatccatcactgaagtgattttttatattgtgattgggtttatccgagagatcggagaactctattgtgcaaaataaaacttcaacatcaaatcgcataaatctagaaagttaaatgactttattgaataaaataaaaattagaggatcaaattgtgtaaatgcccaaattctttgggactaaatctattatgaaaaggagtatcgtaagtacactttgagattttgttgagatgtgcgtgaaaaacaggtgagagcctgaacacaagcttcttgagcccatac

SEQ ID NO: 90442 - DNA, 447 bp, Eucalyptus grandis
  Intron number 2 from transcript Egrandis_v1_0.026980m (loc us Egrandis_v1_0.026980m.g) derived from phytozome v7.0 (c hr-ID scaffold_6; pos 49883075 to 49883521 reverse strand)
aaccagtatccttttggtcagtctccccccgatgcgtcggccgtggtgaatggtggaatgctgatttcgtcgaatctctctgtcttccttttcacccccgtcggggggcagcgagattcggccaccttggaagcccgtgcgttgcgggttggtcgtgtttttccgccaattagcgcttttgtgttaacgtgtttgaattccgctgggcattgtgaagctagcaccatctcgctttcgcttttttggttctggctttgccatttttttttttaataataataaagtcttgtttttttcccagtggaggagtgatggacggggacattgactcgttttctttaaacttttagtgcattgctgtccgttcgtccttaatgggaactgtatgctctgtcacagtggtttttggttttgtctgcacgatattctttgaccctttacacagat

SEQ ID NO: 90443 - DNA, 796 bp, Eucalyptus grandis
  Intron number 2 from transcript Egrandis_v1_0.016897m (loc us Egrandis_v1_0.016897m.g) derived from phytozome v7.0 (c hr-ID scaffold_9; pos 35886346 to 35887141 reverse strand)
tctgggagaggatctgcgagctgggaggcgggtacgagggggacggcagagatgcgggcgatggcgacggcgacggcgacggcaacggcgactgctagggggagggctgaggagtgaggggggaagtgttgcctcctacgtgtttgtggaaatgctgcactgcgaaatgtcttttgaggttgtgatgggatatgtcccaatttttgtgttgattgtaaatacctggggatgcttagttgtgaaagtttcgtcgccctccttccttttggtaatcctgtaaatgtttgctcgacatgctgcagacttctatggagatgataaaccagaatctcctttaaagaattcctctattgttctttgctttgagtgggaaagttcttgacaaaacaacgagtcgaccagcaaacaaattccagcaaaatgcttcctttttgtgtcggaaaaaagataaaagattgattaaatcgggggtaaattcaaacaaaagtgttccgaggtcgatttaataaagaaaaagggatttaataattatttaaatatcaaatgatctgaagagaggaaaaagaacaaacaagagggagcgaaacgagcattggagtagattctccccagaacgaagcagaactgctccggagcttgagagctctgggaaacaaagggaagatccgaatgcaagctcatcgacccacgttccaccactttgccgccctctcgaaccgatggcggcaccggacgtcgtgcaagttccgagctttctgtagctcctcttcttcttcttcttcttcttcctcggatt

SEQ ID NO: 90444 - DNA, 860 bp, Eucalyptus grandis
  Intron number 1 from transcript Egrandis_v1_0.019010m (loc us Egrandis_v1_0.019010m.g) derived from phytozome v7.0 (c hr-ID scaffold_4; pos 33079297 to 33080156)
aaggagaatcctctcttcggtccatcttcttctacgtaagcacacaaattatttctatatctgagtttcttctttcatcttactgttccgactttctctaatataatgttgaaccaagacattttaatgttgcttggagctggtcccttgggatttctgaaacttccatggcggtttctatgtgcgtgtaatgaagccgtttggtgatgttctaggaattgaaatggtcgtatgactcataaccgttgactccttattaaaatgcaattattggagcttcatatcaaacagaacgtcactcccccggcttgcaatagaaaacataaatgtcaaatcttgatgaaatacttgtctaatgtattgtacctaattaggttggctcagtcatgagcgcaactatctgtttcaaaacttccaatccagagaatggatcaggttatatattaattacctcaggggttttctggcaggagaactcttgtaactatttctgcaaaagaataccatgaacgcggcaaaccatgaatgagtagctgtgtagttatttggcaagcattagataattcaagggagttattgtgtcgacttagtctaacagtagaactctgctttgaatgtcactcaaaagcacaagtttcataacaatatctgcaacacgattggctcaattcaccacgtagtccatcattcaccaagtcgacgcagttccttttcgtgattcaagaatttgctggggcagaagatttgttgcattttatgtatgactagttactcattatttgtgatgcatttgtgattttcttcggtgaattttggttctaaagcaacctttgttgctacttgtgtgcagattagacaag

SEQ ID NO: 90445 - DNA, 952 bp, Eucalyptus grandis
  Intron number 2 from transcript Egrandis_v1_0.001016m (loc us Egrandis_v1_0.000961m.g) derived from phytozome v7.0 (c hr-ID scaffold_4; pos 8786079 to 8787030)
ccaaacgagccatatacatttcgcttacacggcaggtgtggcttaatcatctcttcttctaatgctttttcgtctgaagctcttgattccaattcgactcgcttgaggtttggttctagaactacgaccatgcacttacttgttcttcttctgagcagaagtagtcttctggattagtctgcataacataataaggtgcttgttttccataagcttccttaagttccatgtcgctatccctgccttcatttgagttgctttttggacttttttacttcactatgcaatcaatggagatgccaattcggaaagacgttgaaattggctgtacaagtaggtgctgggttactctgactcttatgttgatgccgaatttcccttgttaaacaactgtcaaatgagcctttttgtgagatatgcaatgggtgcttcaacccagggccaaaaatagcaccttgagattttatagcaagaaacctctactagcatattgttcatgattagattttgggaaaaggttttgtaccaagaaaatgttgttatcaagtggtgcacatcggcaagtggtagttgtcatgattcacattgtgtggactctgcaaaattgtaccagtataacatatgcgctcaattaacttccttatttgttagctgtgaaaatcatacacatgcgaggactttgagctggatgtttgtgctgcaatatctggggactagaagtgcatgcagtgactgacactattgctgaaaatttccttattctgaatgccttctaaattgctccaacaattataaattgttgaacttttgtgaaagtgcaatacattgaaaattcttcatgctgtgatgatcttccagatgactccaagctgtcattattcatctcctttctgttcgcttaaattgcttcggttctcattggaaaacagttgcattgcaggttctgactggc

SEQ ID NO: 90446 - DNA, 597 bp, Eucalyptus grandis
  Intron number 1 from transcript Egrandis_v1_0.014831m (loc us Egrandis_v1_0.014831m.g) derived from phytozome v7.0 (c hr-ID scaffold_9; pos 16493545 to 16494141)
gacccggaagtctaccctcgccccactggtatgtaaccatgttgtaatcttttttgttttttttcccttttaattattgtatgtatgtattattatttaattaattgttaattatgatcattaaaacattggtttttaggatgaattatttgaatggctgtcatatgtactgtcacatgtctaggaagcaattattagtttctgctagctttggcttgcctacgtgtctactgtctagcaacagaagatggggctatttcttttgtagtttccatccaatgaagtttctaaatttagcaatgcctagttctattcaattacatgtttagctgaattataatgtggccaaagtacaagcattgattcactgaaatggaaggtttctctctcttcctgtgtagcttgaaattgagctaccaaagtagcttgcatcttccaattgatgtgtcaattgtggggttgattgatttttttcttttctttacctggaaaaaaatcgggtcgagtcgacccgtccacgtgcatttgagattttttttttttttgaatgattttggttatgattgaacatatttaggggaagtatatttgtgtggg

SEQ ID NO: 90447 - DNA, 566 bp, Eucalyptus grandis
  Intron number 2 from transcript Egrandis_v1_0.005979m (loc us Egrandis_v1_0.005979m.g) derived from phytozome v7.0 (c hr-ID scaffold_6; pos 38212297 to 38212862 reverse strand)
taactcgcaggtgcttttctctgctatattatctttagactgtcctcttttttgaatttgtctgctcatgtattctagataaagatcaagataccgaaagggacatatagagggaaacatttatttctttttctacctgcacatggatgtccccaattgtcatgcttttaattgcactctcagcgtctcagtttcttcatacactgttcaatcagcatattcttaaagtgaaccattagctgtctggtgatgatacgttcgataattgccccatggtcttaacactgtaatcaaattctatcgttgctgttgctacgtaacaattagaaccctcacatatctggtgtttgattaatgtacgaacaaatcacatgaaacttctgatctgcactttcatgttaggcgacagactaagatgtacgtaatggaaatgcaccacgcctcatttgctatctttcaatgcatgttttgtgatggagttgatttgttatttcaatgccctcagagtaattgagaacaagcagttatgacaaatggtatttgtttctataaaggtattgtctgag

SEQ ID NO: 90448 - DNA, 609 bp, Eucalyptus grandis
  Intron number 3 from transcript Egrandis_v1_0.054752m (loc us Egrandis_v1_0.054752m.g) derived from phytozome v7.0 (c hr-ID scaffold_9; pos 31290444 to 31291052 reverse strand)
gtggttggcaacatcagcactgtgcttgaggtaaacccgtatccataatttccctcttataaacaagtcaaccgggttgcaatttttggaaggtttttgttgaccagcgcatttcttctttatagttttgtcaatacctgattcttgtttaatactgtacaataattccttataaaaatcgacaattatgatcttttagatattgaagattttttaaaaatttctttttagtcatataagcaaacaagttttcacactcaagacacatagtatataattttcatttgccgtggtaagttctgtaatcaagacacataatatataattttcatttaccatggtaagttctgttataatgaataagaacttcgttaacaagtttataaaggacacttgcaatttagtattagttttttgcccgtttattctaattctacttcaagcctcttataaatttgacttttttctttggtctataataaattaaactttatcacacacctttgtgagttatcgcaatcaatctttataaagggattgcaataaatggatcgattttcattttttttttcagggtatatataaagttggagcaagaaattttggatt

SEQ ID NO: 90449 - DNA, 684 bp, Eucalyptus grandis
  Intron number 1 from transcript Egrandis_v1_0.012454m (loc us Egrandis_v1_0.012454m.g) derived from phytozome v7.0 (c hr-ID scaffold_6; pos 52721221 to 52721904)
ttcattacacggaatgtgagaattcccattctcctctgtttttagggtttccgctgtggattggcgttctaatcctgtgttttgagtttgatattcgcggtcggagcagtgtaagcgcgaaattgttgttgcggaaggacgagagtcgtggagcaattctgaattagggtttgctagcgtttcgtctgttgcggtttaatctttttttggtcctgttgtatctaataacgctgaaaaaggtcgatccttgtattaagaagacctttctaaggtactcagatagcctaggaataacaattgacgaggaaattgtggctatggctatgtgacactagttaagagcagcgtattcaatattggagatgaatcattttaagagaatttctcaggttttagttgtatgagtggtcgtggatactgaagtgaacaacaccttaaaattgtggaagaaactgtctttttgttaaaaggttgtgttaatacagatttttcttgcgtgccaatcttattttggatgaactaccttgtaaaaattagtagaaagggaatggaggactgacaccttatagttgtgtttttggggcaagctattctaaaaaattatgtagctttgcgctgctgcttgtcgacttattgcttctttaatttatttgttattcttttcgacagtcaaccggaggctcg

SEQ ID NO: 90450 - DNA, 713 bp, Eucalyptus grandis
  Intron number 1 from transcript Egrandis_v1_0.020996m (loc us Egrandis_v1_0.017818m.g) derived from phytozome v7.0 (c hr-ID scaffold_4; pos 31491565 to 31492277)
ccggcgagtacggccctaacctcgacttccacaaggttcgcataaagccctcccctggttggaaataaaaaacggtttatttttttattttttttattttttttttatggtgaagttctcgcgtgcggttttcggaggctggtggtggcaaaatttttgcttgcttttgttcttgtcggacggagtgatgattacttgaatttggagtttaatgttttttataggctctttttgaagttatactttcgtcgtgtggtgtgattgtaaattcgtcgttggatacgtacgttggtggcctctgattatcggcctttgacagcatataaatatgttattgaaacttattgccccaccggaatttctgaaaaagataggagaaaaaaaagggtaattgttatgtgattgtttaagtgctgattactgccagtcgacttgtacacttttttcactcttgcttgaaagctgcagttttatggtgctggagcccgggattaaaaattgtttcatattgttttgagtcatgaaagattcggattaatgttgaacacctgtgatggctattctggtcaagtccctttgtgagttcgtttggtttccgttctaggactgagatgatttgtcttaacggagcccgtttgcactggccttgtcatgttgggattgacatatttctgctatggccttgacattagtgtatatgccttcacttgcag

SEQ ID NO: 90451 - DNA, 577 bp, Eucalyptus grandis
  Intron number 1 from transcript Egrandis_v1_0.050578m (loc us Egrandis_v1_0.050578m.g) derived from phytozome v7.0 (c hr-ID scaffold_6; pos 34828625 to 34829201 reverse strand)
gattttgaaccagcagggtaagcaagatcatttcccaagtcaatttaaattttgggtttttactctcacaatttccctgaaattttacatacacattcgatgtgaaaaaggattgattcttcttcacacacatctttaaaagaaataaaaaaaacaaatggaattcaacattctaagttacgaagaagaactgcgctactattattatgatttttcttcttcatgttactaatgaacaagtgtgtttctacaattgatactatttagatcagacacaccatcaataaaatctaagaaaatcaaatcaccttctaaataaatcccaatcattggcacgtcaggatcgaaacactgttcataaaaatttcttcgaataatgtaaatttaacaaaatatttagttgttgacggcaatatcaatcttaggatctatgtttatttccaaggcaaaatgattgtgtgattgttgtaacacaatctaagatctgcttgtgaatctgtaaaaagaaagagtagcgcctgatctttatcctccattcgaattttatagaaaggtacaccagaaatattgtgaagag

SEQ ID NO: 90452 - DNA, 813 bp, Eucalyptus grandis
  Intron number 2 from transcript Egrandis_v1_0.021072m (loc us Egrandis_v1_0.021072m.g) derived from phytozome v7.0 (c hr-ID scaffold_4; pos 36534609 to 36535421 reverse strand)
agatactggaatcacatttcgaccgaggaatctaggtaaaccttcttccctcattctgctcctggatgaaccaaatttgttcttatctcgatggatttttcatcatcgggtaaacgaatttcgttttgatgccattattggatatcggaaatgctcaacgtgttgtatgggttagataacattcgtggcaacatatgttcttgtggtgcttgggaattactggaagattggagtactgcatattttttttttttttttttgaagcttcgaataatctctctaagtttagttcagtacattgacttctgtgagatgattgcaccgtagatgatgaactttggatcatataggaacttagtactttagtagtggacattccttggagagtgacgtttctgaaaagatttggtgacatatgaggagtgcatttgcttgtttcttgaatttgttacaatactccgccaattgacatgtagctacttgccggcatgatatcctgtattaagcaagaagagtgcaatgaaactgttcacatgcaactaatgcaccaagaatttcttttttgtagagtcttatcgaatactcattattagaatagtatctttggtggataaatggcaaagggctatcttaaaatttgaagcaatccatgcattcaccgaaaatttataattggcggtgattagtgagtaagctagtgctcgaagatttgctttggtaaatgtttcctttactttgtgtcatttacttacatcttggaatgatcaatcttataaaaatggtaagacttgattttctttcccggcttgttac

SEQ ID NO: 90453 - DNA, 649 bp, Eucalyptus grandis
  Intron number 1 from transcript Egrandis_v1_0.020789m (loc us Egrandis_v1_0.020829m.g) derived from phytozome v7.0 (c hr-ID scaffold_11; pos 32211710 to 32212358 reverse strand )
tccgagttcttgattccatctcgcagcatctccaggtacttggtcgataggctgatcggtttttgagtcgtacccacttttttttttgtcgggcttcgtgtgctgctagttcggaattcaagatcttccagtgttttaatctgacgggcgaagaagtctgcgtgctgattttctgtagttcttgataaaggcttcgagagaaccagagtcgatcggctttttgggttttgtttcttgatggttttgacttttgggttgttccgagagtttcttgctgaatgttttgccccatgtggtggttaagccttgtttgtgaatcctgcctccaacccaattgctagcagcgtcgtttctgatttgccttcgtacccattttcttttcgaaattggtgcttggtttttgcccttccttattgcagtgtctttgggtaattagttgttactttccttgttctttgtcttgaagactttgttgtgattacgcgaagctccttaatatatatacctccttccgtgtgtaatatgccgactttccttgctagcaatctcatttgatatttgctctgtatctgtagaaatataagagttattcccaattgttcaggtttctgcaggtaaccgttgcgtagcttttttaccgaattttgca

SEQ ID NO: 90454 - DNA, 640 bp, Eucalyptus grandis
  Intron number 3 from transcript Egrandis_v1_0.046098m (loc us Egrandis_v1_0.046098m.g) derived from phytozome v7.0 (c hr-ID scaffold_4; pos 9492618 to 9493257 reverse strand)
gaatttaaagtcgtctttctgcaccaccagacaaggtatatttctacctgtttttgttcaagaaaaggggtaaaggcattactgattccttgatttttcttatcgatcgtgactttttttccttatatttatatgtttttccagttcatcacttttggtctggtcgatccctagtggcggttcagttcagcaattctaaacatatttcgatcttacgcaaacaaaaagactagaggatctaatgggaaaagaaaacaaatggacctgattgaatattttgctcaaaattcatggattagtggtgcttttattcaaaacaaaataattcgatgcacgaaacatgtatcttttgacatattagggaaatagtcctgctcgtctatttattaacgtatttgtagggtccatctatacattcgcgatagagacgtaaatcaatgaatgaccaaaggaggggctggcgatgtctgtcttctactgcttgcagataaaaaaattccttcatcggtcgaactgtgctgtaatttcttattttgaggtgcagaatgtgatctttctggtgacactgactcttatgaaacatgtgcttagtataacctttacgaaacgtgtatcataaatctcgatttttgggtgcaga

SEQ ID NO: 90455 - DNA, 831 bp, Eucalyptus grandis
  Intron number 1 from transcript Egrandis_v1_0.012907m (loc us Egrandis_v1_0.012907m.g) derived from phytozome v7.0 (c hr-ID scaffold_4; pos 41410518 to 41411348 reverse strand)
tcctcctttgttgccgcaactagttttgagaaacggtaggcgtctctctccttggcaattcttgctctctctctctttggcgatgctcgctttgtttttcattgctcccctttgccttttttttttaatcagggtttgatttgtcgctcgattgagcgagagggttagtcgtagatcgtttgcgttttgctgttcgttcgatttcttcctgttgtagctcgtctcgtgtcgtttttggaggtgctctcactttcgccatcgacgtacggaccgcttgtgctctcgcttcccgttcttcttaacaacaaatctgcaatctggggttccctgcaattcttctttcctcgtgggtttctccccctttgcgggagtagtgggtaaaaggaaaaatgagattttggggtcgatggttcgtgtgtttcacaagtgtggtagaagcggttgcttgagaagattaccagtgtcgcatagcggcgggttatcaaatagtgccgtcaaatcctcgaacatcctcgaactcgctcgaaatgctcccctagcatttatacctgtctgtccccagcagagttttggctgggctttttctcgaatatacgttttccagaatccattcttgaattttcatgcctttctattctcttgtacgaggttctttgaattgaaagatttagaagcaacgtattttagttcacagttctctgggttctagcaatttcatgataagctcttcatgttttgattgttttaaatttgctttgagatttattatgtgatgaataaaagttgggtgtttcagaagcgcacctgaagttcggattttggagtcgaaaa

SEQ ID NO: 90456 - DNA, 610 bp, Eucalyptus grandis
  Intron number 3 from transcript Egrandis_v1_0.015235m (loc us Egrandis_v1_0.015226m.g) derived from phytozome v7.0 (c hr-ID scaffold_9; pos 18419806 to 18420415 reverse strand)
ctgcaagaagatttttgtgggactgctcttctcaggtatattgcacacttttggtcactctagtcaaccttgatgactggaaatataaattcacctgaaaataatactatcaatattgaatgcatcctagattccttagaaactaattgcaatcggatgttcaattaagtatgtgttcactgacatcagttattggaactggactgctgttctcaatccttctattattgtgcctgtaattttgttttcttctgcaatttgatgacttggttatggagacgtctttgtatcttggtcaaatgaataggttcttgttggtcatttaattgcttactcttaaatcagtttgcaatgtgtttttaatgtgaattatgaagaactttgattcttcttcaggtatttgaaaaatattccatctcatgcacatcgaattttatgaatgatatcaaagaacaatctggaggaccaaaaatttgattgatacatctctttgataatctagtcagtcagtagagtaatggtgtttcccttattgcttgattgttgttacatttgtattggccaaaatttcattctctctgtgcatttgacagcacagagtggctccgaa

SEQ ID NO: 90457 - DNA, 593 bp, Eucalyptus grandis
  Intron number 1 from transcript Egrandis_v1_0.032426m (loc us Egrandis_v1_0.032426m.g) derived from phytozome v7.0 (c hr-ID scaffold_294; pos 52682 to 53274)
agggtgctatgaatctcgctagccacaggccatatttcaggcgtagcactaagctccaaaatttcgaaattcaaaggtcccaatgaaggttgacgacataggaaatttatatcatctcttcttaaaataatttctaaaaaaataaataaactttctagcaatgtccaatatttgatgaaacaaagcgacttaaagtgagataataagaaatttagaatgacttatggtaattaaaccggatgtatcttttgccttaacgcttgggaatcaattaaacttgttaattagttgcctcaagggaaattagtggtcgagtcgggccggatccggccttggcccggcccggcccgccgcctgcctttctttaccctgcgcggcccaagctctctcccttcggcccagcccacgtcccaaccagccttctccctcctccagccatcttcgcgcccaaaaaccctgcagaaagcaaaagcagcaacagcagctgacaggggggcagagcagacataaaggcagaaaagggcagaaaggaagaggggcagcaggaacggtggacaggaggaaccgaggagggggagattgggggaaggcag

SEQ ID NO: 90458 - DNA, 1015 bp, Eucalyptus grandis
  Intron number 1 from transcript Egrandis_v1_0.012369m (loc us Egrandis_v1_0.012369m.g) derived from phytozome v7.0 (c hr-ID scaffold_4; pos 29808774 to 29809788 reverse strand)
gcggaaggaggccgagaactgcgattgcctgcagggtgacgatcccccttccccctttctgatcgaatttcccagatctttgttttctttgattgcttgtggagctgtttgcgctttttttccagctggtggtcattgtttgtgaattgggttcgcgtttgatgttgcctgttctgagtttagaagatggatttttggcccttgtttgttgattgaagtcgcctgcggcgaaaatgtgggtagatctcatcagtaggagatgaaaatgatcgtcgtgtgatgcgccgcgagcaaaccgtcctctacacgattgagattggagcatcgggatggtttgcagggctatagaaatgaaagcatacagacacgtcttgtatctgaaaaatcgagggtcggatgttgttcctatgttgtcgctgtcgccgtttcatgttgaattatgtaatttcattgatggctggttgacccttaagttacatacctggaaaaatgaaaggggggaacattttgcccgttttatgttgaatcagaaatgcaaaatcgtgaattgtgcaggtgaaaattagtgccgtttctctatttctgtgcgctccatgtgttgtttgattgtttacatctgattcttaacattgccatgtttttcgtggaggagcaatgtgtatgattataacttggacttattctttctttaaggagaacttcattgatgaaatctcataaactgctgcgaaagtccttcctggtggctgatctctccctgtgtccttgatctatttgtcattcctgcgatgaattctttccttgattaagaacttatatagaactaatgattgctcattttggtgtgaaattgtgatatttttggcaaccttgttattcgtgagcaacaattcatgaaatacgctgtcagcttaactttttgtaatatttatatcatcaaattatctcattgaatggttaaatgtcctgtcatctatcaggatttcaagtttgccattctctcggtggaggaact

SEQ ID NO: 90459 - DNA, 807 bp, Eucalyptus grandis
  Intron number 1 from transcript Egrandis_v1_0.032149m (loc us Egrandis_v1_0.032149m.g) derived from phytozome v7.0 (c hr-ID scaffold_4; pos 19433271 to 19434077)
cggcaacgcgcgattctcatcgccccgaccgctacgtacgatctctctctctatctctccgtgcaattgagatctacatggttcgtctcttctgattttgtggttgcgttttcctttgtccgcgttttttctttcttttttgtccccagtttgaatgtttcaaccatcgaatgtcgctggggtatttgcgattcgtggcggtgaaacggtgggaagtaatagggacgctgttgggttcgcttcgcttgggacattcctgattatatgtcagtcaagaatttgttcggcaatcaatccgtgcgatgcgagtcgtttgcgagattgcccttttttggagcacctgccgtgagggttttagacgttttccttcgaatgttgtagaatcttggttcgtttgtctatcataatgttcatctcatggcatctttgaccaggaacgggttcgcagatagcatctttctgtcgttttttgggcatgtctgggaagttgcccaagaaataatattttgtttgtagttcttctgttgaattaagcgggctggcctttgctaagttactagatgatctttgtcaagcaaatgggtctaatgtcaaacttatttgacagactgcggcgtggctcttgactcaatattgcttgtgttgggctggcctgcttgttactttcccggcatcctacagatcatttgttattgaataaacatggatcgaaaagacgggcggataatctttgtcgagcaaacaggtctaatgcctaaaacttgtttgacagactgctctcgactcaatattgcttgtgttgggctg

SEQ ID NO: 90460 - DNA, 433 bp, Eucalyptus grandis
  Intron number 1 from transcript Egrandis_v1_0.007906m (loc us Egrandis_v1_0.007847m.g) derived from phytozome v7.0 (c hr-ID scaffold_9; pos 29504004 to 29504436)
ggagtctcacggttcacgcaggtatggatctggtgcttgcttgcggtgattaagctcattcaatgaaaaaaaatgaagacgattgtgcgatgagttgtgggctgcatttgtgggagccgaccatcttcttctaatggttattagtagggttctattgttgatctcctgattggtaaccgtcttccttttggcatatttctcgacagcagatcatttatagattttgattaagtcaaatcacgggagtgtgaacaaggagcgacgctcttttgtgtttttaaggattacaactttagtctggtgcatttgtatagttggagagctccttgatccaattacagctctgggttcttgcttttgggaagatttgtttgagctcattttgtcgattttgattatgcaggtgagagattaggacgcggcattgtcaccg

SEQ ID NO: 90461 - DNA, 832 bp, Eucalyptus grandis
  Intron number 4 from transcript Egrandis_v1_0.024620m (loc us Egrandis_v1_0.024620m.g) derived from phytozome v7.0 (c hr-ID scaffold_9; pos 717998 to 718829 reverse strand)
gctttccagaacctaaccggttctgagaatattgggtgagttgttctgttcctattatgatgagaacattggtcatgctctacatactggacatctattgcaatggccttgctttattccctcttttctcatgtaagcatttattccgttagaacatcctcatacacttagaacttaaaaatcatgctaaacctgtttattttgttgaattccaattgacttggtttgtgttctgtgtagagcttccgtacatgaataatttctttttcaactttcccacaggcactttgaatttcatttcagtagaatcagctgtttgcttatcgatgagatgtacttactcaaacctttcattcctctttgtccaatatgattgttatctagtatgcatcgagaatcctagacaaaatgtgcttgagttgttgattcatgctctgcttctgaacaattgttcttggatattttctatcttcacacgatcatgtggatatctgccctgttttgaggatggagacagctatcaccttaaaagcaaatcatcgaccttcttgtatcctgcggctataaaccccatcttggacgtcacttaagcaaaaagttccagtaccgaggcttgactagcggatcactctttgcaacattaaggatagagaaacttcttagcatgagcttcttatcaaatacctgagtgtttggatctgcctcatacagttgcctttgctgttgcactccttctagcttcaaatgcatggttgtgtacctagaaaggtatcatgtggatacttaatgaaaccctttttctcttaattgcagtcaatatttgaattactaa

SEQ ID NO: 90462 - DNA, 837 bp, Eucalyptus grandis
  Intron number 1 from transcript Egrandis_v1_0.025257m (loc us Egrandis_v1_0.023149m.g) derived from phytozome v7.0 (c hr-ID scaffold_9; pos 32740858 to 32741694 reverse strand)
acagaaccattgtcaactttcttggagtatattacgtaagatatccccatcttgctgcacagcaacatagtcctgtgtcctggcagttcacatttcttgttatgtcaaggaataatcaaatagactgcttgtggtttaattcttcagtctcattttggcgttcacttttcaagcttggctcagttgaagtttagaagtttattattgacacttaattacatggatataagcttcatggcttctatttcttttgaactataatagtcaagcctttttctttcccgacaaaacaagcttttccattactttttgcatattttagtgatttaggtacatgtaaacttgagatttatgcgatggatacatgagaactatcttatttgcaagtggacacgcatttcagagcagatggtgtagttttgtaacttgcagtggaaatcaattaatatcactggaaagctgaaacaaataccaagtggcattacaagtatgttgtagtggtcctagaggtagctaatgttcgtgagggagctcctgattgaagtgatttttgtttctattatgttgttgtcatgattggtaccctgcaactgcgatcaggttatgattgtaccagctgaaattccgttttatcatctcatattccagaattgtgccacttctagtagtacagaatttcattgctcgcatctacagttggatgttaattccttcattagcattggtttggtcgaatgattgttgtggaaggagagagaatatgatttttaaaagtttaaataaaggaaaaataatcagcacaacattttggtgcctgttcctctatttcttgtaggt

SEQ ID NO: 90463 - DNA, 921 bp, Eucalyptus grandis
  Intron number 1 from transcript Egrandis_v1_0.009268m (loc us Egrandis_v1_0.009268m.g) derived from phytozome v7.0 (c hr-ID scaffold_9; pos 24939982 to 24940902)
gacgacactgtgaatcggccttcgattcgagtggggtaggtaggcatggcttcctacagtagtcatgcatagctttcgtccactctcacgtcgttgtagagttaaaagcaaagggggaagaggagacaatcaaagaaggaatctatgatggaagagagagaaaaaagaaacttcagatccggaatgcgagctttgtcatgtcaatggcattctccactatatatgcacctactgtcacctctttccttttctatttccttttgaaaggtttcttccttccaaagacccaatgtgaccacgcaattcccaacttgtaccgttactatttttgcgaatcttctaatccatcgaaaaaaatgattccctttcttagcctagaagctaccggcctcaatgtaaatccctatcaatccatcaaccggtttcgtgcatcccacgttgcttatgatcgattgccatcgtgaagcttgcatcataggcatcacaaatgtttcaggagggtgcgtgcccatgaaccacgacaacaatgagcaggtcgacctcggaaagacatgaacggggcaaatccacacgcgaacatgtatcgtgtggtgtctcgtttcgatacttgcttattgaaaaatcagagggaccctaagactaattcttgagggcgagatgaaaagcctttgttttcgagtgtatggacatgccatctctaatgcatgcatgcataacgaacacttaccctcaatttggaggcccgagttgatgtggaaatttttaaccatagtactataccgactttttttttttttttctctctttttctttctccttttggcgaggggtcggttggtacacggcgtgccgtgacatcaccctcaccattttctccgctcaaaaggttccggttttgcaactctctctctctccctctct

SEQ ID NO: 90464 - DNA, 928 bp, Eucalyptus grandis
  Intron number 2 from transcript Egrandis_v1_0.028628m (loc us Egrandis_v1_0.028628m.g) derived from phytozome v7.0 (c hr-ID scaffold_9; pos 5081283 to 5082210 reverse strand)
cctgtttcaaccttctgcttcgctgttcttctcaggttctcctctcactagtgacttgatatatattctctcaactctttaaatcggttgttctactctccttagaattttctagcaaaagtcgaataatctgcgtcgcatacatcatctaagagaacataggggatggatctatctggttgacatacaacatttgttatttcaaagggccaggtttgttctttgtttctcatcgggtcctgttaataagtggtctaagagcatttgttgagttacttaacttggaatagtcttcatagtactaattatgcataagaagagggcaattaatgcattagaaattgtgaggtttcattaactagttctttaactagttccgtgaggaactcatttctgtttcgttttttttatcatttcttcttcctactactctctgacgagtcacgagtctatctaatatttttccaattatttgcatagtcttactcttctcacaaggtaaagccttacaagaggttttctttatattgcatagaactctatatcatggtttattagattacctaaaattctggtgcaaagccatgatttcccacattcattatgatataaatgcgaattattagttgtgagttgtgaaaaagagaaaaaaaaaagaattattttgtcaaatgaagagtgcatggctttatttataggttttatagaatgactattctaaagtacaattaatcaaatcaaacaatggaactatattgaattcctcaaatacatctcaaacggtatcaaaattttcaaatatttacgtactttaccaagtgtatatccaaattcctctctagtggactcatgatttcattatagccaaaagttcatctcctaatgctttgcaactctgggcaatactctggcaggaaggagaagttga

SEQ ID NO: 90465 - DNA, 652 bp, Eucalyptus grandis
  Intron number 1 from transcript Egrandis_v1_0.045880m (loc us Egrandis_v1_0.045880m.g) derived from phytozome v7.0 (c hr-ID scaffold_9; pos 31601679 to 31602330)
tccacgtcggtgctccgtcgctccctcttccgtttctttctcgattcgccctttgtttgtttgtttgtttgtttttttttttctctctctcttttcctgcttctgttgtgcggtcgggtaatgtttgttggatcgctacgtggggaattcctgaagttgtcagctagagagccatggtgaattcatgtacaaccgaagatggaaggctgcccgcatttagatctccgtgaggagctgcatttgagtttaatcgcagaaaatgagcagtcttggctcagttgaaccgtgaatctgttcgctgtttccgagctttagtttgcctgctcggtgttgagatttcctatatggttattttacatgccattggttcgaatttataaggagactcatatggaagttgcttagctcaagggcgatttggcacgtgttttggcaaattaaggtcgattaattaggggggggggattactatggtagttacagcagtgccgtcttcgtgggtgatgccaaaaagtgatggcaccaactagtagttggcacgaagcttatttcacttgttatttgaatgtgctctttcactgtattgggtggctatttgtcttgagtttttatttattttttttctaattggatcaggttggacgatcctgtt

SEQ ID NO: 90466 - DNA, 940 bp, Eucalyptus grandis
  Intron number 1 from transcript Egrandis_v1_0.028588m (loc us Egrandis_v1_0.028588m.g) derived from phytozome v7.0 (c hr-ID scaffold_478; pos 14735 to 15674)
ggttgagttttttgcagccgggtaattagggtcgtgcctctcaatcatatatatataaagccatatgcatctatgccttcttcttttattcgacacatacacacctatctatatctatatacccgcgtcaaaacacccttagtctcacttttagatcctctaaattacctttttgtctcatacccaccaatttcatataaaaccatccggtttctttgtctcctcatagttttagacttctttattacctttgttttctttatcttttactcacctatttcatatatgaacttactcattttctttcaatgcataattatctaaaaccagtatataataacaatgcggatgaattgctatttgcattcaagccaagcgattgtattgttagtaatctcaagatattttcaaatggactatatactttctttgggaaaatagacgatggttctcaaaggtagtgatattactttgcctctttccacaaaagagatgcatcctcagtcaaggcctgattcaccggagagatgattaaggagatcgacgttttcaactatcataaggtaagctacaagtccatatagtgatgtcacccatctttaaattctctttccaagatgaaagcaatctgatagtcaatatgataggttctccaatagtttttacattttttcgaatctctcaacagttgcatacagttgattatatctttttatatttcaattttcttttctatacaagcaaaagttgttaagtgaaaccctcccattttttgcctataaatacttcaccctgttagtgctcgtcgtcatcatcacatacactctcaaacctttcatactggctcgttatggcttcttttagtaagtcctcactagcaattacatgcctcaccttcctcttagcctttgctgaaacctcatttgcccaaagcacccac

SEQ ID NO: 90467 - DNA, 914 bp, Eucalyptus grandis
  Intron number 5 from transcript Egrandis_v1_0.029943m (loc us Egrandis_v1_0.029943m.g) derived from phytozome v7.0 (c hr-ID scaffold_9; pos 35073075 to 35073988 reverse strand)
cttgacctgatacaaggttagtccctttgagctttccatactgttcttgggttgtaatgtttcaaaagtcattgccacatagaagtagttgtttcatggcccgttcatcttttttttttttttggagtttttaacataaatgaaatgtagtccctcatgaaaaaatatgcctctgcgtacaagcacgtaggacttggtaattttgtttggtcttctctgattatgtttctgatactaatgaagcctactataccttaaaattgagtcgcaagatggaatgaccactaaactagttgcttacttcagaccttctcctccatttaattaagtttgatgttatgagtcacgattaatgtgagtgaaagccaagtacaacagaatctatcaatagggtcatacgtcctctttacctcattctccctcttgagtgagattatgatctgctgatacaagatttatctcagaattacggatgcaaagtttaaaaaaagtggaacatattttattaagtttcaccaaagcagctgtggatttgcttggaaaagtctctcttcaatagaaactgtcaaacagaacttagggactcggtgcacaccatgatgtgctcgatctttgtatactgaaccagtaaagtctcaacatgtacagctgaatggctagcttggtctctgatgcttttgccgcgttcttccctgcaccatcctttgcccacctgtctgttcctgctttcttcatctggagaagacttcgccacttcaataatgaattgccttagcaagactaaatcatatgcttcattgatgttgatgcgattgttaatttatttctgatgttgatgcgattgttaatttatttctaatctgttctttgattgatgacttgcttgcttgaactctcgtttttccagtttttgt

SEQ ID NO: 90468 - DNA, 936 bp, Eucalyptus grandis
  Intron number 1 from transcript Egrandis_v1_0.037677m (loc us Egrandis_v1_0.037677m.g) derived from phytozome v7.0 (c hr-ID scaffold_11; pos 38398204 to 38399139 reverse strand )
aaaaggtaatcattctcatctttaaattgagcttgatgctctttgtaacgtattgattcaggttgtgtgttgacacttaatatgcaaaagttgagtgaacaccaaaggcttaatgagccaagcagagttaagagctggaagatgttattaattcattgcgggataaacggggttggctttgactggtgcggaagacattgaaaagtgcgagattggaaactgtgaagtatgataggctagctgaatcttacgctcgagtactcgtagtgcctgtatttgctgggtatacgtctgggtttttgaaagactaagcattcgaaaagtcaagtgttgtccaaaaccatttctataatttaagtccttcgctcgtttgaggaacccagattctacactaaagcttgccctagaacacataagcctctcgtatttccaatccctaagattttaatttgatacccataaacgaccgactgagtttattatccttttctaatgtctggattagcgattgtcttaaaaataacctaatacagctagtcttaaagggaaaaagaatatgcatgttcttaacatcatgaacgtgcttcggaaaccaagtaatcaaattgggagtcatagacctcgattattaaaaggcaatagagtcattatgcacaatctcgaaaggaccatattgcatttgcataaaattcgagattatattgcacaaaagaaaaaaagtcgaggatttattacattatgggtacaaaaataattaaggcttaaattttcaatgcaactttcctttcgatgataataataattccagacttcgatcactagagtcttgagttttcgagttacaattacggaccacaacctctctagtaagatctacctcctgatcagtatatcatttcaccataaaaagtttgttttttccactatgaacagtgc

SEQ ID NO: 90469 - DNA, 661 bp, Eucalyptus grandis
  Intron number 2 from transcript Egrandis_v1_0.000085m (loc us Egrandis_v1_0.000083m.g) derived from phytozome v7.0 (c hr-ID scaffold_9; pos 7139582 to 7140242)
atctggtaattgctgcatctgctgcttagattctgacagctagtcattgaaccggtcaaaaaaaataaaagagtttctttattcagtcggggtgtatcctggtattggatttgccattattttacttccctctctccttattgcttaactaaattttgattggatctctagttcttttgctgtgtaattttggtaaatgctgctttcccagtgcttttgcggctgagcttcattttccagtgattatgaaggttgtttgcaattttgagcttcttgagtatctgaattataagtttgatgaactgcggtaaactcgttagttttcctgcttatcaataacatgagttttgtagtggaactgatgactttatttcacactcaagtagctgtgcctatgcaatctttaaaactagcttcaaaaggaagtaattatggaatgcaaaattcaagatcctgctacactttggatcgatatgtatccctactccctagaaagacagtggcagaaatttttactgactggatgtagaacttcttcacttttctacagcttacggtctttcttacattctccatgttggatcatccttcttttctattagttcatgccagccaaatttttggcacctctaatgcgcatcttcacctttgcaggaaagaa

SEQ ID NO: 90470 - DNA, 413 bp, Eucalyptus grandis
  Intron number 1 from transcript Egrandis_v1_0.048118m (loc us Egrandis_v1_0.048118m.g) derived from phytozome v7.0 (c hr-ID scaffold_9; pos 37200904 to 37201316 reverse strand)
caattaagtgtaaaaagtgcggcattgggcttgaggtgaactggcaattttgtgtttggcaactttgtatcttgtcattataaagtccgaagttatgaaaattagtctgtgcagtgcaccatgggttcaaaacatataaattcttgtcaatgttgattattcttgttggttgggtttttcggtcctaagtgcctcagttgactccaaacaaggtctattattatgaaaagaaaacctgagaccaatggggtgctgagtgaccttttactccactttggttttctgcctgatatgttttttccaatgccaatcgtttcaaagattaaaattgtcaagttactgccaaaacaacttaatggtaatttccttggcttgtattatgagtgcataggccaattggagcagtggtgtac

SEQ ID NO: 90471 - DNA, 529 bp, Eucalyptus grandis
  Intron number 1 from transcript Egrandis_v1_0.006458m (loc us Egrandis_v1_0.006458m.g) derived from phytozome v7.0 (c hr-ID scaffold_4; pos 3020075 to 3020603 reverse strand)
ttacactgaattcgcagtagaaataccggtggcaggttagtcctcttccgtttcgctcttcatctatgccaaaattcacataacttgatcagatatcatttcatataactgaataatagagcaagaatttgacgatccaaaaattgcaccagaccacccgattcgccgatgtgaacccggttcgtgttgtgattttacaacaagttcgacagaatatcaattcaaatcagtttgcagtttacgttttggaaaagaggtgcatagacagtagccagatttagccaaggggcaaaaaaagggcaaatcccaaaacttttagatcattgggaattgctccctaccaatatggagacttgaataaacaatgtgaatgcatacatcctaatttccagaaaatgagagcaaaataatgagttacacttaattttagcaaggtacagtttgataaataaaagcctaaattctaaaaccagaattctcatgtccttcaataggtggatcatttgcctacttgagagtggagctggga

SEQ ID NO: 90472 - DNA, 997 bp, Eucalyptus grandis
  Intron number 1 from transcript Egrandis_v1_0.024513m (loc us Egrandis_v1_0.024513m.g) derived from phytozome v7.0 (c hr-ID scaffold_4; pos 4277937 to 4278933 reverse strand)
gcaacgtacgttttcgatttaacccatttcagaccaagtccatctcgtaaaccatcttcgatcccaccaaaattcaacctcaacctagaaatgttgcacaaagtgattgaagtaataaaacttcacgacgagtcagagaattttgcgcttctcttactttggggaatcgtctactttattttagtcctttcactttctttttgggataagtgttccagaagtcctacaacttgtcacgaaaatgcatttcagtcttgaaacttgtaaaaagtgcatttaaatcctaaaacttgtcaaattgtttcaaatgagtcctaagatcaacgccgttagcctttttccgttaaaaatgctgacgtggcattttaaatatttttttatttttcaggtttattttttaattaatttttatccattttttttaaaaattagatttaaaaactaaaaaattaaatttattcttatcttattttcaacaaaaactaaaaagaaaagttaaaaattttatttttaaaatttttaaaaataaattaaaaaaataattttaactttttaaatatgtttttttataaatattttaactaaaaaaatttatttttaattaaaaaaatttaataaattttttaaaatttttttaaagtttttagtgaaaataagataaaatgaataaatttgatttttttagtttttaaatctaatttttagaaaaataattaaaaaaattaacgtggaaaataaaaaaattatttaaaatgccacgtcagcatttttaacggaaaatgcttacgacgttgatcttaggactcgtttgaaataatttgacaagttttaggacttaaatgtactttttgcaagttttaaaactgaaatgcattttcgtgacaagttgtaggacttctggaacaatcccctttcttttttcttcgtgttttctcccgaacacgttatgagtcatgaattttctcactgataatggtagcgtgctttcacagatcat

SEQ ID NO: 90473 - DNA, 1039 bp, Eucalyptus grandis
  Intron number 1 from transcript Egrandis_v1_0.017638m (loc us Egrandis_v1_0.013496m.g) derived from phytozome v7.0 (c hr-ID scaffold_11; pos 29984646 to 29985684 reverse strand )
tcgacgagggctggggggccgtgatcgccaagacggtaagttcctcgctcgtcggtgatgccggaagttcgtatttgttagttcgtcggtgaggttaggacttgggcgattgccgagatctcgagttcccttttagttctagaaaatcggccaccgtcgttatcggagtatctgtctctgaggttagaatttcggggaaactgagccttcctgatgggtgattatgtgtttctgtagatcgcttctgaaaatttgcatttttgagttaaggctattccgttatctgaattccagttggttcgtctgctctgctgctccgtcgaccgtgtttcccgtgatccgagttacggttgcttcatctgctctgctgctctgtcgatcctgtttttccttcaagtataattgagtggggcacgtaaagatttagttttgcttttgtgggtcggcatataatgttgttatctattctcgataatgtataagcaagtgtttgctttccatgcgatgtttgcgaggtgcaaactactttcgttatacatcagatgcatttcgagcgtcatttgggaaacccatgtgcatggacgaggcataagtcgtggtatgttgaggttgctcagcagatgtttagatgttcactgaattagtattgataatggagtaaggagatagagacttaaggctgttaacttgaggggaaaaaacagagcattgaggtttcacggacgtttctatcagcaagtgaaccctttgaaagaaaaagaaagtacctgaactaagattgagtgtgtcgattgtcttaaaagtagcagaatgtagctgccatcgtggattatcatatccgtatccttttctctctactatttggacttttatggaagggactttcttgtggcttttcttccgccgtttcgttttgtagttggaataatatctattactgtgaacaaatcgtgctgatgatattgtgttctttactaattttttgtccacccttgtaaatcattctgctaggtttccctggaggctgacaaagttataa

SEQ ID NO: 90474 - DNA, 638 bp, Eucalyptus grandis
  Intron number 1 from transcript Egrandis_v1_0.000102m (loc us Egrandis_v1_0.000102m.g) derived from phytozome v7.0 (c hr-ID scaffold_9; pos 22663632 to 22664269 reverse strand)
tcgcgctcaacgtcgactatcttaacaagaaggtgtgcgcccttgagtttgcttgaatttctatttatgttggcgaatagaatggaagcttttgttctgttttattggctagaaagtttgaattgtgctcgcccgggtctgattctgcattgagggcgtgaaatttgtcccgttagaagtggaagtagaaccctttttgtttcttcatgatctcagtagctcttatggccaatttaatatcgcatcgattattctgaaaatgttgatgtttaagggttgggagttctcggtatactgatggattcttgaggaaagtgaaataattggacagggctatctgtcggttcctgatagataatggcctccgacttgtatttatgatttctgacgcttagattttgttgctgataaaaagcgagctgcttgagcctttagtgtagacgctgcatgttattatggaatgacctgcttgccattacaggaggattgaacattattttcttatattgaatgactaagttagtgctgtagttgaacattgtgaaagagtgacattttgcataagcatcgagtttgctctctaggtaaagccagttcttatatgttcttctttccagtttggtgcagcatcttcatta

SEQ ID NO: 90475 - DNA, 683 bp, Eucalyptus grandis
  Intron number 1 from transcript Egrandis_v1_0.018352m (loc us Egrandis_v1_0.018352m.g) derived from phytozome v7.0 (c hr-ID scaffold_9; pos 19316229 to 19316911)
gcggaagtcatatatttgttaaacaaggtgggattttttcctctccctgttctgtttttgtggtaatgtattcgcctgtttctgcttgcgctgttgaatgtgatcagattcttccttttctggaccgaaggagagacgggtgttgccttttctggccgaagagagatgggtgttcttaaagaagtcatctttttccctgtgctttgctgaaaatttgttgctttgtttgggggaagtggggtgtgcgaaaaagcattcatctttggaagcagctgattcgtttttgttttcttcatgtttttgagcggggacgagaagaataactcaacttgtggtcggaaattttgaatctcggattacggcgatcttgctgtgctaatcaatttattgccctgttacagttcttgggcaggtcgctgattttggggcaaaatttaaaacccactccatcgattcttctcgcccttcactgcctaatagattgcattaacttcacatgcattgatttcctctagttaatttttctgcatagttttgtgatggctgttgctaacaccagattgtgaggagattatcatgtttctgtttgattaatgatcaatttttatacgatggcatttactctttttttattttaatgcttgacaggacactttgattgttaaacctcccaagaaatcgcc

SEQ ID NO: 90476 - DNA, 691 bp, Eucalyptus grandis
  Intron number 2 from transcript Egrandis_v1_0.028719m (loc us Egrandis_v1_0.027452m.g) derived from phytozome v7.0 (c hr-ID scaffold_9; pos 29274222 to 29274912 reverse strand)
cccgtgtgcttataagacagaggcacataaggtatttgttacctcttgttcatttcagtctataactagctcaatttttccgagctttcctttttcacttgtttgggcataatggttagatgtctttgagtgcattaaatatgctttgagcatagtgccatgtaaaaattcccattttgatagctgagcattggctaatttgatgagatgttctaggtttattgagcaaggtgcatctcattaccattggctctggcctttacacttgctgcttctgtgagtgctgcctaattacaaaatagaaagcgttgaggagaatgcttactctaatttaaatcctgaatcgacttcaaagtgtcatatattttctctcgattcttatcatgtttcatcagcacgatgtattccaggatgccataattttcgcatgcctcaatggttggaattccctatttgaattgatattgacgttgacttctaaatgcatactggagatgcaactgttattgaggtatatatcagtagcttagaatggatcagactcggcatgctgcttgcattatgggcctgggtttgtgtaaggggcttgtgtggtttaatattagatgttagtaacttagaggtttcaatcaataatgatttgtttcattctgaagggtcgggaggcaggtggtcaacattccatctttca

SEQ ID NO: 90477 - DNA, 832 bp, Eucalyptus grandis
  Intron number 1 from transcript Egrandis_v1_0.054920m (loc us Egrandis_v1_0.054920m.g) derived from phytozome v7.0 (c hr-ID scaffold_9; pos 10695035 to 10695866 reverse strand)
acggacaggaattcaagacgttcaaaaggtgtagggtatgtgcttcgccataaaaaaaaactttatgacatttacatgcctgtagagatatcttaagcatatcttgtacgaaggatcaagtttaactgtattcttaaattcaccagcaatgcgataaagataaagataagctttatcaattcatgctgcgttgccaaggtagatgacatgaccctgagttccttttatttcgccatgtccacttcttgttacacaaagagcagcgaaacacctggggaagccattaaattgtcagattgcatgttgcaccccatacctagtgaatgatgtttgtttcgtgtagggataaaccaggtatttgcattttcttgcttggatgctttttggtctttggccgattacgatccaatcaaaataactacgggtggttaatataattgaattgcctataggtggtggttttgacaatttaatttacttctttctgtttcatactcttttgagttattggtgctgttactagatattcgtgaaattaacataaggcacggctatattattgcccagtattctatcatttttgttcattttctcttctataactacctttcatcattgctttctcattacttcactgcaatgagctactttttcttttcatatgaggtgtcagattcatcaaacgaacctcagcttgagctcacttcattaaagtttttgtttccctggttcaatttgctatgcttcgtaagttttgatcacaatttctgggggcctacatgccctgaccaagtaagaggagcctcatgaagctgcaggtacattgaatttt

SEQ ID NO: 90478 - DNA, 696 bp, Eucalyptus grandis
  Intron number 1 from transcript Egrandis_v1_0.009121m (loc us Egrandis_v1_0.009121m.g) derived from phytozome v7.0 (c hr-ID scaffold_4; pos 39799922 to 39800617)
aggagagagagcacgtgggtgctgatttcaggcaggttagttagtgataatgacaactggttagtatttctctgtctttttccataaacaagtagagtatcctgctgtcagcataagcaacattttgctggccaatccttcggtcgagtgtttaaagctgctaatctaatcaaagctggatacaaccgcttttcaagttatgactactgttttctcactaacaaggaaaaaaaaaactaaataaaagattcggctctttcttattttatgctaaaggtgatccattttcgggactatagggttgcgagtaagttattttctagaccaaactatagtggaacatgattataatttcttcgaattaggctggattgggtttataattagttggtgtcgctaaagtttgctcgagcgtgctctttgtttccatttaggtagggcagtaagcaacccactaagccagttaatcatcaagatttatgatcagttctatttcttgtgcatgttgcaagaattgtgtgcttaaccgttcagttttttcttatttaagttcaaaatatatcttatttattatttttctattagatttttggcttgtcattgataaaaatttggatgtcgattctgtgatttctttctttttgaccttttccctaaataggtggtatcggatatcacagagcttctagccaagcc

SEQ ID NO: 90479 - DNA, 588 bp, Eucalyptus grandis
  Intron number 1 from transcript Egrandis_v1_0.047308m (loc us Egrandis_v1_0.047308m.g) derived from phytozome v7.0 (c hr-ID scaffold_9; pos 38369327 to 38369914 reverse strand)
ctccctcctccttcatccaaggtttccttctctacctcctccccgttactttaattattctctcttgctttttttttctgctctcctagtgtagcacggattgacccgtctccctcactccggggtcaagattgaactcccaacttccatcttattcttctcaagtgaaagagcggccgttgaggcaaatcttcacggttaacatattctcgactgtgaatcaagcaaaagaaagtgagaaaaatatcaaatctcgttgatgcagaaaatatggaaaatgagatttaacgtaggccagatcgttaattacttgagctatcagttagctaggtaatctgttgcttccccagatattgcatgtctgctggcttcatcaacagacatggtcatgtttattcctttgcgaaagttgtgtatgtcaactgttcgtactcatatatgcgggagcaatttatgcaagaatgttcttgtagtgagaaaattgttttagcgctctcactttgactttatttatttttacaatctcactacgaattaacaatgcttatacaaaattgcagaagagacagggtgcaccggctataattg

SEQ ID NO: 90480 - DNA, 621 bp, Eucalyptus grandis
  Intron number 2 from transcript Egrandis_v1_0.019595m (loc us Egrandis_v1_0.016568m.g) derived from phytozome v7.0 (c hr-ID scaffold_4; pos 23560197 to 23560817)
aaaagtatgcattctagtctgtcgttccgtgtttttttgctgctttggtgctgcgggcttggtgggaataaagtcaaaatttgaactttgaattttcgagtaagcccatggcaattatcgagaaagtctccttttttgtacatgaattcagcaaaagatttgcggaatgatgttactgggtagagcatcttgtgctgagtatcttatgatgtcatgagaattggacagaaaatgcacgaggaagaatgctattcaatgtaaattcaaaagccagggaccgataagactgattgaaccgtacttttaactgctacagtgtaagcatagaccacaaccacttattgcactaagacattggaaatgcaggagagtaaatgcccatggttacaaaatgtactcatctccatggtctcactgcacctttcactgtcattttctttcttagaaattgctcttgttaatgaacatagagggtgctcatttttcttaagaagctatagagacaaagcaaagtctaacattaaatctcattccacttgccatgtctgtcatctacagtattcactgaatatcggatatattgagatgatttctgaatttctgaatttctttgtggtttag

SEQ ID NO: 90481 - DNA, 647 bp, Eucalyptus grandis
  Intron number 1 from transcript Egrandis_v1_0.030034m (loc us Egrandis_v1_0.030034m.g) derived from phytozome v7.0 (c hr-ID scaffold_6; pos 43599009 to 43599655)
ggtaaatcacaaattcatacttttgttcatatgttgcgaatccgtaactctttcatgcagtacattgtcaaaggataatctcatttacctaatagctgtttcattgatttatacaattcctcttagaagcaaaagaaaattgtgggtatttcagggaggagggaataatttttctagacatcaatttttcaatgtggactacagtataggccaaggcttcaatgagcttcataggcccagccagcactaagtcaagcctggacaaaactcttggcccatcgtcctcaattccatgttttctgctttcgacatagacaagctcgtgcaggtggcttccgtcctacctattcaaacggtctgaatcaaacccaagactgtcaagaactttctttccaatctttagaccagatcaagtcgttatttttgtacatttcgatgcgatcccggtctggtccaagtccacccattgatataatctagtagagatgagatgcctctctcttctctcctttttcttcttcatccttttgttaattgtaatcgtggtcggttggcttctccgagcacgaggagtcgagcctgaagctaactcggttcgaagtgtcggtgcaggcttctctctattcctcggcatactgatagacagg

SEQ ID NO: 90482 - DNA, 711 bp, Eucalyptus grandis
  Intron number 2 from transcript Egrandis_v1_0.012449m (loc us Egrandis_v1_0.012449m.g) derived from phytozome v7.0 (c hr-ID scaffold_6; pos 24541808 to 24542518 reverse strand)
tcgtcctcacttacactggatccgctcccactttcgtgagtagctttgcttgcgcttcgaatttggggcgcgattataacatcgcgcgccttttgcgaatcggaattcgattctggagagatggagtgagacttttttgtccgaatgagtggttataattgctgctgctgcggctgcaacttctttcgagtttcagaaccgagggggagacaatgcttgaagagtccgagcgtgttgtcttaggagtttttttttttggagaaagatgatacctgaaaaagtcaagtctgagaaagttgttccgggaatcttctttttctgaccactactacaaattttaatcctcaagaatagcgctaattggaataaaccccctttttcctatacccctgtcaccactaacgtcgatgttatcctgttattgaattacattctttctttgcttttgcttattatccaaacaaataaagaaaaagaatctttgggtttccttcttctcatgaggaatgagtgaagtgttgtgctgaatcttcgcataaatggatatacctccaccttttcagctaatgaggtcccaggaatttgatcttaaattcttttgagcatccttttctttcggatgatgaagacgtatgcttaattcgatggtgtgattgctgctctactgtttgtccaggtcggaaaagttttgcggattcgaaaggctcccga

SEQ ID NO: 90483 - DNA, 916 bp, Eucalyptus grandis
  Intron number 4 from transcript Egrandis_v1_0.008704m (loc us Egrandis_v1_0.008704m.g) derived from phytozome v7.0 (c hr-ID scaffold_6; pos 14971972 to 14972887 reverse strand)
tctggcttgcaaaacggtaagtatgaaataggttccaacgcctgctattgatttaggtccaatggatgatttctgtgttctgtggctatatgattacaacaccagatagcacatgttaacttttaaaatgcagaatgccaaccgcacttaattcacaaccctaacttccaataccctgctctttagcttagagaataagctgccgacctgtagtcatgaggtggaccaccttcatgaacttgctgtagttcagaaatagtgagcccatagacaattgcaaaatgagcgcatccagtcattacataaagatcttttaaagaaagtcagccatccaattctagaaaaagcttggagttttccacatgtggtcattactccgcacctcgcttcacttttctaaaacaaggttgttggttttcatcctcctaaggttagattgatgatcaccttctttggtgggattggttacagacaaagggaaacaaagtgtttcttggtcgtttacattgatttgcagttgatcctaatttgtcaagaatatataaaagatcacaaagctcccggttgcttatacttggtaaaaccttctggtttcttatagttaggaaaggaaaaacatgtcaaagtcagttttatcaacttgatgagatgttatatatgtttcttctgtttgtccatatttctcctgaatgatattggaatttagaagtaagaatatttagcaagttactgaacttagtttgagggagatatttactggagctatgtctgggagaaattaaaagatgaaatgtccaccctgaattcaaagttaagttatgtggtgattatatgtacctcgcactttgaattgtggttttttttatttcttctaattattatttttttcaggtgtcttgcctgttggagaattcgg

SEQ ID NO: 90484 - DNA, 652 bp, Eucalyptus grandis
  Intron number 1 from transcript Egrandis_v1_0.011499m (loc us Egrandis_v1_0.011462m.g) derived from phytozome v7.0 (c hr-ID scaffold_6; pos 15695596 to 15696247 reverse strand)
tcgctagagaccatttcacaggtatggtgtagcagccttgtagtaaatggcatctcatcttctacaagtattgaccgcctgctcgtaagcaaattcgttttcgtggatttatttctcagtttaagtcggtggttggagagattttaaacgttgttgattcaagaggggtcacatcacaaccaacagagaaagaacgttaggttaaataattacatgagttccatgagttcttcatggatatgaatttttcttttttcttttttaagaatctagaggattgtagcctttgggcatctttcttgaatcgctcaccccatccaaggctcccacttgtcctcattattttctattcatcttttttcacaacttatacgctttgctttggagtgtactttttaactcttttcaaaagaaagagcagaatcttataaagcgagaaggacaaatcttaaggaaatttcgtttcatcctcaatttatggcctctttctgagaattaaagcatgccactttctgctttcttcaccatgctcatcatagctcctagtgacccgttacagtatccttgttctttgacaaccttaagcttccgttgaacgacttggtaatcgtatttttgatattttatctctattgcctctttttttctgcag

SEQ ID NO: 90485 - DNA, 957 bp, Eucalyptus grandis
  Intron number 1 from transcript Egrandis_v1_0.014577m (loc us Egrandis_v1_0.014577m.g) derived from phytozome v7.0 (c hr-ID scaffold_4; pos 37238049 to 37239005)
tttggcctccgtctctgaagaaggcgctcgaccaggtgctttttcgtctctcgatctgatggagctgtttccttttctgtttttcctttttcccgtgcttcgttgatctgcttgtggtttcaatccgtgaggtgggttcagctgggatgcgtcgtttcttggtgctggtgggtggggctttgagcgtgattggttttaccagtcttttttcttattctttttttacccttttccattttagcttagctcaaattgccatgcctctgttttgggtgcccagatgtcgcttggtttggtttgctagccatgactctggaatccagctagagagttaaaattttatgttgttctgtgctagtcctgttgcgatgatgatgataaatgaagtaatttgtgtttctggctttgcttctatttgtacctgaatgtggcttctttccatgggggtaaggtcttgaatgtatggacattgtgctctgtcgattgtgtttcagattctgcagcttggttgaattgatggaagcaacctatagaataattcagatttggtttgttttcgtgggaatgcagccaatagaataattcagatttggtttgtcttctgagatttgataattaatggtgaattctgacgttggcgagggctttctcgtgtttttctttgatggcatctggagatgagcttttcttgggaggtcaccaagggattatgatatcgttatgtaactagatctccagcgtttgatacgtttcagactaatcttttcattcaactagtcttttttttcttaaccctcttcaaaagatttttgcaactagtaactcgtctgatcttctcttcagttttctttgcagcacttttttctttcttttttgttcggggcagcaccttttctttcatttagctaggtttaacaaatttttattgttctcaggcgttttactttatagtttgag

SEQ ID NO: 90486 - DNA, 950 bp, Eucalyptus grandis
  Intron number 1 from transcript Egrandis_v1_0.031940m (loc us Egrandis_v1_0.031940m.g) derived from phytozome v7.0 (c hr-ID scaffold_6; pos 49791937 to 49792886)
gtggacaaaggaacgaaggtcaatgatgcaagcctaggggaggctttctcaaacagtaggatcgggagagtgacttgcacacggaaacaggacaaacaggaatttcagcactgcacgagctcaggagaatggtcgtatctttgtcgatacaaatcagattgacctgattccaaagccaaatgaacaaagacttctggatctacaatttctctgttctgggttttctgaaataatcactgtatgatagtcgaaactgggttggaagtaacgaacagaacagaaaagacagagactccgttggttgctcttctagcctccaagaagttgaggggcaccgattcttctagatcgatgactgcaactcttcaaggatgcagatttcgaaagctccgactcttcaaggacggagtgaaaactcttctaggttttcaagggttgaactcttcaaggttcatgatacttgcttcaagcaaagcttttcattaatcaaaagttgtctctttgctctacaagagattggatggcttatatcatcaagaaaataaaaacagagcgttgaaactaggagaaataaagacaaagcgttgaaactaggagaaataaaaacggagcattgaaaataggagaaatagtaaagagcatggaaactataaactagtaaaagcgttatgcgagcttccaaggtgttttatgtcgatatagcttctcggtttcgtcgagcttgaatgcggcccgaccaaacggagcattgaaaataggagaaatagtaaagagcatggaaactataaactagtaaaagcgttatgcgagcttccaaggtgttttatgtcgatatagcttctcggtttcgtcgagcttgaatgcggcccgaccttcttggtcgggaaagctggtcttcaatgcgggctgcatcagtcaaggtgttgaactacaacgcgtccgtcgagata

SEQ ID NO: 90487 - DNA, 996 bp, Eucalyptus grandis
  Intron number 3 from transcript Egrandis_v1_0.005100m (loc us Egrandis_v1_0.005100m.g) derived from phytozome v7.0 (c hr-ID scaffold_9; pos 23258456 to 23259451 reverse strand)
agtcataaggttgccctccggggagcttgttacaggttgggttctctctgcttgaggtctttattttatgtaacttcaaaagaataaggattgttcttctaacctttgggagcttaaggaatcggaatggtttagcatatccttcccttttttgttatgtttcccaccaactatctgctatttttcattgttagaagtgatgattactttctttgatcaatttggccaaatttcagtcaaaaacatgttcctccacatgatttaggttttagagtttgcaagaggagatgtttctaaaccttgtttagtgggtcattctcccaatgaatcatcaacggattttgtgaaagctccagaagtgccctccactcaagaccagatttcaacatttagggggagtctcgttgttttctgtttttccgtttaaatttcaagtttcttttgatttaggtgcttcttggtctgatctaattttgtttacaaatgattctgtgatctgtgatcataggctcacgtcctcaatttttttttttccacaaatcatggtttagattttagagtttgcaagagaagatgttcctaataaccttgtttactgggtcattctcccaacgaatcatcaacaaattttgtgaaagttccagaagtgcactcaactccagcctggacttcagcattttggggaggccttgttgttttccaattttccgtttaaatgtcaagtttcctttgatttaagtgcttcttggtctgttacaattttgtttacaaatgattctgtgatctgtggtcatagagtcatgtcctcaatactttccttgcacaaaacatgatggatttttttttttttttaactcgtaattagcagcagttttgccgtcagactcatctatagatgtattgacatgcaaagtagatcaagaagaatcttattgataagctctttctctactttgtccaggttcaagtgacacaaccttaaaactctggagagga

SEQ ID NO: 90488 - DNA, 598 bp, Eucalyptus grandis
  Intron number 2 from transcript Egrandis_v1_0.005100m (loc us Egrandis_v1_0.005100m.g) derived from phytozome v7.0 (c hr-ID scaffold_9; pos 23259509 to 23260106 reverse strand)
gacggcggcgacatcgtttctgcctctgttgattggtgagccgaagtggatgataatgtttccggtatcgtagagaaactgtgcgttgttggtatatgtctatatgtcgcgagattaagtgattaacattgtaattttgctaatatgtggttcaatccatttgggagaattcttacctgctgattttatttatttaattaattgcgacctggaggtgttggatatatctactatctagtgcccgttgttaatttcatggatcaaaagtattggaagagtagagtaatctatctttactggtttttaattgtgtaatgcaaagtttaaattttcttcttgaatctctgcatttgtattgcaagaaatatcagaggcctaccaaatggccttcatttgcaatggttcagcatgctctgacgcatagtcaatttagttcactttaagttttccattggcacttttatcccaagttttgctacgtttgactttcttagacaagctgaataaaatggcgtttggcttggtttcaagtattttgcctgcttgcacatgacatattgcctgatgatctcatgcttatttgcagtaccttaataag

SEQ ID NO: 90489 - DNA, 500 bp, Eucalyptus grandis
  Intron number 1 from transcript Egrandis_v1_0.007613m (loc us Egrandis_v1_0.007613m.g) derived from phytozome v7.0 (c hr-ID scaffold_1733; pos 5395 to 5894 reverse strand)
attctccctccaactcagtggttagaaatccttttgttatcttcttcttttgttttctcgcaattgcactttgtagacttacttcgatttccttcagttccaccatatctcttatatggtaacaatcggcctcatataaatacatgttcccttctccacacaaaaaaaacaaagttgaaaatcattaatagataaaagaaggttgaaaaataacgataatacttgtaacttcaccggcctcagtatgtcctctgcgacaaggaacatctcatcatggcattcaaccccctcctctcatacggtcgttgttctcatgggttcaattctgcatgtcatgtgaagagcatataacatcgaaatacctaaatagggtacacagaggtggccatcgagattaaatttattttgtaaagcccacgtatttcatgcttgctttaactgaaacaccgtgcaatatatttgcagaagttcaaattcctcggaagagtggagggacaaat

SEQ ID NO: 90490 - DNA, 526 bp, Eucalyptus grandis
  Intron number 1 from transcript Egrandis_v1_0.006786m (loc us Egrandis_v1_0.006786m.g) derived from phytozome v7.0 (c hr-ID scaffold_11; pos 20125673 to 20126198)
gccaagggaatcagacagggctttcccgtctgcaggtaatttttccgtgtcaattatctaacaatttatgcattgaagagaaagatatatgtccgattttgaggattaatattgcagcatgcccatttaggaggttatgttaaaaattgaattttctaggcataatattttattcaataaagagtcatctgtgctgcttagtttttatctgatctatttaagaagtcttaaaatgctgcttgagattattaatacatgagataccgcagttatttaaatgtgagggacagagaaaagtgtgtagtttctccttcttccatgtgattcactgattagttggagaattataacaatcactttgacttataagaccaggataaatgttttgatgatgaaattgccttgttagttcatatcaagcttttattctcatgtgcctaatagttgtgactgttaatttctattcttgtgtgagctgtgctctttatgtggtattttaatgtactttgctccatttcaggttctg

SEQ ID NO: 90491 - DNA, 903 bp, Eucalyptus grandis
  Intron number 1 from transcript Egrandis_v1_0.017869m (loc us Egrandis_v1_0.017906m.g) derived from phytozome v7.0 (c hr-ID scaffold_9; pos 25509119 to 25510021)
ggcacaacagattcatacgctgaattgatttcacggtctctctctctctctctctctctctctctctcttgcccttcatcttcttctttttccattgcggtgcgttctttagcagcaggtgtctgataaattctcatgtatgtttcttgattcgcgtgttgaaatctgaccagcgtcatgactcttcggtcatatcatctttggccatatcaaggcgtgctttctgtttaggctgtctttcttacggtcggttggaagcgttgggtttctctttctcgagtgaccctcaacatgtttgatttatttcccaagcgaagggcttctcttctgggttatttccttacgtgattctttattttggtgctgttctaataatgggttgctggagaaaatgaaagactattgatcaaatttgggatggtctatggtcatgccacactaggggtgctattagaattacttctcctactgtcggcttcggcatttgattggtggttgtttgcatttagttcagctcctctaaaccgcgaaatggttttacctataagtgattttgttgacatgtaagtcaataaacagagtatcagtatgtttgaactggtattgttaccaatgcgaaggggtgatcgcaatcagctgtaatttgtatgcatctccccctgctctattgaggaactcaagttgatgaactttgatgcctttctttcttcttttttttggaaaaaataactttgtctacaggtgttcatctatgcattatgtcataccatgcttgttgttatatccaaaatgactagctagatgtcaaggttcatgatttgcttgtttgattgtttcatgatattgaagaccctgttgctatgcacagctcgggcatttgcagctgaatccagttggcagaaa

SEQ ID NO: 90492 - DNA, 1059 bp, Eucalyptus grandis
  Intron number 2 from transcript Egrandis_v1_0.011516m (loc us Egrandis_v1_0.011443m.g) derived from phytozome v7.0 (c hr-ID scaffold_9; pos 24692400 to 24693458 reverse strand)
caaaggcaagcctcacaagagtacaaatcaatcaggtgacttattttctttatttttcttggtttcattggtttttctaggtagagcatgtaaacttcaaaatttgtatgtttcatccttttttctcaatgggctaattgtctctgagttatcactgtgcatggtagatcaggaaagtgacaggaaagtgatgccagataaacatgtgattgttatatgtgaaatgtggaagggaaacctcttcatggttatttaaaaccccatgggaatttatatttagcggatacttgtaaggttattcattcttagccacaatgatagagaaccttggctcgttgcctgatgattccttaagtgaacatactccatttcatgattaagcaacaaataacaatggagacaaaactgtgactctgtcacgtgataaagttggaaaatcagtcatattgtgtctataagagacttgtctactctggtgagagtcgaggaactttagatggaagtaattttgcatatttggccaaaagattgcaatccagtctttttctttcttccttgctgcatttgaggatggaaaatgtctagaaagttagtccgacacctttcaatatagttctctggaaagagatcatgtttagctgattcgtctgtactaacttgcagtatacagagtgatactcatgctaaatattttgaactttgaactggtgttaacgttgtcttgagaagatataccactttgatgggactttgaccacactgtctgtgcattccgtaagatgcatcattttccaaataggcaggcataatctgaccaagcaattcaagtaaagcaatttttatgcgttaatttgctactagtaacatttatgtttggcaacaaaagctgtcgcttcatctcagtgaacttcaaaagtcattgattatgacctccgattgtttcagtcaaattcattacatggtggatatgtctatatgtctgaatcactatcattttttctcttctctgaaactttcttttcagactatcgtggtgctggagagcagcgtagcaaaatt

SEQ ID NO: 90493 - DNA, 912 bp, Eucalyptus grandis
  Intron number 1 from transcript Egrandis_v1_0.027017m (loc us Egrandis_v1_0.025689m.g) derived from phytozome v7.0 (c hr-ID scaffold_6; pos 29951683 to 29952594)
cgttcgttgcgttgccttcgatttcgccatttcgggtgagcaatccgcgttgcctgtgcaatttgcaagcttcttcttttttttcttcttttttcctttctttctgtaatgggtatgtagagttcgcgagtttgtgggattttttgagcggtgaagatgaagatgttgggggaatgtcgaccgccggctgacttatgttgctgaatgatctcttgttggaacggttcacattcaaggctcgagcttttctttgtttgtttgtttctttttgattttcggaatttgggtcttcactcgcggaaattgcaatgcaagaattgtgtctctttaacgtgcgatgtgagaattaatgattggattggattttgtatgtgggtcggggatgataagattccggggtactcctgttatgctcaaacaattcggtggtgatgtcttcgagtgaagtactgggagcaggcacagattgaattttgaatcgtgcttgttgagttctgaggggttggcacttgttttcattttgattcagctgttcttgtccaaagctaattttgctgacactcttctgacttcgggggttagaagtttatggaatttcaaggaaataaaaaatgcaaggttgctaaaccctgaagagaataaagcttgaaggaaaggggttctggttgacgatataaggacggtcggtgtttaccttgttaatctcttgactaggaaatggttttctgaaatgtcttgcaaagttgtattcagatgcactgggtggtgcgcttttgcaaatagtcgaagcagctttgttgaatatgttttgtgaaaacttttgcaggttagatggatgagttgatttatgctttcgacaacctaacatagtgttcatttttctgattctagatcaagttgtcgaataataga

SEQ ID NO: 90494 - DNA, 1044 bp, Eucalyptus grandis
  Intron number 1 from transcript Egrandis_v1_0.010712m (loc us Egrandis_v1_0.010712m.g) derived from phytozome v7.0 (c hr-ID scaffold_4; pos 4501266 to 4502309 reverse strand)
ccatcaacgtcaacgactccgtcaccaagagcaaggtaccctttttttctctcgcctttccatttgaattctcatctgggttgttgttgctttggatctatactgttcctcgatagatcaatggatctgggcgatgcttgtcgtttgttatgtctggcctgctcgttcgtcgtagttttgataagataaaaggttttgatttttaatgtctcgcgttggatctggacatttggcttgatgataatacatgaaatattcatgggatctacatctactaaatgtctgcatctttaatcaattggagatacgtcatgtcatgtacgtggtgtaattgaatatgtaacgtcgtttggtctatgtaacatattaaatataagatatgtgcacttatcgtcgcctcattaataaaatgctcgtggaaacaaattaatatttaaccaatggtacaaatggtaaagaaagattttggaaattcttcttgtcccttgttctggctggctcagatctctgggatctaatctgtcattacataattgtgagagtagtagagatttaagttctaagaagtaggaagtaggaacgaagaaccaaataaattttgcagagtgtttggtttcagagtacttgcgtatcttgatgttccgtgtagtggtagtcatgtatccttgtcatacaacttaacctgtggaagactggcagttatgaatttctaacttgaattctgttcatccataatcatccactttaaaatatgttgcactcagctgaaaggaaatgcctgtttgaatgaatttcatttcatatgattttttttttctcttatggggaagagagaattttgggtctagtttgtttctctactttcgggaactctagcttgaggaaacttgtattcgtcccaaaatttgcttctctggtgaacagatactgtatctcttttaccgtttgttctgttttctaggaaaagtagcagtatgtttttcctttcctgtttactggaaactgatgagcataattctttctggaaatagtttgataacttgt

SEQ ID NO: 90495 - DNA, 840 bp, Eucalyptus grandis
  Intron number 1 from transcript Egrandis_v1_0.012059m (loc us Egrandis_v1_0.012059m.g) derived from phytozome v7.0 (c hr-ID scaffold_4; pos 15931123 to 15931962)
gccatatcatttcgcaaagtgagttcaaaatatggacctgtgtgaattcgtaggtgtaagatgttactatcaaatcaccaaaaaataaaataaaaaatcctacatacactgaagattactatacaaaagttggttctttttagagatattattgaaaagttgacacatatcgacttcaatatcacttgttgagattatcattgaattttttattcatcatattggaaaagtcatgcaaccgacatacctatatggacttgggatatatttggttcagcatttgaagaaagtctttaagaaaatacaaaaactttgaggttaaaggaatttttcgaaatacaagtactgtttgatcaattgtaatttaaaagtgcattgagaaacaactttagtttaaacgatatttggaaaagtcacactttgtaacttacttttctttctaaattcaaaaccggccaaagacttagcagccagcgggcagccgccgaggccaaatctggctgttgacgctggcagcccgttgcgcgacctggagaaaggacaaagaaaatgtaattgtagattagacggtgaagaaagtgtcgtccccatagtggtatgatgaaattggatgcacataagccacttaaagctcatcgtcgttattcactcctttacgctaatattgagtattatcataaattattctcggttctgtccggtcataaatctaactttcaatctgtaatcagatgaattaaggagcttcaaagaaggaagcatcttattcaatagaagcaattgcgaagatgttgaagctatgtagagcttcttgaggcttcacatctggctttggaaggt

SEQ ID NO: 90496 - DNA, 419 bp, Eucalyptus grandis
  Intron number 1 from transcript Egrandis_v1_0.003145m (loc us Egrandis_v1_0.001971m.g) derived from phytozome v7.0 (c hr-ID scaffold_4; pos 18692271 to 18692689 reverse strand)
gtgtgcctccctaggatccacgccctccttgaaaggtaatccctttgctctatatggtaatgattttgattgatgtaatctcttgcgctcatcgttgcgctgttcaatctgtgcctgttttttttcgtctccaatttctgccaattttatgttttgtctaggtttttcttttgtcaacatttgttcaattcatgtggggttgccagtttaattggtactaattaaatgtctttttgttcagtctcttcatattatctttttattaaaaataatcacccttttgttttctgtgaatttgattgtctgtttgctatttatttgtaatctagaatgttatgaccacctgtattctgttttaattctagggtttcgtgtccgccgcagcctgatcttaatcaattggagaaggaatagtttca

SEQ ID NO: 90497 - DNA, 909 bp, Eucalyptus grandis
  Intron number 2 from transcript Egrandis_v1_0.014346m (loc us Egrandis_v1_0.014346m.g) derived from phytozome v7.0 (c hr-ID scaffold_9; pos 29944901 to 29945809)
tgcagacttgatattctcaaaggtctcggagaagggtaaatctttttcatgtttgtatttttaccctttcttctccttaaacacatggaagataaggcatagtcttctcatcaacatcttgcttgtttaattaacctggacatgtatgttgttcctgtttcttcctgtctactgatttgcggaatacccttttcaacccttttggctcggacctagcaaaagactgcttgtcttgggtagacaacttgaaactagaagactggacagtggtgtgggcaagatattatgttttatttttataaagttcatcctttcccatgggcaccgttccaatggctgtcaattttttgatatcaaccatggacactgtagatggatggcagatatcggaaatcactcctgactattttctgtgtgattatcgcagcttgttttggttatgattgctataaaattcacggcagtagttgagagactgaattcttgggccttggtctttgtcgaagaaccagacataacatgagatgcctttctttgctgtataatatagatagcactgatctccaggcatattgcacatatttttcagcatgtgagaatttgccaaaggtggtatgaagagttgggaacattaaaaggaccagaaatgcatgttgtaatccaaggatattgtgcagtgggaaatccagttgaagtaatagattatactttttttatatgttcatggttgagttgaaactaaatttatatttttatgatcctcttcttggcttcattgttgtattgttgtgtttgatgttgtgtgcacctatgctacgtaaatgataatggctaatccatacagcatctttatgttgaccttcgtgtcttgtattctagatcttgagtgtgtcttcaccgtcatctgca

SEQ ID NO: 90498 - DNA, 799 bp, Eucalyptus grandis
  Intron number 3 from transcript Egrandis_v1_0.025834m (loc us Egrandis_v1_0.025834m.g) derived from phytozome v7.0 (c hr-ID scaffold_6; pos 38637827 to 38638625 reverse strand)
aacctgctccggtatgactgattgatcaacactcatatgggtgattttttagcttctggaagttgagcagaaacttattaactcctaaatgggaaatcagctttttattgtgttgttattacttttttaagtgttgcaccaattgtaatgtaatagcaccttttgtaggagattacttgtatgctctactttgtagttgatgcatggaaagtcttttgtgtctttctattgttgcaaaaggggaatgtgtagcttcccataatgaagtcatgctgtttgagtttggtggagatacagagattggtataacctattttgggatacttctggagatactaagatttatgctggttgagttggtggagatacacagattggtatggcctattttggaatactgctggagacactaagatttggtgttcaaaattgttaatgacgaactgtaactgtggtacttaagcatgtatgccatattcaattacccacaggagtttgctgcattgctcagtaaattaatctaatgtatggactttgcattatttcttgtctcagttgcactttgttggtttgagtggatttgtccatgtgaagcatgatatttcctgtgtctatcagtctttttcttgtgtggtttttggaggaaagtagaacaaagaggaaagggtaatagaggacaaatgtgtttgtgatgattgtcatgttcaactcctctgattacctttgcattattcaaattggtacttgctgtctgttgagatcaggaacctgcagctaaacctccggttgaaaaggctcc

SEQ ID NO: 90499 - DNA, 629 bp, Eucalyptus grandis
  Intron number 1 from transcript Egrandis_v1_0.001152m (loc us Egrandis_v1_0.001152m.g) derived from phytozome v7.0 (c hr-ID scaffold_9; pos 38300575 to 38301203)
gagcacaggtttggtttggttctccacctcgatgcgatgcgatcgtctgtggtttttttttcctagttttgtgtctgcgctagaacaatcctacttgattgtatacctagttaattgcttaattgctattactccgccttccgcatagagtgccagacatccgctgtggactggtctcgtaatgattcgttatcaaaccacgccgtcttttcattacttctcttctataaggtcccgttgatctggagcttcattggtacttcgggaatgtgttagctgcaattgtcgattgttgactgatctggcagtcatatgtcaggacaattctggtttaccatctttctttctttctttcttgactttctgcggagttcttactcatctgatcatttggatactcctagctgtcggtttgcggtgagttttatctgtttttccttgctttgatcatataactgaatttaaacattagggtgcgcacacgatttctccttgctgcatgataggttggtcggggtgattagccattgtcctgaattttggtattctttttctctgggtgagagagtgatgttgatgtttggttttggttttctgttttagcccactagtgaggcgagctagtgcca

SEQ ID NO: 90500 - DNA, 883 bp, Eucalyptus grandis
  Intron number 3 from transcript Egrandis_v1_0.016448m (loc us Egrandis_v1_0.016448m.g) derived from phytozome v7.0 (c hr-ID scaffold_9; pos 34848179 to 34849061 reverse strand)
ggtttggtgcgtcagcatatcattggaggtttgtcatacgactttatcttctgtaattccccagttttaacgtggccgcatgaattaactttgcacgaggaaatgggaaatactggttaatagttagctaccatagggcaattctctttaaagttgtttttttatgactcctgctgagaaaagagaagtgttggcaatatgaaaaaggttgtaggaattggagtttcttaaatacaatgttaacttgtgagttcttctagagaaccaggtgaaggaagtctgataggatgagctttgtagctagtgaaatagaaatgatgatagctaggaaactctctgaacatattttcttggtttgagcagtttgagtctcctgcaaagaatcaggtctatttccagtgaatgggaattctgttagggacttaggatataacttgtcagagaagaagattggtttcacatcttgctaggtcggatgccttagcggtagattttcctttttacaatgtttcggagtggatcaggagcattatgcaccaggcgagaaagttcacatacccacttgcatggccttgcttgggtcttttcttcagttgtcataagtgtccgtcaacccatttgggacctctcatagtgccaagcccgtctaagaggtttcctctctttttaacataatcaaatacagtatattctgccgagtcactatctaatatcacaagcctacaaaatttggctttactatactcacaacatttgctcttaattagccatttctgttgctacattaggactaacgtgttcattcactcatttgagaatgcgtggattttctgtctgcatatatgtaggtataacattcctgaattagctaaaagctacaaag

SEQ ID NO: 90501 - DNA, 1055 bp, Eucalyptus grandis
  Intron number 3 from transcript Egrandis_v1_0.018642m (loc us Egrandis_v1_0.018642m.g) derived from phytozome v7.0 (c hr-ID scaffold_9; pos 35067373 to 35068427 reverse strand)
ctgaagagttggtcacggccttagctgaggctaaggtaatggccttcactcttctcgagaatataaaatcttgtcgtgtttgtgttcttctcttgcacattggctttgtttgtgtgttggaaagactttatgagaagtgcgtttaatggagttggagctcggtaagaagcttgtcctcctgaaataagaggttttcagcttaaatgtttgttttcgtgtttgaatatgatttgatgtggaggcatggtgtggaacatgcaaaacaggccactagttattttttatttttatttttattttggtaaaacaggccactagttattgataagcatgtattttcatttttttccgttctttttttttttttaagtgggaagcttgttgatctgataatgatttatatgactaatgtattttcgcggtattttttcgaacgtaccttgaaattctactatcccatgctttttatgccgttttcgttctatgatcccttgcatccttttgtcggaacacttgcacttaccttcaaacgtgcaagtcttttcttcattgatgtcccatatgtcttagttgtagttgctatgggttttggctctggctctcataggctctggctttagctttggctccagctctctctcggttgggttctggccttaattttagttgaagatgatgaggacaaatgcccaaaattattcgaatgaacctaagtttgacatcatattgtaaatttaaatatgcgcaaaagcatgatttttgtatcaatgatagtttgtgttttgatacatgcaagtgtaggtgtgtatggtatatttgtatttgattgaagatggataagaataggatattttgagaaggttaatgggacaaggatagttttactaagttaaagaacatgtgattttacataattacatgaggagatgttggcgtgggtgaaggagaaaaaggatatagtgtttactcttaactccccacacacccttttacatgaatgagctattacctttttataagcattttcgccaactaagtacaaccgctttagagga

SEQ ID NO: 90502 - DNA, 1020 bp, Eucalyptus grandis
  Intron number 1 from transcript Egrandis_v1_0.002929m (loc us Egrandis_v1_0.002065m.g) derived from phytozome v7.0 (c hr-ID scaffold_6; pos 29135082 to 29136101)
aagagccctagggcggacgatcgctcgattttgaagtataagttccttgaatgtggtacatttgccagctttttcttttacttcttttcttttttcttttttcaatagactatgggccgtgtaacgcgatcgttcgcgagttaggcgcttcatgtcctttcgtcgcgactgcgtggatggctgcgctgccgttttagttgctgagatgtgcgtcgggaaatttcctttttcagcgggaactttgtttgcctctgggtttttgaatctgagtatggaacggtcgagtgttgcatagaaaacgattgtcccatcgagggtgaatctgctggaatttgttatttctgatttggcaaaccaggggtgaatttggtcttcgaaagatgattttttttttttttttttgtttcgcggatgcattcggtatcatttatttatggtggaaggggttcgtgctacttacagtcccttccttgtaaatgggggaatgtgatatatcgacatgaacggttatcgaaaaggaacggtaaatatgggtcacaaagtagatagagattattaggacagctaatctttaaaaaatctggtgaattgctcaccataaaaagggcggacatcagactataggcaaaaaaattctacccatgccacagaaatcatgcagtcctgtttacaagcctcttataagtgcatttcagtaccacattgttattccttaatgcattctggcagggttttggactaatgatgttagcaaaccttatagccattgcctcgatttttagcaatgatgcaaggaggatttcaattgcacaccaagttaaacataagtagatattgtgggctttctttatatacttggaaaattttgctggtctatgccctcaatttgctagttttcttgtgcttaaggtagttctattcttctataaatagttctcgggcttggtttttctcaaatactcagccttttacattacttttctgactcttctaatttgactgtagttgcccctggatcag

SEQ ID NO: 90503 - DNA, 797 bp, Eucalyptus grandis
  Intron number 2 from transcript Egrandis_v1_0.007635m (loc us Egrandis_v1_0.007635m.g) derived from phytozome v7.0 (c hr-ID scaffold_4; pos 15902052 to 15902848)
gccatatcgtttcacaaagtgagttcaaaatatggacatgtgtgaattcgtaggtgtaagatgttaccatcaaatcacaatagaaataaataaaaataaaaaatcctgcagatactaaagattactatacaaaaattggttctttgtggagatatcattgaaaagttgacacacgtcagcttcaatatcagttgttgagattacaattgaattttttattcatcgtattggaaaagtcctgcaatcaacatacctatatggacttagggttcgtttggtttcacttttggggaaagtttttgagaaaatgcaaaaacctttatgttaaagtggtttctcgaaatgcaagtagtgcctgttcaattgtaatttaaaagtatattgaaatagaactttgatttaaatagtgtttggaaaaatcacactttgaaaagtatttttgcttattctttttgaaaagaaaaattaaaaccggcaaatgactcagtagccagcaggcagccggcgaggccaaatctggttgctgatgagccggatctggagttggcagcccgttgcgtgatacggagaaaggacaaagaaattgtaaatgtagattaaacggtgaggaaagtgtcgtccccattgaggtactatgaaattggatgcacataagctactcaaagctcatgtgttattattccttgacggtaatatcttctgagtcatcagtcatcgtagttctaatattgagtgttatcagcaattattcttagttctgtccggtcataaatcttcgactttcaatatgtaatcag

SEQ ID NO: 90504 - DNA, 606 bp, Eucalyptus grandis
  Intron number 1 from transcript Egrandis_v1_0.002174m (loc us Egrandis_v1_0.002174m.g) derived from phytozome v7.0 (c hr-ID scaffold_9; pos 27035718 to 27036323 reverse strand)
cttcaccttctccaccctccgcttctccgtcggaggttagttatcaactctctctctctctctctctctctctctctctctcttccatctcgtccttccttaaaattcatcacttctatccagaatcgacaattatcgccgacgtggggcaaaaagttaagaacttgcattacgagctccgattgattggtgattaacttcgccgattgtgactttgtttggcgtgggatttcttatgctcgaatgaattccacgagatgctctgttttcgagtgtgaatttcgtggttcaattccagttatctggtttcttcttcgttctatttcttgtaatcgtcgactgcgataacgagctcaaaaaccaaattttgcccattccgtttccccacttcttgcgcggattttgcgtaaccagaactcttctgtaaaatcgagggctttgcgcgattttctgttgcggataaccttctaatttgaataattcgtcggaatcgattctcgcggtgctttagaaaaatccatcttttacacaattgaaagttttatgtgttgatatcgccgtcgtcgatatctgtgcagaaacttttgaaccggtggtcgtcccctc

SEQ ID NO: 90505 - DNA, 978 bp, Eucalyptus grandis
  Intron number 1 from transcript Egrandis_v1_0.010561m (loc us Egrandis_v1_0.010561m.g) derived from phytozome v7.0 (c hr-ID scaffold_4; pos 33641016 to 33641993)
caagagaagacaagagcgaggaagtaaacattttcctcattaagcactttctctcggtacttttccactcctttgacaatcatttattgggttagtcatgatattcatcatcgcagtaatccgtgggatattagtagccgccttcactaattactttggatttgcattcaatggttcttacttttttgttttgtttttttttttccaatcttgatctcgcgcattcttactttattcgatataagatgctcacaactttcaaaatgtgattgatatcaacttgtaaattcgcatataattttttaaaatatatatttgaaataagatgatcttttttacttaggaaaagaaagtgttaaaatttgcatttttctttacccggaccaaccgtacacctcgggccaaaaaaggggtgcgatccttattaagacaacgcacggatcggcctcttgctagttgtcactgggtacatcgacgaaggcgaagattgagttttcctaataattctttgaatgctagaaaatgattgaacgaataagaggtatgtcataaattgttcgctcacgaggatcccacatatgtcggattttgatgtgaacatcgacggggatggtgaacctaagctgtacctttcgcattcgttttctttcaaaaaattgaataaagccaaaaacttgattgaaaaagttggtttacaggataattttgcaagttgttattggtgtgtgtatatatgcccatctagttacactagcggtttcgagcttcgcatatctctttataaaagaaatttgtgaatgggactttagatatctagcgatgctcttactttatattagcaatgtctagagatataaattgtacggtcaagaattggtgcattaaagttcatgtgtgacaatgacgacatatcgtttatatatctcttgtggtggacactcaggatttatttgttgcgggaacggacactacttcgag

SEQ ID NO: 90506 - DNA, 343 bp, Eucalyptus grandis
  Intron number 1 from transcript Egrandis_v1_0.048090m (loc us Egrandis_v1_0.048090m.g) derived from phytozome v7.0 (c hr-ID scaffold_957; pos 3855 to 4197)
tttcaattgttcttcataggagtgaacaaattgtacaagagttgatgtcttagtagatatttgttggaagacattgtaagtgctctcgctcctttgacttgattttataccataagaaaaaatatcatgaccaaaaacagaactccatttatgtctcaatttgtataacctttgaaaccaactgttattcttaataccccactcatcttccatatttctccaagtaaattcaaatcaatcctctgatttgcatttatacataagctttgacaattataggtcattcttcttccataaactaggtaggaatgattttcttatggagtgtaccatgttaacaggt

SEQ ID NO: 90507 - DNA, 594 bp, Eucalyptus grandis
  Intron number 2 from transcript Egrandis_v1_0.048090m (loc us Egrandis_v1_0.048090m.g) derived from phytozome v7.0 (c hr-ID scaffold_957; pos 4213 to 4806)
taacacggcaagtattgtcaaagctagcaaataaggtatatgcaaatgccatgactgcttttcagcaaaaggatgcgaaagctctacattttcacagcgaaaaatttctcaaacttataaaggatatcgatttgatgctcaaggcttgaaagtgccgaagcattagcagcaacttctagtgagatgaggcaggttagtctcggtaattgtcctcattggctgaattgtccaatataattgaagcgaatatgcagagtgtggatctgtattgacgttgatgatgtgtggacatctgaagttccctttgatcaaaaactgtgttgttatttaccctaccaattaatttggagaagtgttctcccttatgaatctctcagcaaaagcttctttcgattaacacccataaagggcatggtatctaattcagaaaaaagcattttcacatgacaaaggagatgggtgtcttattgtttcttctttgattttttttgtctcggtatgaatggaataaggtaattcagaaaaaagcattttcacatgacaaaagagatgggtgtcttattgtttcttctttgattttttttttgtctcagt

SEQ ID NO: 90508 - DNA, 719 bp, Eucalyptus grandis
  Intron number 2 from transcript Egrandis_v1_0.022575m (loc us Egrandis_v1_0.022575m.g) derived from phytozome v7.0 (c hr-ID scaffold_9; pos 29800213 to 29800931 reverse strand)
agttcaccatcaccacgttctcgccgaccggagtggtgggtcttcgcgcgcttctcgccccggcgtcgcctgccgcgggtggcgtttgcgtttttcttcctccgagagtgcaatttatcgtttaggtttgggcgaggttgttggggtcttgctcgtttactcggcattgatgtttggctgcccgcggtcgattgaagaagcgtttggatgggggcatgcattttagttgcgtggacttagagttgtttgattgaatgctgccgtttcttgggtggtgcggcgaagaagatttgcttggtgattagtgtcgggcgattggttccgggggctacctttcatttgtttccattcttcgtctgtgatgtcaaaatccgatctttggggaatcttgatttaacttgtggagaagttactattcatgtgtcatttgctcttgtttggtcgttattgccttgctctgcttgatttggctaattgcgctcggaataaactagtgttagtttgtgcttcccatcgagaagaacattaaaagatgacttcgatttcacttggtttagtcgaatttggttatgcatttttccttttttggacgacggttgattcatcttctttataatgtcgcggtgctcgtgccgacacatggttttgctgcattctttgagaatggttcgctttctgctgcagactctaacgtcaacaggaaccaagaaaggggagct

SEQ ID NO: 90509 - DNA, 774 bp, Eucalyptus grandis
  Intron number 2 from transcript Egrandis_v1_0.027016m (loc us Egrandis_v1_0.027016m.g) derived from phytozome v7.0 (c hr-ID scaffold_9; pos 26352297 to 26353070 reverse strand)
atccaaggttttattcctttttttaaaaaaaaattatattttccattttctgcgcgttgcccccgatcgcctgttgttagtgctgaagcgaaattggcctttctgaatttatttccttttgttgccccctgatgagtatggtcccatttcgtcgatcacgaatgtgagttgtatcgaaaatctcgtacttgtagttgttgttttccttttcaagcaagctcctcctgactaggactgtcggtgccttcggcgcgtttgtggtagtaaatgagaagaagagatggagtggtgcagattcgccatcacaattggttaaatagtaataataataataataatgaagttctaagatgacatgaatcgacgtgaattcatagcttgagcttgaaatgtgcacttattcattttgaagacctcaaagtctcctttgcacccttcatgaacatcttcatttcctcgaccggtgaagaattttggttttgccttatgttcaagcaattttcaaggcatcagtcgaagctatttccttggtgagaaagaacaaatttgcgacaattgggtctttccttaatgttcggatcacatcaaccatattaccgatcccctagtgcatttgcatagaatatgaacatattctgtttattgtggttattttctttcagttaacactgtgcagtatgtgttttattggatttgattgttgagctttgcactcttagctgatagtttgatcattcagaggctattttgaaacttgaggaggcactccaggtg

SEQ ID NO: 90510 - DNA, 772 bp, Eucalyptus grandis
  Intron number 1 from transcript Egrandis_v1_0.018654m (loc us Egrandis_v1_0.018654m.g) derived from phytozome v7.0 (c hr-ID scaffold_4; pos 35431709 to 35432480 reverse strand)
ttgttgctgtcaaatacatcgaaagaggaaaaaaggtaattgtttgcttttgtttttttggtcagtttttctttcgtcccagtttgctcaggacttaagatgcactgagaacagcagtatcaatatgtttgactgatctgtacagtggtagaaggtcaggatatcagcttaaagtataaatgtgtgaattttagaagcgcctcgtttttctcagaccatggttgtccatccctatctgatttttggagaagatggccaaacatcaacagaactttcggtcgctatgattaaaaccgcaacagaagctttatttatttatgtgttgtgtagcctccgaattgcttcggtatttgcaagtcactgtatctgttgtttttacacatcctagtggtgtcgttgtggttagctcttttgatatctttagctagtaatgtgtcttgaaggatttgatgctttagaattttacataggaaggaaattacgttctatctattggatgaaaggtggaaaagctagcttctgagctgtgaatgtgtatctttaaattgttttggtattctttcagggatttttggctacattttccatgtagaagggactgcatttgaatccatccgtcctcaagtttccttttagtgtcctattagctttgtgctttgatatagttttagccttgtcattgtcttgggataattacttttgtcattttcgtcgttgtgcatgtgttttgcctcattctgatgctgtgcaatcttgtttcagattgacgaga

SEQ ID NO: 90511 - DNA, 398 bp, Eucalyptus grandis
  Intron number 1 from transcript Egrandis_v1_0.008840m (loc us Egrandis_v1_0.008840m.g) derived from phytozome v7.0 (c hr-ID scaffold_9; pos 23545414 to 23545811 reverse strand)
catcaaggcttcaagttcgaagcttgctttcttgggtttgtgatcttctttctctttctctctgcatcaggattcgtggtctgggcgcttgaatgctttctcgccacctttccttttgattccttgatttgcgttagttttttcgatctttcttttttgggtttcttggatcttgtgtattatattagattttgactgctctgcggcttttctagcttcactcaactttgactccactgcttttccatttctttatgtaatgtgcactttactcgcttgcttagatcgggtggccttactttaatcagttccttttttgttcatgtggtcttttagtgctcaggtgagtatcttagcttattggtcgtgatttggtgttgcagtgagagttgacggca

SEQ ID NO: 90512 - DNA, 929 bp, Eucalyptus grandis
  Intron number 1 from transcript Egrandis_v1_0.000268m (loc us Egrandis_v1_0.000268m.g) derived from phytozome v7.0 (c hr-ID scaffold_11; pos 15773040 to 15773968 reverse strand )
gtcggcgtcctccgccagctcggcgacctagctgagttagtctctctctctctctctctcttgctcactagaattgagttgcttgagggaatgcggagtcgtcgtcgctgttgcgccgttgtcgtcgggcgcgattgtcggatttgatctgaactctttcccgattcgggagctcgtttggtagagaattcggtttttctttagcgtcgggctgcagatttaggcgtctggctggtcgtaggttggggaatgggcgctagattcgtgtttcattcgtcttactcgcgctttccgtttgttgaagaagcttgattatggtttggcctgaagaagaagaagcggtttttgatcgagatggtgtctgaagtagaatttgagcgagctagtgtggtcgcgggggttaggaactttcggaaccgtgtttggaagtaccagatttaggagagagtttccagcgatgatgcttaagggagctggattttagggaaaaccgtgtatcttgaggcttgagctaggaaacgactagttgagattggtaatgcctctctgattaacagactttgggaacttgtagatggtaattggaagctagttgttacactgttgtcacagcatatagtaacaccaacatgcaagtactgatgtggcttcttttccatcgtttgaatttctttataaccatctcttagcgttgatgtgatatcagccaaattgggcttttctcttcaccaattcagaactccttcacaagcatggttttctgatggctgtgtcgcagttggatatcttgaccattttccatcatgtttacattattatcgtgcgtctggttatttttccattgctgctgtatgttctgatagagaactgcacaattttttgttcattgtggctgacaagatttgctgctgagatattccacgacttgc

SEQ ID NO: 90513 - DNA, 835 bp, Eucalyptus grandis
  Intron number 1 from transcript Egrandis_v1_0.018820m (loc us Egrandis_v1_0.018820m.g) derived from phytozome v7.0 (c hr-ID scaffold_9; pos 30649893 to 30650727)
gcggctaagttcgttggcaaccactcgcgcctctggttcgactctctctctctctctctggggttagtaatcttagttgctaccaattgatgaatgctgaggactttgtttgtgattatctgaccattctacgttactttagtcttctttcgcgagcacttcttgctgtcccatttgccaaaaaaattgtgttctttaatggaaaagagaaggcgatgcaaatgcctgagcatgagaatcccactttagataatctcaagtgcatgagtgatcctggttcactcaatatgatgaactgcaagcgggggagtttgctctgtagggggcctgttcctttttaccttccgaacccgtgttaccaattttttgatatacgcaagtagcattttaaattcattatgcttcggattagttagtgagtatgcgtcgtatcagaatagatttgcaggtgctgattttggttgggagtatgtaatttgtgtatgagaatgttcctttggcaatgcttttgaggtcctcatcttgttatttgactagtgatttgacctgaaactgtgggttctcgtttcccgtatttgatttaagtgaccgatcttgttaacccaagctttgtcatagttcagtgccatatcctttgtccttttcccaattagcagtcatgcttggtaaacctggtcaataagcttggtttttgagcatgtgcatgccatccccttacatgttaatgtcaatgaaatgtgaaactgttgctacaagtgatatatcatgcatagaattctttgtggcatttgtctgatggactcaatttttttcggttttttatgcttgtagaaca

SEQ ID NO: 90514 - DNA, 855 bp, Eucalyptus grandis
  Intron number 2 from transcript Egrandis_v1_0.008579m (loc us Egrandis_v1_0.008579m.g) derived from phytozome v7.0 (c hr-ID scaffold_9; pos 1935637 to 1936491 reverse strand)
gtctttaaaatcagggcctaggtgagattctttgtgcttgtgtgcaaaccatgtttaggtatcttcgttcttgctttatacttttacatttggaaagcatcagccatcaaggttctttcttctttaataggtaagttaacttcaaaagtgacggttgatcagacccactacagccaactgtactaatgtaatctgacaaaccagccacattagcagcaaatacatgaatgaacagtacgacattgcgacaatctgcagctaatcataatgaatgcgccaatgagctcatattaatggaactccattaagtcttgtgtccaattcctatcttctcctccctgagttatccatcaagatagtgcatccgctaatcatcctgtttagatagatttcaaatttacaggttgtcagtgatgagagttcttgtttgtttaactggcaaaatctaataagaggataagaaaaagaggtactagtgtcgccaatttaacaactgatgcagcatcttggccagtcagtcctttctatagttgctctataatctctctcattgtctgacttcaatccagatgatcaagaagttacttctgtcctatcatgtgcatatcccatctggataaatgaaggatcaaggagtctgcaatgcatacgctacatgatttcaagactcattataatgaaatttgggggttaaatgatattgtgccacaaatagggattcatttatctactagtaaacagagaagaatgctctaacgaaattctgtgcaatgtctctgcaaataatcctgttgtgactttcctaattttctcttttgatctctctgctattcagatcatcgacaactttgtcat

SEQ ID NO: 90515 - DNA, 862 bp, Eucalyptus grandis
  Intron number 1 from transcript Egrandis_v1_0.008579m (loc us Egrandis_v1_0.008579m.g) derived from phytozome v7.0 (c hr-ID scaffold_9; pos 1936553 to 1937414 reverse strand)
tcgtcttggaccttcaggagtttgccaattcagtgagtgccctcaaagtgccttttttttttctttttcttttttttttttctgtttgttttagtgtgcattttagttcttcgtgattaagtagatcaagaaaagaagatatctatgaatcaagctgaaaacctgatacgacaagtgctacacagatgaagattcaacatcaagccagttgagataagatgcttcctctttctaccttgtcgacgttgtcgtatgtgtgcatctgccaagaaagccttcacacatatacgcattttttacccctgaatgttctgtggagctcacatagaacatgttattattaaagggcagtggcaaagggattggtttgttttatctcattgaacttcctttttgtatgttgaactttaaataagccagcgggcattttaacttcatcactgtctaatttgtttgttttattatataacatatgcctcaggctccaatgcaggacttacatgaaattatatcagaatatatacctcctaatcaattgaacgatcggatatattttgaagacattaacataagttctcttctctgcaagaattagtccagaacacatggaaatcaacttaatgtttgcattctttactttggtattgcttttcttttttaactttcatgataatagtaatagaggattcagtctctctttttagcttctgttaattttctgagcaagtaagaaactgaaacatgtgtgcgtagttgttggactcaattttctgtgttgcattgatgtcacatttgcaatacataggtggagcttcatcaattactgaactataaatacgaaacaacctcatggcgcaggata

SEQ ID NO: 90516 - DNA, 909 bp, Eucalyptus grandis
  Intron number 2 from transcript Egrandis_v1_0.007960m (loc us Egrandis_v1_0.007959m.g) derived from phytozome v7.0 (c hr-ID scaffold_6; pos 38433916 to 38434824)
gttcccttggtgggttgttgtggctgttcaagctggtaacttttctgcggatctttctacaacttagttatgcttctaaaatgattttttagttgaaacctgcattcctgtttttcttagccactttccgttcttttttgaatttctttttacgacttacgcagtcatgtgccaaacaattcacaagcttcctgttttcttttgagtcctgttaactgtttgcaagcaagagcaatgtatctgttatgcttgtttgagttggaaaaagactgaagctttatcattgaactagtgcatttacatttagtgttgtgtatgtgtgtctggtcacagataatccgtggaattgtcagattttctctctagaaaccctgtttcaaactctccaatacttcctgggagggaatattagatgtgctatctgggaaaagaatgtgacaaaaattactattgctttttggcagtttcaaggttaaactttctctgagcacatccatgcccttgaaaatgcacttctgttgtggtcatacaatctacctttcattattttaatttttgtttgcttcccttgagacttgctcttagcatatgcagtacggtagtgatgccaacgcgatatgcttcaattgtttattccttgtatttatcttgcatcttttatgtgattggttcttcaaaattaaattgttccagatctttctaatttatagtaaggtgagtctcacagtgatgtttcgttctcctatattgaaaatcttggttgattcttgtagcttcgcttaacaatgcaaatccctgatcatattgaatgctaagtccttatatgtagtgatggtattactctaatcaattatctgcacaatactggacgcagcaatatttcttgggacaagttcaaatccagctgtt

SEQ ID NO: 90517 - DNA, 615 bp, Eucalyptus grandis
  Intron number 1 from transcript Egrandis_v1_0.024614m (loc us Egrandis_v1_0.024614m.g) derived from phytozome v7.0 (c hr-ID scaffold_9; pos 259760 to 260374)
aattcaaccgccagtgcaccctcaccaccaagcaggtccctccctcctcctcctccctctatcgccgctcccgcttgctgattctgatgatccggagcctgctcattctcaaagtccgtgaatttcgagttggtccgaggctgtcgtcgtcgttagggtttttttccttcctttctttgtccaacgtcatgtcaggatcttgtttcgtctgtttgctccttagatagtgaaggaagatgggggtgttttttgagtgggatctgttcagcgcaagcacttcgactccacttgacttcttgttgttgatggtggcgttgcattagtgagatagatagctgaactaatcaattgtatatctgaaggcagttgttttcagtatggttatccacctgcattaacaaaatttgatatttttgttattagtatgctgccacagataatccgagtctgccctatgaagttgagaagtatataaaatcgacattttcgactagtttcattttgtttgttttcttgattgcaaggctctagcctatgaaaagcattccccattggtctcttgacttaacctcgtttctctttttcaattggacagaggttctacggctttgccat

SEQ ID NO: 90518 - DNA, 801 bp, Eucalyptus grandis
  Intron number 1 from transcript Egrandis_v1_0.022967m (loc us Egrandis_v1_0.021761m.g) derived from phytozome v7.0 (c hr-ID scaffold_11; pos 4035582 to 4036382 reverse strand)
gatttgtggatccaagtactacgagtacacgggcggtaagcgtcagttggcaatgaacttgtacagcaatattgcatgattctaaacactctttcaattgctactttttcttcaaaaatggaaaatgaaaaaaaaatatttgaaatccaagaaattatacagaataaacatgttcatttacgtcaacatttgtgtatttgaaatccggagtttcgtgttatatattaaaatcaaattgtaggagttgcaagattttgaaaaaaccaaaaaaaagtgacagtgaaagtcacccctgtacacgatccattatcatttgcacgtataaatgtgcctagattatatttcctaaccacataagggttagactttcaatgtaaaaaaaaaaggtgcagccacatgactagttaatatttggtctagagtttagattttcttattttcttaattaattccttaattagtcactcaactaatctttcaagagaccgtcattaacaaattccacaaaaaaaaaaaaaatcatgtatcgatagggggaagaaattattaactaaaaatgaaaatcactatttctctatattctgttgaccgctaacaaaacaaaaggagtttcttgtatatgattttatttgcattcttgcaaatgcatgcatccccttctcatactcttttggacgcaattcaacttatacaaattggcttgctattgctattactctgttttctcgtgagttttgttttccatacttctttttcttcgattccttttcacgtcattcgtttcttctacaggtgtcctag

SEQ ID NO: 90519 - DNA, 976 bp, Eucalyptus grandis
  Intron number 1 from transcript Egrandis_v1_0.009972m (loc us Egrandis_v1_0.009972m.g) derived from phytozome v7.0 (c hr-ID scaffold_4; pos 22696827 to 22697802 reverse strand)
ccggaatctctctctcattgaccagtaagtattacaagatactaagcccagtgatagcaaatccaaaacttatttatttattattatgtttagtttggggagaggtcgaacacgctatttgattagttatatacgagggttatgttttggaaagatttcagttgtaattctcattgcattttctttattgttttacttatcgactataaaataagtccaaccgattcgtcttctcttgaaacgcggactaaaaaaaatagtatccattttagattatccattgattcggaaaaattgctatttacagtgttggtaatagcatttcgcacacgctaatttctttctacacgtttttctagatcttgttctcttactttttatttcctaaattacaccaatattttcagcttgcaagtgatgatggggcacgtggcaatatatatacaaaggatcagggtatatatgctaaatttcttaatccttgagggtaaattatgatgacttgaaaggaaagggatgcaatgattttacttttgaaaatgtagaaggtgctagtcctctttcattatctaaatcctcttataaagttgagttggacaggatattttccataaaatgattggcattgaagtaaattttagccttttattctagacttgatagtgcagatgtcttgctaaaaatatgagaaacttcttctcaaactgcttaacgaatttataacaatttaacttttcaattgataaactttatgaatttctgcattatgctagattgaaagcagtcaggttctacaagtgttacacaagatcgccggaaaaaacttcaaattaccatgacatagtccttcctagtacacacaaaatgggaaaaacttaacacgatgaagcgcagttttagtatctatgtctagatgctataaacagactaaatcataacattttcctattttatatgcaaagtttgggagaaaatc

SEQ ID NO: 90520 - DNA, 823 bp, Eucalyptus grandis
  Intron number 2 from transcript Egrandis_v1_0.025168m (loc us Egrandis_v1_0.025168m.g) derived from phytozome v7.0 (c hr-ID scaffold_9; pos 30560096 to 30560918)
tcttaggtaaatcctccaacttcttgcgcttactcttcatgatgttcgctcttcgcgccacttgtgcatgcgaaggatggtaccctgcgtgtggcggtgcgtatcgttttgtgggttcttcatgatggagcgtgtctgaatggtttgttgcttccgtcgatcgtgaagcgtcggtgatggatgcggcgattgaacatgggagacggatgcgggtggacagacatcgatttgaatttttagtgtaactcttatgttaatcgcttggcctctagacagatcgagcgacccgcgaatcgactgtgatgccagttgagtgtgtcaaaccctcaggtttcaaaactaatttggatgtcacatagctgaccgatggtgatgtattatcagaaccatgtgggtttggtgtttggcttatcgctagttgcaatcgggtcaaaagctaaaaagaaggaagtgaacgaaaagtcaatgagaaagagaatcttctttttgtaaagcaaaccgactttgatttttgaataatccaagtcacttttgcttctattttagcaaaagataagagcgccatgaactttattcataacaaatcttgttggtctgaagactatatgctacacagcatcaattcattgtgggtgacaaatttgttcatcagcggacagagcaattcacaggagtgactgaaatttgcagaaaagctcgatactacttgaattcctataggatattctctaatgttccttgtatcttccattaagtttgcggtgtttatgacaatagggatttggcaggtggtcctggaagtgggaagagcacgcagtgttcc

SEQ ID NO: 90521 - DNA, 921 bp, Eucalyptus grandis
  Intron number 4 from transcript Egrandis_v1_0.016137m (loc us Egrandis_v1_0.016137m.g) derived from phytozome v7.0 (c hr-ID scaffold_11; pos 44946198 to 44947118)
gtgtagatacttctttcttcattgtaagcatcagatgcaatcagatacttcaacaactgtagctttgtgcaacctcaatctggatcctctttcgttgtcttgtttgttagattgatattcaaaaagctaaacacccatagcttcttttgcatagcaacatttgccacttaaagatgtttgttggttaattagtaatgttcgaagtgcttttttggcaaaccatttatggagaccatcaccttttcttttgttacttctctaattgttcatttccgaaagttctcaaattcctctatgctgattcttttattattctgtggatcgaaatggatgctcatcactgctaagtcttgcaaattcattataatgcattctatgacgctgtctgagtttcgttaactttcagctcatctacctaacaagcaattgaaaaggacaataaaaggaaaggtttttcttattgatttctacaatgatgcttacaaggggagggaggcaaaattgtttttctttaattagaagtatacaactggcatgatttattactcttgctagaagtgtcttagaagatcggtcattagtccaatgagatggctaagcaagaaactagctccaaatgagtggttgacagagttgccagaagttgacttgtgaacttcattcatgatcagttgcataggtgcattaagtcgttgggtttcatatcatgtatggacataagcttttttgattaagtgcatgtgtcatctttcagttcggcactttatttgtgtgctcctgtgtgtccatataagatttgtacccttgatgctaagaatcaattgcatatattttattgtcaccacatcttaatagcctactcttactgccttaacctcctatccacctaactcaacacggcatacgtacaggtgtctccgg

SEQ ID NO: 90522 - DNA, 897 bp, Eucalyptus grandis
  Intron number 1 from transcript Egrandis_v1_0.020997m (loc us Egrandis_v1_0.020997m.g) derived from phytozome v7.0 (c hr-ID scaffold_11; pos 43703728 to 43704624)
actccatctcggtgatcctggggagtgaagcagaggtaacgcctcttcgcttatccgatcgcatccattttcgattcgcatgcgcagcgatcgctgcattttacgttcctgctcttccgtttcctgtcgatcgattgcttttttatccgagctcttggcgcgagatcttcatgaaggtgtcgtgacgcggcgggagttttgatgggtcgagctgaaatgtcgggagattgggatcggtttgtggagatttttcgtgggtttttttttttttttccctagattgggattggttgatggagggttgacggacggggttcatgggaagatgatggtcgggagctacgacgctcttgtgatatgcgtttcggaacaagatttaagctgagttcagatggtgggatgaactcgatcgggttgatatttttttctttccttctttttgattggactttgtatttggtgaaaatttgagaaattggtgtggtctccttctgtgcatcttgttgactatgtaccaatccatgttatgagggttggttggggggggctgattggtctttgaggggctgccgggaggtgttgaatcaggatcaaagttgggatttcgaggagttgaaaaactgcatcttttgtataggggtgttctgtgtgtttttgtgtgttatttgttagtttggatggattagaagtgcgtttgaagtaaatcaatgggcacactggaagctggagcgttgacacgatctttggtgcagagcgagtttcatattgcaagatcgaaactttttaatccttaggtttcgtttatgattcgtaggatttgagccccaaattggaatttactcgctactcacaagcttggtctcctgttctcttttgttagaatattggaagacagtg

SEQ ID NO: 90523 - DNA, 906 bp, Eucalyptus grandis
  Intron number 2 from transcript Egrandis_v1_0.020997m (loc us Egrandis_v1_0.020997m.g) derived from phytozome v7.0 (c hr-ID scaffold_11; pos 43704740 to 43705645)
gcaaggtctctctctctctctctctctctctctctgtgtgttcacgcacaagccggcatgtgtgtgtgtgtgatcaagcgctcttctattatctggaaaagttgttccaccatggtaaggtttacatttttaatttgaattttgttatgtctcatttacggtaagtcaatatggaactgtttgttactgtttttgatggtatgctaaagttcggagctttcctttcatatttctggtggacaacaatgcataaataaagacctgcctaggatgcatttgtgcttgattaaaatggaaagcaatgctccttcttccttgagaaaaacaggttttgtcagaaggaatgtttatttacaactcagctggctatgccttatactttattgcacaaggctgtacaatggtgctctgtctacatgcagttatgaaagtgagaaggctttgcatgatttatttgtcccatctgctagttgctgcaaatgtgctcttgttacaggatgcctacatagaaactcattgatctgtacattgttaatgaaagaggcctgtcatattttactggatttaacaaaatgagatgattgcatattcatcaaatagcgatactggaatttaggaaccacatctttatgcagcctctcatagtattactcaacattggggtttaatgtgctgctgaagtagacgttatgaatctctgcagttcgatgttttgtgaatgtccaatttgtgatctgtcagtaccggttacattagactatatattgtacttcttcgagagctttcgcttggcttattctgttggtcaatatcttagagttaaaattgattagacatttggcttctgatcaccaccttgcaacaaacataggttcctggacttgctgtggtgatagttggtaccag

SEQ ID NO: 90524 - DNA, 589 bp, Eucalyptus grandis
  Intron number 3 from transcript Egrandis_v1_0.028430m (loc us Egrandis_v1_0.028430m.g) derived from phytozome v7.0 (c hr-ID scaffold_1668; pos 3581 to 4169 reverse strand)
ttgggggccaggacaaggtacatttgtctaagaagagtttactccattttttcatgttatttgtggatcgttttgcctttgataagtagtgtcacaagaagatcacaagtgattaactttgcctagatcaaattggtataccatttgagctgaattcaaatgaataatttgaacctatgacccagatttatatgcctgataaatgcattttgtttagtgggtaagttggtaccttctctttgggttagcctcctctgttattggagagagtcatgcttgattgactgtttctagtcacagaagcatatcatatgttgtgacataaaagtcacatcggcaagcctgtaactttggactccctttgtttattggaccaagtttgaatctcatttggatgcattcgtcttgttgttgcatttgctgaagatgctgggattccatactttatgccatggtcatattttcattcttatgtttggtcttgcttcatttggttcatatggttgaccatgaggccttcattttcgtcttattgatcgattattttgctacagattcgccccctgtggaggcattacttccaaaatac

SEQ ID NO: 90525 - DNA, 883 bp, Eucalyptus grandis
  Intron number 3 from transcript Egrandis_v1_0.050428m (loc us Egrandis_v1_0.050428m.g) derived from phytozome v7.0 (c hr-ID scaffold_6; pos 32486971 to 32487853 reverse strand)
caacattctgtagaatcctgaagctcgggtaccttttcctacaaagtgcaaattcagttttccaagctttattacatgcagttcaatgaccagtgattgaatgtaccattgtatgctctcttgaatcttgtgaacattattgttatactgtgcaatactaaatattggtatcatttgcactagtatgtgttcaaatgtccttgattagaatcatcttttggaattccacgtgtattttcatgtattttatatggtgatgtctaagataattcattcctaagggttccaaggtacagggaggttggtaaccatcttttagcaaccaattagtgaactatttggtaacttccaagtgctctccttggcagttattctgggaggattgatttagtcatgatgatttgtatgagtgcaaaagtgaagaagaggagtaaatgtggttagaatctgtcttatagctgaatggagagagtgatgcgagtaagctgtgcaattcaaaagcggatattgctacatgatcattttgtgtagttaattggaagtacattatgtcttaagttgtcaatttttctgaagttccacccctttacctactcaagcctaacccactctgcaaatttgaggtattccccagttggaacatttttactctggctaggtggaatctattttcagcacatatgtaggtttgtagtttctacacaccccattatactgttttcctctggctgggtgaccggttgaatgtggtttttcctgaattatatatgagctgaagtttatatatttcatctgcggttttaagtgtactccaacgtgggtcaatttttttgttttttattctttagtgggcaggaaggattcttgttgacaccaatatcat

SEQ ID NO: 90526 - DNA, 425 bp, Eucalyptus grandis
  Intron number 2 from transcript Egrandis_v1_0.008175m (loc us Egrandis_v1_0.008175m.g) derived from phytozome v7.0 (c hr-ID scaffold_9; pos 36248862 to 36249286 reverse strand)
ggtatcgggtacttgttcattctccacatctttcttttaagataattgttattcttattttatttacttaccgttgttagaggaattatagcgttggcatgaagtaaaagaacgaatttgattattaggtttcgtcttgagttaagaaaggattttgagcatttcatgggtaactttttatgctgtgctgataaagaggaaggtgtgatgccactggctgtagtggtcatttcaatttttatggaaccattttctgccaaagatcatggaattttattttctgaagtcgtgatttattctgtttaactatatgtttgtccatgttgttcattgagaaggttcgttccttttcttacttcttctggtgttaattttttctttaatgaccattcttcatttgctagcctctccactgcaggcagttc

SEQ ID NO: 90527 - DNA, 816 bp, Eucalyptus grandis
  Intron number 1 from transcript Egrandis_v1_0.012308m (loc us Egrandis_v1_0.005928m.g) derived from phytozome v7.0 (c hr-ID scaffold_11; pos 3789177 to 3789992)
gcttcaatcttccccagaagccagggaggctagaagtaagcaactttctctctggtcaccgagaaaaaagatgcaatttcttcatgttctggaaaatgtgcagaatgacttttctttttttgataagcaatgagctctcttttttgtgatgccttcgtgcccttggataccacgagctcgtgcttttaactagactctgctttttccaagttttaccctctaggagctcaagttatcttgtgagtttctttgcactgagtaatgtgaaatcccagaaagatcataggattgtttgatgaaggaaggtcaacgatcgggtgctgtaaagttagattctagcttctagattgttgatttcttagtataaagtggcgatttaggtgaaccaccctcaacctgtaatcatccagcttcaggaataaaagtccagcatgcgtagcctgctttgcttgacaaggcaggaaagatgaagctctaaggtcaagtattgctgctgcaaaagtatacaatcaagacaaataatataattcaaaacacgcaaatgataaaaaaaaagaattgcgacatgttcggttttgtgtgggaaatcagaagaattcggatctcgaaagtgtgctggctttttgagctgggggagtcgatggaagtagaatatagctgaacgaagacttttcaaattaatgagatgaaatttgagattctacctctccatttttatagcttgtagacttatagtttaccttttccaagggaattcatgacgacgagtacaaacttgcaggagctgctcgttcttcttcgagcctaactattctc

SEQ ID NO: 90528 - DNA, 987 bp, Eucalyptus grandis
  Intron number 2 from transcript Egrandis_v1_0.032886m (loc us Egrandis_v1_0.032886m.g) derived from phytozome v7.0 (c hr-ID scaffold_6; pos 11350003 to 11350989 reverse strand)
gcagcaactagaccggagcttcagtcctcctccgtgtatgtatcttctaccctcctcatggatgcctatctgaactttctgttgcgattcgtgacgctcactacaggatcttaaccttgtaatctacttaaatttcacaaagaaccctaaagttgtttaatcggctcaatacagaacagaaagttaagcactagtcccaaaatcatgtctgatcctgtttcggaaacaactgttatggagtttttttgttccccgggatgcgttctctattacataagatgctcaatgcttccagtgagcaaagatcgaagacttttattgctttattagaaattaattatataattagctgagtggtcggtcaagtgcttggacagagaagctgtagatccatgtctgaactacattgcaattctccactcaaactgctttggaagccactggtcaagccatacttgatgcctgtaaattggagagtttaccctgtatcctttgaattagtttgtagagaacccaagtaaatggaaaaacttgagggtgcagccgagcctgggccatggaattttgctgtaagcagagtcaaggggcgagattgggggctgaagggagagtgcatggtggagagattccccaagaaagagtgcgcacacccatgaacattgaacaagaaagaaagccacgttcccaaagcgaagataacattgaaaaaacaacaaaaagtagttacaaatctgaacagccaaatttccagaacccaattaaacatgttttgttcatatctgagaatgaaaagagaatttggctgagggtggggttcactgaagcagggctttttttattaaatgaatggggattgacgaagactctcaactcaattcccaagcccaaatttaattatcttacagaccccgacgccattctttacccaaaaaatccgaggtcttcctggaaacctctctgctcattcttttgtgggatacaggtaaa

SEQ ID NO: 90529 - DNA, 1022 bp, Eucalyptus grandis
  Intron number 1 from transcript Egrandis_v1_0.001681m (loc us Egrandis_v1_0.001681m.g) derived from phytozome v7.0 (c hr-ID scaffold_4; pos 29646106 to 29647127)
gaatctaaaagattacgggtactgttagctttttctgttaagtttatttccattttgtcaatttcgagattattttctatggtacttttttccagaataataactttcagtttgctgctgttcaatcttctttgatgtatggttggatcggacgcagtgagggagcgagaaattttgctctgggaacaaggtttcttgcacaaattgatttttcacttttactcccaagttatggtaacaataatgcacatatgtgtgaaaaagaaaattttaaatctcttaacttcccagcttatttttcggctagcaaaatatttcaaaaaaactttggtcgttgctcttgctttaaacatggacctattcacggccccaaaccttatttagggcaccacggggtgaagatttcctttgccttgtgaccatcctagttttaaagttctcaacttttatatgaaactaccaaccttaatttgtgtcttgccaacttcttttcgattattttacaaactaattttaggttaccggtgtttatttgagtcatttactaggtttatttgatcgtttgctgacttaacaactttttataaaacctaccatctcttatttgaattgtgtacttcacatttcaaaattaccaatatttgtaacaaattactaaccctaatatgagtttcatacaaactaatctctaattaagttaagaactaatttaagtaacctactcttatgtgagccacttatcaatagttaatttttgcttaaaaattcccaactttcgtaacaaacttttgttaacaacttacccccttttattagcatagttcacgaacattcttacgttaggaactctattatcaaattaccaagtataatatgagtaacttaccaacttattccgattaaattactaacaaatttaatgtgagtgatgagattgctaacttaaactagttggtagattattcggaaaaatgatggttgcatgttatgtatgtggcagccaatataaacttacaaagctc

SEQ ID NO: 90530 - DNA, 895 bp, Eucalyptus grandis
  Intron number 2 from transcript Egrandis_v1_0.051004m (loc us Egrandis_v1_0.051004m.g) derived from phytozome v7.0 (c hr-ID scaffold_6; pos 38005818 to 38006712 reverse strand)
tgggacgcggcctagactggcgctttacgaaagaggttgggatctccattttcaatcactcaatctacttgattgataattatagagatggctctaccgttggagtctcttttttcttggtcttgaaggtgacatgagatcaaatgctatacttagtctcaagattgtcaagtgttgcttctcggggtaggctgctgtgattgttcttttatattgcaaagtttcgatgctttttcacgtgatgcattgaaaagaagtaatttctttgcctgtgatatcagaaatttttcatgtttccatctgcatattttcctttttgagccttctgcatacctcaggacctgtccccttgtgagtttgtattggttaaaagtatcttaggtcttgattttggatgatgaggatgatgatccattgagaggctccttaagaattcgagaatagaggagaaaataggaaaaggctggagaggaactctttttatggcagtgaaaggtgttaacttatcaaccttcctacctatatactggctaatcggatagactattgtgctggccaaaatcattcctcagtggtttttattttggggaggggggggttactggttacacctgagaccactacttgggggaaaaatagccatttcaagtcaaaccactaatatgaaatcgtctcattctctaacgatgtctgctgacttcttgtttggagtggtgcggtgattcagtcattttgtgtttttactgttatttttcagattttagctgccggttagctgtttaatagacctgaccattttgctcttcgagtcaatttctacttttctcaattatgtgccttattggtgactttgctctcagattttcctggaaaagaaattaagtacagatttacc

SEQ ID NO: 90531 - DNA, 809 bp, Eucalyptus grandis
  Intron number 3 from transcript Egrandis_v1_0.003396m (loc us Egrandis_v1_0.003396m.g) derived from phytozome v7.0 (c hr-ID scaffold_11; pos 1823728 to 1824536 reverse strand)
gtcattgaagcttctactcccggacttttctcaaggtacttccactccatgtaattatcggtatggtatagacatgaagaatatactgcttgctcgaaatgcgccaggctccagcaagacttttttcttattggggttcaggattatttttactgcttcttcttgatatggaggaaatgctatcttttgagaagatggaaaagctattgtgtgcattgctgtcacaaatgttaggttgtttacagggagacaaacttgctttcatggcttcttttcttacaaaattcgattgctgaatttgaacttagaaggagtttatgatatcgatataccttgtttcaatctatttggctactagaacaaggtttaacatcaaggataacacgactcataaagtctttgaagttcttcacccccaactcaaatacaactagcatcattttggtttgaacctccatcatacatctgcactttttttttcctggaagcatactattctgattaaagcaagtgggtcctgtttgctaggcctaacaattgtcttatcaatataccttgctgttttacatttcttatctggcatgtctttaagacgattattggtagtcatgcaatgcaacttaacatgaatataatagttataaaacgataaggcaagataagagaaaataaaagaattaagcagattcctagagaatgaagctttgcagccattaaggtatcgctttcccattggtttcttcaatacttacttaataaggacgctgatttcaggaaaaccggtactctatcatcaacaatctcagcaa

SEQ ID NO: 90532 - DNA, 681 bp, Eucalyptus grandis
  Intron number 1 from transcript Egrandis_v1_0.025159m (loc us Egrandis_v1_0.025159m.g) derived from phytozome v7.0 (c hr-ID scaffold_6; pos 26122039 to 26122719 reverse strand)
ctaccaacacgagctcgtcttttattctaaaccaggtaacgagatgttcatcgaagttcagtgtatcatttctgcatccgcctttctttttaatcaagaaattcatggcctttcttgaatggtgaactgcgttttttacatctcttctcgagggcgaaatacatgtctgtcagctagaagttggatagacttgtcctgttacatcgaaacgatctcacgtcggttaatagtatgatacatgctagaagaacagagagacaagagtttaacatatctcgtgggctgggattgacttgaaactacaaaccaatttaataccttaccatgtccttgactcccaatatcgggaaagaatctaaggtgaactatttgctaatcgctcttatttgtaaaattatcttatctaacactttttcgctcacgctctttatctggagaaagaattcaaggtacaccattatcgcccccactccgccttttccgacatagcattgtttgcttttttgtttcaagaaataatttagaaatccagagtcataaaccctcgagcaaagtcaggcgaaattgtatcccaattcatcagtcctcactgtacaactagtaacttcttgactgttgctaaatctatcattaattgtgaaattaggaaaagcgaagtcgaagtgcgacgtctgcgggaaa

SEQ ID NO: 90533 - DNA, 789 bp, Eucalyptus grandis
  Intron number 1 from transcript Egrandis_v1_0.030206m (loc us Egrandis_v1_0.030206m.g) derived from phytozome v7.0 (c hr-ID scaffold_6; pos 2176415 to 2177203 reverse strand)
aaactatcaagagccttaagctattgcttgtgagtctctttacttttcgtttgctagtctttttcagctgaatatctctaattatatcaaaattgttttacaaaactgatcaactaaaagttactattttctttttagtagctgatgcttgtgagttgtgagtctctttacttttcgtttgctagtccttttcagctgaatatctctaattatatcaaaattgttttacaaaactgatcgactaaaagttattattttccttttagtagctgattatgttgcactcagccaatcttctatttgatatatgctaattaatttactattttgatattaatattatcatgcatttattgttgtttcacttttcaagtctaaattcgagaagtcattatcttttgggtctatcatctcttcaatcttctcatgaccataaaataagtccaattaaaagaaaggcagaggataacgatgctcccaggccgacaatcttcgaattctgctgttgtaattggagcttctgccaatccttcttactgaaagaaaactaaaacgtggtcctttccgcataaatgtttgtttttttttttttttatactatatataatgctacgacagataacgcacatgatgtagggattttatctcggaagctagccatacctacatattatttcatgctttttcatttcatgaagagttattaaagcatgaagtgtggatatctggttctttcttttggcaggctttgttatcaacgggacccgatacgtcagccacgaccatgga

SEQ ID NO: 90534 - DNA, 668 bp, Eucalyptus grandis
  Intron number 1 from transcript Egrandis_v1_0.015364m (loc us Egrandis_v1_0.015364m.g) derived from phytozome v7.0 (c hr-ID scaffold_4; pos 33108601 to 33109268 reverse strand)
aaataatcaaccaactgtacgtaagagctttatagggacctaaaagggcaaaaaaagtatatatgagctgcagttttctactttgagatatctgaagcctcttatcctgttgtttagttccaaattaccgaagaaattaacaagtactgaataggaaaatcttgagactcaagggccatactaaaaatttgttattttatggagtgtttgatgtgataagaagaataaggttacactctataacccttcataaacattcaacgttgtagtatacctttgagcacttagcagtacaatgtagatagtctctttctacaggttcttctgcaccagtcgccaacagtcatattataaattacttaaggagctacctgtataagatccaaaaaggagacgagctactttttgctaaataactaaagaatcacagatcaatttctgatatcatttctgactggaaaaatgatgatcaaaggactagctgtgaataggcatttgaagcttcgcttgtctgtcaaatgaaaatgggattatctttggcatgtttgtttcattgttggaatactacatttccagttttagagtctattcagcatgtacagtggattgagttgattctgctctacgttgcaggagcttttcactgctggaacagactctagtagcac

SEQ ID NO: 90535 - DNA, 930 bp, Eucalyptus grandis
  Intron number 1 from transcript Egrandis_v1_0.043213m (loc us Egrandis_v1_0.043213m.g) derived from phytozome v7.0 (c hr-ID scaffold_329; pos 33369 to 34298)
aagagcttctccctcaaaaaaggagataaggaagagttgttgggaaaatatggcttcgaattgagtaaaataatgaaaacagatatttagagtactcaagtcggactttgaggttgatatcactttctttaatgatttatttgtctcacaacgttgctaatggttactggcaaatatcctcaaggatacaacaaagtcttaaaatgagaatactagatagtaattctagtatttttccaaggtctctctaagaaacaatcgaaaaaatggctgcagttttttcagaaagaaagctaaaaaatgatcactctagtttttccggaaattgacaagtatatatataaaacagttttaaaacacatgcaacttttcgtgaaaaattgccaaaagatgaacaaatgtgtcctttcgaaaattgcccggttgaacaaaggcgtctattcataagaagttgaaagaacgaccaattgcaactcttcaagaaaaatttcaaactgaacaagcatctttccaaaggttgtcttgaaaagacacaaacaaaaattcagaataatttttttaaaaataaaatttcgaatttttattttaaataatttctgaaaattctcaaaacaaaagaaacctttgaattgattaaaattaataacataacaaaaaaataaaaataaaaaataacaaagagattagtgttaattaaaccgcgtgcgccaaataatcgcgcaattatttgcgtaccagcacgcgggtatggtgggctttagccccattcaatcattcctttaggtatttaaaaggaaaccctacacttattaattggtccacttcctcccacttttcctatgtgggacaaggaaaacacacttagtttgtttttacaaacaaatctccaacaagagtgcttttgcaacatgacgactatgggaggattga

SEQ ID NO: 90536 - DNA, 860 bp, Eucalyptus grandis
  Intron number 2 from transcript Egrandis_v1_0.047364m (loc us Egrandis_v1_0.047364m.g) derived from phytozome v7.0 (c hr-ID scaffold_4; pos 15853538 to 15854397 reverse strand)
ttaaggtaacgcccagatcttgtctcggagtaatttgtgcaggaggacttgagtttagctcgttacattaggatggaatccattttcggcagttgggaacctacagtttagacttgggatgtcattgagatcattaggtgtttatactcttttcttcttgtacataagcttgtgacataatatatgttgtgaactgtagtgtatgaaattttttcttttcgtgtctagcaagattagaatatgtttgcttttgcttagggttgagattatgattttcatttaagcaacaagcgatttccccgaccactttgaaagttttattcccttttgacgacactgtactttctgctgcaacttgaatctgctttgtaggtgtttgtctcctgaatgtttgctttagtattaaaactactacaccgtggaaaacttgggagttcagtcttgatctttggtggagctgtttcgaattctttggaaagcaagtgaaacttccaaagtaggacgcatggtcgctgaaatttctcagcaggcgcgattatcttttcccatttgtgagttagaatgtctgttgttttggatggtctcgtggcactgaaagtaacttaggctgttgatactggcactctaagctttataagtttgcattccagcatcgatgtctcttttgatatgtagttggggggagaagaatatatgaagtatttttgtgttgcaaagcttgtcgtcttgatcttccatcgaagagcagaggaggcttattagtcaagattagtctggctaaccaatgtgtttatgccaacccttgcctatgagaaaacatcgttcttaaggtttgcttttcgtaggaggtagcgactaga

SEQ ID NO: 90537 - DNA, 365 bp, Eucalyptus grandis
  Intron number 1 from transcript Egrandis_v1_0.042438m (loc us Egrandis_v1_0.042438m.g) derived from phytozome v7.0 (c hr-ID scaffold_4; pos 36102682 to 36103046)
tcccccacttcacctgcaacctggagagtggagaggtatgctcgtgcccccactccataatggccactaaattttccttggctttggccttttgaagcatctattaaactgaggcgtgcgacacacttaaatgcaattgaatcgatccctatagaaaatggccgggtagtttagggagaaatcgaagcttactatttcattttggtagtcaaaaatcagttctttgtctaataatctgatatcttattgagcttctgttgctcagatttctttgctttctacaagtttctttccattttttacttgtgaagaccgagtctctactaatgcatcgtgttttgctatatgttgtctgccagatacag

SEQ ID NO: 90538 - DNA, 883 bp, Eucalyptus grandis
  Intron number 2 from transcript Egrandis_v1_0.019327m (loc us Egrandis_v1_0.019327m.g) derived from phytozome v7.0 (c hr-ID scaffold_4; pos 2622049 to 2622931)
gggaaattcaggccgtgctccagaaggaggtatataatctgtctgtttcgggggttgctggcagtcgtgttttctgttgtttcggcgatgctgtggcatgacaatgatcgagcttgtgcatgcgatgcgatgcgggctcttttcatggtttcattaactcgatgaattttggtttgtgatttctctgtctttgtctctgtctctgtctctgtctctctctggtttgcgcaattctgtaagactttaggatcctgcaattagtcctgatttctaatttgctcatttagtttctctataaatgagtcataactgaattttgaaagacattcgtattagagcctgccctgtttgttatctttgttggtcatctgacctgttctctttattcttaaattcaatgtaaggcttctgacctgagcaaagaacatgcggatgtattattcaattgggcccctttgtttgtgcttctgtatagatcctcccaaagttgtcacgtggtggttttaacagaattgtgccaaagatgtattgatgataattggatgaaatggtttctttgaccttaatcttctccctgtccaacttgaactcataattctaaatttttgtttaggattttcctttaagggattgcttatatactatataagactgctcaatgttagacaagcagtattccaccgtctttttttagcatttgccagatgtcttttatagttttcgtaatgcatagttcccaactcatagttttggtctttaggcctgcatgtgtttaaatgcggtgggcgtctatgcattatgcggttctcatcatctttttatatctgagaagaataataatagagtggcacatttgggtctaataatacaggagaactttgat

SEQ ID NO: 90539 - DNA, 989 bp, Eucalyptus grandis
  Intron number 1 from transcript Egrandis_v1_0.053315m (loc us Egrandis_v1_0.053315m.g) derived from phytozome v7.0 (c hr-ID scaffold_4; pos 16265614 to 16266602 reverse strand)
ccattgagttaggtactccttctgtaacttatgttattagtactacttttgttaatgtgatgcatatccggcaacctcatttgttttattaaattagcattgtcatgcaaatgatgaatcgaacttcaaaacatattaaattcatgagcataagaattcacatccacaattctaggaatcgagtcaagcttttggattgtataaattatgtatcgtttgagatccactttgtgatatatcgtttcaagtcgaggttgaaagaattttacttcctttacttggcacaagcatttttgaggtcattgaatctgaaataccgtgtccgtactttcctttcagctcgccacaggaagacaagatccctcagccaaaagacaatggttgtgatcattgtagtttcaattttgacagctctacttctcgccagcttcttgtatggcttggtgatcaagaagagaaagggtgtgtcacttagtcctcaacattcgtgcgttttttattatattttccagctaaaattcatcacctcttattgttcaccacttaataaaggacgcaaattttagtcggttcaatcttggaactattcttagctataggaagtcagttacggagtgaattctatgttttatttaatcaattccgaatctaagaaccttgaacaaaagaaagcacgattatgccaattcacatctcgacgcagcatttccacaatgaaactaaaccagcacaaggccagtttcagggtacaagagatgaaatcataaagtacatcactatataaaccaagaagatcttttcaagcttacaactttcattcggtgcaacgaaatgaattactgaacgaggaatctcacaatttctccaaggttgtaatggcatttatgtggttgtcttggaaacagatcgcagaagccataatccacaggtgagtgatatgaccagttcaacgtatttcaacggccctcagtgtgtaaaagaccgcagtg

SEQ ID NO: 90540 - DNA, 368 bp, Eucalyptus grandis
  Intron number 1 from transcript Egrandis_v1_0.004484m (loc us Egrandis_v1_0.004484m.g) derived from phytozome v7.0 (c hr-ID scaffold_9; pos 21222097 to 21222464)
gtccggaaagaggatatagaagagattgccggcaggtcagttccgttcttgatatatagtttcttaatcgctgcttcgttttggtttacgccttctccggtgacgtatggttggttctggatgaggcttgtactagagatcacatttctccctatagttcttttgtatatcagtggaattagattacaactttctaattcactaattggattacgagatatcgatcggattccgtctgtagcagtgcgtagaatcagcttgagcaatgtttttcttcatctgattgtcgtgctttaattgtgtttgattttcataatctacttatatttttaacatctaatctgtcaggtacggcgtgagcaaacaag

SEQ ID NO: 90541 - DNA, 686 bp, Eucalyptus grandis
  Intron number 1 from transcript Egrandis_v1_0.020359m (loc us Egrandis_v1_0.020359m.g) derived from phytozome v7.0 (c hr-ID scaffold_4; pos 3525204 to 3525889 reverse strand)
aggtagaaatttactgtgtcaaaaacctagtttcaactctccaactttcatgagatatttcttagtttgatggacactcttggtttgctggttattttgtttaatgtgtggtcatgcacatcgacagagtcccatatagtaagtcttattagcaaacttatatttgttagcaagttgctcagccttaacaaaataagaaggcattagactgaaattgttcactagcacattgactctcctttcttttttctgtttcaactgccttcttttgcaagaagattggcaccagtcctcgtgggactatggcattcctcatcgctgcaacattctgtgtaatgttgaacttagtcttttgagaaaatgatgaatttaatggaaaacatccttctttgcacatgtgagtttttccaactttcattggttccaagtttaacactctgagtaagcaatgactaccatttatagttaactcttagattccacaactctgtttctgctgctgccataatgtgcatttcaatgccatttgccaacaaatgtctgaccataatagtttgcaatctgtgttatactatgagtcttcagatctccagtctgtaacaatctcaaatgttgctgttttacattggctggcaaactgagaatctaatttattttgtaatcaaacctctttttctctttggcag

SEQ ID NO: 90542 - DNA, 643 bp, Eucalyptus grandis
  Intron number 1 from transcript Egrandis_v1_0.001605m (loc us Egrandis_v1_0.001605m.g) derived from phytozome v7.0 (c hr-ID scaffold_4; pos 8617088 to 8617730)
aaaagcgtgcttgcgctgtggcactccatttgaaggtattatattgctttcttgctttttcttcttcttcgtttctttttctttattttttctgaggttagttttgatgggacaaaaccatactttacttatcgttttcctcattttgttttatttatgtattctaggtgttgtttgttaattttgttaggagtgttgctcagtcatggcattcttgttatcgtaagacttgaatgttgctctgggagagatctcttgggttgattatgatgatgaaatgggaaactctaatgggttagggaagaatttgtgactgtgtttggtcttaggccctattaatgtatctattgcaagttgcaatcaagtcaaagatccatgtaaactttgtcttcactgatcgctccgattttcatcaacaaaaccgacagacagaacttaagaggaaagaaaatgctcatcaatttctgccttcatgttggtaactcttttgatgagttaatgtagaagcttgaactatcagatggcaattatatatacaccagttggaatgtgttgtgtgtgatgtgatggagagtatcagcattccaaacatgacatggttttaacttatctgcaatggtttcttttttattcagcgaactcg

SEQ ID NO: 90543 - DNA, 943 bp, Eucalyptus grandis
  Intron number 1 from transcript Egrandis_v1_0.008585m (loc us Egrandis_v1_0.008585m.g) derived from phytozome v7.0 (c hr-ID scaffold_9; pos 6007154 to 6008096 reverse strand)
ctgcacactgtaagttatcgagatgggccgtagccaagtctctgttttcgtgatggtttttagtggagaaaacgactgtcttagtgattcaggctatggaggaaactcaatctgagagataaagatggtgactttgattagaatgaattctcagaaagttgttcttactatcatcgaaaggataattagagcatgagcattagaagttaagactcatcccgtgtgagtccctgaagctgttggttgtgtaattgattccttactatcatcgaaaggataattagagtaaattttttggccgatgccgtgtaagattgtgggttgagtttagttgatggaattaattaaagggcttgattggcatttgctaaagagaagaaaaatttgagtgcataaaagcatgttttaggattcagatgcacttcgggcataaggtttttaggcttctaatgcaatgatcacgtcatttgagtaaattgatttatagatggtttctgatgagaaattttgtgtttgcttttgctgaatctactttcattatgattatattccaaagattgaacaatcatgagtcaatcaatcttgggtccttcctccggatggcatcagggtccaagctagtgaggataccaactgcactcatcttgtaaagagattcccttcatcctgatttggctaatagtccaacacatagaagcatatgaagagttttcttttctttcctttcctttttttttggttgaggacaccttccttgaattgtcagttctttggtaaatcctagttgaaagctgagaaatctactcgactcttctgagcatcgccccggatcctcacatttcttagcaatgtgtatatttcactatgtaggtaatgcattatctgaattctttgaaatataatttcattttcattctctttgtggccaggcaaagagactgaa

SEQ ID NO: 90544 - DNA, 906 bp, Eucalyptus grandis
  Intron number 1 from transcript Egrandis_v1_0.008108m (loc us Egrandis_v1_0.008101m.g) derived from phytozome v7.0 (c hr-ID scaffold_4; pos 25477236 to 25478141)
tgagctgaggtgaagctgagagttctgtgacccaggtgagcaatttgatgttttcttgagttctcgattgatgatgaatttgaaagacgggtggtggtttttccgcgaagatgtgtgagggctttctgttttgaagtactctttttgtgtgttgcccggacaaagtttgcattttttcatggttgacgggttcttgattgagccgagatgttgttttcgtgatttcgtgagatgggtatgtcgtggaattccggggaggtgttttctcagctgatgtggctcatccagattgcaaatcttgcatgaattcggcttccttttgaccttctttatggttaattttggtcgggaatcaaaattaagctctctgtttatcgaattcgcatgttgatttctggtgggatctggtttacgcgccaaactttctagctttttgatccaaagtgcagggctatctgttcagtggaacctgttgttgatcagaacttcgtatgcataaaaaatttccgccatctctcattaggttctgcagccgctatgagatgcctttttctctctcttttttcccattctttctttttgactgtttggttcaacgatcgcagaggttaaggaatgaacatggtggctaaagtagtaccttttttctaatccttcatgtgatttgtgtaattgggattaatgcattgtgctgatacttcttttgattttttgtccctttttgtttatgcctttaataaactacaccagttactagaggagaatggtgcctttagtttggatactgattttgttcatctttgtggatgaggtgtttcgagcgatcaatgattgtaattgacattgtaccttttctccccagtggtttcagatattactacttttacgcaattggtctgaggaagc

SEQ ID NO: 90545 - DNA, 749 bp, Eucalyptus grandis
  Intron number 1 from transcript Egrandis_v1_0.043441m (loc us Egrandis_v1_0.043441m.g) derived from phytozome v7.0 (c hr-ID scaffold_11; pos 42319548 to 42320296 reverse strand )
acttctccagcttcgtcaggcagctcaacacttacgtaagtacaggcccttcctctgagcactgtagaaatgcaaagtatgaatttttctctcgagactggaattgtcgatgcggctgagcaatttcctttgagcgaggatttgaattcaagctcatctccgtcgtgcttcactccaatggtttcttctctttgctccgtcggattgcgagtgcatctgattcggatgtggcataaactgtaggtgatttttttttattttttcatttttgttattgccgggttttacggatttgtgacatggagcgatgttctggaatgttctaaatgttcggatgcctgggtagagtcccacttcgaatcaatggatagaggataatggattggagcagtactaaaatgattatttcgggccgcgtgttttttttttttttggcttttttctagtttttcgtttttcatttttaatgatttttctcatagttttcttattcttgtatctactatgcttttccattctcctgtcgaaatgcgacaatcaccttgttagccaaatttaaaactgaaaatgtaaatgaaaattttgaatctttaggttgcacgaatttcattaattacctcaagttgctgatcatggcttttgatattttttgggggattttggtcaatgatgattcatgaaatagagctaacagaggaacccaaatcttggcagggcttccggaagacagatccagataggtgggagtt

SEQ ID NO: 90546 - DNA, 706 bp, Eucalyptus grandis
  Intron number 3 from transcript Egrandis_v1_0.017763m (loc us Egrandis_v1_0.017763m.g) derived from phytozome v7.0 (c hr-ID scaffold_6; pos 21233900 to 21234605)
ggtggctactccaacgtcatcgtcgccgattaccggtaacctctcgccttctctctttccaatttttgttcgtttctttattgtttttgttcgattgaaagacagagacggtacaatgcacgtgtaatcggaatctctatgaactattgttgtcggatttccatggaagagattccaatgcacgcaattcatgtgagtttttgcgcttcgtactttatatgtcttcaccatctcgctgaactcagggagagtaaattccaaagaaaaaaaaaaaagactgacgagaatggcattgaactcaaaaacaggggagcctatcttttgaccatgttgattatgaactgccacttccgttctattcgtcacatgattaggtagacctaaatataagttgttttatcattctgattaaactaacttacgaaaaaaataataatagacctatgtacggggactgtgaaaacgttggacagaaaagtcagttcaatctggtgacccctttcgacccatgttcagcccttttaggctccgatttcatggaatggacgagattgagtaacaaagccatgctcgtcaatccagaggacaacataacacgatagaccgtttgatacgatctatctggttgaataggtctaaaacttagcccgctcgatgattgcactaacttgaaatcctttggtccgggtcgcttgcttgtgcagat

SEQ ID NO: 90547 - DNA, 698 bp, Eucalyptus grandis
  Intron number 1 from transcript Egrandis_v1_0.027224m (loc us Egrandis_v1_0.027097m.g) derived from phytozome v7.0 (c hr-ID scaffold_4; pos 15189927 to 15190624 reverse strand)
ctcctccttgcaaggacatcaattccagaatcactgtaagtctctctctctctctctctctctctctctcacgagtgaacagggtcttctctactcagagtgtttttatttcttggagctaacgctttttttggagaggaaaacagaataatttgacctggtaacgtttcaaagtttgattcttggttcttgtgaatgtgtgtgggggtgttagaagtgaaaatgagcagaattagctttcgacgccttccttgatgttgcttgagcttgtgcaatgttgtccggcatgtacattgtacaaagcagcaacatgaaagcacatgcactgcgagaattcgagtgttccgatatgacgaatcattgaatcgggctagtccaaaaatcatgaaaccgcacacagagcaagttcttagaattacccagggcagcgaattcgtttgtggtgaaaaaagcagaaaatgtctgctaattctgggaaaatttgaaatgtgggtggtgaatttcgagatatttttcctttgagatagcgtttgattttggttttgatcgaaattagttgactgttttctgcaattttcctgataaaccctttattctctgtttcaagaaggaatttttccgcactctactgattactaattgccttttctggggaagttgcagagaagcctttctcgaaaagggtctcagcgtgtggg

SEQ ID NO: 90548 - DNA, 670 bp, Eucalyptus grandis
  Intron number 2 from transcript Egrandis_v1_0.015017m (loc us Egrandis_v1_0.015017m.g) derived from phytozome v7.0 (c hr-ID scaffold_9; pos 24903655 to 24904324)
atcacctctttcagcatctcaagagtaagtggatcccaacttcactataaagttccttttaaaaaaaattaagcaaggatgatttgttttgatgtttttcaaagttcgcttcttctgaggaagcgaggatattgatggttggattaaaaaaaaggtcatggctttggcagagtactggggatacaaacttaaagaaattatcagattctttgattgtcactgcgatccgctatatggtcattggtgctggtggtgcatgagaagtctttgagggtgttatggagagttaaaccattgtttgctattatgtaaaatctcgaactaaaccgtgcctttattttgataaactacaatttatttgacaaaaaatgttctttttattcaagtttagcagactttgcaggagctgtcactctgcatgcaattgccaagcagattagtagcttgattacaatgattcttaatcatttcattacgtctaatttgcgttgctagtttaaacaaatacgtgttccaagcttgattaagagaatgtttcattcttttactgacttaatgcttttcaattgatcgcgtactttcctgaaggagtcagagagctagttcccttctatattggttaattgccttttcagggttcatatcggagcaccaatcagtgtctgctgat

SEQ ID NO: 90549 - DNA, 987 bp, Eucalyptus grandis
  Intron number 1 from transcript Egrandis_v1_0.010957m (loc us Egrandis_v1_0.010957m.g) derived from phytozome v7.0 (c hr-ID scaffold_6; pos 42226919 to 42227905)
cccttcaggtgatctctctctctctctctctcttctttttgggtttttcccttatgtcattttccattgatgaagcgatgggaagctcttgcttgcgagaaagtgcaggaaagtaatggttaatgcttgctggccgagggactgtctgcactgattttttttttttttttttttggtggggttcgaaacactcaaatcttttttgtaaaatttaaatggtaaatgaacatacatttttatttttatttttataatttttcaagatttatgtactggagtactgaagagttcattctcgcgctatgctttttagtgggcacctgtttgatatgtccatgattgttggagaaatgtcgagacgcttgcggagcaatgatcgtttctcattcgcccaagccaatcgtacatgcgaaatgttgtcattttgaaagggaaaaaaggaaatccataaattgtcatgcgatgccgcttggtgattggctttagtggacgggaatgccatgtttcgagagtacatcaacatgtcttatgtccaaggataacagaatttagattagaggctagagcttatgaactgctgctctagtaagaccgacctttggactctaggataaataagcagatgaagctagagattacgtttgttgttgcttcctaaaatagattgagcactaatcagcttcccgaatttgcattgttttctgaggacaatacggtggtttacagaggattattttcatgtcctctgtgtttcttgtttttgtacaaattgttattatccacttaacatcgtccacagtcgactttgctctccctatgcatagacccacaaagtgaagtaaactcgagattcatactttctccttgcatatgcagaattttttggaatattggagcttttgagtcttagatgctgagttttcgtttggccataaaaaatttcttctgtaatgacttttctttctcaccacacaggttgctgagtgg

SEQ ID NO: 90550 - DNA, 639 bp, Eucalyptus grandis
  Intron number 3 from transcript Egrandis_v1_0.034627m (loc us Egrandis_v1_0.034627m.g) derived from phytozome v7.0 (c hr-ID scaffold_4; pos 10784960 to 10785598 reverse strand)
aatctgccaggaaagctttagcactagcatcacaggtatacttccccccatactttctgctgattgcaacttgtagtatatgtttatgatgatactggtaaaaactacttatgttttcataatgactcaatgaagttctggcgacatctatgtgctttttgataggatgatttgtgggcaatacaaatactttctgcaagcaagacgtctagaatgccctttttaacgtatatcttgatcaaaagagatcaagagccatcagtattgttttagctgtatagatttggtttgtcataaggaagcagagaggactataatctgctgacactggaattctggtttagactatcatctttgccaaaagtcatgactggagctaaataatgtttgtttggtactcttcctctatttttgtgcaatgtgaaagcagcgagtgcaattcgtttgataagagctctctgcacttgactgcctcaatgtttcgggtgatttagatgctgagaacgtgtagttccttaaactatatgtggttgaatctgtttctttcgtttttgctcctctccagaaaagattgttttgtgtattcgtcctgacccacttttctttgtaatttctgcagctttaactgaggcgatagac

SEQ ID NO: 90551 - DNA, 917 bp, Eucalyptus grandis
  Intron number 1 from transcript Egrandis_v1_0.013827m (loc us Egrandis_v1_0.011649m.g) derived from phytozome v7.0 (c hr-ID scaffold_4; pos 39968519 to 39969435)
ggcgacccggggtggttggccctcacttgccccaggtggtgacccttcccaggctcgggcgagggcacctagatttgggcacgccggccttcacgagaggctgatgaccatcgcccgcccttagcaaggggccgatgaccatcacccgccatggacaaggactcgcccctttgcccaaatctgggcaagcctcgttgaccctaggtgagggtctacgaggtctcacccaagccgggcgttggtcgtcgatcccttgtgagggtcaacatgcccagatttgggtgcccttgcccaacctcgtaggggtggttagccctcacttgggacaagcaaggcctcccctgaccaccctcgccgagggccaacgactatcgccgaccccttcgacgatgggcggaagctccatcggtgccttttttttttttttggaatagttttgttttttttttaaaataaattttaaattttcctttttagattttaaatctaattgaagaagaataaaaataatttcaaaagacacacgaaagatagaaatttaattaaagtgccacgtcaaggccacatcaacattttctgttagtaagttaatcaatttgataagttttaaaacttaattatatatatatatatatatatatttgtaagttttaagggtcgattgtactttattgacaagttttacttatactcttgttatttgtatgaacgataaataagtaaaaataaaaaataaaataaattgagggaaacgtacaccacgagaggtgctgtgtctctgtgtggcctcacgcaggaaggcgtgctgattcttcctttgtgggcaggagagagagagagagagcgtcgactcaatttcatctccaacccgaaccgaaaaagcgaacgtcgcgtcgtgtgtgccaaaaagtcgcgtc

SEQ ID NO: 90552 - DNA, 606 bp, Eucalyptus grandis
  Intron number 1 from transcript Egrandis_v1_0.018344m (loc us Egrandis_v1_0.017887m.g) derived from phytozome v7.0 (c hr-ID scaffold_6; pos 39989587 to 39990192)
gctctgctccagctgcaaagtaagcttcactcttggctctttttttggagccatgcccagctttttggttttttcttgatctcttttctcaatttttttttataagtgtttttggagttacgtgatcttgtgatgattgaagaggaataagcttatctccatgctttctgcaatttttttttgttttgtttttaggtttgtttgtttgtgcagagtaattatggaaaggattcatcttaaccggggccgatacccagacccgtgatcttcttatttttcgggttttgctgtgtttaagcataaagagtattgaattttctcagttatctgcatgtatgcctgagcttgttttgggatcaacccttggttcgtcgaagtttattcttgtgtgcaccatttgggtctttgttagtaattacaagaagagaattaaaaaccttccttcattagtctaaaaattagaaattggaggctggtcatatactgtattcattcactgagatatgcccatctacggcttactcaccttcggagattttagtttttagtttaagtgggtgctgacgtgcgagtgcgcatgcaatttaacagggcacaggtagtggg

SEQ ID NO: 90553 - DNA, 987 bp, Eucalyptus grandis
  Intron number 2 from transcript Egrandis_v1_0.034585m (loc us Egrandis_v1_0.034585m.g) derived from phytozome v7.0 (c hr-ID scaffold_9; pos 27477458 to 27478444 reverse strand)
ctaattcgatccataaaggtatgatcatgccatttcttgtatggatgtaatttcaggtgtcagcgattgcaaattaattctgcagatggtattgcagagagaatgaagcatttaattagaaactttcttccccttttcagtgctttgtctgccatgcaaagaactaaatgcctagtctaagcattatattcttccgaaagttaactcagatatttgatgcagacctaaaatacttgtacctataaaacttctaaatgtgcgtggatggtggtgttttggttaatgatttttaattgttaatgtcctgtttataaaaaaatgatgctactaccacggtattatgcaagtcctttggatgaaggaagttaagaaagatcatactaagctttggcattcttaaaacttgctgctttcactaacacttcctgttgcttccattggatgatcacactacgccaaatctacctttcaatgtttccaaggcgtggccacctttactttcctctgcagcatcccccctgaatttccttaagtttaagtgactggtatttacgtttctggacttcaggataaatttcatttgcacaatagtgatccaaatttgatgtcatcacaggacacggtgtgatggtgttgtagtgagggattgattccaatccttaggtgcagacctcagctagtcacccaacatgcggtgtggatactgatagtccgcacactcttaaggtttcctcagtctgcaaatttgtgcaggttttagttttctcctagttaggggaaaaaaatgaataatgaagattatgatttggtgctctgcaggcactagttcttggcgaaacaagaggaaaaagatcttgtacatgaccgataattcatttcaattgcggattcttgcatatagagtgtataatatgtagtgcatagaaacattttggtttttatatgtaagtttgttcaatttactacaggactttgataacatccgct

SEQ ID NO: 90554 - DNA, 913 bp, Eucalyptus grandis
  Intron number 1 from transcript Egrandis_v1_0.034585m (loc us Egrandis_v1_0.034585m.g) derived from phytozome v7.0 (c hr-ID scaffold_9; pos 27478553 to 27479465 reverse strand)
ggtcactgccagagttttggagggatcgtcccctggtgagttccctacttgatctccctcattatctccacctttgaggaccaaaagtccgtttctttacgtagtgggtggaccttatatagttttgacgctctctagattgaatgtgtatacccggatggtctaattctgaactataaagttctctttactttttcacctatgaagcagttgttaatgatctgcagtcagttgatgcatcaaaggatcacaatgaacattacatacagaccctacttgctgtaagatttcgattttgagttcacctttatacgtcaaccgagagggatatggatgatgtcaaagtcggtcactagtctgataaatacatttcttttattttgagagagcataatgcattaggagttttctccgccttcctactgaaacttttggtattcagtaaattattcagaagctgtttcagcttaagtttgccttttcaaagctcaaagtccaaagcaacagcttacacgtttccactcaaaggactttaggagttcaaactattttcaaattttttcccaaactcactatgtccctcttcctaaaggtgaaggactaatggagatatctttgctgtgaagcacaaaggttgaactcataagcatgtgtgtggaacatatgggaatataggacgtatgagccatttctcgttcacttgattgttaatacgagatcatcctactttgattgtactgactatgccttgaagagatacttttctttttgtttgatgccgataggattgtttctaaataatctaacgtgtgaaatggaagttcacaataaattctggttatgtaaagttctgcttcaacctcctgaagtctgtgtttcccgaaatttagtaggaaggccttgagaagaaata

SEQ ID NO: 90555 - DNA, 571 bp, Eucalyptus grandis
  Intron number 1 from transcript Egrandis_v1_0.036740m (loc us Egrandis_v1_0.036740m.g) derived from phytozome v7.0 (c hr-ID scaffold_4; pos 26897363 to 26897933)
ggatcaactcaaaaataacaacaaggagaagcgatgtatgtttttctggatttaatcttacttttttggtttttacctaatttaaatctcacgagatgcatacttttgagtctttatttacacaaaacacccaaaactgttataacatgcagatgctagcatgcgaatatgaatataacattttcataatttttcgaaatttgaatgtcataaattttataagaaagaaagaataatttaaatttaaatttttatttttacttgatccaaaaacaaatgggatgatgcaaatacattttagtattactatttaaaatcactacaaaactttcaagatctttttataaaatgaatatcactttgattttgtgagtaaattttaatggttttctggaaagggctcaaacctcatctttataactctaaacttttgaataagatagcaacaattcttgtacgcatgtatatgtcttctattgaaagaacatgatgctctctctcctcttgagtccgtactgagtaggagtgcattgcagttaagcgctggctaagtgccccacgtccccgagag

SEQ ID NO: 90556 - DNA, 486 bp, Eucalyptus grandis
  Intron number 1 from transcript Egrandis_v1_0.019957m (loc us Egrandis_v1_0.019957m.g) derived from phytozome v7.0 (c hr-ID scaffold_6; pos 38480153 to 38480638)
aagaaggcgaaacgcatcgattctcctctcgtcaggtgaaatgatctcgatatcctccttattcgtcgtggcgattttgtccgcatcaagaggttcatcatttgactttgagatgaactgctttctacgagttccgagtggttcctggaaagttgagccgaaactctactcgggattgggcgcattcgttgaagccctagatgtacgcggtctatctcgttgcagtactgtcgcgagcgccttgtcgaagatgtgggtgaaaggatatatcgttaagaaaatggagtttcccgagaggagtggtgcaatacgtgctgaaatgttaaaacttttggaccgttggagttctttaatatcacaatagtttctggttctccgtagattcccaatgtgcgctttgtgggacggcgtttctaactttcgagtggcgtgtgtagcatcttttgttctcatctggtccttctcttgtttggtttcgcaggtaca

SEQ ID NO: 90557 - DNA, 709 bp, Eucalyptus grandis
  Intron number 1 from transcript Egrandis_v1_0.006842m (loc us Egrandis_v1_0.006842m.g) derived from phytozome v7.0 (c hr-ID scaffold_11; pos 4471212 to 4471920 reverse strand)
acaagtttgtgattggacaagagagagcaaagaaggtaatgcttgttgcttgttagtgaacttaaaattcgtttttacaggttcactgtttatgctctatgaaatgtaaaaggatagatgtcaagaagcttaatttgctaaagcaatgtcttcttttcttattttgaattgatattctgagtggttaccattagcagtagttactgatcattgcaatattgcttctggaatacaatcaaacggtgtagattaattctccattagttgggagtaaagaatctgtttaggtattatagttacctgtagttgcataacgagttagtattttatgctgtaaagcaataagcttttactgtttgtgaacgctggaaagccaatggttttctgtcatactatcagaatgagaatattgtaattggtgatttagcatggtgatactcagtgctcatgctggtttctgaatcaaatcatatgaaagtttcctgcgttacttgaacttttgggatccctctccagatatgctagccttgaaacacttgtgtggctgtgagaagatattaggtgtgaataaatggaaatatgatggactttattatagagctttggagctataaatagtttctcagtctgttaaaaacattttttacagtcctccttgtcatgtgcttttgcaggtgctctcagttgcagtctacaatcactacaaaag

SEQ ID NO: 90558 - DNA, 419 bp, Eucalyptus grandis
  Intron number 1 from transcript Egrandis_v1_0.028904m (loc us Egrandis_v1_0.028925m.g) derived from phytozome v7.0 (c hr-ID scaffold_6; pos 1540892 to 1541310)
cacttgaaatagtacaaacaaggtacaaccaacatattttgccagcaggctatcattgttttaattaattctcttgaggttcttacggtacctctgacccctagtactgtgatcacagtgttatttgtgggtttgttgcctggctatgctattgatttgttgatcattgtgtcaagattttcctttggagttagctggttaaaagacccttacataaacagactaaaaggttagcggctttcttgttctttcagcagtttaatttgaacatgggacatgtttttcttgtgaattactaaatcccattgctttttgtttggttttctgccttcaaattttacctttttggaagaactgattcgaccttggtcctcattgatgcagtaataaaccaaagcctgcatatctttcaaagattt

SEQ ID NO: 90559 - DNA, 991 bp, Eucalyptus grandis
  Intron number 2 from transcript Egrandis_v1_0.022745m (loc us Egrandis_v1_0.018434m.g) derived from phytozome v7.0 (c hr-ID scaffold_9; pos 27214901 to 27215891)
aaactggaactaccattgttggaataatttttcaggtattgctttttgttagatttgttgatcagcgcagcaagctatgatcttctagctaccactatttcaagtggtaattgagggaatgtgtaaaattgatatatgtttttcaaatgagtgagccaaatatcaccttagcatccttcaatttgcttttctctgtgattgcaaggccaaaaatcggctaacttggaccagtgaaatatcagaagtgatgtcagttcttttgtgaactccctatgaaatcttgtgtctctggataagctaaccttatttatataaataaatttctccagcctttttgggaacctttgatattatcatagcttggctggtttcattcatactgattatgatgggcgctgccgcactttaaacttctgtccttatgtctattctatataaactatagttatttagtgcttgtctggattcagtcggctgagaagttgttgatgaatcctactgttatgtatctgctcattatttttaaatgagaaagtattacttagtgtgatacctgacctaatctaagaaacaacagaatttaggtgctttcttttggtgccttattggtgcttactatccttagtcaattcatgagagtggtagggctgtcttagacattgaatggcttttcgtggttgccccccccccccccccccaaaaaaaaaaaaccacttcaatttccattttcccctcttgaaagattggcattatgtcgatcctgagttgatgtcattatattttgcaagaatactagaggttgaaataagagcatattagagtacggtgaatgtcgtagtagatagcttaatttactatagtgtgcatggattggccataacggtctaggaccatgaatgattatatgtgtgatgtgggtttatcactttcaataatagttaaatatgctcatctgcatttctttctcttcttgaaatcttctttctgtagg

SEQ ID NO: 90560 - DNA, 727 bp, Eucalyptus grandis
  Intron number 1 from transcript Egrandis_v1_0.012045m (loc us Egrandis_v1_0.012018m.g) derived from phytozome v7.0 (c hr-ID scaffold_11; pos 32584841 to 32585567)
gttcttgctctcttgctcctctttcccgtccgccggtaagtgcccccccattacgctcctctcgcttctctttttgcaaaatcttgtttctttaggagcttcctctttcttgtttccctgttccctcttgcggttgccgtcccttgattatgtctccagctcctagagagatgcggaaatcagggtaatgcgcatctgggtttgtttcttgattcccccatctctcgctgtccttgaccggcttttgaagttagttgaaatcgagttgccctgcgatctgaagagccgtgtaatttcgtaatttgtttccgtagttagttctaaaagtggcatattgggtagtttttggtaattagatggttgcggtcgttaggaattagaatatgtgtttgtagattgtgtttggttttgaattctatcttcaagatcttatccggggcagtagttaagaggaaatgagcaaaggtgtcttttgtgtttatttatttcctcgagtggtctgtgtgctctattttacggattccatataaactgatagcgtcgcttgatgtgactaaaatggcagtttacgccctaaatttgtgaaatcttgtgattatcttcttcatgactccttggtgtgccgtgtcatactttcaacattaacttgagtacatgctctggacttataactttcggattgatgtccatggttttcttctgatgcccaattttgcagaagcctacg

SEQ ID NO: 90561 - DNA, 760 bp, Eucalyptus grandis
  Intron number 1 from transcript Egrandis_v1_0.010368m (loc us Egrandis_v1_0.010368m.g) derived from phytozome v7.0 (c hr-ID scaffold_9; pos 38502879 to 38503638)
caagttctacgcgagtgggcgaaggttttgccaaggtatgcctgcctgattttatctagatggaattgtcccttcttttggttagcttggtttgatgataatttgtgcatattggataggtgtttctttagccaagattttttttttcttttttttgggtggggggtgcgtttccctgataactttgttgaaaatctggttgcgttcactttgaaattttaactgtcaagtgatacctgagcttttaattgtggcctattattgcaacaacagaacgggagtttcttttcttttcttttcttttctgtttttggttgtaaataatataattttctctccgttcaaagtcggggattgttaggccggaacaaagtctcacggtagtttgcttttcctcgttagtttagttctcctaacttttaggatgttaaagatcattggatttgtgatgtttcttgttgctatggagtcaaatttaggaggatcggactgtttcagttcatcccctttccttatggtgctgaaaaatgctggcataatgttagaacaaaaaatcctatccaacttgaagctgtatggttgcaagtagatatagtggaaatttccttttgttttttggttgcatgtgtgaaatttttgtgggaacttggagacagggcaagattcgatcgtcatagcatggtgcatttgaattcttttcaatttctttaacttgttctcattgatgtggaatgacactttggaaggtctattggcgact

SEQ ID NO: 90562 - DNA, 716 bp, Eucalyptus grandis
  Intron number 2 from transcript Egrandis_v1_0.006439m (loc us Egrandis_v1_0.005961m.g) derived from phytozome v7.0 (c hr-ID scaffold_6; pos 46784435 to 46785150)
tcgacgacgatcgcaagaaggccttcctggagcaggtacgtgagccggcggtggttcggcggatgattttaatgttttccggatcgagtttagtggagaactttagacgaattctccttcctttgacttacggtgtgtatcaaggacttgcggttcgtttgtgtttgtcttcggcgagggagaaatgcgcggcgtgatctaccatttgcttaaatcctgtgtatttagttattttctttttcaattatgatgatattaagcggaacgaatttatgtttgtgtttttttctctgtgatttttttttttgcctaatgcgggaagtcgattgtttagatggcgatcttttgctgcaacatttgtcccatcaactttcgcgatctgtattttgttttattttactatcttttctaacagtagagtgcgcacgtagggatacacatcagtatccaatttgtccatttaaatggagcttgcttctgctgatgctttcctgcattcctgttactgatatatgtgtccagcttgttacctttcagacctggtttatggttttactacttgattttcggaatctgtaattagcgaaatcctgtgtacatcgaatatggaaatcttgaacctgaacttgcttgtctttactagagattgctttttcttatccgcctggttgtattctccaggtagctaggctcgatacaagttatccgggaggctt

SEQ ID NO: 90563 - DNA, 840 bp, Eucalyptus grandis
  Intron number 1 from transcript Egrandis_v1_0.023268m (loc us Egrandis_v1_0.023268m.g) derived from phytozome v7.0 (c hr-ID scaffold_4; pos 35481273 to 35482112)
gacgggcagatctccgacatcctccgagctctagcgtaagattcggttttcttgctgtctccgcggttctgatgcgtcgcggctgcgtgttttggagtcgatcctgtccccatggatcggcattgtgttcgccgtggttgatcttttcgtcgcatgcttggtgaaaccagattcgtagcgagactgccgtgtgaacgcgatccggagtagcctgtacgcatttcggaccgcgtttgtcgttttagctctcgttaagctcattgttttcctggtatccttcattatacgcatttcggaccgcatttcggaccgcgtttgaaattggaggactgatcacgggcattgttgttcaagctctagcacgatatgctttttgatctgtgtaaactgcttcgtggcgtgtgttcgaagtcaatttaccctcctggctctgtcgttgtgatggtctgattctttcaaatgctttgattgcggatttacggtgacgccatacaattgtaattccgagtcccattctccagctagctctagcttaagctcagctttagtttactgttctctgtttgttagatttcatagaccgcagcatttgtggttgctcttgtgcacaaatggattgagaaaattattgcgggtaaatgtgcttcctggtgtcatttcttttataagctatgacatataatttaatggtcgatgctatctcattgctgtcctcggtagttaatataaacactttgcatttaatagtttaattccagtttgatctctgtgctgagctttctggtgtctgttcattacatttcagaggctaaaagtagtttcttttttcttttctcagaa

SEQ ID NO: 90564 - DNA, 675 bp, Eucalyptus grandis
  Intron number 1 from transcript Egrandis_v1_0.016297m (loc us Egrandis_v1_0.016297m.g) derived from phytozome v7.0 (c hr-ID scaffold_4; pos 24386763 to 24387437)
tgctctcgcgtctgtttcatcctagcattgtccaggtaacattctctttctcgaattctcacgcatgaagcattcttgtcatgcatacgggtggtagcgtttctttctgttattattgtgatatgtcgtggaatgacatcagtttagtattgtcgaatttcgatatttagtcaattttgctaccaacagacttatacatgtcgctaatctgctgatataaataaagagtcattcccgagcatagttaaacagaagatagaaatgaaagaaaacgcgtgatttggaatgtctagtgctttgaaattgcaaaaggtatacacttcgctctggtttattagcataatgatccacaatagcgaagccatggagacgcgacaaattggtctccaattcaaaatgctgcgtaaatgtactgaaagcttccagagaagtaagcaatctaagctccaaaatgggtttccggctcaatctttttgtgcatcgaactcctcaaaacactttgatggtttgcatagacaagatgcattgaaaactaaggcagaaagaggtacttgcatcctcaggcatgtgataattagcttggcaatttaaaccaagagagctcaatattgcaaacttggtgacccatcattttgggcagttcatcgcagcttgcaagaagcccccggtatactg

SEQ ID NO: 90565 - DNA, 546 bp, Eucalyptus grandis
  Intron number 1 from transcript Egrandis_v1_0.000867m (loc us Egrandis_v1_0.000868m.g) derived from phytozome v7.0 (c hr-ID scaffold_11; pos 1558502 to 1559047)
ccctcccccccctccctctccccccaccccgctttgtacgtgcctcttttacttttccatttacggctactcctcctttccgtgtattgcgtgcgctcgatttctctggatttcctcccctgcctcgattatctgacgacttattgcggcagcttctccgattctgtcttcttatttcccgtctcttatttgcttctttatttcttctctttcgtggggttgggggtcagcattataaaaataagaaaaaagaaaaaaaaaaaacgggggctttctcggtttttcttttctgggttctagcttttgttcgctattcgcacgctccttagtcccccgcttcaaatgcatttccgcatgcttttcgctgattcctagtgctgaatgctgaatgcatgtgtaattgatgctgaatactcgtctgagaatttgattgcaggccatgtacataattactatgacggctcgtgttttctctatctgtcgtgcccgatctcactggaatttttcttcttcttttttccgggttgggtacctctggtaatgaag

SEQ ID NO: 90566 - DNA, 615 bp, Eucalyptus grandis
  Intron number 2 from transcript Egrandis_v1_0.027562m (loc us Egrandis_v1_0.027562m.g) derived from phytozome v7.0 (c hr-ID scaffold_6; pos 17935763 to 17936377)
gcccggcaaaagggcactgagagggctttcactgggtacgttcgattcttgggaatgtttcttgtttctctcgtgcgtttcggatcatatgattctctaaatccttagagagtctcccagtttgtcagattttccagcccattttctggtccgttgtgcatagaaatgggtgggtttttggataagaatgtgtttgttttctcgagtagaatacaagtttgagcaattaccacgtttccgaattgttttcttgcctgccggagggcagaaacttgggctagagggcgagatgagaaagttttgcaagtgcctttctcggggagagaaaggagaatttactggaaattttctatgttaaattatgtacttgcaaaaaatttaatgaagtaccgcccccggttccccaccaaatttgagttagagggcaagatgagaaagttttggaactttgcttatgagttgaaccctagctaatgtgctttattattatgtttcaagttgtctagtatggtgcaacaaatagtgttatctgcttacctgtggtaattctctccgttattctggttttatgtgccttcagggagtattggaacaccaagacccccggaacttatc

SEQ ID NO: 90567 - DNA, 627 bp, Eucalyptus grandis
  Intron number 1 from transcript Egrandis_v1_0.045560m (loc us Egrandis_v1_0.045560m.g) derived from phytozome v7.0 (c hr-ID scaffold_4; pos 987913 to 988539)
ttagcatcgtgacattcatcatttttcttttatttgggatgaggatcgagtcttttgactaattgagtatgtgcgttaggcactaaaccgacccccgcaaaaaaacatttgtttaaaagtgaatcgtgcagtttaactgtccttttttgtacaagaagtgacgcgatagcattgcgtaagtgtggcgagattcattgaacttacacaattcaaaggtgtcgttgttatcatgttccccttgatccttcatgctttcgcgaggtaatctaaccttagttggattgttttgtcttcagctgcaatagcacacgagaaatatttcctttttcctttttctttcattcttcatgctcgaattgtttggtgttgattttgtttttgatttgttggtaacgtctaccttctttattaggggtgtcattggccaaatcaggtcccaccgatccccaaatgccaaaaattttcactagaaagtgttttcacaacaagctatagaagcaatttatattgttgggtccaacaatttggacagtaggaaatagtaaaaagaccatctcaattgactgcttatcattactcgaaacggctgtgatattactatttgaagaagaaaagaagactacgtca

SEQ ID NO: 90568 - DNA, 708 bp, Eucalyptus grandis
  Intron number 1 from transcript Egrandis_v1_0.006835m (loc us Egrandis_v1_0.005955m.g) derived from phytozome v7.0 (c hr-ID scaffold_6; pos 27256867 to 27257574)
cttctagccgccgcgccgactgccctgctcatcaggtatgtattctcgccgtccgtcctctccagttccgcaccgtcaatgccactcatcgtaacgacaacttttatcaacatatttgctaaattttctacgctaaaattatttttcagtgacaatatcccatcatctagcagctaacgaatatgatgattccttgaatgagatgccaatttttttgcaagacaaataacattcttgacttaagttttggcatggttcgtgtttgtacagttctacttaaatcaaagctgctggttttttagtacctgtgatatttttttgtccggagttgacgctagacttggtttcatttagttaaaagtggaagaacgattttcggtgaaagaaaaataaggaattgatcgggcgttctttctcggaatcgctgattgagttctgttcgattatctggtctgaaaaatgcgattgcggatgacgaacgaaccatttacgttgtttcggctgtctcttttgtgtttatgcaatgctcggtaattcaagggagttgagtttggagcttctgccgaaattgatgttgaaagatgcttttttttttttttttttggtccccacattgagctcctgagttcgatctttgtcatcccatttaagatgtacttccagcattgttaggtgtaaagcgctagttttgatgccttttgcagatcg

SEQ ID NO: 90569 - DNA, 596 bp, Eucalyptus grandis
  Intron number 1 from transcript Egrandis_v1_0.008890m (loc us Egrandis_v1_0.008890m.g) derived from phytozome v7.0 (c hr-ID scaffold_11; pos 11689405 to 11690000)
tcttgcttctctcaacactgttctcctcggctgtaaaaactcaaatcccagtttatgggttccagcacattagcattaagcttctaatagtttcagtcagtttcccaatcattatccagaacaaaatatgcactgttttggcctagatcaaccttcgtccgcattattgttcatggaatcttctgtttttccagaaacatattgtggaaggtgtggaaagtcaaagctttgtgaattctgcccttgttgagtagtctttagaattgccccttttgtagtctcagttcgcttttctcaagcactattgacataaatatagctagtacatgtgctgttcaagtctgaagcacatccaaatgcggataacctagtgacattttccgtagcttcttgttgttggctaaaggaggctgctactatgtgaaccttttgttgtatcataggattttctgttaggtgggactggaccggggttgcttgttaataaaagttagaactgccgatttgaatgtctcgcaagtttcttcacctttccttagattttgaacaggttagtgatgtcacgaatgagttgatgtgtctttgctgctctgcag

SEQ ID NO: 90570 - DNA, 880 bp, Eucalyptus grandis
  Intron number 1 from transcript Egrandis_v1_0.051541m (loc us Egrandis_v1_0.051541m.g) derived from phytozome v7.0 (c hr-ID scaffold_4; pos 32321248 to 32322127)
agaaggcggtcggcctcggtggctggcactggctggtatatctcctctcttgtgcatccatagttttgctctagctagattagtgattttgtatccatccgtctgggctaattgtcctgtgaattaagaaagtgatcatctggacattttgacttttagtattagagtgtctagttgtgacgtcctatcaatgaacagaaacgattggttgttgaggagaattgtctgggacatgtttgcctgccctgtttctgcttggatggagtgagagaaataactcatcaaagtttcatttaatttgtcctttctatgacagtgctcgaaaaaagtgctagaactctactaaatctgaagttagttcagcctctgaatgtcccacgagatggtccatggttggtactctgtttaaaatatgatggtggtgtaatattttattagcgaatcttgcaaagtttgattgtatattttgtttattgttggcaatatggcctttaagcaaatatcaaggattgcgtgaagtgggtaatcaataataactacaccctttcagatgacgaacagagcaaattgtggtggagtgcaatgattgttcaatttaatttaatactaccacttgatcatgaaagttccatcagaagaaactcctggaaagcaaattaatttgttaagttgtcattgaccttctgtacgaagacactcattatccctgcacaacactactgacaatatctgtctttgtcgaaactcaacatgttttttcttgttaattagttaaaatggtcatgttagactctgatatcgattgggaattaaacatttggacagaagtttcacttcaaataactgagacaaggatacttggtgctgcaggttctgaaaa

SEQ ID NO: 90571 - DNA, 357 bp, Eucalyptus grandis
  Intron number 5 from transcript Egrandis_v1_0.001822m (loc us Egrandis_v1_0.001822m.g) derived from phytozome v7.0 (c hr-ID scaffold_6; pos 16490964 to 16491320 reverse strand)
ccgaacattggaaacttgagccttttaaggagactgtaagtaaagtatagtgcattaattggcacacttttgcttggataacacattttagaagtcctttttgaatgtttgtgagctctcttgattgcaagattatgaaataaaatgtcttaatttaatcttcttgctttaattggaatgaagtttctctttgttcaggaagatgaaaatacactttgttctatgttatatacatatatatatatatatatatatatatatatatatattgagacttgatccttcaatattttgaattcctggatggtttttttcttggcagccttctgtctgctaataatttcacaggaacaatac

SEQ ID NO: 90572 - DNA, 167 bp, Eucalyptus grandis
  Intron number 3 from transcript Egrandis_v1_0.001822m (loc us Egrandis_v1_0.001822m.g) derived from phytozome v7.0 (c hr-ID scaffold_6; pos 16491472 to 16491638 reverse strand)
cccacaactcttactcagataccacttactattctgtaaatttcttttcatacatcaaatttcattatcacaatttaattataagttcttagaaaaaagaagcataattttgtttttactttggtgcttcaggtcagcacttggaaatcgcataagtggtgttccca

SEQ ID NO: 90573 - DNA, 694 bp, Eucalyptus grandis
  Intron number 1 from transcript Egrandis_v1_0.009252m (loc us Egrandis_v1_0.009252m.g) derived from phytozome v7.0 (c hr-ID scaffold_9; pos 23027629 to 23028322 reverse strand)
ctccagaaggcggccgaaggagattttcgcgcaatgtactcgaaaaacttctccctttttatcttcgccgtcgttgattgttagggttttgtccatccactgtacttggatttacgatttccggaagctggaatagagtgcattggttcgtttttgatttggtccgattctcgggcgtcggatctggtgtcgttggctaaaaaacggttatttgtttctatacatgtttggtggaactagaagatgggttgcaggataattgagaatggccatcagtggctgttagagtacagtgtgcttttctcgtatcttcttttacgctgattgatgtagttttgggtattattagctgccagtgggatctgagaatgaccacaaatagctgagttccatgttgcgttgatagtccgtttgtatgttataacagtgttcagaggtccggacttaggagaagatctgattgcttatgaaaatgattaaatcgtttacgaatttgttgtgtcgatagtccgtcctctacttatgacaataattaagtcattcatgaatttgcttcaacattgcacttatctgattactgggaatttggcttaccataagttcctgcttcaagctctgtaatgttgagaggtccttggttgtgcattttatttaagctgcgctttatacatttaggctgctgaggctgctaaaa

SEQ ID NO: 90574 - DNA, 1013 bp, Eucalyptus grandis
  Intron number 1 from transcript Egrandis_v1_0.001553m (loc us Egrandis_v1_0.001553m.g) derived from phytozome v7.0 (c hr-ID scaffold_9; pos 25129093 to 25130105)
catcagacccactactcatacggcccattcgactggtatactccttgctttcggagctcatcccctgcttttgcttctcttttgaacttgccatgattcagttagtagttcagttgatgaaaaagggtgatgtgaaagcaaagcaatcgtgggtgattagctgcaaattttcatgaggggagagtttacgatgagcccttcagttctttctggttgttttgcgtggaagttgtttgctctttggcctcgtatcattgtcagttacaacgacgtgtaacccatataccacgtatttccctatgagctgattacttcaaaggctggagcttaagctcgttgaagaggacatgtcatgcatcttaatagtcatgttatgaggtggacttcagaagtgatttaaaaatgtcctgcctagcttttaaattagtattgatactgctactgtaattgcgcgttcattggtgacccgtaaatagaactgtttaattgctgaaggcttccaaagagagtgtgtgcgtcgcagacctgggaatattattattttgagagctgggatttagcttgagttgtagtctctggatatgatgggctcatctgacaatgcaagctttttctctagtaaaagagatcaccagtctggctcgaaaaagtggcgtgtgaaggaacatgctacgaactggactcattatgaaaaggctaagtagtattggtggctattgctattgatgacaaagatgatggaattgggaagtgaggcagaacctgaggcctttgtttctctatctctctttattccttttctctttccgtcattttggcaatgtaattcaagcgattgtttctgcttattaagcttcattgttgggattttacgaaccattctatttgttatacagtgctgaaacttacaatttcattttatgtgcctggttgaattattaagcaacaaatagtgatttgaagctgtttgttgtgcaggcctcattagaagatctctttccatctcaccttgt

SEQ ID NO: 90575 - DNA, 468 bp, Eucalyptus grandis
  Intron number 1 from transcript Egrandis_v1_0.010026m (loc us Egrandis_v1_0.010026m.g) derived from phytozome v7.0 (c hr-ID scaffold_6; pos 20862529 to 20862996)
atactcagttacgttgacagcttgcccagcgggtatgtatgtatgtgtgtgagggtttttttaagtatgtatgggtgtatgtttgaagagtttgacttgtgggtgtcttcttgtgtgctgtggctgtttctctgcggttgttgaggtgtcgtttctgggtccgtgactggtcttcaatgtagagcctgtctggagtttttgagtagggaaatcacgggggttccttcctttctcgtgtttgaggatgtcttagtgtgtaaatgttctttcacttgtttttttctcctgctgagagtatcatgaacagggtggcagtttaaaataatgaggttttaatttggctaatcattcttttctgggtttaaggtggtttttagatggcttcaatcttgcacccttggatataataagcaatttgtctgttgtatactccatatatgccctgatgaaaaaatgcactttgaagga

SEQ ID NO: 90576 - DNA, 749 bp, Eucalyptus grandis
  Intron number 2 from transcript Egrandis_v1_0.025285m (loc us Egrandis_v1_0.020212m.g) derived from phytozome v7.0 (c hr-ID scaffold_4; pos 11703476 to 11704224 reverse strand)
ctgtaggcattgataaggtgatgaatctaccatttcctgattttctttgctatgtgtggttgctgagaaaatggagatgtatcaaaaaggatagagagaatcgataacagttcatatgtggaaagtctagtgctctttttgtttgataatgctgacgctgtagacagaataacacgcaagtcgaatagcttggcttttgttgtagatcttggtgtaagtgtcacctgattactcagagattagttggtacttcatggatctatgatttactcacctaatcataaagggattcaagaattctttttaatttcttagtttcattcaatacttttcacttagcatattccttcgagatgagatctagtgaacaaagccttgaagggacggtctatccaattccatgaaaagttctaaagcaggggttcacggggaactcacacggaatctgtggttgttttggtcattgaaagacaaaatatctcatagttcctcaaacacaaatattatgtggacacgtttgaagccttatctacttcacacgtatatgcataactttaccttccagtaatctgatgaagttgctcctagtttaatcagtcctaaaattcactatagtagttttgctgctattattgcatgtattactagcagttctgtggttatgtactgagagtgaagccttcttgtaacaaggtttgggcactgtcattgcaggtgtttcttgtagctaaagacttcggagcttttcc

SEQ ID NO: 90577 - DNA, 859 bp, Eucalyptus grandis
  Intron number 2 from transcript Egrandis_v1_0.023078m (loc us Egrandis_v1_0.023078m.g) derived from phytozome v7.0 (c hr-ID scaffold_9; pos 25390185 to 25391043)
agagcaggggaagcttgcctgttcgtttcttggaggtgaggggttctgactcactttgcttcttgtttaatttcgtgatgggtcgacgggaaaaccggagcttgtatagtaaatcgggacgggagttgtttagaattcggctgattctactggattttgtgctcctgttgagatgggattgatcatcggggccctttgtaatgctcctaattgcgtggctgcgaggtatgagacttggcatctttagtacatgaaccagtccagagtggtgacttaaattaaataggcctcattaccaatttactaactccgatttgatgtcttaccagtatttagattaggaacagcatgcaaaactttatatgtcaagaggagactgcagaaagtcctgtttgtatcgtcaccattttgtcctcgttgggatggatgtaggttgcggatggtgatgtgaggtgtgctttttaatgattgacaatgtacttctgtacttaatattattattcctttagtcagtcgtttacagaggaattacatcttcgtacattctgcataggaagcgatgatattgtactggcgaactatttttatgcttacttttaccttgaagttgagactgtcttggggttgacacggtatcatctatttggtatgtgatcacgtgatctctgtaacaggtggtatctagtttctttgtgtcgttgctcttgagttgcatagtttccatcagatcaaatgtcatgttggatgatttattttatgtcatatgactccacccattcttcaccgagtcgtcttagctacggaagatcacgtcatgatcctgatttcaccttaccatctttagagcaagaagaatccc

SEQ ID NO: 90578 - DNA, 733 bp, Eucalyptus grandis
  Intron number 1 from transcript Egrandis_v1_0.001459m (loc us Egrandis_v1_0.001010m.g) derived from phytozome v7.0 (c hr-ID scaffold_9; pos 24135336 to 24136068 reverse strand)
tcgatctctacgccaggaggaagagcggcaagcgggtcagcttcctgcatctgcatgctctgttctttgagtttgcgagtggtttttgccgcgatttccgagagacgcgctcgatctgatttgcacggtagattctcgagagcggcggtggatttttgaaatgaggtggttgattggcgtggtgtcatacttattttgatggtattagtatggaagttgcattctactgaagagtatggaaaatcgtccgcatgaaagagtttggaggtctttaaacaaggtttcttaaacggtcggatcgaccaacaacccacttaagtgatactaacaccacattagacggtgtatcgatttagtaaattagttttaacatgcataccattgctagtgtacctagtatttcagagatttggtctgcttcttggattatagctggttatggtttttctttgatgtgtgaatattccatgcacgctaaagcaaatgtggagacacatatgctcgctggattttctcgttgggcatggcttgattggtccatttgtacacatttagtggccttatcatgttatgaccgtgacatggtgagtagaggtgggctgcgtgttttttttgaccttattggttctacacaatttgctgccctgttcctggggtagacactcaactaacccatctttagtcattttatttggggtcaggttacgggggaaagatatattgctgacgagaa

SEQ ID NO: 90579 - DNA, 797 bp, Eucalyptus grandis
  Intron number 3 from transcript Egrandis_v1_0.053320m (loc us Egrandis_v1_0.053320m.g) derived from phytozome v7.0 (c hr-ID scaffold_9; pos 21829234 to 21830030 reverse strand)
tccaccagccatccacaccaacccacctcctccctgtaagtttatgatttctctctgtgtttctgtttgcgtgtctatcctcagttcagatataaatacaacatcgacgtcactcgcgagcaatcttttacaaggaaaaagagcattattgggtcggatagaaatccgaataggacaaatttatgcgcggattccgcatgtgactcggatatctattacaaatttatgggactacactttgtttaagacaccagtttttgtaagagcattagactgcacgcttgacggtttgacttcataattgtcccacccgtgctaggcatacgcagaacctgtggaccagcgacatggtcacgggctggctgggtcaatgatgggctgtggccattaacagcctgcccttgaacaacaatataggtcacacaaatcacttttcttatgagaaagttaacaggggtgcaacattccttgtggaaacaggagcaaaatatcaatcgggagttgccagtttggctcggcaattcgctgtagcaaaattataagttcggtcaacaaaattaaggccggttgaactgagaatggtgagggtttgggggacatgaaacattatagagtatcgtgctttagcaatatgatgagtaattgtatatgcatatggtttgatagtattgattttccatccctaatgtaggaaaatgattccaatgtctcaaaggttgtgcttcaactaaattttcttttcctctccatgatctttattaggagtttggagaaaacggtggacaagaaggatcaag

SEQ ID NO: 90580 - DNA, 711 bp, Eucalyptus grandis
  Intron number 1 from transcript Egrandis_v1_0.033147m (loc us Egrandis_v1_0.033147m.g) derived from phytozome v7.0 (c hr-ID scaffold_9; pos 38737482 to 38738192 reverse strand)
cgtgttggcctcgattctccttcgactttccccaggttcccttcttcttccgtattctctcttaatttcctgggattcctgttatgctctttgtcgcgggcgggccggcggttttgttttcggggcgatccggtaggtcttttgctttgtgttcgtttctgcatgcccaactggtatacgactgatccccttttcgtgctcgcacttggatttgatctgctccaatctcagtgaggtcctcaatttgtgtccatttaatgacgtttgggaattcgcttgtcctcaattcaccgtgactccccgacttctactctgcatattagccttagcccacccaccggtacccccgacctctactgattcggagcttcagttatgtcttttgctctttttagttagttgacgaatcgcgattgttgttggatctgcattccgttttacctgaatgcctcttgattgtggatgtccggctcttgtccctctttggcatcttgcctcccaagttgtctggtcattttgctgccgtggtcttgcgcacatttggaatttgtttaggtcaccccgtcctcccccagtcccccatttatgcactctctttgaggcggcgtcatcctcctttgcaccctcttcatttgcttcacctgctctttccttttcctcagtcaaattgtgcatcgtaaccaatttccactgtcttttcaggctcttctg

SEQ ID NO: 90581 - DNA, 614 bp, Eucalyptus grandis
  Intron number 3 from transcript Egrandis_v1_0.020620m (loc us Egrandis_v1_0.020620m.g) derived from phytozome v7.0 (c hr-ID scaffold_228; pos 2938 to 3551 reverse strand)
caatttcagtatgccatcttatcgacatttactgtgaaactggtgtatatgtctggtcatcttgttgaaatgcctgagttttaggtaaggatgggtatattggtctctgagtcaagcacgcacaagaagttattaggagtttccaagtttacgattttaattgttgaaatgccatgattgtggagaacgaataatcaaatgtttactatttgaaacatttgatctatgattaaagatgtggggttctctcctcctatagaaattgtgagttggacgttagagaggagtgagtattaaaatcacagatatatcaacaggattttcatgaatgctaattttcatttcacatgtttcttttcacattgcttagaaattcaaatcatacatacaaagatttcgcattcttgtggaacagaaatgagcggaatatgttagtgatatagcatattggacatgttcagttctttggcttctttttgttttggtgaggattatcatgccgtactggtcagtaaataaaaccaagaccatattagaccactaagattgatatttggcatttcagtggtaatgatgagtttcttaccgtgtatgtcatgtcaattgtagttaaa

SEQ ID NO: 90582 - DNA, 933 bp, Eucalyptus grandis
  Intron number 4 from transcript Egrandis_v1_0.005742m (loc us Egrandis_v1_0.004972m.g) derived from phytozome v7.0 (c hr-ID scaffold_11; pos 8433200 to 8434132 reverse strand)
gtgaatttcgcacacttcaacttccaggagtagaggtacttcttaagctaggattttcctttgtttgattgtttaagcctttaagatatcttggagaagtgtttggaagataaagtagatgggcttcatgtttgagattgtgaaagaataaatgggaagtggccaagctctttgcaccaatgtactgatattgtgttatcctttctatttgctgccgatgctggaacttggtctttagcatggaatattacatggaaagagcccaagtgtgacgattttgatagtgaataatactgttagagcttgattgaaatctgtcaaggagagagctgcttggagcttattttaattacttgttgcgatcttcttaataaactacatgctggtagctgaataaagaaaacttctgactaatccctatacttcccattaggatcagtacagttaggtatagaaagcccaacccataattttccttacattttaccagaaacaacctgttaagtctttaatgtggatgaataaagaaaaaccgtaagctagagccctatcctttgccatcagaggatcaataaaattaaggaatagacagaccatccttgactttttccgttctgaagctaggaatgacaaaactgaatcagaatgtagtaatctagatctaattaaggataataattgatatcctatgggaaacgttaccggcagttcaatagtttctctctcgcttttatttggattgaagagttttcgatgtgcataacaaatgttctgcagagtgtagatattatttgagctgaagagtctgtctgtacagttatcgtctaaatgaaaattaccaaaacagtgtccatcactttagttactttcatctaatttcccttatttaaacctgcagttgcatccaccggcttcagaggcattgagaagaat

SEQ ID NO: 90583 - DNA, 489 bp, Eucalyptus grandis
  Intron number 3 from transcript Egrandis_v1_0.005742m (loc us Egrandis_v1_0.004972m.g) derived from phytozome v7.0 (c hr-ID scaffold_11; pos 8434290 to 8434778 reverse strand)
aggtaactcttttttttcaccccttgaatttgagctttgttttcctgccatggtgaggttttcctgcttccttgaatcgaatacaagattaccaataatcttttcagaagatgacatttcagctatccacataactctctctctctctctctcttgctctctctcctgagttacctttgtcatctgtatcaatcgtagtttttgaaagtctttgtcgtcatttggtcatgtttatttgaagattttcctttgttaacactgaaaatttatctttccactggtagacatgtcttgatgtaacaaaaacaaatgataattgactcaattacagaaaaaaaaaaaaaatcctagtaatttttatttgtttttactattataatagctattgttgttatgatttagttttgttttgttctgacagtcaaattctagccatctttcattttacttaaatgttgggagatgccatttcagggtaaacctatcaca

SEQ ID NO: 90584 - DNA, 1037 bp, Eucalyptus grandis
  Intron number 1 from transcript Egrandis_v1_0.005742m (loc us Egrandis_v1_0.004972m.g) derived from phytozome v7.0 (c hr-ID scaffold_11; pos 8435129 to 8436165 reverse strand)
agggaattcttccggcgagccgaagccccccaaaggtcagttgcatttctctgctcgcgattctcgttccgtggatttccgcccgatcgcgccgcgaagttcccgtgccgttccgcggtcgccgggtttcgtcgcccgccggccgacggggctcgctattgtcgagtcgtttttggcccccgtggcctccctagggttttcgctcctgttgggactccgatcgccgcttgtttgtctgatcctccctttgaattggagccggactcggtaacctccttgtagaagctgtcgaatgttgtgatgtcagcgccgttcgtgttgtggtcgacgagtgggaggatgctgcgggaagtgaggttgttttatgagaagtgagggtcggttcgagcttcctagggtttcggtgaaaaagggattgagattgacctccccggtgaaaggtccttggattctatgttaaaggacatccgcgtgttattttggagctcctatctttggggaaaatgtgatttgacttgcggtggcgcctgcagatagtagcgtctatttaatttgcatgctcgatttcgtctttagctgtgtgaattgggagattagtttgtacacgtttgttgtttgcgaattctttatatttgtaatctgtaagttccggaagcaattatagggatgtgtagaatggctacctcattagtgttgctaatttctcttcatggacctccatcgataaacgagatatatcacaaggacgattcttttctgtctttagtgattccttgtgcatctatgaaacatctctttttataccttattcctggttaaacctcctgcttaataggaatatgagagtattgaccacatgtttctctaggaagtcgtgtctcctctcagaattattatgattttttttttttataataattcaaaggtagatagctgactgcagctattctacattttcaattttttttttgtcctaatcttctttggcctcggttttgccaggtgacgttacttgttcgctttgtctaggggtggac

SEQ ID NO: 90585 - DNA, 1010 bp, Eucalyptus grandis
  Intron number 1 from transcript Egrandis_v1_0.050360m (loc us Egrandis_v1_0.050360m.g) derived from phytozome v7.0 (c hr-ID scaffold_9; pos 33795098 to 33796107 reverse strand)
ttggagcccaagcaaattagcgtttttattaaggcttgttcatttcgcagaaaatatggctttttaaaaaaattcaagaatttattgaaacctaaaaatgaataaaaattatttttcactgttcgataaggaaaatctttttttacatgcacccttttcaacattttttttaatttttttattttaaattgacttttattcttttttttcttcttcttcttcttcttcattagttggttgtaggccacgtcgacggctagctactgactagaggcaagctggagtctcgaacctcaccaaattcgttgagctaggggaggcttgagcctagccagaggttgcgagagcctcgccgacgtttggggaccttcaacaaggctcgatccctgcttaggtggttggatctagtgaggctcaagttcatagcaaggcttgagctcgtcggcgtcgggcaagcttgagcctcatcagcctatggcgaggctccaactcgcctttggctagtcgcgggctgccattgtggttgacgacccgtcaatgaagaagaagaagaaaaagaaggaaaatgaaaaaaataaaaaacattaaaaatggttttaaaaaaaataaaatggaaaaaaaattagatttcattggtttggttcggttaactaaaccggttaaaaatatttcagtttttaatattatccaaaccgaatgaaaattgaaccaaaaaaaaaatcgaactttttggtttgagtcggtttggttttcggtttgaccctacccacggccaggaccaccgtcatgcccctcttatcctcgtttccaaatccagaaacagctatagagccactctcctcactccaagttcagtccattcctcctcctcttcttgcaatgagctcgatccagtttggttctccgcgaccgccgttcgatcccaagctctggctcactgccgtctgggcagtagcacttgtctctctgcgtcagggggccgctgcctcggtagtgtggcctcgcaacgt

SEQ ID NO: 90586 - DNA, 194 bp, Eucalyptus grandis
  Intron number 2 from transcript Egrandis_v1_0.043208m (loc us Egrandis_v1_0.043208m.g) derived from phytozome v7.0 (c hr-ID scaffold_2312; pos 2783 to 2976 reverse strand)
gattccggtgaatttaaagctgcggaccacgggtgagtttttgatttccctttttttttccttccaaacctattttcatctcactaagtgctctttattggaacaacaattttaaagcttaatcaattaatagctaattaaacgtttattttttcttatcaggaggctatctctttaccccaaaggaaacaaaa

SEQ ID NO: 90587 - DNA, 842 bp, Eucalyptus grandis
  Intron number 1 from transcript Egrandis_v1_0.051279m (loc us Egrandis_v1_0.051279m.g) derived from phytozome v7.0 (c hr-ID scaffold_9; pos 14882358 to 14883199)
cgtcgcaccaatcaggtcacagaattgctacactttttttcttttacttacgttttctcttatatgttcggatataacgatcatgtagtattatgatccaagccagcttttacgtactaaatcttcggtctattcaaaagtaggctattggatggtgtcttatgtctatagacgtctattagtcaacttataatttgaacatggcatgtcgttgttctttttctcattaaaatgaaggagcatctgtttttttttattttttataataccacgagggctagttttaatcaccgatgagaaaagctaagaggaacattgtttatcgtttacttaaagataaatatgggctattaactcaatatttgaacgaaatggacatgcaagaaaaagcaaacaaaaattagtttcgtctaagaatgctgatttgcattttctaaacaaagttgaaacgatctcagctcgagctccaaaaacgaacaaagaaaagctctagccactttagcctgtgattccattattgacaataattattccccaacaagaagttaactcgcataaaaaagagagcttcgttttcggcaactcttaattaagcgttgtaatagctctcgagcttcaggaaagcgtaacaatccagagtgcaatgtatcattcaggaacttttatgagggactacaaagggtagatcccacttctagatctagcttcattttcttgtatggtacttgttcaacatgatggcagttgtatttagaattctggcaagtcccaagctaacttttcctttccactaactgaattttgcaggagaaactgaggatcgcagtgctagtctcaaaggc

SEQ ID NO: 90588 - DNA, 912 bp, Eucalyptus grandis
  Intron number 1 from transcript Egrandis_v1_0.011977m (loc us Egrandis_v1_0.011977m.g) derived from phytozome v7.0 (c hr-ID scaffold_9; pos 3823446 to 3824357)
gcgagagcgagaagcgagaagaaacgcgggttttggttggtaaaggtgctttttttattttcttggtttctgggtttttagcatctccggaaaaagcttttgaattgcattgcgtgagatctattcggcgttttgggttgatcagttgatccttacattccatcgattgagggcaatgttttcgtgttttttcgggttcgaaagaatctctttggggtggcgttgcatggtgtaagtgggattgttatgattgcattgctttcgtcatgacttgcttgcgatgctcttcagcgattgtttgttttgggttggtgctctaaggttgtgggttgatggttttgagttgggatttgcggatcttggggcaattctcaaacttttacaaacagggtaaggtgtttctaaaattgttttcggcgtttgattgaggcgtgtttcttttctaagagttggtaataggcaaatgtcaggatgggttgtttggctagaatgaatatatgacagagctggtaaatttcctccctccccagcgtcaaaatgtggattatatgtagttatggtgtttttgtctgcattgtgtttcttgataaacgctgccaaattttgctttggcttggccaaatatcagctagttcattcaaccacatggtcattttggtgaattatttgttctcatctggttgatgagactctgcattgggaacatgtgtgtatatgcctacctagcaatgaatctgtgcatatatgcctgtactgtgtttatagcacatgcaattgctacatgaattcatgtgttaacgctcttctttcctttgcttatatctacagattgtatttctggaaggagagaaatgactaattgtgaaatgtgccgagtttttgctgaccaacttcttggcttctctggttaga

SEQ ID NO: 90589 - DNA, 971 bp, Eucalyptus grandis
  Intron number 2 from transcript Egrandis_v1_0.045440m (loc us Egrandis_v1_0.045440m.g) derived from phytozome v7.0 (c hr-ID scaffold_4; pos 41700325 to 41701295)
gggttacccataataaaattgcaattccgggtgttatttttgaaagatggaaactacttgtatactggaggaggaaaggaagaatgctctaaatcttctcttttccttttctcggcaatatgtgtaattactctctaccattctctctctctctctctctctctcacatgcaatgccatgcgatgtaaacattttatctggacatttccaaggtttttgtttttaattaatcagataaaagttggaacaattaccttgtgattatgagtgattgaatttgttgtagcctctaaatatgcaaatttgttccatctgctactgatagtgattattatgggaagatatgcttttttcatatcttagacttacttttgaatgttcttcggtttttatacagggtagtaggagttcaggcgtcctctttggcatatgcaaagtctatgagattggatacacctgaatatagagccagatataaaatacaacaagaaaagacgagatacacgtggaaagcttttctctttggtggaagggcatggctttgggtttaaattgcgggcggcaattgtagcagaaaaggatgagagagaaagaagaggagagagggagagagagagagggggagagggggagggggagcatgatccagccctcttctatgcagacactgtgacctaacaggtaacaaggcactcactaacatgggatgtgtgttaattggtgaagccggataagataggagaacatatctaattgttatatccagtctctgtccaaatagaatgctcgaatattttcatatcaattctgtctttattctatgatcaaacacagtctatgttctcaatttctgcgtaaaccactgtgttttgggatggacttagcaatcaggaatcatggtgaacatgcattattttaggcatgtctctgacaatgtgtcttcttaaatttctatgtaggacacttttatt

SEQ ID NO: 90590 - DNA, 571 bp, Eucalyptus grandis
  Intron number 1 from transcript Egrandis_v1_0.025748m (loc us Egrandis_v1_0.025760m.g) derived from phytozome v7.0 (c hr-ID scaffold_9; pos 30373564 to 30374134 reverse strand)
ggtcgttcgctttttgggtccacgtttggtcttctgtatgttatcttttttttttcttggggatcgtcggctggggttgcttatgattgcgtgggcgatcgtttcttgatccgacgagcttggttgtgtgccgtgcttgcgtttgcgtttgttttggtacgtgggtgccccattttttttttttaatgggtttaaggcgttttggtgatgaatctttttccgatggcatttgtcgaaggagagcgagccttgcttaatgtccacgaaagaacgccagaaaggttgtccctttcgtgacgagcttgcgggttttcttaagacatcattgcctacgaagaattgttctgttgggtttgtgtctgattatggacttgtttgaataagggtgcgaggattgatgtctttctttatattttgtttcatgggtatgtcagatgggttttgtttcttttatggctcatcgatctgttctggaaattaggagcctttttgtcatgaacttgatgatctgattcgctatggcttattttatgcaggttcaggcatattgtggatttgttcatttgtttag

SEQ ID NO: 90591 - DNA, 969 bp, Eucalyptus grandis
  Intron number 1 from transcript Egrandis_v1_0.029241m (loc us Egrandis_v1_0.028086m.g) derived from phytozome v7.0 (c hr-ID scaffold_4; pos 37513082 to 37514050 reverse strand)
catcaagcgcatcaaagctcctgttcacctggtatgctcggcatcgacccttgttgttaatcgtcagcttgcttgcctctttaggaaggtccttgtgtggaccgtcagcttctgcttcgtctctctcttttgctctgtttttatccgccttttcaatctctttgatggtttctcaaaagaattcgattaatcgaattggcttctttgagtttcgattgtcacaaggaaaagttttgtcagaggttgttctcaaaggctaagtttttttttttggtgaattgagtaagaatttatagttcatggttgtaaggatcttccttttccgagcattctgcatcgcttgtgtagaggtccccaatgatttatatacatagtcttactgctagcttagatatcagcttaagcttttcagtcagactaattcccctgttcgaattggagatttggctctgctttgatttcactcaactcgaagatgagccatcgcctttttctttatgataattaaattgatctttatttgctcaaaacctcaaatgaaagtgaaaaattaccacccactacagggtcaaatcatacaaagtcacaggtgtaaactaatcatactttaagaaactcctcctctgcattggttatctgggttcaaataattcaagatgagtaatcatgtgagtttctttgaatcagttgtattggttcttgtgcttattcagtgaaaaagataaatttctctatgttctcaatcgtttcttccttctctttcggccatttgatggttgtagatatatactatagttaaaaatgatggacaatgcaggacaagaacccatggattttgtcttgaactttgttcaagaatagttttccttacgaagtctgttcttgtgcttttcctcttcatgcttacgaaccaaatactttacccttttgacaggtgtggtctctggtgaggagattcgatcagcctca

SEQ ID NO: 90592 - DNA, 770 bp, Eucalyptus grandis
  Intron number 1 from transcript Egrandis_v1_0.041098m (loc us Egrandis_v1_0.041098m.g) derived from phytozome v7.0 (c hr-ID scaffold_4; pos 15203537 to 15204306 reverse strand)
cattttcacgactgcttcatccgtgtaactcctctctctctctctctcacaaagatacattttctttctatgatatcaacaaatgattttccttatgttttctctcttactttctttggatgatttcttttgtcacttcgtgtacagttaatttcgttgggactgtaaatgggatgtattttctcatagtaatgttgaattgcctttccaaaaatttaatctttaatcgatattctcgctgtcttcttattcatcgtcctttcctacagttagcacggatttctaattattattccacctcataatgttttttcttcttttgataatattaaaaacttgttagctacacatatatatcaagaaaggaaaaaaataatagaagaccccaatttatatttcatacaataaaaaatactagcaaatttgtcctcttttttattaccctaagcattcccaggaggttttttttttttggatcgaaaacggaaaatatattataactttagaagcttacaactagacagtaaagcatcagtatatacaagatctagcaaaatgtcaaaggaattacatcaattgactaggtacaattctctcattaaattatgcacctacatattatatcttagcacatgcgctttatcatccagctcatcaagtagtaagcatccaatgcttgaactacggtactatacatctccagacatttttaacatttttctaataaactaatatttcgtcctcttctgtttaccgcgattagggttgcg

SEQ ID NO: 90593 - DNA, 817 bp, Eucalyptus grandis
  Intron number 4 from transcript Egrandis_v1_0.020606m (loc us Egrandis_v1_0.020606m.g) derived from phytozome v7.0 (c hr-ID scaffold_11; pos 35464697 to 35465513 reverse strand )
gtgtgagttctggatctcctccagcatctttttgaattcgtgttgcttcactttctttataacttaacagtctttttgtggttgctctgcgtttacacattagtatgcatcgtaggttctcagggagctaagttatcacaactcatttcctgttttaatgtttagactatgaagctcagaaattgagtgtcattcctttcttctggttgcttttgggatacaggagggaatcccctactgtgctgttttttttggcttttactcatttgtaacagtttaacttctggaagaggtacttttctatggtagcaatgctgatttttgtgggatgtagcgcccctgttctcgagtcttcattgtttgtcactagacaatgtttcgtaatcaacatatgatgtgctttacatattggataagttgttttttttcatacccaatgggtacaaaatgttaaactcaaagcctgccagaatttccatgtcatgcaagatggctttgtcggtttctttatagcatgaccctctcaaattagtttcccgcttctttttggccccattgctgcagaagaaatggctttatttaaatgactgtatttgtttctgtaatgcgtgtcctcattgagtttcagcatgcagtttttgcattgcatccattggtatttttattgtgcatgcctcgcttatctatggttttggcattttttttacaatatggacatgcgcaaaatggtgtatgagtcttgtatatagtagctttcatccttagcatacttttgatcactttcatgttgtaaaatcacgtgaatcaggttggaggg

SEQ ID NO: 90594 - DNA, 990 bp, Eucalyptus grandis
  Intron number 2 from transcript Egrandis_v1_0.021305m (loc us Egrandis_v1_0.021305m.g) derived from phytozome v7.0 (c hr-ID scaffold_11; pos 13334241 to 13335230 reverse strand )
cgggatttgctacacccatccagagaaattaccaggtactggatagagagtgcctttccggctttatttgccttcttctttcttcttggatatcttgaacctctcactggatttgaaacatagttattaaatcatctgaaaaaatgttaagaattgaattttacactaaacattctctgcgagacgcgcggttcatttgttttgggtttctctctcttgaagcttttccttgttctcttggtccttttcattgcatcaaactaagaacgtagatgggtcatctaataagaaagtaattcaagattgtttactgcatacaagttatttgaaatttcagttttattagacccacagttgctagatttcattgcatgaatggtacaagaatcttcacagagactctctctctctctctctctctctctcacataggaagaggaagatatagaagcaggtatcaaattattgtccctcttcttttcaattattgagccgacggattttaactttaactcctggtacatgtacaatacgtactcaatcgactataattacttttgaaaggaaatctattcaagtgcttgatttatttgcttttatgagatcgtcacttgtgttgcatgtaaattttatctcatccatggccataattccttctctagccaaaagatccatctagttttcatgcatttgttaatgttttagtagtaactcaatcatatttacctcagaccattcctattcattgtctctaggaatatactacatccaaatctaagtaaagtccactggcaatataaagcattgactagtcttccgtttgaattgccaggcagcaattaattttctttatcaacatttttgcgttgcataaaaatatgagatacccgattatgtttatcatgtctactagtatgtacgtgtgattgtccaagttatgtaacctgtatgtatgtttctaatgatgatgaaggcgtgagcaaaaacggc

SEQ ID NO: 90595 - DNA, 874 bp, Eucalyptus grandis
  Intron number 1 from transcript Egrandis_v1_0.015980m (loc us Egrandis_v1_0.015980m.g) derived from phytozome v7.0 (c hr-ID scaffold_9; pos 26171545 to 26172418 reverse strand)
agcacccggtcgatttcgtcgagttcgacgtccaggtgagcctccggtttctgtggtcgtctttgccttgagttcttgatggttgtttgcttcgctgttctgctttcttgttcgcgaaataaggaaagaaaaaatattcttcttttttctcttcttcttttggggtgttcgtgggtttcaccggaggagatttgacctgtctccagatcccgattcggaagtcatttatttgtttaactttttcggtgtttctttgtgttctttgattcgttgtagcgttcgtggttcgtttcaatgcatcgaaacctggcgagcgagcctgcgttcacgtgcgttgtcgggtcgcatcgtggcatcgccgcgtacggccgcccggttttgtccgtttccgcgcgcggggtccctttagagcttgatttatgaaccaggcattgcggctacatgaaaataaataataaaaaatgatataaaaaatgttttgactatccgtttcgcaaaaaataaatagttttgacaaataattgctcgtactgtttaacaatattatcgactagaaatatgttcatggccatttagattatttttagaaacgacgctttcctgatttagatgagcctttgcgattttgtattatttggccatcctacttaattaggcttctttccgggggacttccttttttttttgctctgtttcttttttccacttcggcttgagatttttccttaatttgcgatactgatgaggtgcttttttttttttttttggttggctcgttggttgatccttcaagatgtttggtggtattaatgcctaagaacaacaaaagtaaagccaaaacaaaatcttgggttctttttgtaggtgaccagag

SEQ ID NO: 90596 - DNA, 977 bp, Eucalyptus grandis
  Intron number 1 from transcript Egrandis_v1_0.029375m (loc us Egrandis_v1_0.029375m.g) derived from phytozome v7.0 (c hr-ID scaffold_6; pos 8358088 to 8359064 reverse strand)
caggtccagccggtctcccttccggccaaggaaaggtgcgatcttgcgtcgatttctggtcgattttggggctttctgtgcttgttagtggcttgtcggtgcctgagggagcgaaaggtgcgatttttatgagaaattgttttctatcggttcgccctttagggagttattaatgggtttgtgctcgtgaggtggagaagaagggtaaagcaggctctggttttgttctttgcgggtattttcgtgtgagggctaatgggtctgtctggggttggtttgtggcaggtggctgagaagattggggataaagataaagagtgttgggtactttgaattttgggagatggaaaagggaaaataggctcgaggatggttgattaaggttactgtgggtgtaatagaacgaagttttcggttcatgttgttgagatgggttatgctattatcaagacggtgctcggcattaacgcttcaggtccaaaaagatatgaacagtcggaaatgtctgttgaaatgaaagtttgttttgacaagaggaattggttctgggacgaacgttttgctagatggctgcataagatggcagagtgtacgtgttagttgttgaagcagtgggtaattgtttccattggccatcaattcctggcctaacattacacagcattttaaatgatttttctggcagagtaccttctcggggttattctttttactggtttgagaagggcctgctagtgctatattcatataactgctgaggttgaggcattagaagttactttgtccaactcgtttctatctgtgttgggtctatttgtccgcttgcttctttttgttgtgcttcatcaacgtttctctttgttgacatatataaatgctttatcaatcaagttgtggtagagctaaatgcttcgatgatacatttggcttttataattgcagcgctccggctaaaggcaaaagaagaggtggccctg

SEQ ID NO: 90597 - DNA, 768 bp, Eucalyptus grandis
  Intron number 1 from transcript Egrandis_v1_0.010589m (loc us Egrandis_v1_0.010557m.g) derived from phytozome v7.0 (c hr-ID scaffold_9; pos 25252686 to 25253453 reverse strand)
tgcgagcgacaggcttttcctcgacgcttctcgaggtaaattgaactgtaattcgacgggaacgccggagattccttcgtgggttcgcctgaatccggggagtcgttgtccggcgtcgatcccgtccttcgatttcgtacgcgcgagaagaagatggtcgtgcggttaatgggcgatttggtattgatgagaaaggggtctgggatggggtgttttggcatgttgggcttaagactagatttgaccgaaggcatgctctcgaactttgtcccgaagtttgcttctttatggaaaatcgtggggattacgctccctacttctttggatttattcacctactgtacctgatttcgcatttctcagttagcttgtttgtttcttttttctgttcggttgttctctgtagttctctgcgtttctgttgacttctgggcacccaagacggagggaaattagttcagtctgagtgcaaagcatgcttttttctctcctttagttttaagtagcgggacatgggtgcattcttgtagttgtacatttcgttggtttcatatcgtcactcctcagtcgtctgattaatcgtatcgtgatgaacccatcttcattttgaagtgataataataccttatgaatggtaggtggagttcttgtagtggttgttactttgtcataaacgtaatttctttagtgagaagagtttctttgagattggaactcttgcttttttcttaacatctgtaatttttatgagcaggtctgcatatctcg

SEQ ID NO: 90598 - DNA, 658 bp, Eucalyptus grandis
  Intron number 2 from transcript Egrandis_v1_0.020692m (loc us Egrandis_v1_0.020692m.g) derived from phytozome v7.0 (c hr-ID scaffold_9; pos 33886411 to 33887068 reverse strand)
gactataccatcacattttgccctaattcaccaaggtatatcatcatctctcaataatactttggttctctagatgactattggatttactaatatagttattcaccttagtgtaatctattcggttctgatttaatactggggcattatatggatacattcagaacaacaacaaaaaaattacagattcgtataggcggcttatgtttgtatcttttctgacatcatgcctggactttagatgttcttttttcagtgtcaaatgacatgtacaaaaacaaaagacagcaaatccgctttgtcaccagctcagcaattagagaacgatttgcttccataatagtctatatcttcgaaaagaacgcaccccttagcacaaacaccgaattgataattactaaaatggaataattcgtgggctcgagattattcccgtgagatggcttcggtggtcatgaataaacttgtgaggtcattacgcattctaatttggaaataggtgatcgtaacacgctgaggttctgttgataccagctgaaaagtcatagtaggcttgcgaatgctatattctgcagaagtcgttgcaattgacagttgattcaaaaactctgtttcttctgcagcatcaaatctgcaacgggctcctctcccaaaagca

SEQ ID NO: 90599 - DNA, 487 bp, Eucalyptus grandis
  Intron number 3 from transcript Egrandis_v1_0.008438m (loc us Egrandis_v1_0.006921m.g) derived from phytozome v7.0 (c hr-ID scaffold_9; pos 20639815 to 20640301)
atcaataacctggaccagccctttcttttgacgttagaactgaagtttacagtgaagatattacctttgagatttttgctgcataatgctgcattagtttcttaacttggaagtcgagcaaaaaaaaaattgtccattttttttttgcaaatcccgctctcatttctgtcttggaagtacattgtttatttgcatggctaggtgttactggattgtggattgtgttctcaatgcttccccaagagattgtgttcaaccaaagaaaaatcaggcctaactaaattatcggacatggcctgggaaacatactagttgcttagtagtacaaacatatttgactctagaaggacatggacactgtagatgtggacatgctctgcttaatttgtcattaacaaactgaaagatgttactgcaatttcgtctttcataatcagcactgtactgaccactaacttgtagttgtttgctgtggtcggagtcagga

SEQ ID NO: 90600 - DNA, 921 bp, Eucalyptus grandis
  Intron number 1 from transcript Egrandis_v1_0.016380m (loc us Egrandis_v1_0.016380m.g) derived from phytozome v7.0 (c hr-ID scaffold_6; pos 5524586 to 5525506)
aaaaggtacgtgctttgtggggaagtgagtagttgcgagtgagctgatggtgtggtttggtgctggcttttggctcgaattgtgttttatcttgttcattctcgttggatgtaaggctcaggacgtttgcagttgggtaaaatgattattcagttgggttttgagaccaatgagcttgcagctctttagcacttctggtcaagtaatgggtcaatgctgaagttagttgaaattctaggcgttctgcttttcttttttcttttttcaaaatggaaaaaattatgttttttgagttcgataattctcaagttacacgaagcagttaaaggttctgcttacatccgatatgcaggtagattgaaggtatttaggttttccttttttgaggggcatatatgcttgttttgctggaaggaccataaatgtgcagtgttccgaaatgggattgttttgggccctctgtttagcagtttttttcttcttcttttttacatttgaaggttctaagttttgtgcttaggaaagagatgagaaagcatgcatttgtagtgagtatgcattatatggtattgtatgccactagctttttttgatagttattgatgtggatcgtaaaaagcacctagagaacttgtgtttttatctttttccagcatttcgacattgttaattgtgagtcagatgagatacaactcttggcaaacaatatcgtttgaacgataatttctgaatgttatttgagaggctttgcctttgtaatttgtcagcttattcttttacaacaatctgcaactatcattcttgtcactgcatttagaaacctattctgtgcatgttacccatcatgcaatggatatccatgaattttttgcaatttgtttgccaggtgcaggcagtgcttttgcttctaggaggacgtga

SEQ ID NO: 90601 - DNA, 467 bp, Eucalyptus grandis
  Intron number 1 from transcript Egrandis_v1_0.020433m (loc us Egrandis_v1_0.012895m.g) derived from phytozome v7.0 (c hr-ID scaffold_6; pos 34610603 to 34611069 reverse strand)
ccgagtggggctgcgatctccccttcttgttcaaggtaggattttttggtcactccggcattgcctggtgagggttgaaaagattcaattttgggtctttttttccactttcttgtgggagtgtcggcgattgggtgtggttggttctgtgcttctcataaaaattcgcgctttcaggcacgtgtggtggtgggtcttttttcttttttctttttctatcgtcctcttttttggcagaatttgtgatccatcgtggttggagatccggagattgaactgcagtttatattggtcttctggtctggtcttctttttcgtgaaatgcgattggattttcaattgcacttgtcaatcaaagcgaagaaagttcagttttttttttttattattattagcctcctttgatatatggtgtttctgggcgggcgttaggtgctttcgatcgcaaaaccattgtcgatacaggc

SEQ ID NO: 90602 - DNA, 926 bp, Eucalyptus grandis
  Intron number 1 from transcript Egrandis_v1_0.021822m (loc us Egrandis_v1_0.021882m.g) derived from phytozome v7.0 (c hr-ID scaffold_6; pos 20357104 to 20358029)
tgttcccatcttcgtgatcgattccagaggttggtttcgatttagctttacaattgttatatagatttcctttttgttggaaacgattggagattggtcattacaaaatgttgactgggtggcaatggaatttgtacttgttgcttggggtgattggcttattctgagggtagaattcggattgaatgcggaagtgaagcagggtccttgaattggaagatatatgcttactcgtacatatgttgagcatggtctacatttggcatgctgaatgtttaggaaagaagtgcagtttcatgcctagtagaacatgccttgctctgctatcaattggattggcattgaaatagtaaaaatgtaaaatggtaaaaatcccattttctaatttttgccgagctgaatatggattgttgagtttgaattgaaaatgtaaagcttccgtgaaaaaagtagagaaacaaacatgttataaattttccatctagaatctagttgtgaatgagcattcagcttgtaggtggatgattaaggcatcaccttctctgtttctactggcttattctcatcttctatctagccctgaaaaaagagggactttggtcacttgatcttcctcttacttgttcgaaatgcactatgtttactgcctatccccatgttctctgatgtttgaaatgcatatttaaccatttgtcaaaactgattatttgaagtgaatcctcttaagtgaatgctagttggagcagatggatgctagaccttgtacttggctcacttcttaaatagctcagcagatcaattagggacctaagttagctttctgagaatttttcatccatacgcggggggtgatctttatgttttccatctactgaaatattttgtttgcagaagggcctgtgaaattgcattttgctccgagttaa

SEQ ID NO: 90603 - DNA, 484 bp, Eucalyptus grandis
  Intron number 2 from transcript Egrandis_v1_0.007446m (loc us Egrandis_v1_0.007446m.g) derived from phytozome v7.0 (c hr-ID scaffold_9; pos 25420717 to 25421200)
cattgactttgggctctctgttttctttaaaccaggtaagaagttcacgtgttacattccattggcgtctaagcatttaccagtgggttttttctttttctttttttttttttttttttttttttgagtaccatctgctaagttttgattttcctctctattttcagcagtgcaatcagtcaaaataaaagctttagtttgttgccatcagaattatatccacaccacactttttttcccaacagttgacgttctggctattcttcatgcatgtgcataaaatggcttttagggcagagccattgtgagttgaaaagttctatatttctgctttcaggataaattagtctatacttgctgagctgagttaaattttcttttgtcatatttcttccatttgagatcttcccatgtacaatgtaattgtctgggcattgtagtgatttatagtttctgctttgtgatccaggtcagatatttactg

SEQ ID NO: 90604 - DNA, 601 bp, Eucalyptus grandis
  Intron number 2 from transcript Egrandis_v1_0.037909m (loc us Egrandis_v1_0.037909m.g) derived from phytozome v7.0 (c hr-ID scaffold_11; pos 11218619 to 11219219 reverse strand )
gggtaaaaatctttcatattaagagtcacttgcaggtactgcaacataatgacttttcatctattagctgaaaatcaatgcccatacttaacattttgtcacagaaattcaaaccaaaactttgtttgtctattgcattaaagaaatgtcgcatcgcgaagtgcattgcagaatctaaagaaggttgttctttgcatccactacgataagcacaaatgaacattccttgcaagagacaggaactctgttattattgaagacaaatccaagtgtaaccagtctttgtttggcaataggacagcttattttatgtgcatgaatcatattgtacatgcaggaaaatcagagaagaacaattttgacacaaaaccagtgcacgacctcaaaatgtaagctttgacttgtttgttgtttattaactcagtgtacagacttaagaagagcacaaaataagcactatttatgagaggattgcatccttcaaatgtccaccatctgccttaaagtaggaattcatgatatgaggaaactaagcccattgaatatttgttggcaactgaggcaagctgattgcagaagcttattatagaatcttgcagat

SEQ ID NO: 90605 - DNA, 762 bp, Eucalyptus grandis
  Intron number 1 from transcript Egrandis_v1_0.026989m (loc us Egrandis_v1_0.026989m.g) derived from phytozome v7.0 (c hr-ID scaffold_9; pos 25451986 to 25452747)
tgcgacatctccgtgctcttccatattcggtgcgattccctccgtccttgctttctgctattttcgctctgctctcttttcttttccttatttttgctgcgacttttcagtccattttttcctctttttttggcgttcgaaaatatttttcttttgggccttttctgacgtggcttttcgtgggaggatgcgatctttttaaaatctttttttccttttttttcttcctactttttcagttttcagcgcgacagttgtcttttcattttgtttttatcttgccggcaagtttgatcgtttgttgggaaattatgtgtgtttagaagagtggattgtttgatgcgagaaaattagacttccaattaatcttcgagtattaaatgtttgtatttttccgcttctgaaaagtcgaaggcaattttttcatcttccattcaaattttatatgaaataataaagtaacataaaattatacattttgttgatttgtatacccttgaaaacatttgagttatcgtccctatttttatgaaaattcgaatttgacattcctctatttaaattgaataaaaacatcttgaccccgcgaaatacccctttttctaagctaactttttaggaggagcagacaatacgcctctgccaatagaaaataataatatctcctgatctcgatccgcgataaggcatcttgcgatatatgtaaaaataacagaaataatttaatttaattaaatttaaatgggattttggggcaggggc

SEQ ID NO: 90606 - DNA, 532 bp, Eucalyptus grandis
  Intron number 1 from transcript Egrandis_v1_0.022870m (loc us Egrandis_v1_0.022870m.g) derived from phytozome v7.0 (c hr-ID scaffold_4; pos 15502817 to 15503348 reverse strand)
tctccaaaaacgtcgatcagttcaatcaggttcgagaagagatcaagatgtttttcttttcttgtttttctcttctcgaaaacggaaagtgtttctttacatgtttcaaactggtgaactatgcgccaaatcagtgttctattgacaatgtgtcttttcgagtctataattcatcctggtttcaatgcactttgtaatgctttgcctctcttttgacccatcctggtttttctgtctctgcaatttttctcagggggatgtgttcttttctgtcttgaattcttgaactttatgtttcctgtaagccattaagatttgcacattgcttgtcagggaattgtaagctcacaggagcatttgattctgggtattattcttggatagcagctaaaagttcacactgcataaaagttaaataggtgtttgtggattctatgttttgggtagtgacaaagtacaaattcttgttttcttcctcagacagtaggttatagttctggttgttttttacaggatttgagaaatctgacgg

SEQ ID NO: 90607 - DNA, 601 bp, Eucalyptus grandis
  Intron number 1 from transcript Egrandis_v1_0.014841m (loc us Egrandis_v1_0.014841m.g) derived from phytozome v7.0 (c hr-ID scaffold_9; pos 15994093 to 15994693)
gacccggaagtctaccctcgccccactggtatgtaaccatgttgtaatcttttttgttttttttcccttttaattattgtatgtattattattttttaattaattgttaattatgatcattaaaacattggtttttaggatgaattatttgaatggctgtcatatgtactgtcacatgtctaggaagcaattactagtttctgctagctttggcttgcctacgtgtctactgtcttagcaacagaagatggggcttatttcttttgtagtttccatccaatgaagtttctaaatttagcaatgcctagttcttttcaattacatgtttagctgaattataatgtggccaaagtacaagcattgattcactgaaatggaaggtttctctctcttcctgtgtagcttgaaattgagctaccaaagtagcttgcatcttccaattgatgtgtcaattgtggggttgattgattttttcttttctttacctggaaaaaaaatcgggtcgagtcgacccgtccatgtgcatttgagatttttttttttttttttgaatgattttggttatgattgaacatatttaggggaagtatatttgtgtggg

SEQ ID NO: 90608 - DNA, 715 bp, Eucalyptus grandis
  Intron number 1 from transcript Egrandis_v1_0.016096m (loc us Egrandis_v1_0.016096m.g) derived from phytozome v7.0 (c hr-ID scaffold_9; pos 35517310 to 35518024)
ggcttgtcttgaaagggattagcgtgtaagcaaaggttagaccttctttgatatgacttttctgatctttcattttgttttcatttgatgggttgtgctgcgcaagcatcgctgtttcgattgtcgagattttgccccaattcataggcatttcggttttctcatcttcgagttgctacgacttgatttttgctaaatttcgaatttttctcctagcaaattcagaatcgttgctgggtttctcttgcatttcaaactcttgcggctttttggtttccttttttgcgttatttctttttaaattgagatgagggatacggatgagtagaagaatcattgaccttgtcgagctgaatctacagtaccatatgagtatggaagcgtgcattctagcttttattgatgagtagaagactcgttgacatcgtctttgatttgtcaagatcctgccttaaaaactaatgcttattattcttcctaatgttggggatgcttcgactagattcttttggaatttggaatctgaatcttctatgatttaggatgcaaattaataactttcttgctgtatcttgaagttcttgtactttttggtggtgctgaagttggggaagaaaattgagtatgtttatttagctgagtttgcagtctaccaattgaaagttctttcttttttccagtttcttgtgctattccttggtagtttttgttgggt

SEQ ID NO: 90609 - DNA, 760 bp, Eucalyptus grandis
  Intron number 2 from transcript Egrandis_v1_0.009509m (loc us Egrandis_v1_0.009509m.g) derived from phytozome v7.0 (c hr-ID scaffold_4; pos 1698764 to 1699523)
cgtcaagggtagtaggcgaaattgctccataaccggtacttttatcagtaattctagttttatttatgcttctgtcttaattggtgctgtcttcagcaataggagcgagcatagtccgggtggacggttccaatggaaccgaaaaattgctcactaggactgctactgggtttcacccgttggtttcatggatctggttccgggcgggtccatggaaccagttccatcaagcaaaaaaacaaataactttcctattcttaattgcaagatcagtacaaagattggattcatattgaaagttaagagttgacgtcgtgagttgatggacgttgaggtcgagagtcgaggccatgagtgagagagatagaaagacaactcataccaggtgagagtgagacaaggcgaacactcaattagtgggtattgagtttcagattatggattttagggtttgctttgttcttaaagttttttggtcggaaattttttgtagaaattaaatatatttttatttattattggtgtggtctgagtgggtgtatgggcagttccacacttagaactgggaaccggaccggttttgagcgatccgggctattcctggttcttttgcatgccattattcagcaatttgttattttgttcattttctgctgtttgaacgggctccagttagttcattcaggattctcataattttggcctttaaatgcttgcaatgcattttgatgttttaataggatcgaaaataagttgttcc

SEQ ID NO: 90610 - DNA, 884 bp, Eucalyptus grandis
  Intron number 1 from transcript Egrandis_v1_0.022002m (loc us Egrandis_v1_0.022002m.g) derived from phytozome v7.0 (c hr-ID scaffold_11; pos 40510479 to 40511362 reverse strand )
acagcttctggatcatcctcgcttaccttttcgtctctctctctctccccctctccctctcctgttcgtgtttttagagtttctttttttacgtttggatggagttttagcgacaagatagagaagcagagcgtgtctctgctttcttggtttcttgttgcttctcctgaagaattcatctgaaaaagttttaactttttagtatgtaattcatcaaagcactcatgaccttgatgatcatgaagtgagataagataatgacttttcataaagtttcagcttcccctgttttcttggttttctccagctccagctaatgtcttgccaacattagctggaaactggagagaatgttccttccttttcttacctttctcgattcaaattcaaatttcagaaaagttatcccctctatttgttcgcctttagtcttcagatgatcgtactcatagcttttccagagaaagagatgcagacacgttgtctggttttgatttccaggaattttcagcaatgaatatgtcctcccgtaattaatccaccaacttctttcaagacttcccggattcctctttaggaagtccccatgaattttcaggacaacctgcttcttacaggattcctctaaccttttaccagatgacaaaaggtcaccgtatgcaaagatgaaagaatgctttctacaacatgttgttttgattaaatgttacgctactcgtcgattgccatagcatctggcctcctttcttgacaagaatacaggctcttttggtcgttttaggcgcaagttcttggccgtcctttatttacattaatcctttggttgactttaattattgaatcctgtaggtctcggtcgctggctacacggctggtcaacgcgc

SEQ ID NO: 90611 - DNA, 723 bp, Eucalyptus grandis
  Intron number 3 from transcript Egrandis_v1_0.017633m (loc us Egrandis_v1_0.017633m.g) derived from phytozome v7.0 (c hr-ID scaffold_9; pos 31869874 to 31870596 reverse strand)
ctgtgcagcaggtaagcttttgtcagatatatgacttttacatcagaatgatcttttgtttgggccaatgatcttttctttgggccagcacaacaaagaaaattcataatacattatcataacaattggtgcacaacttgtgaaatagcaccgaccatgaaattggaaagtattcaccaactaacggacgccaacctcttgcttcagcattgtccattgcttagtttgtctgtaaaagagcgatttaaaaagaaaataaaatgtcatttctgaaaaattcagacagaaaccaaacaaagctgaagaaaagtgaatgaaactacatattttggtttatttcagtttgaaatgttcagaccaaatttagattatttagtttaaaaattcaaaaacaatcatctgtgaagggtgaaatccagtttaaaaatgcttaatatgtaagtagaaaagtctagttgtgcaaatggtaattaatgttttaacagtcataggttttgctcatagaaataataattatccatatcagtttatctgaaacttttagtgaaagaggataaagaaaataaaagtggttacccttgttttgaactttctttttcctgtaatgccatgatattggtacagcgtatatactgctttataaatgttccattctctagtaattaattccaatgggactctcattaaacttatagcatgctctgaacaggcaatcaggggaat

SEQ ID NO: 90612 - DNA, 910 bp, Eucalyptus grandis
  Intron number 1 from transcript Egrandis_v1_0.031935m (loc us Egrandis_v1_0.031935m.g) derived from phytozome v7.0 (c hr-ID scaffold_9; pos 29075490 to 29076399)
aagaaaccttactttgacgccattagttaccagaggtacacggtgtgcttgatcacgtaaaatcaagacaaccagatgatttggtcactcaaaaacaaaacttaaaaggacttaagttgcacgacatcataaagttagatttaattacccaaagtgaaagttatacaaccaaatctgtactttaacctttatttatctctgacaaaaaaaaaaaaaaacacccctttaattagggtaaaggaaacctatttggaaaggagaaacgaacgatggagaacgacggatgaccatttctcggtgtatcttactgacttccatgacttggttggttgtcactgactggagtgctgacagagagacatcaattgtaagtgggctccatgaaatttggaataatttaacctcgtcagtccttctctccctcttttattttattttcttttatcgacagccttccacgaaattcaccaataatgcaacaaataaacagtccgccaataaactttacagattttagtacaccaatctttcgctcgtaagtaatagcttcgaaagtcgtaaactttcaagaactatgtaccttgatattgaagtattttcttgcaactataattacttcatttgaaaagaggacacataaattaaagtacgggttatctcttcgaattctatttttcttttccacatttgcaagcaaaatagatgtacacgcttctttttgttcgcagtaggtggtaggccgcactcttttagctcgtatatcgccaattacaatctgcctcaccaaaagagtcaatgaaatgagagtttagttcgatagtcacatgcaaattgcccttctcttgaatttgtattacttagaatagccagaccagggagggctaaggacggcttcgagcaggcagcagct

SEQ ID NO: 90613 - DNA, 873 bp, Eucalyptus grandis
  Intron number 1 from transcript Egrandis_v1_0.015454m (loc us Egrandis_v1_0.015454m.g) derived from phytozome v7.0 (c hr-ID scaffold_9; pos 29937911 to 29938783)
atcctctgctgcagcctcaacagctcgtcaaccaggttcgggtcgatgccttggcaactctgtggaagtttttccggtggtgcgatgacgttgttgctttctgggtttcctaatgtgcagtggaggcgcctgggttgcgtgctgtctgatgtggacttgtcttgtatgtcgtgtagttgagttgtattatgaaaatgcatgctttaattggcggtggagatgtttccccacatcatttctcctttttttttttctttttttgatgatttggaagaagcaatgcatttgtcttacttgggttctgttgagaagaagaagaagaagaagaagaaaaagtacttgaatctgcacataatcaattctcatcaatggttgctgtaattgtgggatttcgttgcgtcattaatgagttcggtgtcatagaagcgtaatggtgtcgaactactttttttgtctctatccagcttcaagctgccttccatactgaatgtgattgaatttatgatcaatccatattgggatggttgaggtattgaattttgaagcttggtgttttgagtcatgcgacggcaaatgttctggctttagagaggctgtttgtgacttccgttccgcagttggattccaacagtagcccttgagaggaccgtcttgaatattaagtttgagtattccattttttcttcatcgggtacctttttgtgagctgtagtcttgttgcatgaattaatgaacttgaaagagtgatttttcatttatcttgtgaatttttctgtaagaagatcagagcaaagggctatattttctgtcatttgtaatttgttgtgagaatgattcctgacaagtgctttgtttaacaggaaataaagatcg

SEQ ID NO: 90614 - DNA, 845 bp, Eucalyptus grandis
  Intron number 1 from transcript Egrandis_v1_0.023255m (loc us Egrandis_v1_0.023255m.g) derived from phytozome v7.0 (c hr-ID scaffold_4; pos 31984304 to 31985148)
acgtcgtcgagaaggtccgggtcttgccgaggaaggtggggcctttcttatttggcttcttggttgccgaggaagtgtgtttgtgttaaatgcgcgaggaatttaattgaaattcggttgaaattcgttctctttgtttcttttggctccgctgttagtggggaaatgcggtctggagagtgtggagatttaagtgggattcagtttcttgatttcagattaagaattagcaaggttagcgaagaatgtagttgtttgttcttcttaggatgatcgcaagtggaagtcttgatgcttattgagaaatttttgggcatctataattataagcttagtttgacattgatggtggtaggaaaagggaaaaagaaggtgatgattctctgatgttctatcctgttcagaatgacctcaactaattagagtcctcttgactgaatgcggaatcagcaatcacctttatattgacgacccatttcatgttttcatgacaatcaaggtttttctgctattttgtggggtttgaattctgcagttggagctcaaattgcaattctctgactaaatactaagttatttagtgagttatggtaacagaagtggcctattcaatgtcaacatttgcggtatccatatgattttcaatatactaactaatttttttaagaggccaacgggttcattttctctcttttggtgtgttatcgccagttttactggtggattgcattacattggcaattgtttatgatgttagaaaatcaataactaggagcttatttgaccaaatctctaaattccttctttttcctcattgtgtcagcttcatctgcactcaggtacgg

SEQ ID NO: 90615 - DNA, 918 bp, Eucalyptus grandis
  Intron number 1 from transcript Egrandis_v1_0.008445m (loc us Egrandis_v1_0.008445m.g) derived from phytozome v7.0 (c hr-ID scaffold_9; pos 24545089 to 24546006 reverse strand)
tccttttcatctacttccagcccgacgacgtcaaggttcgttcgttcgctccgtcaccattagagacgccggttttgaatttcacggcggacttttctcgatcgctttagttggacggatatcgaactgcatttcctagccggcgacgtgcttgcccgccgcttgatattctcttatcggccgtccgtctttttctttttttctctctacgttttggtggagttctagacttgtttgtttcgttttagctgctggagacggttcaggtgctcatctgtcgttacggggaatatctgtgcctgagttataccaaagtcggcgagtccgaaattttgttccgagtttgtttcccttttttgttgttggaaaccatggatgaaatttgaactacagagtgttgttatgtggcctcttttgatttggattgtatattgacgcgtagcttcattcttgcagaattggccccagtgccaaattgaaaccaacgagttgtagtttatttgatgtggaatattttaggttgcttggaccgatagctatattatgataatatgctaatgcatggtttgaggttaatgtgtcctagacatcgatggatgctggagagcaattaatggaatcgggatgtttagtaaaacttttttctttttggggtcatggttaaaatttgaggttattgcacacggaccatgctctctgaacgatcaggttgcatgaaaaggttagtcttcaccctaagaagtagaggtgatccgcagttgaagaggttctgcatgctacaatatgtactttttggtgataaaatggaacacgattaattgattgagaaattttgcaagttcaattttgttgatctttgtgtgctacgtattgtcattttcaggatcccatcgtccggccactgatcgagcaagatac

SEQ ID NO: 90616 - DNA, 439 bp, Eucalyptus grandis
  Intron number 1 from transcript Egrandis_v1_0.012440m (loc us Egrandis_v1_0.006716m.g) derived from phytozome v7.0 (c hr-ID scaffold_6; pos 24982355 to 24982793 reverse strand)
cttctccgttaggaggagagggattctcactttaggttcggctttcttcgttttctcatgttctcatattctcatattttggcggtgcttgtttgttgttttagttttttaagctgttgtttaaatctgttgttaaactattgccttcaatgtctgtattctggagctctagatacgttgatgattggctttgagttccagtgtttggagttctatccggtctggcattatggtttctgttgagttgttctagggaatctgttctttgggaagttgtttagtgggcttatgctagttattcgatcaaaattattgcttcctttagtgtctttaggtggtttttgggggagaagttgagctggttcagtaggtaactctacttgggagcaaagagctgctttttgattgagatttcgaatttctaggttatacttggagc

SEQ ID NO: 90617 - DNA, 615 bp, Eucalyptus grandis
  Intron number 2 from transcript Egrandis_v1_0.027603m (loc us Egrandis_v1_0.027562m.g) derived from phytozome v7.0 (c hr-ID scaffold_6; pos 17935767 to 17936381)
ggcaaaagggcactgagagggctttcactgggtacgttcgattcttgggaatgtttcttgtttctctcgtgcgtttcggatcatatgattctctaaatccttagagagtctcccagtttgtcagattttccagcccattttctggtccgttgtgcatagaaatgggtgggtttttggataagaatgtgtttgttttctcgagtagaatacaagtttgagcaattaccacgtttccgaattgttttcttgcctgccggagggcagaaacttgggctagagggcgagatgagaaagttttgcaagtgcctttctcggggagagaaaggagaatttactggaaattttctatgttaaattatgtacttgcaaaaaatttaatgaagtaccgcccccggttccccaccaaatttgagttagagggcaagatgagaaagttttggaactttgcttatgagttgaaccctagctaatgtgctttattattatgtttcaagttgtctagtatggtgcaacaaatagtgttatctgcttacctgtggtaattctctccgttattctggttttatgtgccttcagggagtattggaacaccaagacccccggaacttatcattg

SEQ ID NO: 90618 - DNA, 854 bp, Eucalyptus grandis
  Intron number 1 from transcript Egrandis_v1_0.045310m (loc us Egrandis_v1_0.045310m.g) derived from phytozome v7.0 (c hr-ID scaffold_9; pos 15238014 to 15238867)
gtaatgataattgacatcaaaccccgtctgaaactcatatataagtgcgatatatactttataaaaccaattaaagttcatgactgtcgaaaagaaatcgagggaggaagccgaccaccttgaaagctctctttcacataggttcaattacattatcagatttgacggatgcaagttattatgtgatcaatctaaccgaggcgttttttaaatattttctcaaactcatgtcaacttcttttaagttacttgagtttgaggggaatgataaagatgattatgatatttcctttggttctttattctctcaggattatgagtattttttcttgattgttcatagccatgattgattataattgatttataattatctttttaattaagatagtcatttaataaaacctataaataagctcatgatctactacttttacatacagaatttacacaatactctccctttcgcataatttcttatctcttattataacttgtacatttacattatttctatgtcaccgattaccaagtcaaaagaaaaagaaacgacaaccgtatattgtcgttcgtcaaccctttcggtaattattgcctttttctatgcggggttctatgcatttttcatttctatttcgcgtcctccagactgagacgttcatattctggagagcgccagcaaatcggcagttcagaaaccatttaaacacgaaaaccgaaaaaagaaagtcatttatcatattgccatgcctgtctcttaggcacgtccaaacctgctcctaaagcttgaagagcaaaggagaagcgatcaatctcaaggggatcgcggaagaggcgcacaacgttcgggtcct

SEQ ID NO: 90619 - DNA, 220 bp, Eucalyptus grandis
  Intron number 1 from transcript Egrandis_v1_0.042520m (loc us Egrandis_v1_0.042520m.g) derived from phytozome v7.0 (c hr-ID scaffold_9; pos 23717109 to 23717328)
tggttgtccagcagttagaatacatctagttgggcatcataagtgggaaataacaaaagttgtactcaatcataatcattttacgactcctctaagtgctatattctttacattacacaggagtcaatactcaaaaacaaaaagaaaaatcgagttgcattgtgatgcagggattagaacaaataaattgtttcaagcattggttgttgaagaaggaggc

SEQ ID NO: 90620 - DNA, 718 bp, Eucalyptus grandis
  Intron number 2 from transcript Egrandis_v1_0.021022m (loc us Egrandis_v1_0.021022m.g) derived from phytozome v7.0 (c hr-ID scaffold_9; pos 25147492 to 25148209)
actcgtcgcccaaggtacatagaccctttttaatcaacacatggaattgaattaatatgctccctgcatgtatgttgccaaggaaaattttgaaatgtacatgttattttcaccaatatcaatcttgtaacgcttgcttatcgacaaccccgtgaaaatcaattcgaagaaactgaagaataagagagaatgagatggcttgaaaaaaatactgtagtttctgttccctagactttcctggaaattgcaactaggctggtctttggagctttgctgcatgccaggaagctaaagttttaattaacaagaccaggaccacttagagaaagctggtactttccaatcctgaagttgtagagaagtttcctggaaattagttgacggttttgatacttattgtgagaaataaaacttgattgactggccactaagtttttttttttaaaaaaacttaggtcccgttgatttatgagctgactttgacttgcaaaataacccccccccccccccaaaaaaaaaaaaaggaccatcgacttgattcgcctgcgatgaaatattttacctggcaatgagcctaacccgtaaatcctaagtcctaaaccaatcgaagaatagaatccggtaaaattgtaacgaaaagaagggtcaagacacagtctgatgtcgaaaacagaggacgcaattctcacttgtctctccattgaaaatgttgcaggaa

SEQ ID NO: 90621 - DNA, 365 bp, Eucalyptus grandis
  Intron number 1 from transcript Egrandis_v1_0.051368m (loc us Egrandis_v1_0.051368m.g) derived from phytozome v7.0 (c hr-ID scaffold_9; pos 27928542 to 27928906 reverse strand)
ttggcttctttagggacgccgactcttcgccacctgtaagacatcatattatgtgaaaaatatttttttatatatataatttcgtccattgttcttgactacaaaagtatgcttaatgcgaatctattatgatcttgaatttctcatttcctattccatcaattgtgttagggtcaattgtgaaaagcgattttttacagatatataaagacttaattaccacaagacattttcgagtattatcactctgagtagcttcttagcttttgattacttttctttattgaaatgttttttcggcgttcttttctttcttccgtgttcattaagattgtgccgggttacgacgtggccggtgtggtggt

SEQ ID NO: 90622 - DNA, 300 bp, Eucalyptus grandis
  Intron number 1 from transcript Egrandis_v1_0.042186m (loc us Egrandis_v1_0.042186m.g) derived from phytozome v7.0 (c hr-ID scaffold_9; pos 12070613 to 12070912)
tttttgctggtattctcaaaatggaactaaagaaaacaaaaaaaaaaattgggggggggggggggtcaaactaactttcttgaataacaaacttctttaaatttaaattaagaaagttaaaataataattaaataaattaaatataaataatattgaaattgcaagtattctcttgactttttgggctatcgttcaagcgtgcgactaaattcttcattggtatgaagtcaaatgcattctttctttttgatagttggttggcagggtcaggacctttctcactgggtgagcacatccaa

SEQ ID NO: 90623 - DNA, 635 bp, Eucalyptus grandis
  Intron number 1 from transcript Egrandis_v1_0.009305m (loc us Egrandis_v1_0.009305m.g) derived from phytozome v7.0 (c hr-ID scaffold_4; pos 3433606 to 3434240 reverse strand)
aggtaggaattttacggtatcaaggacctattcgactctccgacgctcacctaatatttctctggttgatgaacaatcttgattagctggttcttttgcacatcaacagagtcccatatgttgtccaaaaagcttgcatttggtagctagttgcttaaccttaacatgtgagaaagcataagactgaaattgttcactagggtattgactctcgttttgtttattctttttcaactgatttctcttggatgaagcttggtgctagtggatcctcgtgtagtattcctcattgccactacattctgtctaatgtttttttggtaaagacattctgtctaatgttaaactttgtcttttgataaaagcaatgaaactaatggaaaacatccttctttgcacatgtgagtttttcaacttccgtgggttccaagtttagccctctgagtaaccaaatcagccacagtttatagttaacttttcacttccacgagtctgtttctactgatgccatgatagttttcattatctgtcatactgtaaatcttcagaacaccagtctgtaatgctattttacattggctggcaaactgaagtctaatttgctttttaataatccacacttttttgtttggcag

SEQ ID NO: 90624 - DNA, 888 bp, Eucalyptus grandis
  Intron number 1 from transcript Egrandis_v1_0.042892m (loc us Egrandis_v1_0.042892m.g) derived from phytozome v7.0 (c hr-ID scaffold_759; pos 13583 to 14470 reverse strand)
agcttgttttggggtcttgcaccctcataaaccaggtacgtcatactcatcattttccgaaaagctcttgctgagattaaatttctgctcgtcttgaaacagaaatgccatgtgaagaacaaggacatcaggaagttcctggatggtctttgattgtttccaaaattcatttggtgctttgaacactttccttgagtagcttttctctgttttcagatgataagaaatggtatagtttttctttgtgttgcttattgtaccgcattgcttattgatttcgttggtctgttgattgaagtatttattctcgagccggggtattgagatttctgtctgtggttagaatgtagttcaaaagttggaatcttgcggtgtctgttggaatgcatggatggaaattcgaagtgaaaagaccttttttctgaagtaaaattctgcatatgaatagcttcacgtcattaggagacctagagatagcttgtgggctgttatgttctgttggtcctcttgatgattgtttatgcagcaagtgtgtgtagtttattgtactttcaatcgattgaggttaaaagattgccttttgtctattaacttctgttgtttctggactaatgggatgaatgagtttgtaacgaataagtatagccctgtgctataggggtgtgtgtataccgaatggcggcttcaggctaggggccggatacttcggcttttcggtttggactgatattcagataacaagttttcccaaaatcaaatcatttgatgattttgcccacccctatgtttttttcactttacttatctcgtgggtctagatgaaactgaaaataatctttttctttgctcgttttactcgggtgttttactcaggtgaggaaggcggaa

SEQ ID NO: 90625 - DNA, 960 bp, Eucalyptus grandis
  Intron number 1 from transcript Egrandis_v1_0.005669m (loc us Egrandis_v1_0.003331m.g) derived from phytozome v7.0 (c hr-ID scaffold_4; pos 37184878 to 37185837)
tggccaacggatacggctccgctcacgattcggaggtgcgcttttcgattgggctggcgttttcacgaaatctgatgtgcgtttgcctgtggagccgttgcttcagctcgttgcgtcttctctgttatgttcaattttgggttgaatagatgagtctcgctcctgaactgcggtcgagggcaaattgttttgtctaggcaagattcgattgacttgtggtggctaatattgttgctcaattgatgagatgcgacattggaatctacttgccgactttgaagacgcataccctttttattggtaggcatgcgtgcttaaggttctgagagatttaaatctaaattacagtcgtctgcattgcaaaaattcgagcttgtcttccaaatgcaaaatcaaaaggagttcattgcttgaaattgtgacttttcgcagttggattagagttacggcatgaagacccccagttttgaagcttgaataaattgcttcatctttaagcatttgaagcctgaataaattacttcatcattaacctttaagcacaaataagtggttgtggttccttgcggtgaactcttaaagatagcatttgacttttggtgctgctgaatgttgtatgtacttgtaaggcatcccatcttaggcactctgcaactctacaccgtctactctagggtgtcaggacgtgtaatttttgtccccccgggtttaaagtgatgtttccctttgatcctgtcaatatgcacaacttttcctgcttcacaaactgatgcctttgtacgcaatcagagcgaagcagatacattgaaaaatagatgctcagaatatatgtcttaagcatggtctttctttactgttttcttttcggtaatttcatttgtgaggattgcttagtccaatcacaattgttattcttatctggtagattgagcaatacgaagcagaaatcaaaaggctaca

SEQ ID NO: 90626 - DNA, 736 bp, Eucalyptus grandis
  Intron number 1 from transcript Egrandis_v1_0.055201m (loc us Egrandis_v1_0.055201m.g) derived from phytozome v7.0 (c hr-ID scaffold_11; pos 17077130 to 17077865)
cgggcgccggaggacacgcgatcagccgctcgcaggtcttcttccggagccttttctcgaaaattcatttctttttcatttcgaaattacggaaatttgtttcttgaaactcgattgtgcatttgaaattagttagtcgtgaggttgaatgcgcgagaattttccggttgcgtttcgcgttgttgattgctgctccttttactggaaagaaagaaagaaaagagagaacgggtcgctgcaaaatcgtgtccgaaccaaagttttcagggctcaaacagagtgattttcactgagggtgattgaacatcatcttcgtcgtaactgataagtcgtcttcaaatcttcgccatttcggattatctcctttggggtgttcaagctcgaatcttatggtcctataggcttaaaattcgttcctttcttttcttttttttttttggctttctcttcgatagatttaggaaaggatagagaaggtgcttgatggtgagggtggtggagaaggagaaatttaaatgggcgagaggattctgagaaaatgaatgagaataagagctcgaattcgtcatgtttgggcttttgtgcttgtcaagtcaggtgccaaaggggtctcaatcttgtgcattcaggtgtcaatgttagaaatttttttgttttattatctggctgcggtttctgtatgaacttgtatgtgatgtgatgtcttgtgattggtgtagaattttctttttcgaca

SEQ ID NO: 90627 - DNA, 866 bp, Eucalyptus grandis
  Intron number 3 from transcript Egrandis_v1_0.048481m (loc us Egrandis_v1_0.048481m.g) derived from phytozome v7.0 (c hr-ID scaffold_6; pos 846299 to 847164)
agacctgcgtcctcttcggctgcatcgagttggtggtacgtgcttttcgtgcatgactctgtgcacatacgtagaatgttcctgatgcacatatacggagcgggttctctgataggcagtaaatacactatatattaattaatgcctggaagacctcgtcatgttgtgatcggccccgcatcctaattgagttttcaatgtcttattaagcacctgactttcttctctgtggttgacatttgtaacagacatgaatctaacttttcacttttgttatcccataggatcctatttgacagtagttttggaaggatttggcccagctatctgtatcaatgagaacgatattatactcgttctgatagactcagccaatcacgactcaaaaacacacaatatatggtagaactcaggaaacatatgatcgagtcatcgaccgatttgtttgtcatgattgattcttgttagaagaatcagctgttagtgtaactgataactttggcaaaaattgtagtacagttagtttgctgaaccaagtccacatccgctttatattcaagttaactgtgctcttagtttaagaaaagtaagctttcgcccctctgacgtttcttcaaattattgttaagaaaaactatatggtctacctaatacatgctgacaagctaagagaaatagattgcagcgtcaagaatatcttctgttgactcgaattcaagtttgggatgaactgcaacttaaaccaactcatacagagcgattcattctcatgcaattcaaaggcatttaataatgagcctaggcgatcagaagtacaaaatatatgaatgatcttcatcatggtgattgctttcataaacaggggt

SEQ ID NO: 90628 - DNA, 610 bp, Eucalyptus grandis; identical to SEQ ID NO: 90456
  Intron number 3 from transcript Egrandis_v1_0.021444m (loc us Egrandis_v1_0.015226m.g) derived from phytozome v7.0 (c hr-ID scaffold_9; pos 18419806 to 18420415 reverse strand)

SEQ ID NO: 90629 - DNA, 701 bp, Eucalyptus grandis
  Intron number 1 from transcript Egrandis_v1_0.003578m (loc us Egrandis_v1_0.003578m.g) derived from phytozome v7.0 (c hr-ID scaffold_6; pos 44968947 to 44969647 reverse strand)
gtttggtgcattcacccacctttgccttgaaaaaggtaatgctcacttttatccttgttgtacaaaaataagatttattgagctttggtgttttcagtcacgaaagtctttagatttgatctccaattgtcttcgcagagtggtttatttttctcatcttttatctaggaatttttcccaaaattttgagataagtgcactaaagtcataaaattcatcatagaagtgtagtcgagtcttaaattttttgaaaaaaacgtagtaatcactttaaaaatttgtcaaattggtgtaatcaataagttgttttgatccaaatctaattttttaaacctatattctatttaagttaaattaaaaaaaaaagctaatttaaataaaaggaaaaaccagtgagcttgcagccatgtaagagacggtcatgtgagagagaggacttgattgtgctaatctgccaagttttcgaattgatggtatattttgaaagtcttagttttcaattgcaatttcttgatgagtcttagtacctttggtctccattttttatttttattttggtggtgctttcattgatttctatcaatgtcgtctctcactctgcttctcagtttgatcatttctgggcgtttgcttttcaatggcctcatttttttttctcctttctttttgcttttagccttatatcgtgtacttaggatctc

SEQ ID NO: 90630 - DNA, 681 bp, Eucalyptus grandis
  Intron number 1 from transcript Egrandis_v1_0.029964m (loc us Egrandis_v1_0.029964m.g) derived from phytozome v7.0 (c hr-ID scaffold_11; pos 10170094 to 10170774 reverse strand )
gccctggacatagtacgggctaaacaggtaagtatgaacaacactatcatattctttcctcgactgctacgcgactaagagttcaactctcttacaagtgcccttcttcgtttattattacataaaaagccagtacaatattaaaaaaaaagagagagttaattatggttttccttaaaagagaaatttgcctattatctgattttttttcaccaggtgcacccattttcgaaattatttaaataagatattaatatctacaaacaataggaattgggtttaaaagaccattcgaacttgtcccttacatatatccataactatccaaactgtcttttaactttaccatatttctagttgatgaatgaccatttttgtttcgttggataggtataaatatgtaatgcaaatcattattgaattctatcatgtcctatctagataatgcacattcgaatgaaaaaaacaagaaaatgtgcattgctgcgctgtgttgtgcatgtgttgtatatggaggtctctgttttcgcataatttctagcgtttccaaggaatcaatttgctttgctacttgttgtgcgtgcattgttgacttcaaagtttctattgagtaaagtgtgcattgctgggatttgaattccttgcttgcattggacaggttgataatcgtggttcttctga

SEQ ID NO: 90631 - DNA, 1012 bp, Eucalyptus grandis
  Intron number 1 from transcript Egrandis_v1_0.018254m (loc us Egrandis_v1_0.015887m.g) derived from phytozome v7.0 (c hr-ID scaffold_4; pos 32703894 to 32704905 reverse strand)
gacatagtcttcccggattggtccttctggggttggtatgtaattgattatcattcctcgtcattgttggtctgtcttttgattcaatctttagtacgggaatctaaaatcggggaaatgctcgcatggagttggttcatcttatgaagacaatcattagaaccttcggaatttggatcaataatgacggtagttttctagttgtagttgttaaatttagccagcaagtagaaaaattaaagaaagtactttttcttttttgatcgaaagctaagaaacttcattaatttaaaccaattttgtcaatatctaaacgtaaaatatctaacatggattgcgggggtaaagcaaccaattagaaggaagttcatttttcctcttcgtcttcgccacccggtctgtcaatttgcttctcttggacaatattgtagccgaacaaacctaagcccgcccagtagtgccttgcattcctcagcccaagcattgatattccatgggctgtcatctttgctcagcacacagttgaatctttttgggggcttcggtcccatgaccgattgaggtcatctgattactcttcattttccatggcctctttcgctttgtcggcccaagacgatggaaatcctgtatctggcatattactaggtagggacagaaatcattttaaagatttcgattgacgaaatcgaatacgaccatacattaatctcataaagcatgtcttttcataatgcgaaaacagacttttgaaaagttattgtaattgcacaaattgtctaaccgaggctctagagatcccatagcatgataagatatatatggttacaactaatgagggtagctgtgccggttgcctccttatcactttttgtttttttaggatccggaggaaattgatatctctcttctaattattaccaaataatcgtacatattatacatgagtatatttatctgtactgagtttttgtatattccttggaatttaagaagggctgagatcaatata

SEQ ID NO: 90632 - DNA, 530 bp, Eucalyptus grandis
  Intron number 1 from transcript Egrandis_v1_0.053924m (loc us Egrandis_v1_0.053924m.g) derived from phytozome v7.0 (c hr-ID scaffold_11; pos 42572838 to 42573367 reverse strand )
aagggtcaagaggtatttaggtttctcaaatttgatcttctatagttaatggatttaataaactcactacatgatttttttttttttgaagaatttcaagaaaccctttcggcagaaagcatagctgaatgatgtaactcttgaggattattaccatggaatgtgaaaaactactacctgttcatactattttttgtcatcctttgcaagttattttctgttataacttactcaagctttgccacacatttttcatataatgatttagcacacccttttttcttttctttaggttatttttgttacctttaaatagttaaactatgctttcatatggtactttaacattttagaatagcttaatgtcatctttcctattttgatctttcttatttcgatatcaaaacaaaagatccggttcctatttgatttttgtattttatattttcacgtttgagtcttaagtcaaatacaacctatgtgtgttttatttaaatattactttcatctttcatcattccaagctgctg

SEQ ID NO: 90633 - DNA, 943 bp, Eucalyptus grandis
  Intron number 3 from transcript Egrandis_v1_0.025894m (loc us Egrandis_v1_0.025894m.g) derived from phytozome v7.0 (c hr-ID scaffold_4; pos 39204978 to 39205920)
tgagcagatccctaagcctccagtagttaacagacgtataaacattctctctctctctctctctatttaaatatttccttctttatttttctttttttctatacccatctttcatttaggttgacctatgtttcatggtgtgagccgacactggacaaattctaaatggcaactctctctctctctctctctctctctctctctctctctctttctgtgtgtgtgtgtgtgtgtgtgtgatatgcgcaatatatacgtaagaaagagttgcagttcatctgtgagagagagagcgtcaggttatttttgtgatcttcattacttgaaaagttcagtagtcctcaacaagatctaaattctcctttttgttttgagcttgcataacatgtaagaaaaagaacttcatagcccatcagatagccgccgcctcctatattctatgcaatgactagccaagaaagcctacattttgtttttcttctttccgcaatcctcacttaattgatcaaagatttcattgtcccaatcgtttctagaagaaagaagccatgtcagatcatctttcgctctgactctgaaaggggttttcatcttctttttttttttggtaaaaggggttttcatcttcatctccgagattgtcaaaaaaagtttgagagagagagagaggttttgccatctctcaggaggtcatgatgagactatgatgagagagagagagagagagagagagagagagagagagagagagagagagaagtggagtggtgttgccatatcttggaagtcatgatgagactatgataagagagagagagagagagagagagagagagagagagagagagagaggagatattaatgtgtctttgatttgtctgtatgtctgtctggttgctcatgcccagctccggagaagagacagagagtaccttctgcctac

SEQ ID NO: 90634 - DNA, 819 bp, Eucalyptus grandis
  Intron number 1 from transcript Egrandis_v1_0.000228m (loc us Egrandis_v1_0.000228m.g) derived from phytozome v7.0 (c hr-ID scaffold_12; pos 189744 to 190562)
gagtcaccgggtgagccgctcctccttcctgtgcgcatctgtcgttcgctgtgatcggctgcgatttgaaagattccgcgtgtcctctcgttctggattctggatcattgcctgaatgtgattaagacacgagagctgttggaaaaactatgctagttagcgttgtctagagtacgtgtttgagctttgaggccgcttgatgtgaattttggtctaaacatgaatggatcgtgagctcggctcggagcttcgaaagtatgacaaaaattttgcgagtatttctctagttagccgggaattttaacttattataggcgagtggaaattgaactgattggtttggtttgtggagctcttcgagtcacgtgttttctcaaccccaaatgaacgccgcactcgagcccttcgaaatgtttcgaatatcgattatcccagatccatggtgtgctttctgcaacttgaatctgaaaatgatcgaactgctcttgactattctggtagttgagttcgtgcaatgtgtgagtgattggactcaattttattttattttcgtgtttgctattccttactgatactcagttgtgtttacttacagtaacttaacatgttgttcgtctttctttccttcctttttatatttttattttttcacttgtgattaggaagtttagttcacggaaggacttgaccttttatttcttatattcacatctaaagcattctgcattggttagtgtctttaatttactgatctttttcttggcatgccgttgtcccgtagtaggtgcttcgaaggacacgtctgtggttgtggtgact

SEQ ID NO: 90635 - DNA, 390 bp, Eucalyptus grandis
  Intron number 2 from transcript Egrandis_v1_0.039748m (loc us Egrandis_v1_0.039748m.g) derived from phytozome v7.0 (c hr-ID scaffold_4; pos 15610942 to 15611331 reverse strand)
tctccgcttgacggcgtgcctgacggtgcagatcggttcgatcggattgctgtttgagtgtaattcatcctggtttagttgcactttgtaattcatcatagcagttatttgtatcatggtgctgattatgtttttgtgttcttgttctccaagaatgtgttctttttttccctttttcagtcttgaatttttgaactttatgtttcctgtatgagctcacaggagaatttgattttaggtatcatccttggacagcagctagcaattcatatcgcattaagattgagtaggattttatgatgcaggtcgtgacgaaatactaattcttgtcttcttgtcccgacagtagcttaaagttttggttttgctttctaggttttgaggaatctg

SEQ ID NO: 90636 - DNA, 1031 bp, Eucalyptus grandis
  Intron number 1 from transcript Egrandis_v1_0.025432m (loc us Egrandis_v1_0.025432m.g) derived from phytozome v7.0 (c hr-ID scaffold_11; pos 29673021 to 29674051)
aaaaggtgactcctttgacttttttcccccagtttttgtctttttcttctttttgggtatgtgtctgcagtttgttcacgttatgatgagcgtgagttatgatggagcagttgttttactaaatggtttttggggaaaattcagagtatagtttgcaatctgatgcaatctagttgtacagacggttttctattgattgacgttcactcttttgcccacaaagttgattgtgagagttgaattcgaattgctgtgccaatgattcgagtcgagttcaagcttgttgctgaattggctcgactgtctgttagatacttcaattgattgttcactacaaaagtacaaaaccgtgccacaaaattcctcgggttgagaattgcatttcttttgtctgagcaaaggttaaagttccctgtagggaggagaaccatattaatgtaaaggtgtgacgttgggggtggtatgtttgcttgccttgaatctttagattccgtatttggatgcactacatgtataaatgctagctccagaacagcaaactaatggcaggatcaataccatataatacggatgaagctcttcctaatcgggattttctggtttagacaatggaaaatgcaatcttctgagtttactccatgaaaaaggttttctgatgaaatcatcttagcaactgagaaagtccactgaaaagaacgaacccttaaattcaatagatgaataaaattaaccatagaggcggctttgccaaggggatttctatttatgtattaaaagagttgatgttatgaaatcctctttaacagttgtagatttgttggctctataggtcaaattttcttctggcaccaaaaaagaatacataattcacatctttgagagatacgggactttatgtcatgcatgtttgtggccacagcagaattactttctcatcgagtcaaataattcttcttgacaagcttgctttttttccccccgtgtcattgagaacagtgtgtcttcggtgcttggggagcctgttgtgccga

SEQ ID NO: 90637 - DNA, 929 bp, Eucalyptus grandis
  Intron number 3 from transcript Egrandis_v1_0.022370m (loc us Egrandis_v1_0.022382m.g) derived from phytozome v7.0 (c hr-ID scaffold_9; pos 33717540 to 33718468 reverse strand)
ccggcagattggaggtaacatgcatgattagctactgtttttgttgttcggttgtgttcattttgtggtttgatttttatttctccccggtacagttcaattgctgttttatgtaaataccagaccaaagcaatcgcgtgtctaggtgaaattgtgactgtacccacagatgtttgtaaggaagaggaatttcctccgtcgagaataattagaactcgtcaaagctactcttcttttggatgagatagaagcaactagttgtgaattagtgggacttgggagagattctcaaacaaggcgaaacacccaaatcagttggaagattgagggagggctgttgaggtgaaaatgtcattcagataccctgagttctgccagataatagatggacctgcattttttaatagtgtgttcaatttcatacgtcccgtgcttttcagatatgtctataagattgtttcaactccccctttgctctcacccatgcacacaccaacacacgctcacatgcacgcgggtggcattgttctaaaagaggatggtggtccttacagggattactctcaaccaaagtctcggtgatatatcaaagcaaacaaaattagaaaatgctaattgatagcttcatcttctaaaatcaggtcccctcaagatgctgatttgaaaagggaatgttaaatttgcaaactttgttgccaaacacaggagaatatgttcatgaaatggtattctgtgaggtataagttgaattaggatgcctcacaaatcgtgggtttgtcccaatcgaaattaagtttcatcttatctttccttcaagcattctagatggctgacttgcttcacaagatagcttactgttggtctcaataagagttcagtggcttatcatctgttgtcctcttctttaaaactttcaggtgttggacaac

SEQ ID NO: 90638 - DNA, 1018 bp, Eucalyptus grandis
  Intron number 1 from transcript Egrandis_v1_0.002911m (loc us Egrandis_v1_0.002911m.g) derived from phytozome v7.0 (c hr-ID scaffold_9; pos 23751593 to 23752610 reverse strand)
acctaggcgacctcggcctcctccaattcaaggacgtccgtactcctcttttcctctgtctccgattcggattgtttgtttctcttcgcggattgctcgctcgctctgtctcgcctcgccatttggattcgatttgcttttccgcccgttctcgctgccgattgtcgtttcagcgatcggcgagggtttttactgtcgccttccgttgtttgtggactcgctgggtttcgacgtgaattttaggcttctggacgctttaggattgatgatcgtttgtttggagtcgaattgaggcgcttgatttgctgcaatggaattgctagttcgttcgctgcggtatcctcttgtgtggctgaggccgtttcattgagccgctctaggaatccctatgtttggtagtaatcgagtcgtgatcggagaaaccattggagtaaagtgtgagtaccggtgtcttagatgtgtaaagagtttctggatagcgcactacttgatatagggatgggtatctggtaattacttcagaacaaagagaacaaatagaagttagagaagtcggtacatcattcacatgtgattctgtgatgatgatatgaagcaatgaacgatggggatatcggatgtgagctctggtatatccatttccaagtccattgatgtttatgggtacagaataactttaaatcatgatgtcttagttttttttttttttaatattatattgctctgaatttaggaaaatggaatctcatttggagcgagaattctgcaggaggattatttcctttacttcttagatgatttcaatcatcgagcttatattatacaagttatgtaccaactgttgttatctgtgattcttttggttattaagtgccagacaagcaaatgttacctcagtgttaattggagacatatgatctctcttcttgatgttctatctgaaactttcagatatatgctttctgataattattcatctctagctgattattttgataaaattgtccttttcagctca

SEQ ID NO: 90639 - DNA, 647 bp, Eucalyptus grandis
  Intron number 2 from transcript Egrandis_v1_0.005396m (loc us Egrandis_v1_0.005396m.g) derived from phytozome v7.0 (c hr-ID scaffold_11; pos 25685040 to 25685686 reverse strand )
ttctggaaaatccactttcctcgactcattggcaggtttctctccttctctctgccaaccttctcgttctggaacattttctttcaacaatatttccattagcttagccttatattattgcatttttatctgagttattatacggtttgaccgccggtgaaatccgaattccaccttcgaagcattacgtacgaaaactcccggtgatactgatatagttactgaaagaataagaccacgagcattgcccatatatgaaaaaatacagcagctcgacatagtcaccaaaatcattaatagcattgaagatattgcagaaggctacgatgattactcctttccatagccaaatttagaagtgtagaaacgaagttacacgtggagtttaactttgtgactaaccaaagtgcaggaagctgtttatgttcatgaattttgcttaaaaacgaccgctccccaaaagctttcctaacttttaatcctaattttgcttcaagcttttttttttttttgtctaaaaaaagaatttctaactttcactctaattccaaatgtaccccgtgtcccaaaactatcactagttttcatttttccaaaattatcaatatcaaaagattgctgttgtaccacccatcgttgcagcgtgg

SEQ ID NO: 90640 - DNA, 488 bp, Eucalyptus grandis
  Intron number 1 from transcript Egrandis_v1_0.005977m (loc us Egrandis_v1_0.005977m.g) derived from phytozome v7.0 (c hr-ID scaffold_4; pos 16702097 to 16702584 reverse strand)
gcaaaggcagagataggtactaatccatctagctcttactgattttcttttgccatcactagctagctttaaagaggttttcagttgaatagctgccaaggaaatccatgtccttgcctggaaatgctttatgtgaatgtgatgacatggttatagttaatattctcattgaggaggctcaaatttggtcactcgtgtgtttgtgtcgaatccactaaaatctgtcatttaaataggatctctaagccctggaagttcattaagaaatttttctttctggaggtgcaatcacatagcatgtcctagttatacacattgatatatgcttgatgttagataaaaaaacaagtacaagaaacttgtctgtattgaatattctgtgatgaggagagcacagtggcacagataagaacttttgccgtgtggttactaagctctctgtttgagtatgacagcatatgattattttgaattttttcaatgagtag

SEQ ID NO: 90641 - DNA, 859 bp, Eucalyptus grandis
  Intron number 1 from transcript Egrandis_v1_0.035423m (loc us Egrandis_v1_0.035423m.g) derived from phytozome v7.0 (c hr-ID scaffold_477; pos 25648 to 26506 reverse strand)
ttaaggtaacgcccaggtcttgtctcggagtaatatgtgcaggaggacttgagttttagctcgttacatttggatggaatccattttcggcagttgggaacctatagtttagacttgggatgtcattgagatcattaggtttttatactcttttcttcttgtacataagcttgtgacatagtatatgttgtgaactgttgtatatgaaattttttcttttcgtgtctagcaagattagaatatgtttgcttttgcttagggatgggattatgattttcattaaagcaacaagcgatttcctcgaccactttgaaagttttattcccgtttgacgactccgtactttctgctgcatcttgaatctgctttgttggtgcttctcctgaatgtttgctttagcattaaaactgctacacagtggaaaacttgggagttcagtcttgatctttggtggagccgtttcgaattctttggaaagcaagtgaaacttccaaagtaggacgcatagtcgctgaaatttctcagcaggcgcgattatcttttcccatttgtgagttagaatgtctgttgttttggatggtctcgtggcactgaaagtaacttaggctgttgatactggcactctaagctttataagtttgcattccagcatcgatgtctcttttgatatgtagttggggggagaagaatatatgaagtatttttgtgttgcaaagcttgtcgtcttgatcttccatcgaagagcagaggaggcttattagtcatgattagtctggctaaccaatatgtttatgccaagccttgcctatgagaaaacatcgttcttaaggtttgcttttcgtaggaggtagcgactaga

SEQ ID NO: 90642 - DNA, 523 bp, Eucalyptus grandis
  Intron number 2 from transcript Egrandis_v1_0.032665m (loc us Egrandis_v1_0.032099m.g) derived from phytozome v7.0 (c hr-ID scaffold_11; pos 39087534 to 39088056)
tgattggcctcatcgggacattcattgtcgaactggtcagcctcttttcttttagcataatttcttgctcctttttgttcaaggacgctctggcgttgtggttgttaaatttagtaatgctagatacaaaggagatagcatattaaattgatttataaaatccgattttgttaacagtgctcttaagacattttaagaatgtttaattaggaagatttcaattttcatgatagtggttattcataatatgagttggcaagtcttttgagagcactctcgtcaaataatcccacaaattataaatcaaatttaagttaatggagccaaccaaacaccggacaaggttccgtggtattactttgggtgtcaattaatattcggtcgtaatctctatggcattattctagtaaaacccggcatcattttttgcacaccttgatgatcgttgtcttgattttggtcagataataaacaaagggattcttcaggtgattggagtggaggtgggcaagggcctcgatct

SEQ ID NO: 90643 - DNA, 724 bp, Eucalyptus grandis
  Intron number 1 from transcript Egrandis_v1_0.019351m (loc us Egrandis_v1_0.019351m.g) derived from phytozome v7.0 (c hr-ID scaffold_6; pos 39524202 to 39524925)
tggagctccctctcctccctttcaacacgagcgaggtcagtagtgaagcgtgcgtggctggtctctgtgctcttcttttcggcgtattgtggtagaatgagattgttaagccctttttaagttgtgggtagtgccttttctgaaagtcttgaaatgtttattgcttaaattacgcacctttacgtgtatttgtctgtccgtacgcatttagtttggcagtgtggttgcttcgtctccctgacttaggatgcttctgaacctacgagtttctttacttgttgaattgtgttgcttttgccgctggaacgaaaaatataaatatatggaactgctcgttgcaaattgttgttgaagtcctccagaaacgggagggtgaatatgaaaaggtaaatggacagagcttatcaatctctgctttgagtctcaaaattcatggattaaatgtggccataaggccgagatttcatataaatttggaatcttagaaactttctctctaattttttggtgttattattatcatggatgatgcccatagaagaatgcagctctaataagattgttcaccattgcatgtctcttggttttgtttgattgatgcaacctcctgaactccagtccgacgcctgatattttacttttagttaagaatgacctgctacttacctttgtcaattaaataattgcaggtacttgttccctccgagagtaaagtactccattt

SEQ ID NO: 90644 - DNA, 243 bp, Eucalyptus grandis
  Intron number 1 from transcript Egrandis_v1_0.014101m (loc us Egrandis_v1_0.014101m.g) derived from phytozome v7.0 (c hr-ID scaffold_4; pos 15877878 to 15878120)
ctggtaaaataacatcttaccttgaaccacatgatcatatctgtttctgcattgcctttgcagtttctcattctctggtctagataagtataaaatcgtttgtttaattttggagtagcctgaacgaattggggattgaacttctggtttttagcttatctgaggatggaaattcttagactgaactgtcaatttgattaatgtcattgcaactttttcttcttccagtaactgaactaagtg

SEQ ID NO: 90645 - DNA, 654 bp, Eucalyptus grandis
  Intron number 1 from transcript Egrandis_v1_0.043658m (loc us Egrandis_v1_0.043658m.g) derived from phytozome v7.0 (c hr-ID scaffold_9; pos 28145871 to 28146524 reverse strand)
ttgaaagcaacattccacgccaatgtgaaatgaatcaaacctaaagcttgtcaatctaaaaattcccactcttcttgcttaatagggtctagttttctccacatagaggctaatgcaagttcttttgatacaacatattcttgatatgcatcttccggaaaccaaaagtccttgccatcaaaccgaccaatcttcaccttccattggtccatattcgcacacgaatatataaagagaaaatagagaacaaaaaacaagtgagaatttttatgtggaaaacccttcccaaaataaggaaagggaaaaaccatggtgtcgcattaggcaatctttccattattagtattagtgttacaaactctagaattacaagtttctgcattaaaaatataaaagatattacctctatatatagcaggagtttagagcatacataattatgatggaaattacatgtatgtcattagcagtaataaaagtcatatataattatgatggaaattacatgtatatcattagcagtaataaaagtcctattgtttgctttaacatgacaagatgagtgacctactaggaattacttgcccaagataaattgtttctacgcttgaacattatttttctctattagactctacaacttcatcaccggat

SEQ ID NO: 90646 - DNA, 883 bp, Eucalyptus grandis
  Intron number 1 from transcript Egrandis_v1_0.010835m (loc us Egrandis_v1_0.010873m.g) derived from phytozome v7.0 (c hr-ID scaffold_6; pos 48381477 to 48382359 reverse strand)
gacttttttattgcaggcctgttactggtgaagaagtaagtaccttatgaaattggagccgaggtggttgcatctcataaaaacatactatctagtatctactgtagttttttggtttggctagcataccatctactattcctggatatggttccttttctctttggcctctttgtttttgtgagaaacacttggctacattggtgatggtagtgtcaagtatacggcaagtttatcctttatttccaggatatcatagttgttgccttttatgttatgtttggtgggtgcttagtcctcttccgtgattattgtttacacttttgtttttggacttgtgaaatcatgtgcttgatctagtcataggttgttaatgctactattccagacttcactttgcagttttctttagttatctgctgaactggtttcaaaataggatctggcaattacatgctttttgccttttccgaaagctttaacacctaatactttctattatttacttctaatattcaaacaggcttcatatgtcactatacttagttgctttgtgcttttctaagtttttagatatcattttcctcgttctgtatttttctgtctcccaaaattgtatagcccagaccagctgttttatctttaaattgtgacttcagatgacagttcacagatattcttcagctgatgattcttcattatttaaatcctcttatcatcagtcgcgtgtcgagtttgtgtttacatttgacatttttatcctccggacggggtatgcccgttattgctactacttttgtctcctgtaagtctactaaacagcatgtttcttccattcttatctgcaggagttttgctggtactgaactcctattgatctgta

SEQ ID NO: 90647 - DNA, 774 bp, Eucalyptus grandis
  Intron number 3 from transcript Egrandis_v1_0.024110m (loc us Egrandis_v1_0.018262m.g) derived from phytozome v7.0 (c hr-ID scaffold_6; pos 41770309 to 41771082)
acatatatctaagacctggtaatgaagcttgcatcagactcagtgaccgtttcttttgttttgttgatatctttccaatgaccctatattattattttgtccttgaaaaatcatcagatcggctttcattgctcttggcaaaagaacggagtcatacgcaaacttacattgggtgcatgaaaaaggggcaagttttcactaacccacagcttaaatggttagtcttaccaatatgatcatgtgacattttatttaactgtgcatggtgtagtgtctcatttttgcttcctactgtcctcatgaaaagagagacgacagctatctgatgcttgtggtcgaatggttgattgaaaagagagctttagagtgtcgatgccccatttttagctgaggtgacaattttctcgtttgtgcatggtgtagttttttgctttatgcttcccatggtgttaatgaaaagagagatgacagctatctgatgttgtttgtcaatcgagtcaatgaaagagagatttagtgtaaatatgccattttagcagaggtaggaattctataaatggccataacgcatgctgaactggattacaggttgatttttttcttggacagcattagtgttttattggtatagaaaaggaagagagagtattgatgatttccaaggccatgtagtttataggtgcaattatatagttagtgtgagtttcttcatgataaatttcttccgtctccccctttctccagggtttgattcagtgttcgactgatgcaggt

SEQ ID NO: 90648 - DNA, 380 bp, Eucalyptus grandis
  Intron number 1 from transcript Egrandis_v1_0.015853m (loc us Egrandis_v1_0.015853m.g) derived from phytozome v7.0 (c hr-ID scaffold_6; pos 23246139 to 23246518 reverse strand)
tgggctctgcaaggttccttgctgcatctgactttgtaagttacatatcagtacttgaactgttgagatttgagatctatgatcatagttttacagtatggcttattaaattgtagtagcacaatgatgacaagatcgtgtgatgctattttcttattctattgtcttattttggtttctgaatcaactgtggaatagctcaatctcttatggtcagtgaagattgggaccaagctagtaattttcgttgtcattaatttgtttggtttcctactgctggagtttatattaggagatatggcttatagtagaaagtttgtttgaaacaaagttttgaacatatgtattaaccgagcttatggcacctttgaaggaatccg

SEQ ID NO: 90649 - DNA, 666 bp, Eucalyptus grandis
  Intron number 1 from transcript Egrandis_v1_0.030388m (loc us Egrandis_v1_0.029667m.g) derived from phytozome v7.0 (c hr-ID scaffold_6; pos 21166590 to 21167255)
acgagctcaaggcctgggacgccgagttcatcaaggtcgaccaggccacgcttttcgatctgatcctggtcagtgcccgtttcgtgggagattttgggcggtgatgctggtttgccttgtctcggcgttgctcgggcgagggcgagggttttgatatcgattttgctgattaatatgtgtttgtgcgtgtagtatcgagtaggttcttcaacagagtttagggtttgaggagatgttgtagtagtaacgaatgattgagatctgctgcgtcgattttgttagaagttgaagtgttcgtgttgcggtgattcttaggtgtaagatattattttttcttgttttataaattttgaagggcgaaaaactaaatagcggatcgcgtagttgatgctcccgagtcctgaacttgtttggatgattggcaattctttgtttcgcgtggcttttgaagaatgaagtgcggtctggtgctcatccctgttgcgttttttattcgatgacgacttatcactcgtgggttttgcaccatcatagataattcatgagcttgtgaagttgatttgagtcttgtctcgttgaggattgcagtacttatcattttctgtgtggcattttacttgatgtgtgataggcagcaaattatctgaacatcaagggcttgctgga

SEQ ID NO: 90650 - DNA, 574 bp, Eucalyptus grandis
  Intron number 2 from transcript Egrandis_v1_0.041054m (loc us Egrandis_v1_0.041054m.g) derived from phytozome v7.0 (c hr-ID scaffold_6; pos 16003330 to 16003903 reverse strand)
caaattcatcatgtgagttgtaagactttagtagcctgctggttttaattgagaatactaagtgaaatttttttggttcccccatttcctcttccatttgttttctttatgcacctctttgttccagtagtgttatcatcgcagggactacattcttattttgatataagccatctgttgcacgtagcacggccaatactgctaataatggtgtctagatagaccagttagatcctggaaagttaaaagaggagacaaaagtcatgcaactttaatgcattgttttgcttctttttatagactaacatcctgtgagtttttcatatgagcccagtagtttttttttttaaagctaaaaatagctaaaaaggctaatgatatgttttttttctgaagttttcttatactggcccagaatttttttttttcccattgtgtgttttgttatattatttatttcacgaatgttattgggaccagtctattttaattaagacttaaatctcagttatcttacctattcttgatgtatgtaatcctcttttctaatccaaatattcatttgtgttgcagt

SEQ ID NO: 90651 - DNA, 1004 bp, Eucalyptus grandis
  Intron number 1 from transcript Egrandis_v1_0.002102m (loc us Egrandis_v1_0.002102m.g) derived from phytozome v7.0 (c hr-ID scaffold_11; pos 31980697 to 31981700)
ctctgcttcgcaagaacttgactttccaggttggctgttatctctcagcgtcttttctttacgtgggtccttctccgccggcgagtgacgggggagggtggcgtcggtttggctttggtgagcccgtgatcagtatcttgaatgcattgttcgaaaagccttcttggtaatacggagattagttcggttgggactgcagtcgggtgtgtttatcctcgtcttgaatgatggatgatgcacgcggaactgattcttgcaatttcaagttttggtttggagtttttgcgcctccatggacttggttatttgccttgttggtggttgctgtcgcggttaattcactacggttttgttctgtctctctcgtatttgattgtggagatgtaattggactattacgattccattgtggcatttcataccggaatcaattgtgtctcctcctttttggtgtatgagtcgacttcattgtgcgagtaacgcttgcttgccttgtttctttgtgcttatacttcaatgggcaacgagtatatcaagatctagtgctgtattaaatggtgcttcttctttgacatttgcatctctcttgaattacatgatttctttcagtataactggatgagtcaataatgcagctcataaaaccatttgcgaccacaagaatgcccagattccactagcatgctctgaagttaggatagagtaaaaataccatgcacaaccgttgtctggccttcttatcttcagtttagcccctgggaatttaatcttggctagttgtcccttttgggatccagcggccaaattctcttttgcacagaaagtatagagttaatttgaagccgatatgacctttatagctatcagtataacttcttaaggggctttggtaaggctaaacagaacatataccatgctttatgttacggtaaggtccaacaaattctacgaaggatgcatctgatgacattgtttatattatcctttcgcagagacggaatatc

SEQ ID NO: 90652 - DNA, 864 bp, Eucalyptus grandis
  Intron number 1 from transcript Egrandis_v1_0.022070m (loc us Egrandis_v1_0.022017m.g) derived from phytozome v7.0 (c hr-ID scaffold_9; pos 35090518 to 35091381 reverse strand)
gcgtcgccgtcgccgtcgccgtccgctccgagcaggtgcctccccttccccaggtgggtgcgcgcgtgactgtgcatgtgccgtgctttcctgtcgggaaccgtgatcgagtcgggacgagctctcggcgttccctcgtgcgctcgtcgcctcccggtttctgtccccccgcccgcgcgcgcgcgcgcgcgctgcattcttgagtggcgacttagagagcgtctcgttagtacggtctcggtcggcgtcggcagtttcgaccggagcgatcgtggctcgtggcgtcgctcccgtcgtgtggagttagatctgatcagcagtgcatgaggtcgtggttgactttgcattccgtgtggcgatggtggtgttgattaatcgctggccttggctcttgtttgaccgctgcattcctctctctttttcttttcttttccaaagaatgactgttcttagatgggttttgtctctcgtcaagcttcgcgttcctgtatattctgaagctctaaatctctagtcaaccatgagtttgccagtacgtatatttacatgttctggcgtgggggggaggggggattttgtttagagcgaaagtctagatggcacagtgcgaaagcaaaagattaatagtgctgttatggaagattggccttttgattgttcttttccatgattccaatggatcccacaagatcactcctttcagtttcagtcacctcttgctgaatttttgattgaggttgccttatagtttagaatgcccttctgcttcttcttttcctggtgtgattcatcctcattactgtatataactcggataataattttacagaggactgcttgcagctctgaatcgtgaaattcaag

SEQ ID NO: 90653 - DNA, 254 bp, Eucalyptus grandis
  Intron number 1 from transcript Egrandis_v1_0.001393m (loc us Egrandis_v1_0.001393m.g) derived from phytozome v7.0 (c hr-ID scaffold_9; pos 36927670 to 36927923 reverse strand)
ggtaatgcaccatcttccccaagaaaattatgttttcgttagttgtattcccagttgcacttgatggataaattcactcaccgcaaaagctcatattggtgcttgatttgaactctactgttgattgaatttagttaatgtgtttcttgcttatatgctgatggtctcttcacgctgtagttagtcatatttgaatttgttcttcccatacaactgcagggatcaagcgtatttcatcgagcaaattgtaggac

SEQ ID NO: 90654 - DNA, 823 bp, Eucalyptus grandis
  Intron number 5 from transcript Egrandis_v1_0.015058m (loc us Egrandis_v1_0.008878m.g) derived from phytozome v7.0 (c hr-ID scaffold_4; pos 32505697 to 32506519 reverse strand)
ccaaaggtattaatgggcttgtagatgattatatagtttaaaaagggaaaagatcttgctataatatgcctttttaatatatatgttttttttttcatttttatagtactgtaattatataattacttttaaagtacatcatgagcacttattgttttgcaacaatggtttggacatgtgattatttaaatggtctatggtcataatttgaatgccttgctatgatagaatcacaatggcatggcattgtttttttgtttttgttttttttttttaatatataaatatgtttcaactttttgactggcatgtttgcttaattttgtgcttaggttgatgtgtgtgcacaacttgttctcatggaaacctttggagcatataaaatacttgtgtctctaattcacataacaagtaaaatgtgaagatctgcatctattgagccttatcatgagcgtcatgagaggaatacttacaagttggaaatgacattatatgtctattgtagattcttgaaaagtttacataagagctaaggtctacctcataagctgctattgacagtgtgtagaacaaggttttgtgtgggtgtggaaccttttaccgttttctggtgttcatataactctgtcatttttatcagttttgggtttgcatttcctgccttcacttgaacatcttcaaatcttcttcttcatcatctatatcattcattttaagttgcttagatttagaagccaagaatactacttctcttggtgctgccatttctatttgaatacttctactagttgcatactgacaaaatatttggctcagggaagat

SEQ ID NO: 90655 - DNA, 726 bp, Eucalyptus grandis
  Intron number 2 from transcript Egrandis_v1_0.015058m (loc us Egrandis_v1_0.008878m.g) derived from phytozome v7.0 (c hr-ID scaffold_4; pos 32507296 to 32508021 reverse strand)
gaggtagagttcatgtctcatcaaaatgagtgctctgtaaggttatgctatttatttcatgtcgagacgctggtgaagggtcctggttctttctttgttattcttttggctgatattggtatctttgaaaactaatttagtttttcatttgaggtgatgtgatctccaaggactgtttcaactctattgctttcacttgtatgtttactgtgttacaggcagtagcttgatctgctatcatcttaactcccttattgtgtattaatccttcatcccctaagtttgctgagtatgtttagcttcagaccagagtcgcagaatgtggaaagataaaactgactcgtgctttttccttcgaagaactcgttttctaataattaccccaagggaggaaagcatcattgctcatattctgtgctattgttcatttggtattgctaagttggttgacttctgcagtgtgtttgtcaatttatctgtcagtatcttgttgccatgatagtggccaaatggaactatgcccatgtatgtggagataacaatttcatgtgaatattgaatcgccgaaaaactgaagtcccatatagcctttgactttgcttccgtacagatatgaactttttctaatttcatagtctgaatgtcaacgttttgattttgttcttgcttcagttattgcctcggtatgcaacttaatcatgtttaactgcagaataggaaccgaac

SEQ ID NO: 90656 - DNA, 846 bp, Eucalyptus grandis
  Intron number 1 from transcript Egrandis_v1_0.015058m (loc us Egrandis_v1_0.008878m.g) derived from phytozome v7.0 (c hr-ID scaffold_4; pos 32508357 to 32509202 reverse strand)
agccctagacgccggattcgtctgccgacgacaaggtaaatcctccctgctccgccgcccggcgcggcggcgagccggcctctggttcgtccgtcgttttccgcgagtttcctttccgtccgctccggcgagccggggcgcttgttgctcggtcgatcgtgcggttcgcggcccgtgctgtccgtcccgttgtcatcgcgcgtttgcgatggatttccctcggggcggtgcatgcgtggtggtttcttctgagttctcgcgtcgggacgatcttcgcctctggtttgatgattccttcatgaaggagcgacggcggaaacaccgggggcggggggggggggggggagatgagtttttttttttttttggccggaatcgagcgtgcttgtgtggtgctgctcggtttaatccacggtcgtgtaccgaaatgttggttcggcatgaaggcgaggcgatgcggtttctccgccgtctctttgcagatgatgttctgatttttatttttattttttaattttttatcgagtataataggctctcgcaatcgattttgacgataaaagcgagaagcaggacgcgaagcagtagtttgattgcgcaagagtatctcgtgatctaatgtcaatgcatgtctttgctagttactcgatccatcgaagatgtcgcgtctcattttttctgatgaagtcctgaaaacttccttgatcgccgtatcttggttcggatttaatctaaatagattcggtgtatacgaactaatgcgattgattgtgctggatagtgatgaaggtatcagtttcgcgtctttctgatgtggcaaattaactgtactgtgacaggcaaacc

SEQ ID NO: 90657 - DNA, 807 bp, Eucalyptus grandis
  Intron number 5 from transcript Egrandis_v1_0.007994m (loc us Egrandis_v1_0.007994m.g) derived from phytozome v7.0 (c hr-ID scaffold_9; pos 25849624 to 25850430 reverse strand)
gcaggtttgctttgctttttattgtttgtattatgctacactttttcatttaatgcagaaaatgttttgggtttgtttttctcacttcttataatataccatgctactggcttaggtaggctgacaatatggtaatttaggttggggtgtagagaatgtaagtggagagaagaatcttggaagaaattttttagacatgccacatccttgagccaagaagctaggggcaaagcttggtgcctggctgcaacaacatcatcatgagcgatatagtgactgcttactaatcttagatgagcactgttttgattttttattataagcctctggacatgtttgcattcggacctaattgaaagtaagtgttataggagatttcatcttcaaaaacatatgaatgactgaggaaagcacaggcacggttgcctgttaatgtcatgggaaccacccttgtgtattttcttacctcattgtactaactgcctctcttttacaacctccgtcaatttgtggtgcgacaattacgggcaaaccccataaacacgttccatagaatggcggttttccacttttaggaatacctttttgcttgctgatggtgaaaaggtgcgacagctgctgtgtaagtgtgtaggggtggggggctgatactgaactgcttctgaagtgtggcaatagtttgggaacactcagtattactatcatatatatctggctgcagccctgctgtaattttctctgcttattccagttcatttctggcaattgtaaggtgattattcgagcacgttcaaggctagcacagaa

SEQ ID NO: 90658 - DNA, 980 bp, Eucalyptus grandis
  Intron number 2 from transcript Egrandis_v1_0.030421m (loc us Egrandis_v1_0.030475m.g) derived from phytozome v7.0 (c hr-ID scaffold_11; pos 3793225 to 3794204)
tttgcagaaggatccccccacgtcctgcagcgccggtattttcccctcatttctttcctcttgtgttcgtgtatcttcttttgctcgttcgtatccatgcgcgtcgatgatctcgtgtcgatcgaggttagaatcttgttgaaggctcccgcgcgtagattgggcggtgtttgtctggatttcgcgtgttgttagggtattagaagcttctagaaccattgaccagggagacccttttgcgccggtgtctgagcagggattgtattgtgggtaaagatcgatcttttcctgtggagggctgaacttcccttggacataattagaacttgttctgctttttaatttaacctaaaggggtagaactttctgatgttttcggaattgtttgttctgcgtggtggaagttttgtccttcttgagctggctttagagggttgcgcatataatctgcgacggaccttttattggaattgccctcagagttattactcctttagtgctgcgtaggcatgttgttcagctacatattaccctcgagattacccagagagaatttcagatgatggagaagatggtctgtccatcagggttgggtgtcgaggtgagaaagttgggaagaggctgattcaacccatcaattttatatcctctctctgctaaaactgtaattttagggtggcgcctttctagaagtatttctaaacctgcagtttccctgattatgacggctgcagcacccttgaccaattcgaattggtgagagggatgacaccgctcaagtttatctattgattcatgcatatccagtctgttactataatgttttgttggtagcttttctgggaatagggcatgtatatctttgatatatcttgcaatgtatgccattgtttattgccaacattgggctactgaccttgatatttctgtccaccgtcttatattgacttgtcatgattgtaggccctgttgcagaagac

SEQ ID NO: 90659 - DNA, 755 bp, Eucalyptus grandis
  Intron number 2 from transcript Egrandis_v1_0.033675m (loc us Egrandis_v1_0.033624m.g) derived from phytozome v7.0 (c hr-ID scaffold_6; pos 8612893 to 8613647 reverse strand)
aggtttttcgtaaagatccatatcgatcacctgtgtaattgcctcctctgtgggcatttgccatttcattccgtcagtgatatttatgtatgcatgatgaagtggctatatcttccaattggcttgattttgatcatctggaaactgaagttccctcaattgggggaactcttgttttcatagctagcctgactgaatatggtggcccgttaagaaacgtgcttttcgaagaggaaatttttgtatttctacaaagactccttgtatttgttattgacttccttgttaagtctctgctacttgtaacttgagattttcgagaaaagataaatatgaagctgagatgtgcacagggttcaaatctttgttatgcttggatcctgctatgtgagtcaattatgatagcaatggctaaaagcaaagcaattagtcagaaacttctctagtctagttgtggggaaacatctagggctttatggatgataaaacaaataaaagttgagtttaatagatgaaaagcaggaatgcattacagaatcaactcttaatatgtgcccagaattgactgatatgatgaagtgcatatgcaccatctgggttctagggatttagtgatgtcattcgatctttaatgtgcatgtagatgcattgatatatctgagcaattttcttttttagtggaagcgatgactttggtgtattcaatgtccttgtgatggctcacctgctgcaaattgcttgtttgtgatagcaac

SEQ ID NO: 90660 - DNA, 905 bp, Eucalyptus grandis
  Intron number 1 from transcript Egrandis_v1_0.008161m (loc us Egrandis_v1_0.001960m.g) derived from phytozome v7.0 (c hr-ID scaffold_11; pos 40760858 to 40761762)
ccaggttctctctctctccgccactgttgaatctcccgattgcctttattttggtgaaagccaaagaatctttaaattaagacttgccttcatattttatagtaatttgtgatttttgtatgacttactcctatgagttttcagaagttctccggatgatgattcttacccttagtttttgttcttctaaacggctccttcttttggttgcttatttcagttgttagaattacctgtcactgtttgcttcgacgtgctaattgtgcggttgctctgttgaggttgagcattcctccacgcatctgcacgagcaatcttgtggctgcgggtcgtttccgtgtttaatttcgatgcgtttcttcgtcctctgcttgtaccgaagaaattgtacaacgaatcgctcccgtgtaaacgaaaatgcatggtcttcctgtctcgttaaaaattctatttagcatctatgtgaaagttcatagcacaatctgttatagacagatgaaggtgtttttattttgatgttttgagtgagtgaattgaagaatcaaagacatatcaagattggtacctcattgctcctggtcaatttgctggtaatttgtatggcctgtgattgttgtttttctaatatatggacattaagagcgtcataacctttatcctacccctgttaatttcatgacatatttcaggtaaagaaacgttaaaaattctttgagacatgcattcagaatctgtaactggtgacaagattgctgcttttttgcagtcctttgttgatgagatacagatttcccgcatctgcttcacgatttgctgatacacatcactttttcgggttggccaactgatatgcatgatttcattcggcaggttttgttagcttggattgtggaggatctcagagt

SEQ ID NO: 90661 - DNA, 381 bp, Eucalyptus grandis
  Intron number 2 from transcript Egrandis_v1_0.035965m (loc us Egrandis_v1_0.035965m.g) derived from phytozome v7.0 (c hr-ID scaffold_4; pos 31066447 to 31066827 reverse strand)
acactgcgaagtctctgaggtctgcaaaaggcgaggtaggaaacagccaaatacatgctgagattatttagtgtttggtcggtacaaattgttttctttggcatttggtgcaccttcaaggtggcaacatggcgtagttctgcacacgaaaaagacacttctgtttcgttcttctttggtagtagatgaaatggaatttccaaggttctcgcccatggagagactgaaatacatgtggcgagagtgatatgaatgtctgttttgcttggaaacatcaatgatgaccttgtgaagaagaagttagaacttttcctattttatttgatccttccaattcagattacacccggttaattcaaacgaaaatgttgtcgcagggta

SEQ ID NO: 90662 - DNA, 832 bp, Eucalyptus grandis
  Intron number 2 from transcript Egrandis_v1_0.006721m (loc us Egrandis_v1_0.006197m.g) derived from phytozome v7.0 (c hr-ID scaffold_9; pos 27410938 to 27411769 reverse strand)
gtcaagctcctccaagtcagtctcgtcactttcaggtcctctctctctctctctcgatgtttagtgtttttttttttttaaaacctagatgggggaaaggatggcagcggtttgtgttgctttgtgctaacaatagttttaggacataacctgtctttatttaaagcatctgtctttccgatatgaattgatcttacatgctcggaatctctcaatgtttaggttgtttttttttttttgccgatagagttgcgctaacgatgttctttaatatttttccgtgggcttctcctctagtatgttactgaagcttattggtggatgcgatggtaaatgttgctgcttgtcttcattgttttatcaatttcttttttttttttctaaaattttctttcggtaagtgaatgtgacggatgtagtcctttggacaacttggccaatgaaatcgtggtgatttttgttacgttggttacgcatttcgaagcagactaatccgtgctcatctcacttgttgaactttcaagctaagtttgaagcttttggatgttctcatggatataaatccatggctgtcttacaatgtggtggagatgagaccataatttttaatatcaagaaccttgcagaggttttgctcgtaatgtgaaatcttttatgtaaaagttgaactcaaaaacattgattcataaaacaagagagacacttgagatgttatactttatcttgtggttttctgtcgattaaaaaaacaaaattctctttgatgcgcgtcctttgtttatgtatcagagatttaccctttttctcttcttattggaaattataggagact

SEQ ID NO: 90663 - DNA, 1001 bp, Eucalyptus grandis
  Intron number 1 from transcript Egrandis_v1_0.018271m (loc us Egrandis_v1_0.011055m.g) derived from phytozome v7.0 (c hr-ID scaffold_4; pos 41032898 to 41033898 reverse strand)
tttttttgggacgacatcgtcgacctcaatttcgggtacttctgtcccacttttcctcctctcttttcgtgccccctccctttctctgttctcgaacctgttcgcgcctcccccccttcccttttcactgccgtctctgtctctctaattcctctcctcccggcggcgaatctcccggcggcctgactttcctcctgtgtcttcctttctgtgtttttgggtgctgggggttctcttatcgggtgttcccagcatttatgtgagatgcatcggcagtgcggccttctcctcgtctcttcctgcccccccttttctcgttcgatcgtgattttcagataatagggtttctgtgtaaccgccgcatatttcgctttaggtcggccttccggtttccgtttctttcccaccaactctctccatttctcctcttaatctactgcgacagtccaattcttgacctttccactctccatttcgactctttctcgacataaattttctctccggggacccgagattgcttctccttcttttttgtcttttccataccatatccatatctccttcttttttttttttggggggggggggggggagggggggggggcttgggaaaccccccccacctcttttttttttaaaaattttttttttacttccccagggggcaaaaaaaaccgggaaactctgggtttttttatttttcagatacttcgggaattgtttatttatttttccccggtttttttaatgagtaaaaaggtaaaaaaatcctggaaaatccgagcttttaaacctttgggcggattttcctgtcatcctctttccggattccggatgatttgagttgattggtgttgctacatccttaagggagcatcttgaatgtttctacagtgctctgctttggaaataggttgctactccatacatgcacttatgcagtttcattgaacttggttctagatcaggtgccactcgtgtacggttctcacgcaaga

SEQ ID NO: 90664 - DNA, 592 bp, Eucalyptus grandis
  Intron number 2 from transcript Egrandis_v1_0.022962m (loc us Egrandis_v1_0.022962m.g) derived from phytozome v7.0 (c hr-ID scaffold_681; pos 708 to 1299 reverse strand)
tttcggatagtgaaatattggacccggtactcgacttctcttcttttgcttcccctaattgagcatctctaacatggttacaagtgcaggtaaaattgacatcatcatcatttctctgcacatgtttctcattcagcttcttgaagtttctagctttctgagttcattattttctagttccttcctctgtctcgttattatttaagcgtgatttaccttcatttccagttgaacttcgaacactagtatccatgagtcagaacctttaccacagtattttgtagaatttcatgagtaagatcgagaaatcaaacttacagagaatcattttaagagagattcgtgactggtgttttagtggtagtgactagtgaaggttatactgccgaaactgattttgcagcaacaaagggggcaatttgttcatgaaaaaagaattacttcaattttgataagtgacgcgtgatttttcttgtgcaaaaagtactttcgtacaacaatcgagtttcggttatgcaaccctgaagctcatccctgggatcattctgtctttgcagacggcgttggttctttgtcacataaaaaacaggaa

SEQ ID NO: 90665 - DNA, 1007 bp, Eucalyptus grandis
  Intron number 1 from transcript Egrandis_v1_0.019515m (loc us Egrandis_v1_0.019515m.g) derived from phytozome v7.0 (c hr-ID scaffold_6; pos 27566252 to 27567258 reverse strand)
gccgccgctcctttcgcggcgcgattcctcttcgggtacgctcccccgcccttcccgccttcccagggcatcgtcctgtaaatggtttcttgcagaaaactcatcgctttttttttagctgaaattcgcgtttgcccggcagttgatgcgagtctccgatacgatgtggcagcgtaactggattcttgcgagaaagaaaatttagagagtttgggatatcggggctttttgggttttagcgtggagatcagagtgacgtgttggtatcttgagctgtgaagattttcgctttggtagtctcggagcaatgaaagctcgtgaccgggagcgattatcttttgcgtcgcgattgtcgcgtgcgcggtgtgtcattgcagtattgtctctatcatttaacatagtgtgattcggtattatttccgatgtggtcagcttggtgtttcgggatacataccgaagttagggtcaccttgcaaagttcttgagatcctaattatgcatacggatgatgtgaactgatttttcgcttgaccgagtgtcgagatggaaaatccccaacttctcagtggggaagttcagaaagttaggactgtttgtttcttatgatcagtagcttttgctgtgtatgtcgtatgtctagtgcaatccgacgctggtgattttaatgtcgatgtaaaagcaagttgtatcctcatggagggtttatcttagatagactgtcttgttgtcgttctcgtgtttgcttgaggcggtgcttggtgatgtttgctttcactggtgtatgcgttttctcataagggatgagcagctatttgccctaaaaaataatgcatatgcatattttcttattactttgagatttcagtgattaaaagattgactctgctcggctacaatttttattggtctctactagccgtttcgctgaatattcttcctctgcccccttatccttcatgacatttcattctcatgcagcagttttaggttacctgtggcatactgcg

SEQ ID NO: 90666 - DNA, 992 bp, Eucalyptus grandis
  Intron number 3 from transcript Egrandis_v1_0.003933m (loc us Egrandis_v1_0.003933m.g) derived from phytozome v7.0 (c hr-ID scaffold_9; pos 11529881 to 11530872 reverse strand)
gcgtagggagtctctctttgtcatcacgttcttcggtaagtgactttggaatttaatggaaatttctgtttatcatagagtgcattttgtcagttctgtggcagaggtacagaaattttgctggataagatgagtgattgcatgcattggatgcctgcccatgaatgtttttaaatgaaattcagcagtatgcctgacagaggacgtgaacctccatgtgaaattattgtagttaggggctgaaatgggttagacaaggctattataacatgaattcgcatttcttttaaccaactggtcatcaagaataagcttggagaaaaaatcaaaaagagagaccagaacagtattgataaaagaacttaaaggggagaccacaaacttgatggaaggagcttactaataagcgcatactgtatacatggctcagctaaattcttccatgcttttacattttaattcttggttgttttgtttcctacatttttcagtcttgtaggcagtagcactgataatgcatagtacctgttgacaagacacagcaatgttctaatctgtagcattttggagctctttacatcctggaaacatgaaatgacagagagtagtcaattccattatttctttttgcttcttgtacctcttttcatctcattacactgctttaccatgagggctacttagtttgcaaactataataatgaaacaccatggagcttcctcttatatgtaaacaaggaactcgaattgtatttagcaaggggtgatctttgctttctcggggtagatactttctgagagctattgctggaagagcttcagttgaggacttttaagtcttacgtcttgaccattttgcagcaaaattttatcttttgtcgtttgtggagctacatgagctgttctcatgttggaatctaagttgaattactgctgatttgatttaacatttaattttctttaaacggcatgactggcaggaattttggact

SEQ ID NO: 90667 - DNA, 718 bp, Eucalyptus grandis
  Intron number 1 from transcript Egrandis_v1_0.012584m (loc us Egrandis_v1_0.012549m.g) derived from phytozome v7.0 (c hr-ID scaffold_11; pos 16489509 to 16490226 reverse strand )
ctcgctctctgccgaccgccctgaggtattcgcagctactctctctttctctctctctctacagtgtacgaggtggggggttgccattacttcttgtcgcttccgttactccatttccgtgctgcatctaaatttgtttctgcatctgtggtcttgactttccttctctttctgtcggcgctctctcttgtttttgccatttttccaatcaattacgcgactcctgaatttttcgcctttcctgtgaatctctgacaccgttggacttcgcgtgtgtatgaatttctggggtgcaaatctctgccctccctctctttgaacccgagcaattcctatgatttgtgagtgttctttttatttgttgagaatttgctttgggtatgcatccgccaattcaaagatccaaactttctccaataaaactggacaagatcggctctgggatcctgcacatcacttctacttcggaagaccactgaataacttccatatcgagaggcataaaaagggttggaaaagatattgttgtccaccaattcaaagataaagactttctccaatcttgcttgtcagttctacttcaaaaaaccactgaatcacctccaaattgaggggctcaaaaagggctggaaaaggaaacgctgtcctgtgatctagccctgaattatgattgcctgactgtcagtgttataatttgcagtgatttagttcgcatcag

SEQ ID NO: 90668 - DNA, 764 bp, Eucalyptus grandis
  Intron number 1 from transcript Egrandis_v1_0.015509m (loc us Egrandis_v1_0.015509m.g) derived from phytozome v7.0 (c hr-ID scaffold_305; pos 4254 to 5017 reverse strand)
cctatccgcttcttgcgtggcgagaggtaggttgtgattctccctgttttaaagctcgcgagggtgcgtgatttcatgtgttttggctttgattgctggtgctttagtgaattttggggctgtggagtatttttgggtgcggtttttggagtcaattgagttaatgctcaccgggtggagttggattttgtgaaggaatggaaagtctctgtggtgtggttgcaggcatggtttgctttgtttcgtctgtgacttcaactatactgccattttaagggcacttatgatgaagtttcgcgggcaaatataggcgacgtatctgggggttatagagtcctgatacatgtggaaactcaggagtatgttgggcgctaaattaatggagattgtatgaaggcttgttgccgatatgaaacttagtttcaataaagtacaaacttttataagaaattttaccttttctttttcctgatttaacttggagatgcttttattggaaaaccattttccattttcgactaacttgaagaatggggctgtcatcttgtgccatcaagttaattgtcttgtagactagattgtgactagaatgttgtctctaaccgactggatgtcgttgtttgcttttagtaagttggagtcgtcccgggcaagctaaatgtttgatggacctatatttctactcgggatgtttaatttggctctgacatcttctcctgttatgtacagaacttaaggtcaagcacaaagacagtggccctgct

SEQ ID NO: 90669 - DNA, 1016 bp, Eucalyptus grandis
  Intron number 3 from transcript Egrandis_v1_0.032021m (loc us Egrandis_v1_0.032021m.g) derived from phytozome v7.0 (c hr-ID scaffold_4; pos 1718965 to 1719980 reverse strand)
aaggtaagtcatttgaaccttttgcattatttttgttgctgtttgagtatggatttgttgcagtccctggatgggatattatgttgattgaattatgccaagttctcaatataacattgtttccaaggacatgaattgatttcctttcttctgttgcttagaaaattccatagccttgtgataaccgtgtgtgtgataattgtgagtctagatgcaatgctagaggcatctgctgcaaaggtttgatttgtttgtcatttaaaccagcattcttcttgccgtatataggtgcattttcctacttagaatccacatcaccattcttgaccactttggtcttcttgcctctacttacggtgttaagttcggttgcgatcatggttgtgtttatgacttgatggtcagaccttttattccatgagctctgactaggagaatcttctccgtactgttgtccaattcccatccctgactgacaaagaaattggtggaagaggatgaagtgcacattaactcatgagtactagatcaaatcctcggtgcatatgcatctgatgcaaaagttgaacctgttaagtgccagtacatgcatgtatttccaactcttaatggaagcatctgccaaaattttcagaaagagcacggtttactggtttgctgattttgcatacactaccaataaaactgatagtacctcgattggataagaaggaaaggtgggcgtgctttgttgtttagattgtcttccatgtgctttcttgggccttctcaaaagaattagtagtgttgtttgaatctcccctctacctaagaatacatattactaagttggtttctatttcttcatgtgatttgttaggataatttcacaggcgttttagatccgatgcgagcataagttgttgatttaattggaattgtcttttgctgttgaggcctagagaaaagcttacttgtatggtggtttgatttgaaatgcagtagagaaaatttctgaggaattgtcgggcaaccca

SEQ ID NO: 90670 - DNA, 519 bp, Eucalyptus grandis
  Intron number 1 from transcript Egrandis_v1_0.002010m (loc us Egrandis_v1_0.002010m.g) derived from phytozome v7.0 (c hr-ID scaffold_4; pos 36880005 to 36880523 reverse strand)
gagcagaaccgaactccacaattttcaattttgaggtattttctgatgcatgccatgtttttgtccatcttcaaagttattagatcgggtatagtccttgattatctgatgatgattttgatttcatctatatgtctcatatctttcggatcaattttttggttcaactggggatgtgtgtgtttgtgtgagagagagatagagagagcagctctctgcaaaaccacataatgagttgttctcatggtgcatggaaaaagatgacgagtttcctgttagttgatttggcagtggactgatctttggaactttgaagtatgtgatagcagaactatggtgttttaagtgttgaggttgctttaattaagacaaaaaacgtgagattattatgtgatttcagaatcttcttgtctgattcagccagcatatttgattatactctattaggcctctttcacattatttcctaaactttttgcagcaggtgtaaaaaaatttcaatcaacttgcagaaattgg

SEQ ID NO: 90671 - DNA, 757 bp, Eucalyptus grandis
  Intron number 1 from transcript Egrandis_v1_0.025323m (loc us Egrandis_v1_0.024319m.g) derived from phytozome v7.0 (c hr-ID scaffold_9; pos 20401717 to 20402473 reverse strand)
ccctgctcgagtccgggaaagtcctcccggtcaaggtgaggatcgttcgccccgaccctgatcggatatttcgtgggcgccggttgttcctcagagtaatttgcaattgcagaaccagccgcgaaaaagtttgcatttttatgccactgggtgcaattgtttgcggagaataaggaaataagacatgggtttttgcttacttgtgctttcttcctctgcgttgcgagcatagttgttagatagtatttgatgagctagtggctgatgaatattattgttttatactccatatcggaacaagtctgtcaatgtgtatagtttgatcccagttaggtagagtagttacaggcaagaggcttgaattctagcaatacagaaggagaaaaaaacacgtgttggagctaaaatcaagttagtagacgtgattgtctacgagcatttattgtttggaggaatcaaacagtgctacgacttgagcattgttatgagcaaactaaaagcgagtcttatttctatgggcgaacatgaaatgtaaatgagtctgaagtttacattagccattcatctaattatgtagacccagataaaagctaattcagttcggcaaggcacgtgtggatgcttctattaggacttgtagaaccctttaataagcaatggagataaatggcggtgactgttaagttgagaatgtcattgaaattcgtgtttggttgagtgttgatgcatgtcctattggttttgtaggttcataggg

SEQ ID NO: 90672 - DNA, 1042 bp, Eucalyptus grandis
  Intron number 1 from transcript Egrandis_v1_0.007462m (loc us Egrandis_v1_0.007462m.g) derived from phytozome v7.0 (c hr-ID scaffold_4; pos 31794057 to 31795098 reverse strand)
caagcggcggagggaggagatcaggaaggacaacggtcagtccccgttccctgggttcatttcgctttttcgcatgtggtagtggtagagtcgtgcctgtcggtttatcacgttgtgaaggaaggagcttcagttcagttgttttttgatttgccgaggaattacctgttcgactgtctcgcttcggaaatggtacggattgtacctcaatttgagacctagagatgcaaaatctcatttcaggccaaatttcaccgatatatgttcttgatgctgtgatttaagatggaagcgtttttgtgccttcaatttggctgcagaacctctcatgatattaatatcacatcaaggtcacttttgctcattaaatagtgatttcatttttgaaatccatgttattttttgaagatgtgctcctggtaatgtgaactatttactttggctacattcacgcatttcaatttcctcacttccagaaactcacaccgagcaaatggctataccgaactcctagcaccctcgaaagtactaattggaacagttcaaataaaatacctacctgaactgctaattatcatttgttctacttggcttaatgggatcactataacacaatctcacttcctggtttgcttatctaagtttatatttgatggtgggcattaaggaggtattagcctaactatgcaattacctatcatgaccatgaatcctgatgagctggtgttttcatgagtaatagaaacttacaactctttttttttttttttttaaagggaattccttgtttaggttctaactatgctatgatcactgaaacaagtcacgtttcttttcttgcctccataaatatgtattcattgtaaatatttgctgctgtatggcgaagttcatcttccgtcactttggctgttagttatctcattcacttgagatttgtcatccaagcatagttcccctttctggcaaaatgatcacatgatgacggaacttgtttgcctttgtagttttagaacccgttcagtttgaggagcagatattg

SEQ ID NO: 90673 - DNA, 718 bp, Eucalyptus grandis
  Intron number 1 from transcript Egrandis_v1_0.044028m (loc us Egrandis_v1_0.044028m.g) derived from phytozome v7.0 (c hr-ID scaffold_4; pos 6647903 to 6648620 reverse strand)
acggcactagatgtcagtttcgctctgggtaaatccggccatcagatcacgaccatgtttattcatgtgaatttcactaaaacagcttttctgcttccaaggaattctggtaggttcgataacttacttcataatgtcggtctgaatggttttttgtattttgtcataaactttaagtagctatgtgaacttctaaaacaagaaatataggatcattatttggaattttgttgaatagcttggcctaaataagtaaatgaatgatgaaatactgatgcttacatcccgtattcttggcctccgttagtcacatttatctatcaaaatccatgactagattgatccaccaattgtaatggaattgaacctttaaaacaaaagaaggtttgattatagtatgtttatggactttgccttgaacatgtaatgaataagtttcattttcaggtcattggaaaaagaggctgctctggctgataataaccattcctctagttgtatttgtcatttcagccttcgtcgttatctcaagatggaaaagctacacctgcataggaactgaatctactcataagcaaaaatattggttcttttctttctttttctttttttctttttttttttgacccatttctctctgaactgcttgattgttgaagcagcatggaatgtgaaagaaacagacacgaaaaggagcttggagttgctcctgatccaa

SEQ ID NO: 90674 - DNA, 730 bp, Eucalyptus grandis
  Intron number 2 from transcript Egrandis_v1_0.018144m (loc us Egrandis_v1_0.018144m.g) derived from phytozome v7.0 (c hr-ID scaffold_11; pos 9592891 to 9593620 reverse strand)
cctcaaggtgagacaagacggcgacttcgggaaaggtaagaccggtctcctgctcgataagttgggttttctttttattttttattttttaaatgattttcttacgcctggcattgtgctactacctggctgagttctcgaatttgactgttgtctcttgttttggtgcgggttcacttcacgactttgaattgttagaggtagttgctattcctgaggatggcgagttgctgttgtgaaattggttgtgttgttggcgatgtgtttccattttcattgacagttctccggtgaaatttgccagtgcatgagtgccaatggaaagagatgtattgtgcaaaaacaaatgacattgacctgaaagctgcttgcacgtgatgagggcgataaaagaagaatctctgtgtactgttttgttttctgaagtcatgagagaaagtatattcattgttcggcctaattaggagggttcattctaggtatgtaatttactctatgataacttgtgtgcagtgccacttgctatcactttacattgtgttgttactccgttttaattatgcagtttctgataagaagaaatgagctcaagtttaaaatatttaatgcactgttgaataaaattgttttttgcatatttaatgcgacgaagctgctcttggtcagtggcttctacagtctgcctttctaacattgagcatctgttggacaattttttttccaggtgtat

SEQ ID NO: 90675 - DNA, 937 bp, Eucalyptus grandis
  Intron number 1 from transcript Egrandis_v1_0.012053m (loc us Egrandis_v1_0.012053m.g) derived from phytozome v7.0 (c hr-ID scaffold_9; pos 35104019 to 35104955 reverse strand)
aggtatgatggattgtttgtggagatttttgctcgggaaggctttcgattgccggtgcgattggtagaatcgtcggtatatatgaggaattggttgcgtcagcaggaggaagcggaatgattttgagatgcttatgactggggtttttgtcggtgtgcttttgtgtgttcctgaatatgtttgaattcgtgttgtggtggagtgagtgaggcgctgcagctgacaaaggctaggttttgttgtgatgttctatttgcctgtttgaaatatggtggtgaagatactccatttgatgattctaatcaatggcgggcgaagatgatatttgttgcacctgtaagctgcataaaatctctctgttggctggtgcttttcttctttgtcatgtatgtggagcattgtcagtatatataatgcgttgtcattatgcactcgtctgtcaagaaaaatggtttgagcccgaaattatctgctgacacttcgaatttcattacagtaagaagtttgtttgacacagtcagttaattcgggtgagatgaactgtttcttttctcccctggtggagttaaatgtgcctgcacttgttgaaggaaacttaggaggctgaactgaattattcttggagtttgctaaacagtgcattacgtctgcaggtggtttgttaaagaaacctttgaagaacattttatatatccttatcattttacattaaatacggttcgaaaatatcattctatgaattattctagcattttgtgagaattttgtgatttctgcaattattggccaaattgaaacctatcattgttttttcccaaccatatctgttgggtatgcttgtaactttgttttttgctttgtcgattcttgggcgaccccttttaatgttaaataattcaaaatcgtttctttactatgcaggaagaggaggatcggt

SEQ ID NO: 90676 - DNA, 780 bp, Eucalyptus grandis
  Intron number 1 from transcript Egrandis_v1_0.015778m (loc us Egrandis_v1_0.015696m.g) derived from phytozome v7.0 (c hr-ID scaffold_9; pos 27908109 to 27908888)
gccgtctcatcattgatttcatcggtgagccggctcacacgtagtttactagcatatatggtgaatagagaccggtcaatgctgttcgtactctgtttttttgatgcaattgatgttctttgcgacggacatccaggatatcttgtgtcctttagttggtagtctcgccagaccagactctgggcaatccagtgattgatagtgtttttgtcagtcatttgatcttttagcccaaaggccaagaaaggtataaaattccgtcagtcgtgtgatggagtgagcttagcagagtagtagcgtggaaagatggcgttcggttcgtctcggtcgcggcttctgtgtaatttactctcagctagtcacttacagcagaaagaacgttatcctagagaaatttcgtggcgtagatgttttcgccatccaaatctttgaaacgaatggtcacctctactgtgtgaaaagcttggcttatgcattgtctttcgtgtgtaatccgtgggcttttgaattgctctcaagtgcaactgtcgatggtttctgaagcccgttgttgaaatactaacgcgacaagcctcagccatattggccctgccttacattcatctaccgcttctttagaatgatcaccatatcggctgcaatttcaccttctgagcttgtagttgataatttggaattactcctagcaaaaagcatttcttaccttctacattcaaactctatcagataatacttttttgtgcagctgaagatcttaaattgccctatttgagtgcatat

SEQ ID NO: 90677 - DNA, 605 bp, Eucalyptus grandis
  Intron number 1 from transcript Egrandis_v1_0.036903m (loc us Egrandis_v1_0.036903m.g) derived from phytozome v7.0 (c hr-ID scaffold_217; pos 9075 to 9679)
agttttatttttcgggagttcgtgaattagttttggtaccgacttgattcccgaatcagagttttgcttcctgttggggttttcttcttgctttggcttttcgggttccccagtttctggttgtttctgctgcgaatcgatggtttggatcgtttgagctccgcctcgagtttgctttcgtgttgctctttgacgatgctatgatatagccgattgcctgctttcgtgtttcttgttcacttaagagggcaacgatcgtttcgtgtgcggaacatgaaaaattgaaactggagaattaggtgagcacgttgatataagcaaacgggtgtaaaaaatctcgatcatctttaatcatgtgaggtgcagaggaagaactttgcttcaatggatagtaacactaaagtttgatttatgttgatgatgaaagcctttgatcttggaaaagctagggtaatttcatcaattaatgggaatatcaagctacattgccggacaatttttatttttttttttatttccatctgactgatgtcctcacattaatcatcttatacaaaaaaccctccttgaacaggcatcattgacagcactcggctgaaggtcgt

SEQ ID NO: 90678 - DNA, 784 bp, Eucalyptus grandis
  Intron number 1 from transcript Egrandis_v1_0.020430m (loc us Egrandis_v1_0.020430m.g) derived from phytozome v7.0 (c hr-ID scaffold_6; pos 4550016 to 4550799 reverse strand)
gtgaatctgtcgagttcgttggcgtcaccgaggtagtagattggtttgtgcatgttcttgttttgttttgtccttttcttggatgtcttctatttatttttgctcatggaattccatagacgttggtgggtttgtgttgaaaagggtagatttttggctggattttagctgaaggttttggttggttttctaatggatatgagcgacagggaatggagaaattaattattttctttaaactatatgatcgatgttcagagccagggcatgattaggctaaaaagtacagccagaaccaatctcgacttgtagagcatgagagattgactttagattcggagttatgttatgcaggctttcttcaggtcctcttttggggtttgaatctgaatttctagggttggtttgcagaataggaaattgcctccatcttttcttagaaagataattatttttgcttttcccatttttttaggtaatgctggaacaatgtttattttaacacttcattcttcaagcgcagcaggactagaattgctgttaaaatacttctttgctatctatgcatagactttcgggcttatgaagagtcatttcaaagtttgtttctttgatatgagtgttgcttcatgtaagcgtgtatgagactgagcctgataaaactgtatttagggaagaatatttggcagtggaaacaaagtgaaactcgagggtttttgcttttcctgatgaaatgcatccattaaattttgatgagacttttaaatgtattctatgaagggtg

SEQ ID NO: 90679 - DNA, 768 bp, Eucalyptus grandis
  Intron number 1 from transcript Egrandis_v1_0.024873m (loc us Egrandis_v1_0.021788m.g) derived from phytozome v7.0 (c hr-ID scaffold_418; pos 3362 to 4129)
gcacgcatctgaatctgctttttgcgtcctaaacggtatgttgctccgtcctcatctttgccattttttttccatttgtgagaatcaaataaagactctccaactgaacatccttatttacctggatcaaatatatgcgcacttgacaagtagatctgatggattctatgcgaaatgaagggttaaaagacctgaatgtaggtaggtggacgtaactacgagatgcaataaacttctcggagagagaccaagaaacagagagagagaaggcgcgagaagagagaggggaagagcgacaacgggggatagcagcccgtcgaaagggtcgagctacaccagtaatctctattgtcgacactagacaagattttttttaactctatttctcacgaatttgggatttttgttttaaaagttcatatctggatatattttggatttttccttgccggcaacgatttggtcaaaatccaacgatattctgattccccacatctccttgtaattctagaattaatttttttcttgagttgatatccaagttgtcattaagttgatcgtctgtttcttgtctaaaaaaaaaagcaaatttttcttgggtctgttgaatataatatctgcagcttggctttcccgctttaatgcttgtggatgttattatttgcttaagaataatgctatgcgcgctaggaaaatatacacaagattggtacgttatataatcgggtgcgctctctttgcctgcaggtcgataatcgagacgacaag

SEQ ID NO: 90680 - DNA, 907 bp, Eucalyptus grandis
  Intron number 1 from transcript Egrandis_v1_0.036917m (loc us Egrandis_v1_0.036917m.g) derived from phytozome v7.0 (c hr-ID scaffold_6; pos 15374420 to 15375326)
acttatattaagacggttgcgcaggttgtaaaaaggtcagtggttcgagattgtggtcttatctgtttgccagggttgtgttctgtgtggcaatgcgtttgctcatcattattatggttgttgatgaaatgaatgagtaggttgagacgggtgctgggtttttcaacttcatattactcacaccatgttctctgcttgtactctgttttgcctttgtttatcggtcatttttcagcttctccgtgatatgttggaattacctatggctggagggtgagatgactgaattcttcgtgccatgctttgcttgtctttcacaaacgaggtctaaaaatacaatgacacacagcttttcgtgaataactattttcttgttctggccgagaacaatgactcataatttggtctcttagctctggtttaattaaacttccaattagatctgagtatgttttgcagtgattattatgctgtctctttcaggtgcttaagcttaaaggtgattccttattgctaccttatgtggcagcattgatgctatgttttgatttagaattgattttgacatagagggatgattgggtctgtttctttttttctttcattgccagatgtggcacatttccttttcatgtgaagttaacccttcttgaaattggtcctcattacaatatcatagctagtattatggtgactatgaggatgtttaagaatggtatttggcgggtacagaagcaacagtttctctcgtgtgttaattcttttgcgaatggttcttgaagtgatggtccttgcctgtagtcattgatcatctcgatttattactgtccctattattttgtctaaccacaatttgttgcttgctattacagtgaagaaaaagccaggagttggatctacactgttg

SEQ ID NO: 90681 - DNA, 769 bp, Eucalyptus grandis
  Intron number 2 from transcript Egrandis_v1_0.043795m (loc us Egrandis_v1_0.043795m.g) derived from phytozome v7.0 (c hr-ID scaffold_6; pos 7547048 to 7547816 reverse strand)
agtcaaacacattaacttagaaacactacttcttggtcacaatgaatttagtgatttcccctcatgattaggactaggtatacccggttctcagaccgggccacccggaaaatagggtcaggaattggtttccaaaattcggaacccgtttaaaccggttcgggaacaagttccaagtaattacctacccggaaaccggttcctagatcggttttggaaccaattcccgaaccagttttgcaagtagaggtctaaaacccttctttttctcccaatttctattcttactcccgcaatcacacgacatttttcttcttggctctctcaaacatgcacggcactcctcctttgtcattcctcttcctcacttgcttccctccctcatgggttccctctcgcactgttcgacggacggacggtgttcatcaccgccaaattcttgtgtatcatatggattggctcacctaatttctcttttgtaggaggagttatgcttgcataaatgagtagcttcatgtagtagttgttggaataaggctaatattagacccatgtttgttgctaattctttgttttatgattttatttattataattagccttgtggatccttaatttttcgtttagtcaaaaaactcatgtatttatttattacaagtgcttaatgtttcgatacaaattagaatgattacgttattttctcacgtattaatataaaatttgaagtcgtataggatatcgggagattgcaaaacaagttcaagtggaa

SEQ ID NO: 90682 - DNA, 533 bp, Eucalyptus grandis
  Intron number 1 from transcript Egrandis_v1_0.051486m (loc us Egrandis_v1_0.051486m.g) derived from phytozome v7.0 (c hr-ID scaffold_64; pos 40564 to 41096)
ctttctgtttcaggggcactcacttcatcccaaaggtagtaggaagactataaacactggtagaatgaattaaaagtgggtggacctaacatatggaggaagaatgattaaaactcaaaagagggcaaaatccatggtctgatgatgtatactttgttttaagaactgaccatcaaagaattttaactcggggaagaaggcagatagaacatgtgacatgtgaagtgactcaaaagttccatcttagaaagctcacagtttgccggtggtgagaacaggatagatcgttgcttgtttttctgtttgaattattaagttgatcagtgggtgtgggtttctgttggttttagtggcagcttcatgtgcgatgaattagtacttgaatgtgggtgacattctcctagtgcttgtatatgctgctgctaccgattttgcttttctagttatgtctcgattttgttttcttctcatgatttacttttttttttctttcatttatttgtgcagactgtcctgggaaagtgcttcgaaaa

SEQ ID NO: 90683 - DNA, 805 bp, Eucalyptus grandis
  Intron number 3 from transcript Egrandis_v1_0.029174m (loc us Egrandis_v1_0.029174m.g) derived from phytozome v7.0 (c hr-ID scaffold_4; pos 27929449 to 27930253 reverse strand)
gaacttttgatactcttttgcctgcacaggaggtaattgctgtgttgcttggacacacatgattaacatacagcagtttgtcattgaattatggtttcttggtttcttctctcattgagaaaccttccaaatcttgatgacaaatgagtcaaagttttttaaagcaccttagcagtagtaccttgagatgcagttatcagtgtctttagccacaagaagctaggtaaattttgggtgattgtgatgatcactgttaagcaatggcaaagtttgctagatcagggtaaaatctctggtaacgttaaattaactgttattttggtttgcaccttgtaaggtcaaccaagaaatacgacagagaacaaatagaaacattttctaagctttaaatatgatgataaaccatattgactgaggattatgaaagcattatctttaccgagctcttctactacaatcttatggcgtaggaggcatatatccatgacatggaatgcaattacatttgatagtgatatatgattttcatgtgatcatggagaatttgactttgaaaaattgataaccttaggagaaatgcatttacatgagaaaaatgaactgaacagaatgggtgaaagaacgtaatgcgatttggtgttgtcgctgtggtgtaatcttgtcgtaacatgcttttacccttactcgatgctacattgtggatccctttaccattaatccaactggaaaaaaaaaaagaggaatgtgtctaactgacgcatttcctgcagactgagctttacatcgaggactggattggattgaa

SEQ ID NO: 90684 - DNA, 834 bp, Eucalyptus grandis
  Intron number 2 from transcript Egrandis_v1_0.001650m (loc us Egrandis_v1_0.001650m.g) derived from phytozome v7.0 (c hr-ID scaffold_4; pos 14067846 to 14068679 reverse strand)
aagcatcacttttgcttggagtgcatcgaagggcggttagtgcttctgtgatcattccagtttgaagtttttttgtggcgttgaatttcccgttcagtctctatttggttgtaatggtgggttgttcattttttttttgtttctcctcacttgaatcattgtggattatgagttcttgttggtggccatcaatgttcatcttttttggccggaatgctatcaatcttcatgggatggatttaaggagtgaagtgtgttcatcttgattttagtatctgttaaagggaggaaggttgttttttgatgcatcataatggagtaaaaggaaaaaagagactacatattatgctacctaagatgggcaaaactcaattactttgtaataaaggatctgaaatcttgattttgcatgaaagttggttctgcatacagggaacattggaaactagtcatgcctctgtgtcgtagtacagctgctaaacttatggtcaacataaattatagtataacttatttgcttaaactggagccgaaatattgccatctaaaaagtacatttcttgggttatgtacaactccaaatccctagcattgtgctatcttcaagaaataatatcctttcaggcccatgctttggagaatattgaccttttccctttcaaatctcttgaaaagtcaaccaattatctcatttctagttattgttaaccagtaggagggggcattcttaactttattgtttatttatattttctttttttttaatatcctatagtctgtaacatatgaaattcaaatgaatccaggtacttcgacacacaagaagaagttaag

SEQ ID NO: 90685 - DNA, 777 bp, Eucalyptus grandis
  Intron number 1 from transcript Egrandis_v1_0.004053m (loc us Egrandis_v1_0.004053m.g) derived from phytozome v7.0 (c hr-ID scaffold_9; pos 31896453 to 31897229)
agtatcgttttcgcacgtaagagaattgaggaaggagatggcgatggaggaccaatagcttccccaacatctcgaggttgtagcttggtgagaagaaagcctggggggtccaattagtaataacaacactattcataagatattagagcccgcttctaattcgtctagtttctctgtatgtccttaatcaatcggtctcaagattttgtactcaagttgatattttgagtttttgcatatgttgcgacgcaagtattgctagcgaccgcaccttttcataaaatattaatgtttgagagagacgggcataacaagaaagtgatcatcttgacattttccttttcttgccctagaatctcaataaagacgatagagctccttaaaattgccctagaatcctacaacttttcgaacgatcatctatatggatcaatcaaagcatctccagcaaacattctaagcttagaaaattacggccgcggtcttccaacgctaaacctgtcgaaatcggccctttaacgctaagaatatctacgcagaagaggaagaaaacagaagcccaagctgcgaaatccccacccagacatcggaccctccgaggcccaatagatccgggcctcgtcaggcccggcccatcatcgcaccgggcgagcgaccgctggctcggccttaacccgcgaaacgtcgccgtcgcggctcccctctctccgcgctcaacgcctgcgcgtctctctgtgatcagagaaagagagaaagaaagagagacagagagagaaa

SEQ ID NO: 90686 - DNA, 1001 bp, Eucalyptus grandis
  Intron number 2 from transcript Egrandis_v1_0.029639m (loc us Egrandis_v1_0.029639m.g) derived from phytozome v7.0 (c hr-ID scaffold_4; pos 40908932 to 40909932 reverse strand)
cgctgtcgaacccatcgatcagctagagattttcgatatccttttcttcgttattgcttcttgtttgattcgattcgatccaatttgatttggttataattcctttcttttaaggtcggttgttttttagctgtttcatgcttatgcatagtcttagtatcaagtatgggaatgattggtgagttctttatgctttgtagacagttaatttaattcaaacacttttcaaatgagatgtgggaagtttatctagtgcgagtaaagtaaaagtttacaattttatgtcttatgtggaaagtgagcatgcattgtcagcttttgtttccaccggctttagattctaattttcaagagatgttggcgtagacacctagtactcgatgtaagtttatgcagagtgtggatcaatatttggccatattgctctgtggtgcttaaactggtgggtgttcctctcataaggtcatccactggttgtcatatttggacgaggtcaatagctatggaatcgatttccatttacaagggagataatggtgtttattttttcgacttgctaatgagttgtgcttttgatgatcggctgattttattgaggtaacttctttatgaaattctagaaagttggagatatctgttattagtatcgtactttatttcaagtttcgtgatctttgtatgtcagagaagaaaatgcttagccagactaggtggtgcttttggagagtctcatgagttagtgcgtgaaagcccataagttgatagtaagattgatcttttctgcataaactcatgattttactgtttgatgctgagaactcttgaatgtatgtttggagagttcacactgtgcacaggaaaaagaataagatgttctttattcatgtggagagcttttggaagttgaatttgaggtttttcatgcccgatcagtcaagaatatgttgaaattcttaatggtcatacatcatctcagagatataaaggacccagaacaccca

SEQ ID NO: 90687 - DNA, 577 bp, Eucalyptus grandis
  Intron number 2 from transcript Egrandis_v1_0.053307m (loc us Egrandis_v1_0.053307m.g) derived from phytozome v7.0 (c hr-ID scaffold_9; pos 3558853 to 3559429 reverse strand)
gatacatagcaccaggtgagcaatcttcaattgattttactgaaaaaagaagtgttgtaagggtaatcaacatcgttgcagccccctcatgcattgcagaacttgtttagttgcccatattagactgatatgcagcaacttttatagctttctttcatgcttaatttcaatacagaaaaatttggacattcctgctgcctagaccttggcttattcatctaacatcccaaacaatttctaaacaggttgctttggtcaaaattatatgggaaagttttcctatttcctacctttgattcaataaaagatatgtttattacacgtagtcattgtaaaagtagtaaacaaattcctatgctatggatcattaagaacaagatttcaatgacgatacgccttgaaggctttgattaacatccatgtgtccctcatttgtaacagaagaagttgattgatagctagtttcaaaatcatctctactgtccatgttctaactctgagatatgactgcacaactttgtaattctctttccttttcacagagcttgcttatagtttggtggttaacgagaaattt

SEQ ID NO: 90688 - DNA, 987 bp, Eucalyptus grandis
  Intron number 1 from transcript Egrandis_v1_0.041503m (loc us Egrandis_v1_0.041503m.g) derived from phytozome v7.0 (c hr-ID scaffold_4; pos 39760064 to 39761050)
caccaagtggaaggagtctcgtggctgataaggaggtacagcctcggcgtcaatgtcgttctcggtcagtgtcgcttcttttgtctctgaactcgcgtttttgtcggtattcgccggtgaggatgtgggagaatcggctctgacgatcggaatttcactggtggtggtgcaggagatgaggtacggccttcttcattttttctttcaccctgagcttttgggagctcgttgtttcgcctcgcgacagcgaaacgtttcccttggcagtatgcatttgggattgtttgaacatttgtttcgttttttcgtttccttttattttgtggatagaagctgctagtttttcccaatacaatacatcgtgaagggcaagcgcttgcgaccttgttctgaattacaataatcagggcattatgtcgatttcttgcttctggacttactgttttggagtttaatgactcgagggtacttttgagaatgactacctagttcctcgtgagaaactatatgtaaagttttatgcacgttaaattcgtttcactttgagttggcgatataatcgtgttaaaaggtgtaaattcatcacgagaaatgccaccctactccatatgatgtccctcgagccacaagaacttcaccttttttttttgctcatattggatgcgctcgattgtgcttgctaaatggttgctggtcgtacatctatgagtataattggataaggacttccttatctttgcgtctctgccttttaagctaatctaactttgttgttcgcagatgggattagggaagacattgcaagctatttcattgctgagctatttgaaagtttctcaagtgtcctctgggccattttgtgagttagaaggagtttgctttgatatgattcttaactagctccttatttctgttagtagtctgattatccttcttgtgctgttctttgatgcaccttagtggtgttatgtcctcttagcgtgaccg

SEQ ID NO: 90689 - DNA, 676 bp, Eucalyptus grandis
  Intron number 4 from transcript Egrandis_v1_0.010055m (loc us Egrandis_v1_0.010023m.g) derived from phytozome v7.0 (c hr-ID scaffold_11; pos 27366985 to 27367660 reverse strand )
agctattgcctattaattttgacggattgtcaaaggtagtaatttaattttgatcctgttgtcatatcgctagacattccagttttgctttgtttgttgaatgcactcttgtgtgatcagtttgaacgtgttgttgatattctactgtggatgaaaagttttcagttcgtctttggagtttgaattcaaaaagtgccttcttgatagaattattatcaagtgcaaggttgtgtcttttctttacatgttgcatgagccttgtatagtcagctttgagttgatcaagaaataattaataatttgtccctccctctaaattcaatcattgttttatttttacaaaccttatgtcattggcatgtctttcacagatacttcttgaaccaatgttcagtatctgggaagtatgtgtgtgaacggataatttttggcggtgggagggtggttttcatggtgatattttaaaatgttcttatatgtgagagggacttgagtatgccaggacttttctggacctaagcccacatcttcatggttattttgctctattacatgcctaaacatattcattagtttgtctcttaaatttggatgatactttccccagtttgaaagatcaatgttttgcttttctattgcaggcagtgaagaagggagacaccatctttattggtca

SEQ ID NO: 90690 - DNA, 558 bp, Eucalyptus grandis
  Intron number 3 from transcript Egrandis_v1_0.010055m (loc us Egrandis_v1_0.010023m.g) derived from phytozome v7.0 (c hr-ID scaffold_11; pos 27367779 to 27368336 reverse strand )
aggccgccatcaagagtaccaagaagctttgcgctgtaagttcctcacggcgactcttgtgtttcaaagtttaaaaaagataacaccttaaggttgaggcactaacagaatttttttgttgggttggttttgccagatttcatctctttatttatcaactaagttttcaatcaataggtgaaaaagatgccattttgatggttcatattcgaagtaaattacagaggctgtgcaggcagtctctttttttcccctttcgtggacaatgtggattcagtgctctttgagcgccgatggtgattcttcttgtgtttgtgcattcatagtttcacttatgctatgtatcacaaaccaagagggaagaaaaaagaaaaaaaaaacacccttagatttaaattttcactgcgcttccttctcacagaaatttcaaaattttcaaaattttccatttaaaatttcatttttaccactctccgaaacatagccttactcttcttttgtgatatctgtctttaatgagtttgagaataatggaggagttttgtttatcatcaggtt

SEQ ID NO: 90691 - DNA, 487 bp, Eucalyptus grandis
  Intron number 1 from transcript Egrandis_v1_0.025614m (loc us Egrandis_v1_0.025614m.g) derived from phytozome v7.0 (c hr-ID scaffold_11; pos 16272433 to 16272919)
cccttctaactttgagacctaaggtgatttgattctcctatgtttcgtcatatgcctcgtgaggcagctagctagttttgatgctaaaatatatttgcttcaatgcaacaatatagctttagaagaaattaagtttcaccttcgtttagacattagatcgcgtagattcatgctattccgggtttctcttgttcgagcgatcgttcggattatacaatcgatctttccaaggagtctaggctttcagaaaagagctgtgaacgtaactgctggattataatatacatgtattctccaattaatgcttaacgttatcgttcttttccgattcaaactttgctaggctgtccagagggagtaattgagattgttttgagatttgaattgactctagctacaaaaatctgcaaaagaccacaatgaaattttgtcccattttcttcagtggaacttaatgttggtgctgcgttgtcaacaggttctgagc

SEQ ID NO: 90692 - DNA, 900 bp, Eucalyptus grandis
  Intron number 1 from transcript Egrandis_v1_0.046383m (loc us Egrandis_v1_0.046383m.g) derived from phytozome v7.0 (c hr-ID scaffold_11; pos 22250407 to 22251306)
gaaggcagccacctgttgacaccacgtggcagcaggttatgaatgcttcctttttctattccattttctattttggtggcgaagtcaataccataagaacgtagaaatttggtctattcatgtgaaatcctcattttcactggggtgctgccgtaaataaaaactgctgatgttttgctctcgagattcagagtcttttgattgagatgacagtgatttatgtttcagctatcccgtcttactgtatatgaactattacaagaaaaaaagtatttatgataagaagcattttgttttgttttttatgttaagagggtattttgggctgccctattttcttgggatattgctgattgcagttgctttataagcacggaactcctatgcctgtagctgacttattttacacatgtcttgtttcaacagatatacttttgcttgagaactgggtattacaatgaagcaagagatgttgcctgtcatcctgtagtgcacatcagtttgcacctctggtactatttgtttactgtgtaaatgtactattgttgttcttccctaatggttatttgttattggcagctcacagaatggataaatactggaggtatggtttctgctgagacagctgcaactgcttcagaagaatgtgaaaagttgttaagaataagtgatcgggtgggtcgagctgcatatgataagaaaaggttgttactatatgccatgatatctggttctcaaaggcttgtcaaaaggctgttgagagatctatcggcacttttcaccaccatagaggatttcttgtggtttaaattgtcagccatcagggagttccctctcggaggttcatctgctattctaagttaagagttcagtcccctatagtttagaggatttgcaggc

SEQ ID NO: 90693 - DNA, 447 bp, Eucalyptus grandis
  Intron number 1 from transcript Egrandis_v1_0.049808m (loc us Egrandis_v1_0.049808m.g) derived from phytozome v7.0 (c hr-ID scaffold_776; pos 11148 to 11594)
cttccaactccaactcgacggtagcatttaagttactccttttcttaaattacttttggaaaaattttcagctgttatgtcttctgaaaaccgagagcataaagaataatcttggattggtgatgatcattctacagcatttaatcagaaaaaagaagttctaatttattggaaaacccatgcaagggttggtccttgcatgattcaaaatttctgtgcgaacctttgggatgcacatatgacttgacaaatgtagaaagaactttaatgtaaataaaattggtcttaacggtataatctttaggtaatttcaactcagatttttattgtgatcaattggatcataggcaacctcatatgtttctggcatgcttactcgatttacgtcaattacctctattttttgttttgttgaactttcaattttgtattaattgtagagttctg

SEQ ID NO: 90694 - DNA, 482 bp, Eucalyptus grandis
  Intron number 1 from transcript Egrandis_v1_0.000005m (loc us Egrandis_v1_0.000004m.g) derived from phytozome v7.0 (c hr-ID scaffold_9; pos 34068988 to 34069469 reverse strand)
gcagcactctcgccatttggtggaccctgatctacgtactcctctctctctctctctctctctctctctctaaactcactcgctcactcacgagcgtgattcaataggcacggatgttcatacgtacgtataggaaggatcatagcgtgtgttgtaagcggggaaggatgttccttgctaaggaaggatgttggggtgtttgagcttaggtgcgagtctgaaagggggaaatgataatctatgatcgtaatgatatggtgaagggatcatgtgggtgtagtgcttctatcgtggtttaaactttagacatctaattgttccgtgggctatctgttcttcaatagagggtttctgtactgtgatttcaaaaagtagctttgtaaattttatttctcatgccgtgttttggaatgagtatctgctggtgtgaccatgaggttttttttgttgttttgaaaacagcgattcaggcgaggctagtg

SEQ ID NO: 90695 - DNA, 637 bp, Eucalyptus grandis
  Intron number 1 from transcript Egrandis_v1_0.033138m (loc us Egrandis_v1_0.029667m.g) derived from phytozome v7.0 (c hr-ID scaffold_6; pos 21166623 to 21167259)
aggtcgaccaggccacgcttttcgatctgatcctggtcagtgcccgtttcgtgggagattttgggcggtgatgctggtttgccttgtctcggcgttgctcgggcgagggcgagggttttgatatcgattttgctgattaatatgtgtttgtgcgtgtagtatcgagtaggttcttcaacagagtttagggtttgaggagatgttgtagtagtaacgaatgattgagatctgctgcgtcgattttgttagaagttgaagtgttcgtgttgcggtgattcttaggtgtaagatattattttttcttgttttataaattttgaagggcgaaaaactaaatagcggatcgcgtagttgatgctcccgagtcctgaacttgtttggatgattggcaattctttgtttcgcgtggcttttgaagaatgaagtgcggtctggtgctcatccctgttgcgttttttattcgatgacgacttatcactcgtgggttttgcaccatcatagataattcatgagcttgtgaagttgatttgagtcttgtctcgttgaggattgcagtacttatcattttctgtgtggcattttacttgatgtgtgataggcagcaaattatctgaacatcaagggcttgctggatttg

SEQ ID NO: 90696 - DNA, 701 bp, Eucalyptus grandis
  Intron number 1 from transcript Egrandis_v1_0.003684m (loc us Egrandis_v1_0.003684m.g) derived from phytozome v7.0 (c hr-ID scaffold_11; pos 24145122 to 24145822)
cagctcttccttccccactgctcatcaccactcaggtatggagatataagtataaatacttttttatatttctacataactttcttgggaagttgatgcaagctggtatccagaatgccttttcttttcttttcttcttcttttcactggcttttgtctgcttgaaatgctgctccttgattcattcacccaaagtatcgatctggttccctacttcttccatttccctctctctctctctctctctctctctctctctctctcttgtataaaaggagaaaaatgaccttgacattagaaagtggataataattagtacaacactaaaaaaatttagtatctttgtgcactcttctctggtgaatttagagacatttttggcaaaaattacgttcgcttacattgatgaccttgttagaccaatcggaatcaaaggtggttcttgctcattttgaacatgacccaaatttcgaaagaaggcatagctcggtttcctgtctcattaatcacttttccttgcttttttagctttggttcgaacctgacaattaagattctcttctaatgatcggttaaatttgtgtaacttctgactaggaacatcatcattattatcatcaaaaccgctaaactttatttgagagacgtttatggaaaatcttgcatgtggtgatagctaggtgacggaattgattaatacg

SEQ ID NO: 90697 - DNA, 713 bp, Eucalyptus grandis
  Intron number 2 from transcript Egrandis_v1_0.017038m (loc us Egrandis_v1_0.014792m.g) derived from phytozome v7.0 (c hr-ID scaffold_4; pos 21233648 to 21234360)
tctccccctgcaagtacttctcactctttgtccaggttcacgatctgccatttctttgtcatcgaattcggtcctgcccgtgtgttctccgagcttcaaaatgagaatgttggtaattatatacttcataagttacttcacaggataatgcttatgcgcaattcgcgataaagcatgagggtctgcataaggacgattgcatacagtctgtcttcttaactgttttcaattcatttttctcccatcaatctatacatagtcgggtattaaaagactcttaaaattcatagccaagcacgataccgtaaagagattttacattgcccactaaagctgatgggacaaggcttagtcttttactgttgctgacttgctattagtacttgaagcctcatctaaaaaacatggcatggattggacagttgctttaatttgggaactgggatttgatacctttgggctaatccctatttctgcaattttcgcgtcccttattgttgaatatttcaatgtttcatcatattcggatgtagtattccaataacaggaaggtaaggcaacagctcaatgcaatgcaatgcaatcaaaatagttcaccagcccttacaatgttcatttaattgtctggctaaagagctaccaatgtagtcatggcgatatcgttttcatcttcgacagtgaaacttctctggctgctcttgcaccgctggaag

SEQ ID NO: 90698 - DNA, 764 bp, Eucalyptus grandis
  Intron number 2 from transcript Egrandis_v1_0.011222m (loc us Egrandis_v1_0.007633m.g) derived from phytozome v7.0 (c hr-ID scaffold_4; pos 15969437 to 15970200)
gccatatcatttcgcaaagtgagttcaaaatatggacctgtgtgaattcgtaggtgtaagatgttactaccaaatcacaaaaaaataaaataaaaaatcctacatatactaaagattactatacaaaacttggttctttttggagatatcattgaaaagttgacacatatcgacttcaatatcacttgttgagattatcattgaattttttattcatcatattggaaaagtcatgaaaccgacatacctatatggacttgggatatatttagttcagcatttgaagaaagtctttaagaaaatacaaaaactttgaggttaaaggaatttttcgaaatacaagtagtgtttgatcaattgtaatttaaaagtgaattgagaaacaactttggtttaaatactatttggaaaagtcacactttgtaaagcacttttctttttaaattcaaaaccggccaaagacttagcagccagcgggcagccgccgaggccaaatctggctgttgacgctagcagcccgttgcgcgacctggagaaaggacaaagaaaatgtaattgtagattagacagtgaagaaagtgtagtccccatagtggtacgatgaaattgggtgcacataagccactcaaagctcatcgtcgttattcactcctttacgataagatcttctgagtcatcagtcatcgtggttctaatattgagtattatcagcaattattctcggttctgtccggtcataaatctgactttcaatctgtaatcag

SEQ ID NO: 90699 - DNA, 445 bp, Eucalyptus grandis
  Intron number 1 from transcript Egrandis_v1_0.025417m (loc us Egrandis_v1_0.025390m.g) derived from phytozome v7.0 (c hr-ID scaffold_4; pos 32205001 to 32205445)
ctgagatctgcctcgtgagtgatgctggcaaaaagccatggtctcttggactctttggagaacttacacccgattgatgtcattagagtgcagtgtgaagactaataagtaatcgatgataatcgaaagttcagacagttttttgttgcatctcttatcatcctatatccatattcaaacatataccaaatatctcctcacaaatcccattattatcatatttaactcatatcttattcaacaaaaaaaattcagatgatcaaatgcaatctaagtaatacccaaaaagaaattaaaaagaaaaactccatagaactaaggaagcccggatggacaatacccatactacccctcaccctaaaacccccaccggacctatcgatttccttcccttgataactaatctctagggttttttcctgcaatagctgcacctgtttctgcg

SEQ ID NO: 90700 - DNA, 901 bp, Eucalyptus grandis
  Intron number 1 from transcript Egrandis_v1_0.008468m (loc us Egrandis_v1_0.008468m.g) derived from phytozome v7.0 (c hr-ID scaffold_9; pos 33688949 to 33689849)
gggaacgcgacctaccggctcaacgcgtttggcttgtacgtgttttcgttcctctctctctctctctctctctctctcatttatgttcttgtcgttgtagtctggcgctgcattagttgtagctccgtagtacgtgagtgagaagcgatgaggttctagctgatgaactgagtgtgcaacggattccttttttagcttacaaccgtccaagaatagtatggtggaattttcagtttatttcgatcttcttttacatctgaagcttgccctttttgtggtgaattttgtggggaatcatacaccattagctgccttcaatatcaagttatcaatcgagtgcgtggcttaacgactgctaaacggcggcactgatcagaaatatcttttacctcaagcgagttcttctgtgggatccgtgaatgataaccatggtctggaattttaagcttagattggttgctgatgatgagtagtctggatgggaagatggaagaggtggagattaccttctctttgtctgggtgctttgctgttgagtttgagtgcgggaaattggatcatacctttgataatcagctcaaatttttctctcttcagataaattgccttttaggtgcggggcggggcagggcaaaatcctgtacgctttttcggttaaacatatgtcctctcattttgtttctgtataatgcgaggattctcttttttttgggtcgagattttccacttgccttctaaagtggatttttcccgaagtctccgcaggaaggttttccttgttctgtttttatagctaccagcctaagtaggggatgctgatgtttaatgtctttgaaatttggatattagctgagaattgttactcacagtgctttctgcatttgcagtttgcactacgcaa

SEQ ID NO: 90701 - DNA, 378 bp, Eucalyptus grandis
  Intron number 3 from transcript Egrandis_v1_0.024748m (loc us Egrandis_v1_0.021047m.g) derived from phytozome v7.0 (c hr-ID scaffold_4; pos 18303512 to 18303889 reverse strand)
aaagcaccatagaggtcatttttctccatcttagcattaatttctcagtggagctttgaaaaaataaatctgcaaggttttgtggattatctgcaagcattttataattaggtgtcctgtttagctgggacaatcttgttcacggaaaatcaaaatttagaaagaccgtgattctttgtttcctggttttgagggcaaagaagttaggaaagttgtaccttaccaataagatatatcagtgcaatctggagatgtacggtcttttggcattgtgaaatgcaattttataaactaatgaatgagttactcatgtttttgacagattcatctgacacaaaatttctttttaggcatctgcaaagtccataagagatagat

SEQ ID NO: 90702 - DNA, 558 bp, Eucalyptus grandis
  Intron number 2 from transcript Egrandis_v1_0.024748m (loc us Egrandis_v1_0.021047m.g) derived from phytozome v7.0 (c hr-ID scaffold_4; pos 18303994 to 18304551 reverse strand)
tcaactgtcaacttcttccgtactgtggttttattgctttacaaatgaagttggtggtttcttcaagtagtcgatcttggcgattcatggccacagcaaacaacataagaaagtccttgaacagtacttgctgttcttgcacttttttgctttctaatttgcagatagatcctacagcttcagcagttgaccttactaaaaggttgatctactgcttcatcatgaacaacaccaatcttgtttcaccagatttagctttactcagacctgagtcctcttgatttaacccattattttgctgccaccctgcaagaccttgcactgtcaattaaatacagtgtaaattgaaatgctaaagcaatgatcactgcttttcagtgtattgattcatttggaagttctactgatttgattttctgcttcctcttgtcttcaagtttgagtggaatttccatatctgctgcagcagaacatttgacttagcctgtacaggactttattaattatgcctctgcttcattaggtcaagcagctgctgcaaaaaagtgaaaaagggca

SEQ ID NO: 90703 - DNA, 697 bp, Eucalyptus grandis
  Intron number 2 from transcript Egrandis_v1_0.039810m (loc us Egrandis_v1_0.039810m.g) derived from phytozome v7.0 (c hr-ID scaffold_11; pos 23773996 to 23774692)
ctcgctcttttaaagaaggtttgttcttgaattggctcgacttttcttggaatatcttcttttcagtgtgagggtatgatgggtttctctctgattggctgtgcatctagatttcgagaaaccagtgttgtgacttgaagtagaacgagagttttagatgagaaaaagaacaggtgagaagatgtagaaagagagatcttgagctgagagagagcatgtgtttcctgcgtttcattcgttaagcttctcaaaggcaggtgagcttctaacatgagcgcacaacgatcccgaggttactgattaaagaatttagggatttaagttactaagcaacttgtccaggggtggaggagttggggattgactgcgcctagatgatccaaatgttgatccagcaaaaagagaggagcgacaacttgagttaaatatagctggtggtcttaaagatgtgagctgtcagtttattgacttttttatttatttgtttgttttatgaattttgttgctttagctgatcgaggggagttgtttgcttcttttgttaatattttgcctgaccgacaattccacattctagttcatggtctccaatgtctccttcacatattatgctctggtgttgtagtaaacgagtttttgaattcgtctcctgaattctgcagaggcgcaacatcattttactgcgaggaagagagac

SEQ ID NO: 90704 - DNA, 396 bp, Eucalyptus grandis
  Intron number 1 from transcript Egrandis_v1_0.014836m (loc us Egrandis_v1_0.014836m.g) derived from phytozome v7.0 (c hr-ID scaffold_4; pos 40396881 to 40397276 reverse strand)
gtacatacttcatacagttcgtcccggtttaagaggtacgtttcattgctcttcttgatttttccaatgcatcccgtgcgctgcgggccagagggacgccgacaagcagatcgctgtcgttaattctctgcggaaacatttattggggactgagtttgtggtttttcttggttcatatgcattgatgggcttcataggaagcgagaaagctgtctttttagtagcgttttgggattcgttcatcgcggtttgattggggaatgttgcgtttcttgagggtctcggtgagtgtggttaatgagagtttagtggctagtaatgtaatgctaccagtggtactcgcaatgtgatttaacttttggtcacctggtgcggttcttctcgacgatgtgcaga

SEQ ID NO: 90705 - DNA, 935 bp, Eucalyptus grandis
  Intron number 1 from transcript Egrandis_v1_0.023497m (loc us Egrandis_v1_0.017477m.g) derived from phytozome v7.0 (c hr-ID scaffold_6; pos 38428367 to 38429301)
gactgcaccgagaagatcatcgccgagtacatgtcagcccaccctccgtcccaccccccctcgactctgttctcgtgaacaaaaaaagaaatgcttctttccgtcgcttttgctcccagcgtctctctgggtcggggccttaggcttcgtcagtgcgttgttcgtctgtgatctcgcggacccttttcgttttgcgggtggaaaaagatggtggagctgctaaaattggattcttggctttttttccggggcgctttccttccccaagttttgctgtgatcgctcgtgtcgtgcgtgcgtgcgtgtacgaagtctcatggaagttggttcctgttggcgttcggttttcgtcgcttcttgtttgaagactgtggtcgttcgtttgagtttcttcacgtgtgaatgcttgtttcttttccctcttcgaggcgttgcataacttttgtttcttccgttttagttttcgaaacttgagcatggaaaacggagtctttcctgtgctaatttgaatattattttttatgcggatagggtactagcaccaagagaaatcactgaattatccgaccgaggcttcgcttgtgattgccttttgcggatctattcaatataagataggatttccgctgggtttatacattcgtagattgtcatttgtctacgctttccggtcatattttcaagactcttaccgttgggattatttgtcagacatcaagtgactttttttatttttttatttactatcctttttgtccattcttggccttatatctgaggattctggcatcttacttggtttattttttagcttccatttaattatttaactgttacatgccattttgttttgaccctgagatgagaggatgccttctactatgctaattttgatcatgtgtactgtttcattgcataggattgggggatctggg

SEQ ID NO: 90706 - DNA, 701 bp, Eucalyptus grandis
  Intron number 1 from transcript Egrandis_v1_0.034556m (loc us Egrandis_v1_0.034556m.g) derived from phytozome v7.0 (c hr-ID scaffold_9; pos 33455174 to 33455874 reverse strand)
cacaagtttggcggtaacctggacaacacttaccattattggtttatttgtcttctcttactttttgaattgtttctattaccaaatgaaactctacttctaaaagaattgggatattttcttttaaaagtgactcatataaggatttagatttaaaacttataagggttcttggaataccctcattcacatgaggtctcaactgtcaagtccttgcttatctcaacttattgctattgaaagacagctatgagatatacgtttctgtatgtaaattgtcaatgatctgatttgacgcgtatgcccaattctaccattctataatgagctcaatttgaatgtcctaaattttagcatgctggaaagcacacattaattgtgctagaaaatcaaaaacctaaggtgatttgagtatgtttgtgatgtccacatgagttggcttgcctatgcatgcttagttgttcctcaatgttgcatacatgagtgcattgacctaccttcctccacactgctatcatggttgctctgtgtagtttactactccaggtcatgtgataggtgttttaaggtcaagttgcacatttcttatgttgtattgagataaggccaatgttgttattgttgttatgcatcttgttgattaataggttaggcgagcaattctcatcgcactttcatatgaacatgtgtcttgtaggcct

SEQ ID NO: 90707 - DNA, 822 bp, Eucalyptus grandis
  Intron number 1 from transcript Egrandis_v1_0.048091m (loc us Egrandis_v1_0.048091m.g) derived from phytozome v7.0 (c hr-ID scaffold_11; pos 6088819 to 6089640)
tctggcatcaccgtaagttgtctctacaatttttgctcgcaatatatgtctgtataatcagttaggaacattttggatttggtcgtggagacgtacctgattgcttgcttgcatatattttttttctctatttctgcaacttaagcgaatgctatggatgaaaatattcaatccatagagtttggcaccttgtctttcattgatgtcgtttgggaatcagttcgatttcagtcaccacctaggaactaacatacatgcttcataatctgtgtattcaatccgccaattagccgttgagtggatcaagtcccttgattatttatctaggggagactcaactctactgtgcggtgctatgttcagcgcttattgttttgctaatctatgtcggttcctacttacaacaaattgccaaatgtgtaacatggcacttctgtggaggagatactttgttttccataattttctaaagccatccagagccactgggctctttgcatgactgaacgttggactagataaatgatcacctcttggctcttctcctttttcctgtaaagaagaaaaattagctttgtcctgtaataggaagcactgcagcagctggataggcttggttttggcatgttgtctgttctttaattcatttgtgacttgtgagagacaaagcctgtaatttctttgattcttgtctcctcacggttttcaatcaatggaattgtgatgttaagaactctatttatgcctgacctcgaccaatttgtaattgtgctatgtttgtgtgaaacagttagaatcaatcctagcatcacagacgcagca

SEQ ID NO: 90708 - DNA, 868 bp, Eucalyptus grandis
  Intron number 2 from transcript Egrandis_v1_0.023092m (loc us Egrandis_v1_0.023092m.g) derived from phytozome v7.0 (c hr-ID scaffold_9; pos 25381733 to 25382600)
agagcagaggggagttgccggttcgtttcttggaggtgagggttccgactcactttgcttctttttgtttaatttcgtgatgggtcgacgtgaaaatcggagcttgtctagtatatcggtacgagaattgcttcgaattcagctgattctagtaggttttgtgctcctgttgtgatgggattgatcaccggtgccctttgtaatgctcccatttgcgcggttgggaggtatgagacttggtgtatctttagtccatgaaccagtccagggaggtgacttaaattgaataggcctcattactaatttactaattcagatttggtatgtattgcgggtacttagattaggagcagcgtgcaaaactttttatgtcaagaagaaactacagaaagtcccgtttgtattttcaccattttgcggccgttgggatggatgtaagttgtggatggtggtgtaagatgtgctcttttatgatcggacgatgttcttatacttctgtaattcatattattcttcttttagtcgattgtttacagagtaattacatcttcgtagattctgcaactatgtttatgattacttctactttgaagttgagcctgtcttgtggttgacacagtatcctccattttgtatgtgatcacgtaatctctttgtaagaggtggtatctagtttctctgtgtcattgctcttgagttgcagagtgtccattcagatcaaatgttatattggatgatatcttcaatgtcatttcactccaccccttcttaagtgaatcttcttatctgtcaaagatcacggcaccatcctgatttcaccttaccattttcagagcaagaagaatcccgctgacttcgcaaaagaggt

SEQ ID NO: 90709 - DNA, 625 bp, Eucalyptus grandis
  Intron number 2 from transcript Egrandis_v1_0.024912m (loc us Egrandis_v1_0.016645m.g) derived from phytozome v7.0 (c hr-ID scaffold_9; pos 8787597 to 8788221 reverse strand)
acctgttagcgtgccttgcagacctatttacgcaggtgtgaaattctcttagctttattttcttacctgctgtgttgctgtagttttattagggtaattgtctgttctgcttttggtgtccatttgaaacttctgcgttgctattggtgctcagacagtgatcgattgtgtatgtgctaatcacttatggatgtagttttactttgtggcgtgtgtaatcattgatggtacttgatgattttcttaaaatctttgttaattccattgtggacgtatgaactatgaagaagtgacttttaaattgtcaacagatgttttcaagttcattttcccctcgtgaagttctgctttttttttaattaatattttaaatcttctgcgttatctttctaattctccattaaattatagttattcctaatattaagacattatatactatatcttttatttttatttttttgttccgcttatgtagggtttgcgtggtgtttcttttgcatcctattctccccgagtatcgctcccattgttttaatacctattctaactctagctctaagcttatggtgattacttttgatatgcagataagttcacaaaagaagaaaaccggtgtcattgc

SEQ ID NO: 90710 - DNA, 607 bp, Eucalyptus grandis
  Intron number 1 from transcript Egrandis_v1_0.024912m (loc us Egrandis_v1_0.016645m.g) derived from phytozome v7.0 (c hr-ID scaffold_9; pos 8788266 to 8788872 reverse strand)
tcggcaacacctgttactgcaacagcgtcttgcaggtccggttgtgtttttttccctctctccctatttctttcttctccctcaatccgatgatggccgctgccgccgccgccgcctcggcggatgatgatgatgatgatgccggaattgggttgtttcgggtcgattgtgaaatgggttttgtttggtttttgttgatttgggtctggtttgactttcgttgtttgtaaagtcgattgcttgcgaggaggttctttttgtgttgcggagatgtgaagggtggtcgtagagttgattgctggttaggatggatttttaagctatgtcaatcatgtggctcttctgatggttggatggttaccctattgggaatttttcaggagacggccgcgtgttgttctgtttggtcatctgatgtgcattccgcaagttatctgttgtggggaagtagattttgggggggtgttcattagattacatctgacttttgttatggagtttgatcattagattttctaaatttgcgtttacagcgatttttgctcattgttgtttctccaattcctgggcaggccctctatttttgcgtgccctttcgagaccaact

SEQ ID NO: 90711 - DNA, 643 bp, Eucalyptus grandis
  Intron number 2 from transcript Egrandis_v1_0.027085m (loc us Egrandis_v1_0.024741m.g) derived from phytozome v7.0 (c hr-ID scaffold_6; pos 45173083 to 45173725)
catttgcgcatattcggtaactccctggctctgctcacaagttaagtttggcgcgtacgagtgatcatggcttttaccaggaactaggtggtggaaaaatacactcgtttgatgattttggggtgtgtggtttctctgtataagctaaggaatggagcttttacgtgctcttgagaacattctgtttttcatcttttctcttctacgactatgtatgtttgagcttgtcacaagattctatctttatggtgtatttcatgtgcacagcattgatctgatttcatttcgcagaagaaaaatatttcaatctccacccatcatgaatattgtcacgcattgcatgtccaactccctctttaagcgctgtgaaaatatgaactcggtcttctggaagatcttttagctgattctagtgttggtgagtgcaggtgcatgtcatgcacctctccttgcatttcttgaataatattcgtcatactatgattgcacgttatctggtttagttcaaggcatactagtttataactgtattttccttagaattggtgccgatcttgaagatggttccctcatcttcaacaaatttttgattttccactctgtttgttaatgccttatgtgtaatactcagagctggcaaggg

SEQ ID NO: 90712 - DNA, 731 bp, Eucalyptus grandis
  Intron number 2 from transcript Egrandis_v1_0.050774m (loc us Egrandis_v1_0.050774m.g) derived from phytozome v7.0 (c hr-ID scaffold_4; pos 16033764 to 16034494)
gccatatcatttcgcaaagtgagttcaaaatatggacctatgtgaatttgtaggtgtaagatgttactatcaaatcaccaaaaaataaaataaaaaatcctacatacactgaagattactatacaaaagtcggttctttttagagatattattgaaaagttgacacatatcgacttcaatatcacttgttgagattatcattgaattttttattcatcatattggaaaagtcatgcaacccacatacctatatggacttgggatatatttggttcagcatttgaagaaagtctttaagaaaatacaaaaactttgaggttaaaggaatttttcgaaatacaagtactgtttgatcaattgtaatttaaaagtgcattgagaaacaactttagtttaaacgatatttggaaaagtcacactttgtaacttacttttctttctaaactcaaaaccggccaaagacttagcagccagcgggcagccgccgaggccaaatctggctgttgacgctggcagcccgttgcgcgacctggagaaaggacaaagaaaatgtaattgtagattagacggtgaggaaagtgtcgtccccatagtggtatgatgaaattggatgcacataagccacttaaagctcatcgtcgttattcactcctttacgctaatattgagtattatcatcaattattctcggttctgtccggtcataaatctaactttcaatctgtaatgag

SEQ ID NO: 90713 - DNA, 875 bp, Eucalyptus grandis
  Intron number 3 from transcript Egrandis_v1_0.012802m (loc us Egrandis_v1_0.012802m.g) derived from phytozome v7.0 (c hr-ID scaffold_4; pos 22663345 to 22664219 reverse strand)
aaggactacaaaaagaaaattagagattgcgcacggttgcactggacagaattcccggaggagccacttgtgtgtaggattacttaacctttcgagaagattcactgctcttaagatagcatttttcacacggattcaatttcgttctacatgtttttccggatcttgttctcttgcttttttctgacttttcttcgaatttcaccggcaccattgtcatcatcaagccctcctgtgatggaaatggcagtaaccatcaccatcaccatcaccatcacacccctccctgttcccttttctctctcatccagttcgttcctcttttttttttccttatttgtttcgacattttctcccgattgttagttgcttttcagtttacaattaatgacggggcacattgcaatatatttccgaaagatcagggtatccaatgcgaaacctcgagcgcaaattatgacagacttggaaaaacgggtgtgcaatgagtgcaatgactttacttttgaaaatggagaaggggccaactcctcatttaatattgaaattttctatcgaatcgagttgggcacgatacctctgtaaaattattagcatcacgctaaaaagccacggccttttattctggcctttgaagagcagatgccttcctgaaaataagagaagcttcttctcgattgcctttacgaatttctaacgatttcacttatcaaaaacaaaaaatttacatgggggaaaacttaatgggatgagatgcaattttaatatcgatgtcaagatgctaaaaacggtctcaatcatgacataaccctattttacttgcaaagattggcaggaaatcctagtgacgagcccagaagtgatcaaagaaggag

SEQ ID NO: 90714 - DNA, 1061 bp, Eucalyptus grandis
  Intron number 1 from transcript Egrandis_v1_0.018038m (loc us Egrandis_v1_0.018038m.g) derived from phytozome v7.0 (c hr-ID scaffold_6; pos 39482266 to 39483326)
gcgctctccccgatcaattccccaacgggaagccggtgagctcgacttccgagtcctcgtcgatttttctttcctttttgggctgggtttttcgctcgtttgtgagcggatcttatgcgaattgagctttcgcgagtaagatctgagaggttagcgatagcagcaggggtggtagtggccgaattcaattggagtcggtgccggtcggtcagtggtctggtggcgagtcacggaacgatacttctgcgcggaaaaggggggaatcgcaggaaaaaaaagaagagaggaaagacatcgtctctcttctttcagagcttcagaaaagtgcaatgattgatgatgcacactcgctttcctccaattttttttttttttaatgttgtactttgtctcctgctctgggaagctttcgaagagacgatgatctgcttttctttttgcccccttttccggagcagaaattgtgggaccgattatgtgcgattagtcatgagaaagtttccgatcttttgagcaaagcgtcattagcgttaatctagagagattaaccccaagttgacgctgcatttttcttatattttctttgactttttctttaagtaaagcaagatgcaaagtaaaatttgcaggaaaagtagtgatttttttatgtaaactccatttttgtattcaatcgtggtttccttttgtcctcgttgtgtgattggtgctcgatcctgtctttctgcccaaacttcagttgtgattggtgcttgatcctgtctttttgcccaaacttcagttacatggttaatacttcctcttctgttcttcatatgaaactgatctgcactgggacttggcttgatccaactaatgaagggtgctttgaaccagctttacattactcaagtgtatgacaagtattgagcagaggttccatgctccagcaaatcgtgttttagctgctcaccttctgtaaatttcgattctttctttgtttgatcacgtgaaaaggaaaatggatatagatataactagaatgtccttacacaggtagcagactctctggaaggtgtaaa

SEQ ID NO: 90715 - DNA, 993 bp, Eucalyptus grandis
  Intron number 3 from transcript Egrandis_v1_0.001341m (loc us Egrandis_v1_0.001341m.g) derived from phytozome v7.0 (c hr-ID scaffold_4; pos 7614213 to 7615205 reverse strand)
tcgtaagcatgtatatactcctcagctcgttactcagatttaatgcatagttttgcaccttgactggagaaaataattcttttttgtctatctataatatacggtctcttaagcagggttgatgtaactcacaacagtaaatagtgtgaatatctggggctgctttgacaatgttcagattcttggttgcaaacacaaaatgagaggtgttacataggcagctgaataacatgcattacatgacaaaacatgaaaaggtttgagtccacaatttttcttgggaaacaagttattgcgagaccttgaaagctgagactgactcaaatgagagcctcactatatacaggtatgagaaaaaaaggacttcgtttctgcagctggaattttttgatacgtgtagactaggtaaaaatctgtataatttgattgagtcaatttctgcaatttttcataatattcatcagaaggaaccaagaagatgctggctctcttttaaaaatatataatatgtaggatgtttagattgtaatcatctacctaatattcccatgcttattggactgccagccactatttagttcaaaattcttataccataataacatccaattccaaacatgacattttagaagattatgtagacacatagtgaattatcctagaatatgttgagtatttttttaattatactcttttgtacttccttttaattttcatcctagttggttaaaaaacattaaatccggtcattataattccttgtaacctttcaaagaacagcttttatgcagcattggtgagtatagatgtgctttgcaaatttaaaacagtttttcattgactgcttgtcacatagcccttaaggacctctttctgttgtttgtctgcgtagaaattgttatcattcatcgtgtgatgttacttgagtttgtctaatttttgttttgatgctttgtagagctctcaagggctttagtctccctgggatccttc

SEQ ID NO: 90716 - DNA, 562 bp, Eucalyptus grandis
  Intron number 2 from transcript Egrandis_v1_0.001341m (loc us Egrandis_v1_0.001341m.g) derived from phytozome v7.0 (c hr-ID scaffold_4; pos 7615336 to 7615897 reverse strand)
tagattggctgaaccaaaggtttctccccaagaaggtgagtgcaaaatcttcattttgtcaactctggagataattaaaagttttttgctgagtttttctgagctttgccttcttaagatggtttggggtagctaagttggctttgcatctgtctttgtttatggaattttgtgtttttcagcctttctttagtgggtttgaagcacaacgagatctgctgtacagtaacttacaacagaaataaaaagaacagacaaaatccagttctctctttcgtcacgttgtccacaattcttattttgcttgccgttatgctgattctgctgtttcttggattgatcttggttggagtggtttcttctcttgggtctgcatagcagaatttctaaacttagtcagttggcctgatctttgctaatgatatcaggcaaatatccttaaatatttgattggctactcaggttactgcaatgacactaatctttttgcttattttcttctttacgtggttctgaatgggtttcagtggacgcccttcaacaaattgctgctaaactgggg

SEQ ID NO: 90717 - DNA, 834 bp, Eucalyptus grandis
  Intron number 1 from transcript Egrandis_v1_0.046362m (loc us Egrandis_v1_0.046362m.g) derived from phytozome v7.0 (c hr-ID scaffold_6; pos 11002074 to 11002907)
tttgtaagtctaagtggcaatataccaagaggaaggtaattattagctcatctgactaaattatcttttgcacatgggattctgagtcgggttatgcggtgaaatagcgagaaaattaaaggattttgtaacataaatttaatgagggacaaaaatagttctcagagaaatcaacagaataataaagagcactcaagatttatataaattggtccaaatatgagtagctactccattaaaaaggtcagccgcaataaacaaagaaaaaaaaaaaacttattaaaaatttgatatcgttcagttcggttttttatcacgtatgttgttatttatttgataacgtacctaatttttatagtattttttgtaaaaatttgatctggaaattggtttgttcttttctctataatattgtcaacatttttttcaccataacccattgttgtcgtcatatgttttagtgcttactggtacttcttagtaaattgagtaaataaatctatcggagcgcatatatcgggcattgtttattaatctttttttaaacgttagagatattaaaactgatttacagaactatgtggcagactcaataaaattttataaagattgtatccatatcggggaaattaaactagtgcttcctctaaccgatctatctatataggtttacgttctttggtgggaaatctaggctgttgatgaccttgaaaaatcacacgagccttaccataaaatagaatggtccatttccgttacctgcttctatcaactgctgatcgttattgctcatctgcaggactacctttaccgatacctgaagtccatcccagc

SEQ ID NO: 90718 - DNA, 869 bp, Eucalyptus grandis
  Intron number 3 from transcript Egrandis_v1_0.024021m (loc us Egrandis_v1_0.024021m.g) derived from phytozome v7.0 (c hr-ID scaffold_9; pos 10710996 to 10711864)
caggatttcattgatgtaagttgacgaaaagttcaaatttctcagctccacgtttgcatttttgcacatcgcctctgaatctaagtttagttgataccaagtgttccgttttcatttcctttgcgaaagtaacttgagcacttacttttcctgattcaaaatggaagtttgtacagttaatcatcaggtaatagctacatgaatggggaagtagattctttacatggctctcctgtatttatatgtaattgactaagccacttcttgaccagattgtgtagtctcgtctcacatttttattgctccagattacaagttattgggtggattacattctacaactgaagaatgcttctttccttgttttagtagctctggagtgtttgttatgtttatggtgatgttcagtgaaaaaaatgtgcataaataaaaacgcctctgcttttagagaatagagtcatcaccattcagcattctgcagtggattatcgcacctttgttccctcttacccatatttgaggccgaggaatattgcatcggtgcgttaagtccacaaatccctactgtatggaacattctggacactagacagaatgaataagtagcttgatccttgtgaactgagactatacgagactaaacagttgcttatcatacaatgtgctaactctcactgtcgtcgatcctgcattaactgtgctgtttcaactgacttatgaaaagctaaatatttaaatttcatatgatacttcttacgggcaatctgggacaagtttatcttgatcactcaagttctgtggcatttcaagaaaggtcaccataattgtctgcaggttttgtggaaggagtaccttcaagaaaggacaga

SEQ ID NO: 90719 - DNA, 1035 bp, Eucalyptus grandis
  Intron number 2 from transcript Egrandis_v1_0.037272m (loc us Egrandis_v1_0.034101m.g) derived from phytozome v7.0 (c hr-ID scaffold_4; pos 25511365 to 25512399)
cctcggcttctttgtcttcgtggttgttggatcatgtatgatatgtttcttcttgtctagttcacacactcattctttgcatgaggagctttacatcgtgttttgtttgctcgaatgttttggtgagactcgtatagctgttttaggaaggataaaatagatttcaaagaacttgtgacttgataggttggtgtagctctgttaatggtatttgatatggagaggctttgaaatagagaagctgctagtcatctcagcaggtgtgggtaaaatgtctcccctttttgcattttacaagagaatgcaacagaggaatgtaatctccaatcttatgttgcatatctaatgacacaaactaaagtatgaggaaatatctcaatttgtattgtgggtgtcaaatgtggcagtgtcttagaatgttcctgggcaattgagcattttctatggacttatgggtcgatgggatcttgaaccactactgagtcatacaagtacacatctgtttatcccagtttcttctgtatatgtagacttttctggttgcatactatgtccttgagactgttttattgtaaaaaatcttgcctttcttctttctttgccatattagcagcatgtgcagaatgtcctgctggcacatccgttgtatagtcttgtaatataagatgctgaagacacgtattctggacggtttccttttaacattcattgctgtttgcaattctctttcaattataagagctgatcaacatatatgaaagtgcttagtttccagctgtttgtagtggtcatctatatgtagctgatgtagaatgcttattgttatactcagatttagaggcctgaagtctctatagagccataagtaaacgaaacttagtagtttttggtacttttgaattctatagttgatgctaatcacttcgtctttctcttaccaaggggactttcccattttcagaatagtgtttgacatgcctttctatctactggtttgcagctctgtttcagataatcaggacagctacaagtaag

SEQ ID NO: 90720 - DNA, 1029 bp, Eucalyptus grandis
  Intron number 1 from transcript Egrandis_v1_0.019769m (loc us Egrandis_v1_0.019769m.g) derived from phytozome v7.0 (c hr-ID scaffold_12; pos 1418115 to 1419143 reverse strand)
tcgaacccttcagacctggttcggtgagcaagcctaagtactcttttcgttgtcaagttctctctttttctttttttctttttccaaaagaacatagatagagaaaaagttcatcgagaatgatgtgggttttcttgagtatgatattttttgtcctttttaagtttgctctgggcattcattacgttgtttttcgagaaagttgcggtttctctgctgatggatggcggatattatatccgttttccttgagtgttagatcatgatctcaggtttggctaaattaatatacaaggacttgtcaagtattagttctgattatgtccgatcatttgaatcaaaaggattgtagcgactctgtgctgtatgtgtatccatttttttttttgttttatatcatggctaaatcttttgcaagcaattatcggtggctttgaaagtgtagaaattgtttgtgatgtcggtataacatttggcgaatgtattgaagagcttagggtgttgaaagagcgtcgcttgtgctatttggcgtaggaagtttacactccttacgtttactcagtccgcataatcatgggattaagcgatgcgcgtaatgtctaagcatgacgaatggcagctgatagcttgcacgtgaaagaggacaatgagatgtattaattgaaatataaaataaacctgactctgggatgagcagtgtttgttaggattctgatgcatagctatggatttcaattttattcccgctgtgttaaaattatgccattctaggtttgttggaagttatatcaagggttaaggaaaactgcattttgactaccttacttcaatatgactcgagttgcaaacttttaatatcagaaaaaagtttaaaggtgaaagggtctctggtaattgtagcgcatttgactatgaaattgtctttatgtccaatcattccttcttggaagtacaatgtctatttatgttccctaaattattcacttatatttgaagtatttaacgcattgatgcagcctataactggat

SEQ ID NO: 90721 - DNA, 711 bp, Eucalyptus grandis
  Intron number 1 from transcript Egrandis_v1_0.043069m (loc us Egrandis_v1_0.043069m.g) derived from phytozome v7.0 (c hr-ID scaffold_4; pos 14021351 to 14022061 reverse strand)
aaccacatcctaacagttcccaatattaatgtcgaacttctattgcatatacaaaagtgatatcaaattaaatgtttaattcaatgggttatgctctgaatattacacataggatttctttacaatgtgaccttgatattatctaaatcgccatcctacttagtcacccaaattcctaggactacattgtgcaccttgtagaaacgccggcatgaaatattgataattaattattatgcgtgactcgggttcgtcactataaaaagaatggtgttccgatcgagagaacatggtcttttgcatagctcttcaatccaaagaaagtaaagaaagccgaatcatttaggccaacatggctagaatcagcagcacattgatcatgctcttcaacctcttcttggtgctctctctttgcttccctgtttccatgtccgaaaggattctgaaaagtggtaagttttgagtttccttaacgcatagtctatttcatataatgaaaaatacgcaccacgcatgactcacattctctcaagcataaacatctcgatgtatgaacgtggttttcaggattttcttggcagaccgatcgagtagtcaatgtcatccgcttgttagaacaaataattttctgctaatattttttttttcgaggtgctgctaattacttgcctatgatctcgcattttaactttggatgttgattgaaaatag

SEQ ID NO: 90722 - DNA, 454 bp, Eucalyptus grandis
  Intron number 2 from transcript Egrandis_v1_0.038145m (loc us Egrandis_v1_0.038145m.g) derived from phytozome v7.0 (c hr-ID scaffold_6; pos 2160366 to 2160819 reverse strand)
ctggtgagcctccttgctttccattttccttgtttttccagctaaatgtactgagaccaattacgagctgtaggagtagttagagtctgagagatagagtagaaatagagtatgatcaataaaagaaaattatgagctatagaatttaatgttaagtagttggatatgtcgtgttcaactaatattttatttgattatcatttggaccggctctatcatttcttcaatcttctcaaaaccatacggtaaatctaataataagaaaagcatcgaacaatgatgttccccggcctataatcatagagtgtagcgattttatcttggaagctagtcacatctacatcttatttcattctttctatttcattaggagtttattaatgcttgaaatgtggatgtatggtcttttatctcgacaggttttgttattggggggaaccgatacgtcggtcgc

SEQ ID NO: 90723 - DNA, 965 bp, Eucalyptus grandis
  Intron number 1 from transcript Egrandis_v1_0.042245m (loc us Egrandis_v1_0.042245m.g) derived from phytozome v7.0 (c hr-ID scaffold_9; pos 30723437 to 30724401)
gttattcgtgcattcggaattggtctgaccatgtacgtgttcttttggtttcatttttgtgcatttcccaaaatagtgattgccctaaaaattgtattggctcttgaacatctgctagtgtgacaaagttctttctgatagtacatgggcatgttgctggcccgaggtagagcacttaatgggctggggtggcccaattttgccttaccaaccccagggaaactctaaataaaggcctagatcgtttatatagatatatttttatataattagcattcacatgacaagtgtgaaacttttcactgtcttttccttctggagttcattagtaaagaaagagcttgaatatctctctttgcacttagtgttatatatgtcaggtccttctagtttgcaccctgtaagctttggtggaaaacagttgtttcgataccttttcagtttacattaccaggtactgtcattggataagcatgcattggctggatataattctatgtcgactgtgaagcttggtagaatacatttgcaatcagttggcactaggatgctgcattacacctggccttctatctttcaatatttgttgaagtacaactgttcatattttccatctctcctaaactacttttttgttactccatggcattaactagtcaaatgtcacttgcaaatctaaattttgtatattggagtgacagaagaagaagctgaacctttctatagaagtttctcaaacgagctatatgttgcttatttggggaacaagccaaattgccctttttctgatggaagttttgaactagcttaagctgcttaggttgcatcttgaaagtgtcatattctacttttgggactcttattttgctaacactgtactccttggtttgagttgaaagtgatcacaatttagcgaaaccgtgtttgcagtcttcaaggaaaacgacttcaacttgtcccctgtg

SEQ ID NO: 90724 - DNA, 788 bp, Eucalyptus grandis
  Intron number 3 from transcript Egrandis_v1_0.003042m (loc us Egrandis_v1_0.003042m.g) derived from phytozome v7.0 (c hr-ID scaffold_6; pos 23229495 to 23230282)
tagactgcagcctcttctgacacaactgcttgaaggtgcttttctggatactcgtggttacatgaacgcctttgtttctctgttgactttatcaaacaagatgatgcaagttgtgaactatattttttcttgtgcttttaagaataaacttcaacccccccccccccaaaaaaaaaaaaaggcacgcagcagcgggcattgacagagattcttaagaattagttttgtgctttgctcatacaaaaaatcaattgacggtatattgtttttaaggcagttcgtactctccatttttattttctggggtcaaatcatactctccatttcaaggcacaggaattgatgcttaatgattcgtagtctcttctaactcccagctgaaataaacattaggtttctgagagatcagagagaacaaggtgtggaagtttggacatcattagaacaagatgacttccatgagggtcgctctagtttctcaatgaatttaagtgcagagaaattccagtgaggacattagcacttagcattctcctatcttagatattttctcaaaatatatccaatgcctgctttctgtgtcttctgtgactgggactgtgttaatgagctaacagtcctgctcctaatgggactttctgtttgaattttctgctttaattttaatttgactatggtcgttatgacatattcgaaccgtcctgagctttattgtcttaccatttttaatgggagtatggatatgctgttgatttttggatgcagggtctcaagagactaaactttcc

SEQ ID NO: 90725 - DNA, 765 bp, Eucalyptus grandis
  Intron number 1 from transcript Egrandis_v1_0.009848m (loc us Egrandis_v1_0.009848m.g) derived from phytozome v7.0 (c hr-ID scaffold_6; pos 40270473 to 40271237 reverse strand)
accggaccgcagcttcacgcctcaggtctctcaaggtcagtactcacgtgggtccgcttcaaagatccggcctttttttgcgattaatacctcgacacgagcaggaacttcgttgagaatggaaacggattcttatgctcgttcgtatggtgttgctaagttccgggcgtgactgggtcgcctttcgaccgaatgggttgatcgctagtggaagctggggaggcgttgggtccggtgggttttgaaatgctgtccgggattttgtgtcacgcgcggcttcgattttgatttggacttcttccctttgtttggcctgaattttgagtttgttcgttctcgggttctgagctaatgttgctttggtgattctgtctattttatttgttttgagtaaaatgaatagctctttttgggttgcaatgtgctcattgatatacctaagagttccaaacgtccaaaacgaatgattctgttgagattattttctttgcgagtgtcgtattgattgcattcttgataagatgctcaccttgtggtagaaggttacttattactgctgaacaaaagatgggccaggactgaaaatggttcttttctgggttctctattatcaaattaccgaattacattcatataagtgatcataatatatggcatttcatatgcagtaatgatggaaatgtacatgggagttcccaataccatattcattatcatttactatcatgtgatagggtcgagtggggagcgtaggaacttgcaggt

SEQ ID NO: 90726 - DNA, 816 bp, Eucalyptus grandis
  Intron number 2 from transcript Egrandis_v1_0.029346m (loc us Egrandis_v1_0.029346m.g) derived from phytozome v7.0 (c hr-ID scaffold_4; pos 26366501 to 26367316)
caacaagttacaaaacaagtacttgaccattcgtggttgataatcacattattcataatcaatgtttataaagtcacagttccaattacatcgtcattgcttataattaacaacagaaccaatctgagaaaatctttgggcctgcatggaattgttctttatttctgttcttgaacacttttttagtttttttgttcctgagaacaaaaaaagaacagaaacgcgtttggttgcgtttctgttctttttttgtttttttgtttccagaacaaaaaaaagaaacacaaaatttttacttcttgttctagaaacaattttggagaaacgtttctcttctctctattcttcttctcttcttcttttcttctttttttcttcttttttctttgaccggtcgccggcctcggccatggccggcgaccggccgtcgagggccagcgacgccctcgagggtcggcgacctcgtcggagcgtcgccggcccccggcgaggccgagcgttgccgtggctaggcgaggctgctggcctcgtcagccggtcgccggaggccgacgatcggccgaaagaagaaaaaaataaaaaagaaaggaaaaaatggaaaataaaataaaaatattaaaaaattaaaagaaacaaaaaaagaataaaatttaccaaacgtgtttctattcattttttattcccggaacaaacgttaccaaacacgttcttttgttcaaaaattgttcatcggaacagaaacacttttttttgtttctgtttcctggaacaaaaaaagaacagaaacattaccattcgcaccctttgtagataccg

SEQ ID NO: 90727 - DNA, 571 bp, Eucalyptus grandis
  Intron number 4 from transcript Egrandis_v1_0.029346m (loc us Egrandis_v1_0.029346m.g) derived from phytozome v7.0 (c hr-ID scaffold_4; pos 26367882 to 26368452)
ggatcaactaaaaaataacaacaaggagaagcgatgtatgtttttctgaatttaattttactttttaggtttttacctaatttaaatctcatgagatgcatacttttgagtctttatttacacaaaacacccaaaactgttataacatgcagatgctagcatgcgaatatgaatataacattttcataattttttgaaatttgaatgtcataaattttataagaaagaaagaataatttaaatttttatttttatttttacttgatccaaaaacaaatgggctgatgcaaatacattttagtattactatttaaaatcactacaaaactttcaagatctttttataaaatgaatatcactttgattttatgagtaaattttaatggctttttggaaagggctcaaacctcatctttataactctcaacttttgaataagatagcaacaattcttgtccgccggtatatgtcttctattgaaagaacatgatgctctctctcctcttgagtccgtactgagtaggagtgcattgcagttaagcgctggctaagtgccccacgtccccgagag

SEQ ID NO: 90728 - DNA, 786 bp, Eucalyptus grandis
  Intron number 4 from transcript Egrandis_v1_0.045316m (loc us Egrandis_v1_0.045316m.g) derived from phytozome v7.0 (c hr-ID scaffold_6; pos 11962724 to 11963509)
tggtcaaacttgctgactttgggattgctaaacatgtgagtttccacctcttcactacaagactactgagtgcatgtcgaaattccttgctgttctgtggtgcattcgagtgtgaagtcagggacccaaggtgactgcgtacttctcattattggtttgtggcatttcatctgtgcaaaatctattatagatggatgaaatgttattgagtaattttcttcacctttttcctattgttttgggtaaagtaactatgttgcataaacagggaaagatttcttgttgtaaatagatgctgaaacctaatgagagttctttccttttctactggtttctaaaaagttcctaagagcggtagtgaatagagtgcaatacctttggcgaaaggttgtggtattgtttttgctgctcctctgcattattccaaaagaaggaacgaatttagtcagagtaaagaagggcctccttcctaacatggggtaaatgaaagtgtattggtccatagaacataattctggatagtagccaaggtagtgttgctctccttttgagttctcaagcatttgctgaaatcatgtcgttgattgcttcatggtcctttttctcagtaacaagctaacataagttgaaagtggttcattcagtcatcaatctgatgtatctatgtctataaagatgttgctgttttatccagtgtttcatgaacacaccaggtagtcttcagctttactaatgccgtaccatttcttagctaactggacaagcagcctaccgctctttgaaggg

SEQ ID NO: 90729 - DNA, 625 bp, Eucalyptus grandis
  Intron number 1 from transcript Egrandis_v1_0.051805m (loc us Egrandis_v1_0.051805m.g) derived from phytozome v7.0 (c hr-ID scaffold_4; pos 34190923 to 34191547 reverse strand)
aggagagagagcgcctgggtgctgatttccggcaggttgggcagttatgatgacaaacgtagataatttctctctttttcaataatcatggatgtggctgcttttgaacagtcaacgtctaaattgataacatgcgttacgattacttttttcttattaacaaaaagaaaaagaatattagactttctctcgtgccaaagaggagataaccattttagcactttatggtcgcgttagaattattctctagaccaacctataataaaacatgactatgattcttcgaattaggctagattgaatttgtaactaattagtggtacttcactagaaagtgctcctcgtgactatttgggttgggcacagtgggcaagccactaagccagttagtaatcaagttctacaatcaattgtatttcattgtaatagtcataagagttatgtgattaattgtctagttttctcttatgtaaattaaaaaaaaaatcgggctatcaacttttttggtatttgattcttggcttgagagaattttaataatttcgatattggttttcagatttcattttggttttccttccctttggcaggtggtgtcagatatcacagatcttcttggcaaacc

SEQ ID NO: 90730 - DNA, 601 bp, Eucalyptus grandis
  Intron number 3 from transcript Egrandis_v1_0.016732m (loc us Egrandis_v1_0.016732m.g) derived from phytozome v7.0 (c hr-ID scaffold_4; pos 4621690 to 4622290)
gctcatcctgaaggtaatgtatcctttcatgaccttactccttttcaaggattgactagtgcttcaatacacgttgttctacttgcctctatatataaatagaagcaacacgaatttgactctggatcctggttaatgaaaaaattattcctcactttatttgtggatttggcacatgaaatcagttgtaattcaaacaaaatggtgtccaactacttcatgcctgtggtatactgttgttcccttttgaaccagtgattgctaaatgcacgttggtgagtttaggagatatctgtgatcacttttacatccctagaggacattggaagtgctctaaagttaactactttgtcattgcatctaattgtcctatctgcattttagagaacgttctagtagcttttatgcaaagtttgttattctagtggaattctttgtacccttcttctcaacttccttgcacaatttgacccgacagcaaatgcataccgtgtgatgatattggcatcagttttctctttaggttgattatttgtagaccaaataaaagtaaacgcacttccgttttggtataagaaaccgatactttttacaggagagt

SEQ ID NO: 90731 - DNA, 329 bp, Eucalyptus grandis
  Intron number 1 from transcript Egrandis_v1_0.044615m (loc us Egrandis_v1_0.044615m.g) derived from phytozome v7.0 (c hr-ID scaffold_4; pos 32921087 to 32921415 reverse strand)
aaccaactatagggtcgtgttctgccctaacaaatgtaagtatggaagtagacgatgctctttattattttctgaaaaaaggtttgaagtaatctctattacaaacttttttgtgataaacaaaccttttgtttttgtcttcttttgtgcgtttttactgtgatttggccccagagattatttctgcagctattaatcttttaaattttttctgcggaggggtttaagaaaaaggaaaaaaagccaaaaaaaattagatctattttgataatagtgaattcaacctcgacctaaaaatatgcagggaataagggtgaagacttaaaaac

SEQ ID NO: 90732 - DNA, 867 bp, Eucalyptus grandis
  Intron number 1 from transcript Egrandis_v1_0.009950m (loc us Egrandis_v1_0.009950m.g) derived from phytozome v7.0 (c hr-ID scaffold_9; pos 687941 to 688807 reverse strand)
cttttgaaccctgtgcaggtgagccatggctactcaggtatattatgagaattgatagcactatagacatctaatgtttatgtcttaatgatcaaaagaaatgctctcgaacagaagtttaaccattttttttttcttttggggaaagcctcaattgcgtaacttccctcgatcagtccaggtactaagaagcaggggtgagcaagttaggcctagttcccaagttgaccatagtttctgctagatcgagcataccgattctggtttccaaaaagcgggaatcaactttggcagttcccaccccagaaacctattttggaaccgattacccctaataagaatttatatttcgtgaccctcctctcttgttttgccaaaacccaccacccgcacagccacacaagttagacatattttctcctctggtcggtagtgctcattaccatatttgtctggaaaaatcgaaagaacagtttagagtgctatccttccccagagccattttccttggtgttgattttttcttattcgctggtattgcttcgtaagatgatttgcgacacttctttgagcaagacaaatttcaaaaatggagtattaatgaacgaaatggaatgctaaatgggctgttttgtgagtgttgttcgtgttctgcctgaggattgcttttgacttgcattcatcttttagcaggtgaaaattatctgtcatttaactggggagtatcaatcttacccagtagaaaatggcttctttcctgtagtcttatggaagaaatctaggtttctcagtaccctatcctgcaattaaatggcttttatgctaacaataagttgattgcttttcctttgcaggtttttgagctga

SEQ ID NO: 90733 - DNA, 718 bp, Eucalyptus grandis
  Intron number 3 from transcript Egrandis_v1_0.018591m (loc us Egrandis_v1_0.018554m.g) derived from phytozome v7.0 (c hr-ID scaffold_6; pos 41286876 to 41287593 reverse strand)
acactagaaatgtaagtactgagatgagtttggttttagggggaaaaattggggaaactttttattattattctcctattgtattgcaattctttattggtaaatgctagagttttgatattattttcttggaatgttactggcagttatttccgggaggttaattttaatggatcgtgtcacttcatgagagattaaatcagccccttttctgacttattttaacaaactatatggtagactgaaggataaactttctgggagttgagtttcaaattgtatatttgctgctaaccagttgttattggtaaagctaattgtggttttcttcaagtaaaatgcctttagccgcattaatgggaccacattggcatgctgaagagatcttagtgttatatcatctccccttttttctcacagtcagtgccatcacttgtctgcggtaataaaagatgtctgcaaggagctaatttaaactaatcatttaatagaaaacatacaattacaagtggtaatgtctgtgtatgaactaaaatacagaccctataaacttagagttggcttttccttttgctggagcctgctgttcaaaagttctgcgtagtatttgccaagagcaatctaatttcctaatattgtactagcatgtatcattgccttatatattctagttctcttcatctccagatattctacctcagtgatcccgattggtgca

SEQ ID NO: 90734 - DNA, 1044 bp, Eucalyptus grandis
  Intron number 3 from transcript Egrandis_v1_0.024390m (loc us Egrandis_v1_0.024390m.g) derived from phytozome v7.0 (c hr-ID scaffold_6; pos 47484275 to 47485318 reverse strand)
gcactgcaagggtagagggtaagagagtttccagagctttttactaaagactatatacttcactcctttttcatgtcttcagatataaatacaataaacccagagtgcccaataagaaccattggcttaaatgttgatatatactgctgcacaattatgaaaataagttgtgcggttcttgatgaagatctggatgtcgggtgggcaactaattaaagtggtttgatttgtttcggcggccactttttcggatgataaattcagaatagccgatttactttttctggtatacttagcattcttgacccccttgctgtgagccccatggtttctgaagtgataatgccatacatggatctgagttgggggagacagcatgggggttcattggccacactggaagttttatgacttctatcaaaacttttctgatgattgatctttagcagatcttgagaatgacgacacaatgttttgatacgtgctaactatatttttttaggaaaaaataatttccaaacctttgattttatgcgaagcaaacgcattggacaaagttatatcctgttctgagtacacaatggaagagttgtgttatgactaatttaatatttattttaggccattcaaatttccatgattttggtctttcccagcataaacatgataatttgcatattttgagaacggcagtgtatttctctgaggttgtttttccgagaatgtgttgtcatcctaacgttttcagagcatgggcgataattttttattcttgtgtttttagacttggtaggtttgctagcaatcttctactctccttctgtatgcatagtttcttcctttctctttctgtgtgtgtatgtatgtttaaaatagatgtcttagccaattgattcagttggctaatgaaattatctgtttctgccattgatgtgaatggtgaattcactcttagaaaatcctggaagttgattttctctatgttgttacttaatctgaattttttgtattgcagccaaggggaactcataaaacttgttaccg

SEQ ID NO: 90735 - DNA, 530 bp, Eucalyptus grandis
  Intron number 2 from transcript Egrandis_v1_0.009545m (loc us Egrandis_v1_0.009545m.g) derived from phytozome v7.0 (c hr-ID scaffold_9; pos 22640037 to 22640566)
cggagcagttttggtgatagcgaggacataattcggtgagaagtataacgtcgtccttattaaattcattcctggttcccactagttcattacaaatgttttgccctgcatttctactgctttctattcccaattgttgaagcgtttgcaaacattgctagctgatttttaaaactggcacggagaagctaatgttcagactacgaatgaaggaaatcaaaatttcctgcgtaagaacactcagaattggtgttgtttttagtataattaattaaggactagcacagactgggaaggtcaggtcgcaatcatcttggagctacttttaggagaatgttatggaagaataggttagacgggataggtattgtcagtttaaattgtaggattcatttcatgccgcatttgtttctttgaaaaagagacggaagaaagttgaaactgaagcttgagggtctttctgatattttgatgtactaatttgtgcaaacctaggtatccagacgacgaattcaaccgtttctggcaac

SEQ ID NO: 90736 - DNA, 1031 bp, Eucalyptus grandis
  Intron number 2 from transcript Egrandis_v1_0.012158m (loc us Egrandis_v1_0.012158m.g) derived from phytozome v7.0 (c hr-ID scaffold_6; pos 23252365 to 23253395 reverse strand)
ctgtggctgctcagctcactcccaaggtccgctgatcaattggactgtcactacttatattttctcctcattgaatgtttttgtgctagttggttaatttcattcgaaccaatcattgtccattttgatggttaagttcatagaaacatacaaaccttttcaaggaaagatgttttctggacatcatttgatcggtcatcgttcacgggaaatagcatgatcatttgcatattttacaattttcctgcatattaagagattctcgtgaagtaactactagcatctttgtgttctttacttgacaaataatcatatccggcttaaatcccaaggaagtcttggactgcaagattacctgtaattaaccagaacaccagaccatagcacaaagattgatggtacaggtttagccacgggtaagcagactgtctagagaaccaacagagggaaacaaattaatctggaccttataataatttcttgctaagttcttggaggaagtctgaaggctgtccttggatggagtatggaacaaacttgaggaaatatagtcattcgaggttaaacaggggaagaggacgactcttctcgatgtcaaacttgagctagcgactaagaactgcaataacaaccaaagaatgcgattttgggggatgtatatgataatatttgtaactctgtataataaaagcactcgtcttatatggagagctgctacttgatctgttggcgatagttgatcaaaagtgagaaagtagaaaattgcaagaggatggtttgtctcaaagaggcacctaagaatgtgaattgcagaggcaaatttttagtggacaagctaatatatttaaagactgagccgctgcactgagaaaagtggaaagtataaatggctcaacatttgtcagcaactttgttactctttacatgatatctctttgcagcatagtcgatcttcctaggtaacatactcataattcctatcaatggtgaaaacagacttcagcaccagctccagcaaagggagagactgt

SEQ ID NO: 90737 - DNA, 279 bp, Eucalyptus grandis
  Intron number 1 from transcript Egrandis_v1_0.041132m (loc us Egrandis_v1_0.041132m.g) derived from phytozome v7.0 (c hr-ID scaffold_4; pos 10217424 to 10217702 reverse strand)
ggcgtggtgaggggtgtagtaggcaacctgatggacttcattggttgaggactacctgaataaatgggtcgtcataaatcgaagttggaattggattctattttaacttgaatcataataagtgtataatgtactgaaacacattgttctaaagattaatagtaatttcccactttgctatccaaagttcaattttttttctcttctaagccaaaagttagccactgggtaattgtttatttgattgcaaaatagggtatttgtgaagctccttagtca

SEQ ID NO: 90738 - DNA, 877 bp, Eucalyptus grandis
  Intron number 3 from transcript Egrandis_v1_0.042639m (loc us Egrandis_v1_0.042639m.g) derived from phytozome v7.0 (c hr-ID scaffold_9; pos 28689537 to 28690413 reverse strand)
tcctaagcgagaaggtccccaattcagaatcttaatctctcggttatttcatgtttcatttatgatttttgattcccagcgtattagggcgtgcatggaaacgttccaaagaaatgtttctggaacacttctgtacggattttgttcccgggaacaaaaaaagaacagaaacgcgtttggttgcgtttctgttctttttttgtttttttgtttccggaacaaaataagaacaaaaaaaagaaacaacaaattgttgtttcttgttccagaaacaaaaatgaagaaacgtttttctcttctctctcttcttcttctcttcttctttttttcttcttttttctttcgccggtcgccggcctcggccatggccggcgaccggccgtcgagggccgacgatgccctcgagggtcggcgacctcgccagagcgtcgccggcacgggcgaggccgagcctcgccggatctgggcgagcccaagctcgcccagccaaggcaaggctgccggccccgtcggccggtcgccggaggccggtgaccggccgaaaaaagaaaaaataaaaaagaaaggaaaaaatgaaaaataaataaaaatgtttaaaaaattaaaagaaataaaaaaaaagaaaaaaatttaccaaacgtgtttctattcattttttattcccgaaacaaacgttaccaaacgcatttttttgttcaaaaattgttccccggaacataaacactttttttttttttttataatcataaacactttttttgtttctgttccctagaacaaaaaaagaacagaaacgttaccattcgcacccttagctaactctgactgaattgaaactataggtccctaatcttcttgtcaacgtatcgctgtttgt

SEQ ID NO: 90739 - DNA, 408 bp, Eucalyptus grandis
  Intron number 2 from transcript Egrandis_v1_0.050583m (loc us Egrandis_v1_0.050583m.g) derived from phytozome v7.0 (c hr-ID scaffold_11; pos 30758388 to 30758795 reverse strand )
atcctgcggtaagggaaacaatcgatgtgccttttctgcctttgattgactaggtgcattaataagttgcatgagctttttaactgtcacaggacaatgtcctggccacaccatatgccccccaccccacttaaaaggaggggaaaaacccccaaaacatagaagaggactgtaatcaggctttttctccatacaactgaattttgttttgggtttttgttgggggagaggggaagggggggtgtgtttggggttttgtgttgggggttgataaaaatcacaattcaggctgtttggcatcctgaaacagaagttcttaatacgtctaatgtttcttatttctgtcattagtctgattgtaatgagactccagggaaataaaagaagtgctggatttacaattgaaga

SEQ ID NO: 90740 - DNA, 816 bp, Eucalyptus grandis
  Intron number 2 from transcript Egrandis_v1_0.020153m (loc us Egrandis_v1_0.020153m.g) derived from phytozome v7.0 (c hr-ID scaffold_11; pos 38264143 to 38264958 reverse strand )
actggagatacattctcgccggtctcatctgtcaggttctaattcttctgtgattgctcgactctttcgtgaatctgatgttgaaaagtatacaacccagatttgcgtgtttgcgttcatctttccaattccgattgtggaatatccgaagttaaatttgtcgaagtttttgaagaatattggggggtttgaaaaggtcacccttttcgttaaaatgtagctagcgctctgttcggcataccggcaccgagcgcgcgcatctgaacatggatgttgccaggaatcgtcgactggccttttctgaaagttaacgaatgagcgagagagaagcataggatttggtaatgcgtttcaaaattgtttttcgttacttcaagggaactcctttagtccatgcttttcactcaaggcagagtcatctgcttgcgcaagtggcgttcttcaatggaaaggacttgggtctgcatgaatctgaagtttcagttactgggatttgtgtttcttttttgtttgctggattcgaattttgtgttgggtctcagagttcttatcacgggcatgtttcctcttagttgcgtaatgccatgctaatatatgaagattgacgaactattgtttctttatagcatcgttaaatgaggttaatttaattctctccgttttgagtgaaatttgttgctcatcatggccattaaatttcactgactagaactctctagatggatgttcactttgagtttttttacccccagtgaggtttgattttttttttcttgccttatttctgatttattatttgtctgccgcagtacatac

SEQ ID NO: 90741 - DNA, 879 bp, Eucalyptus grandis
  Intron number 1 from transcript Egrandis_v1_0.004180m (loc us Egrandis_v1_0.004180m.g) derived from phytozome v7.0 (c hr-ID scaffold_11; pos 12949863 to 12950741)
ctccttaccagaaggccgccactctcgtcgatctggtgagcccgtcccctcgcgccccgccggcgagcgagcgcgcgcgcctgtctcgccagctcgctctctctctctcttcgtctttctttctcttccgtttcgatcccctgagtcggttttagtcgacgaccgcgtgctgcatttgcgctgggacgtcgcgtcgtcttctccggcgcgcgacgaatgggagggcttccgtagcatgaaatcagcagtctttttttttttttttttcggtttccaaatctcgatcgcggattgccgtcggaggtggcgtcgtgacgctgcgttcgcggcgatcacttttcgccgcgttgagatcgtcgctaactgatggcactgcgctgttgttagctgttgaggtgagatggtctgagtttgcgatgtttcccgagtcgttgagctcgttagaaccgggttacgtgacgggaacgcgaaaagtctcgatcttgtctacggcaatttagccgcgaaacattggaatgtgctcttgtttgattatcaagtttttgggatattaaatcttgagtgcttctttctagctaatcttggcttaagcttgtaaacaactatttcgagtttctttcctgcccagcttccgtttccatatcttgctttctttgtttcaatcgtggcccactgctttagtgccttttgacttgttttcgtatgagaaccgtgagcttgtaaactatattattgaggataggtgttctgtatatgcgcttattccctatctcggggaatgaacctataatttttttcctcctgctggaatgatcattgctgatgttcgttttgaataatcacgtgcgaattattgaaaatgcatcctgcaggctgaag

SEQ ID NO: 90742 - DNA, 976 bp, Eucalyptus grandis
  Intron number 1 from transcript Egrandis_v1_0.001884m (loc us Egrandis_v1_0.001884m.g) derived from phytozome v7.0 (c hr-ID scaffold_4; pos 24058847 to 24059822 reverse strand)
cggagccggaacctgcgccgcgctcctccgatcgggtgagttgcatcgagcgactcccgcgcccccccctcgcccgttcttctcgcggttctctctctgttttcttttcttctttttttttttttttggttggtttcggttttggtttcgataggttccgctacgcgattacgggcctcctttcttttggttttttttctggaagcgctttggggaggaggggtggttctgttttgttctcttctggatccgccttttcgacggtatcgacacgtctggacttcgcgttgacttcaagtcaacgggaccgcgcttttccctttttgctttttctattttttttttttttttttttggtgcccgtcctgcagtatgtgagaatcggtgtcgtgggttctgtttcgtttggcgatcggcagagggtcgagttcggcgatcggcgcgagcgcttgcggcctctgttccggtatatctttcttcgtttggtgttcttttctcggccccccgttgactgttgtattgactttgcgcagttccgctccgtcctgtttctggaaacgagttgctctgcttgggcaaaaacgaatcttttttttttttttgattgtcggattttgataaacatgaagtggcctctgctttttccttttctgggttttcttcatttttgagttttgtatacgattctcgtttgacttggctcattgtgctgctgattttattagatgcggcgtctccaagcttcggactttgctcggaattggaaattctctgaacttttgtgtttcctgacgcgcattcctcttttgaattgagtttctttttatgtcgagagtgctgctttgaaatagattctggggcattaatatgaaaacgttgaaaaaaaaagaagaacgaaaatcgcgaaaagtgtggttggttttaaagtggacgtgttaatatgattgaatcgatctatctaattcctgcagtgaga

SEQ ID NO: 90743 - DNA, 392 bp, Eucalyptus grandis
  Intron number 3 from transcript Egrandis_v1_0.015923m (loc us Egrandis_v1_0.012688m.g) derived from phytozome v7.0 (c hr-ID scaffold_6; pos 21724194 to 21724585)
tggtaaaaacttccccccttttctcttttcccatatgtgaataatctcgtacctcgtccaagtctgattggcgatattcaagacatacacacttatgtttatatgcaaaatccgtcatatgttgttttcaaaggcgacaagttggttatttataacccgacccctgtaatgtcctgaatccaatattcggtcccgcggttcgtatcccaatttcaaaatagtgcatgaaaagacaaaaaaacaaatgcgtcattttccctcgttttgtatatcgtgcatcgagcgacggagagctttcttccgaagctcgcttcgagtttcgttcatggcggaatcacgcgttccgttgtcctccaggcggacaacgtccccgccggaagacgagcctccgc

SEQ ID NO: 90744 - DNA, 956 bp, Eucalyptus grandis
  Intron number 3 from transcript Egrandis_v1_0.016113m (loc us Egrandis_v1_0.014210m.g) derived from phytozome v7.0 (c hr-ID scaffold_6; pos 44919913 to 44920868)
gtctccggtgccgccgcatcgaggtacgttccgttctctttgattagaaaggggggggggggggggggggggagtgggagctgtgctgtagaaggagaagcgtcgctgtcgcaggttgcggctttttagtttgaagaatttccctaggatttgaaagttcacgactttgcgtatacttcgtgtagggatgacctggaatttttctgtagctgggtctatatgcttctgttgcttcaatagtttcgttttgttcttgaagcaattcagttgaaacagtgaaaagattaggacttttctattttaatcttttccctcgagaagagggaacttctgcagattttgacttgcgtggactgcttatactgaattaggatcttgccctgtctgctttttctttttggaatatggtacgcttgatctagaacgcctatattgagactgagagcgttgcttgtgatttgatacgagtgatgttgatagtttacttgctatttaaaattctttccatcttgatttactcaagataatacctttttcagtttgccagtatagatagttaggtttggtgtaatggcatcttgatggtggagtggattgagattaggacagggggcactttatcgactgtctttcaccatcacagagatcagatgaaattcatttctgtttgctgagttttcccttgatgatgcgatgaggatgacatatgattgagcagtggcctcaattgtttctttgcaaccatctttcgttctccgttatcctaccacctctcccttaatcttttgagtcatagaggccattggctttccttttttttatccttccttttttattggttgttgccggtaggagcaagtgggtgggagggaggagaacgtttttattttttcctttttccccccttttttgtgcaaattgttgaaatggtttgaaaaattacagtgctgcgggaa

SEQ ID NO: 90745 - DNA, 760 bp, Eucalyptus grandis
  Intron number 1 from transcript Egrandis_v1_0.011676m (loc us Egrandis_v1_0.011676m.g) derived from phytozome v7.0 (c hr-ID scaffold_9; pos 30309304 to 30310063)
aaaaaccagagtgccaggtcatctctctctctctctctctctaccgagtcgttttcttttactagttttgaggggtcactggtgagtggcgactgggtgaacttcatctcattggccttccatggagattgaaatctacttggttaagcttttctctatctgagagagtaaaaaagttctatggactcgtgttgccagtgatgtggtggacagaatcaatttgaaaccgagaaaaagtcgtcatttttaatgggaccccgagcgagagacctgcgtattctggaaatataattgacttggcctaatagactcgactcgacgcgatatttgcccaaagcagccccggtgctgcactaatgtgtttctgaaatgctggttgattggtctatgttcttttctagtagaacccgccgttgcttttaggtaactttatgggcatgaaaaagcttgcatggacagaaaagtaatgtaaagaagtgaaaaccttttgtgggatctatcgttgtcacccccgtgaccgatcccgttcgcgctgggtagagtccagcaggtgggttcaccttcttttgcccaacgaaactcttctgtcaaagaaaatgcccttggataacgtaagatacacctcatttttcttggcaacatcagtggtcgatcagtccagtagatcaaatgatatggttcttcccaggcgagctggtggttcggcgtcctcgttcgatttttactcagttcgctttgctgatcggaaaacgctgcaggt

SEQ ID NO: 90746 - DNA, 660 bp, Eucalyptus grandis
  Intron number 1 from transcript Egrandis_v1_0.012357m (loc us Egrandis_v1_0.012357m.g) derived from phytozome v7.0 (c hr-ID scaffold_11; pos 25337220 to 25337879 reverse strand )
atctcgtcgccacgaaacccgggtatcaagagaaggtgagatgagattattatatacaatcttgggcagtccgtatggctccgataaactaaaccgataattaaaatgaagacttcgaaatctgtgttttgttaatttacagtggtatagatacttcttttaagctttgttttagcatcatttttgtggcgtttttacacatgatgatacaaccatctgtgtgatgaacaaaactcgctgatgcttaggaacttgaactttttatgaaagttaatgtccagatcttaaatgaagctctccgcggcttttgtgtctacatatatcttcagtaatagatggaatatgagacactcggcagatcaaatgtctagaaggattatgatgaagggtttgaatttactaagaaggtgtttatgtaggttaactataaacttagcatccaaatactatatttttctcggaattagggttgaacacaaagattaaagcaaagtgaccatactaatcattatatattctgccttcagtttttatgattgatgtccaacatatgacttaacgaatatattctttttcgacccttgaattgcaaagatcaatctgttcatgtctgctgactgtccaggaagagccaagcaaagaaggtggtgtgtataccag

SEQ ID NO: 90747 - DNA, 695 bp, Eucalyptus grandis
  Intron number 1 from transcript Egrandis_v1_0.041002m (loc us Egrandis_v1_0.041002m.g) derived from phytozome v7.0 (c hr-ID scaffold_11; pos 22048370 to 22049064)
gcattcaatatattcaaggtacttttgttgtacccattaaaacaaaattggaatccatggaccttttgctctataagaccgtaaatatggtgattagtttggtcatgatcttcattggatattggccaaatcttatgttatcacatgttaacatgtatgtcgataatctagattttaatttcttgattggtttaattataacaccttctacttatattctattattgatgtgtctgtgcgaaattgacgtatatagcatgtcaatggaggtggaagaatgagaggcaatgactttcattatgtgtgagggatgtcgatgattgatgactaaaattcaataacttaagtttcatgtaatgtgttatgaactttttattatttattttattttatacattcatcttttatagattatttctattgacaaatgaaaaactttcatttttgtttttgcattcactatcattttgcttcactaaaactgcccaaaaaaaaaaaaaaaaagaacatgttagaccacaaaaccgaccttagaatctatgacaagataggtataggttccagggtatacaggataagttttatgttttagaaaatggggaacatattttaatggataggttccagatttaaagtggaatcggaactgctcatccctacttaaatcttctcattttgggcattttttcagtcct

SEQ ID NO: 90748 - DNA, 438 bp, Eucalyptus grandis
  Intron number 1 from transcript Egrandis_v1_0.020607m (loc us Egrandis_v1_0.018539m.g) derived from phytozome v7.0 (c hr-ID scaffold_4; pos 36488574 to 36489011)
ccaaagggcgcaccccgaggaaatccctcggccaggtacggcgcgttcgaatcctccgggtctctaaaagtagctttcaccgcctggtgggaagcgctgtctatgcctccatttcggagcgggagtaaaatttcgttgaggaagataagacgggtggcgtatcggaagctgagcgattggttcaaaacatgaaatttcaaaccattcttctagatgggttctgtttgtgacatcattcggcaaatgggtttatgatggtgaaatctgtagttgtctcggtagtggagttggagttatgaccagtggctatttctggtttctctattgtgttggacagttcatgattgtgcgcgagtgacgtctaattgtcgcctttgatttacccagaaaaattgaataattgttgcctcatgttgctttttgttgtttcagcattac

SEQ ID NO: 90749 - DNA, 586 bp, Eucalyptus grandis
  Intron number 2 from transcript Egrandis_v1_0.020607m (loc us Egrandis_v1_0.018539m.g) derived from phytozome v7.0 (c hr-ID scaffold_4; pos 36489127 to 36489712)
ccggtgccaccgttcttggaattgaaaaggtcattgaactgtgtagttaatgctcttacagtagtcatcctagttctacctttaatgaatttttccttttgacttattgtaataaaatcgttgcccatagctaatttaactaggcaagtaagtgcttaatctatgtttcttctagtgatccaagcagacaacaaaatcacgtttgttgtggctctgagactgggtaccagatactgtgtttcggtttcttccgagcttttaacagttgtttcgtgaactacacactcatccatcgcctgactgtactcaatccgttgaatcattaaatacctatcagcagtctcttccatttgatttcaagactatcaactgaggtggttgttttgttgcattttgtcaagtagatgtggctttattaacctttatatgttgctgctgcatagactgaatcaccaatcaaaaaacaaggtcacacaggaggccttgcaagtctggttacaagcgtgataaatattcttcctaccctacttacagtttttagtgtactcatgtttttgtctttgttgtggaattttaggatccatat

SEQ ID NO: 90750 - DNA, 938 bp, Eucalyptus grandis
  Intron number 1 from transcript Egrandis_v1_0.040932m (loc us Egrandis_v1_0.040932m.g) derived from phytozome v7.0 (c hr-ID scaffold_9; pos 2096292 to 2097229 reverse strand)
agcccggtcctttttgagccattttttttttagtaattagtttgctgttgtccttgaatttattggttggtcttgcattgtgtttagatggatgagttgatgcaacggaagggaaataaagacagagattatgaataggataaataatggaaatagtacgataaatatttccttttgggccatagaccactctggggcaaaattgggaggagatagaagtaaattcacgaatcactgtcgcccttcttttcatttttgatgagatgcatatgaagaactcccagttttctttcttgctgaacgaagcagacgaattgttaccttaagcaatttcaccagatattacgaacttggcaggtatattatgaggacttgatattttgcttggtaattgtcatgaataatcagttttgcatcatagatcagcaaaactgcggcttgctttatttgatataaatgcttttgaagagcaaagaagtgtattcagtttatatgggatggtctggccaacttccataaactggcatagttgagggatgctctccattgatatattagtaatgatggttcatcaagaagctcagctggactcatgttagttcagttgtattgtggttatcacaaaccatgggtttctttttgttaggcttgtactggttttagatattacttatccaaaaaggactgttactaatcctaggctttatttcttcttatagaacatagtatgtgtgcaaacacctagtagtttccatatctggacctgctttgatgtttagactattctaaatgacactgttactcgtacccggctttgtttccttctttagaacatctcatgtatgtctgcagatttcttgtagtgtccaccactagggctacgtacttttctaattgtaacttcactttctctgactcgataatgcaggaacatcagc

SEQ ID NO: 90751 - DNA, 409 bp, Eucalyptus grandis
  Intron number 3 from transcript Egrandis_v1_0.025763m (loc us Egrandis_v1_0.025763m.g) derived from phytozome v7.0 (c hr-ID scaffold_11; pos 19880031 to 19880439 reverse strand )
acacagattgctcggctcgcacacaacatcactatgtatatttcagttctatcaattctcattcagtttgtacttcttaaaaatcagacgcttgcacttaatgtgtgtgtgtgatgctacatgaagcaatcaaacatgtttttctcagtaactgcttgttgcaacttttcaaccacttcaaattagtaactttgtagaggcactggatcttcttattaaagtagaaactccttcgacctgcaatgcctgcttcttgcataattgaagcaatgacaccctttttgcatatctcttgtttgtagcacaggattgggtgccttagcaacttcacttaattggaagcgcaacagcatgattattttgtgaggattttctgttcttctcacaaatcggtactttaatgcaggag

SEQ ID NO: 90752 - DNA, 925 bp, Eucalyptus grandis
  Intron number 1 from transcript Egrandis_v1_0.018927m (loc us Egrandis_v1_0.018931m.g) derived from phytozome v7.0 (c hr-ID scaffold_4; pos 32657073 to 32657997)
ttcttcttcgaaatcctctcttccttgtcaacggcgtaagttcttgaaatcccacacccccccggtcttcccttcactgaatttcttctgctttctgaatctgtatgctcggcctgagctcaaatcatgtccggacgcggagtttgtagagttccataagctcgtttcgcgtggatggctcttgggtttttatccatgtctgataaagttggcttcttgtttagcggcaactcttctctgggtagcttatgtgatgtaaaaagacctgcttgatgctggtagattgattttgctcagtcgggttttggaaaaatccgatttttcttcaatttgtcttgcggggctttgactgtgtccaatgctatagtcagtttggttgcttgcgtgtgattacaatccatctggggaatttctaaggcataagcgtgttgttctcttccctccttttttcaccaatccatctgacagaaaaaattagtcttctcttctctttctctctctcacatgttatttttctgctgttaaatatcagagtttagtgattctctgttcaatctcatcagtttgatgggtaatatttgctgttcaaattgttcaaatcactgtggcaatcaaacagaggtttagcctagcaagccactgattatgctggcaatgtctggacacatcggttgggtccagtcaaaataaccttactgggatttgggaagaacttcatttcttgtttgctgactttgagctgtatatatctttttccctaaaagtgaaacggtgagatgaaaatccagtgggaggaatatgtaaatacatttttggttgtcagataatgtgtgcaaagctatgttgagatttgagtttcttcaccagtgcttgctgaaaacttttaactctatttagagaaattacagagcaaagtggttgcttc

SEQ ID NO: 90753 - DNA, 509 bp, Eucalyptus grandis
  Intron number 1 from transcript Egrandis_v1_0.017211m (loc us Egrandis_v1_0.017211m.g) derived from phytozome v7.0 (c hr-ID scaffold_4; pos 24615850 to 24616358 reverse strand)
aatatactccaccctgccgtgtatttacctgttaggtgagacactatttactttgttttttaaagatacaaagagatgcatcgtcactcattgtactgagttgaattttgttatcattttgatgtggatcaatttgcgttcattgtttatgcgtaagacttcattgcacgcatgaaaatataatatgacagacatgaaggtaaagcacagtgtcaaaatttctctgcactaccacagattcatttctgtcatatctttgttatattttcatacctaaaatgaagtcttgtacatgaaaaagaatgtcagctgcataatataaacgtatactgtcaatttgacattaaaaaagttcaagaaatgctagacataaagaaaaaattactggacatgataagacaaaataaaaaataaaaggctcgcagagtagtaattctagttgaacgcatcgttctcttccgtgtctcaaaccaggtccatttccagccgtttgatcgggaggaggtggg

SEQ ID NO: 90754 - DNA, 695 bp, Eucalyptus grandis
  Intron number 2 from transcript Egrandis_v1_0.021851m (loc us Egrandis_v1_0.021851m.g) derived from phytozome v7.0 (c hr-ID scaffold_9; pos 28227599 to 28228293)
aggagaaactcattttgaaggtaatgtgtgggatcaagatagtctgtttaaacgaacttgttttcctttggtttagatgatgaaggtcaactaagtatttcctttggccatggttcttgggctatgttttttttttcttttctttttttgggggggagaaaatgatccctcaataatgatgcttagatatctggtttttgaatgatatgccttggtctgcatcatgtgctctttttggtgatggttggcaccgtattggaagtttagtcataggtttaggtgagtgggtaagagtgggacagcgagctattttaagtcaaaaacacatgatccctccaaaagtatctgagtcaaacacacggactaaatactcctctcaatttggggaagaaccttctatatggcacccttgccgcgctgatctgctgtcatggatgaacggttgttcatccttgttgaagtgcatgatcacgtcggtatatttattggtacacttgatagatacatgagagaccttttaatggcgatgcaaaatttttgttctatagtcattaaggagtaacgaactggaccgaagtgcaagatgaccttgtgaatgggaaatccttctagctgaagtttagatctgcaataaaaggagcataactgcttgacttgctttgatttgtcactgtgggaatatgtgtaggccccat

SEQ ID NO: 90755 - DNA, 814 bp, Eucalyptus grandis
  Intron number 2 from transcript Egrandis_v1_0.007777m (loc us Egrandis_v1_0.007775m.g) derived from phytozome v7.0 (c hr-ID scaffold_12; pos 150187 to 151000)
gagaccactgcagactgaggaagcgtataaaactggtaaaatatttgtcttttcatgacatttcatttgctttaatattgtattaacaccatttccgcaagtatcaaagcggatactctgggtttggcagcatgcacttgtcttcattttgccaatctagctcataaggaccacctttctgtaaccatttatcgacagatgccgcttccaatctcatttctactctagtttttggcccttggctgttaggctgattggtgaggcctctaggatttttcttcctgttgattctttttgcccttccgagcatacaacttctgaaaattaagggtgaaactcggtcctgtggtttgtttcgcatctaattctgtatctgttaagactctctggcgaaaagtcaattttatagctcgtcacatcctgagcgctgttagccttgtaagttgcaacgtcttttgctgttaaccgttcatcaatttgtgtttgtttaatttgatgattggcttctgtttttctcgaagattcatctgaatttgcttttactgtcgtggaagcactttcctatcctgtgttctcctgtaaatacaagaacaatagccaaccccttacatatctgagatacaaattagacttttattgttctggttgaagtttttgaactagttaatgtttgcttgttttactgggaagatgatttaccccatgaagtggatacatgttatcaaccattggacaatgacatcatttgtttctgggactatgcaaacgtcttttctaattatcagtatgcttctcatctccaggaagaatagta

SEQ ID NO: 90756 - DNA, 909 bp, Eucalyptus grandis
  Intron number 1 from transcript Egrandis_v1_0.007579m (loc us Egrandis_v1_0.007579m.g) derived from phytozome v7.0 (c hr-ID scaffold_4; pos 19775169 to 19776077 reverse strand)
acttcatcaaatacgcttccccctcctactcaacggttagtaatccttctttatgtctactacctctgttttcttgcaattgcgttttgcagacttaatgaaagtctttgtgtttgcggtaattgatatcgtcaaagatctaagggtccgtttgttccaaaaaataataataataataataagagctgcttttcggtatttgaaggatagaaaactgattgatctatgaaaaaaaataaaaataggttcttatatgcttccaacccatcccttggaaagaaaaaggtagcaacgaagaaaagaaagagctatcccatggtttttcttcttctagtgaagtgaagtttattcacttgacgaatgaagttgatcaataccgttttggccgccaaatcatttgaattaggtctgccgcattgggaagttccctcgctgtgtgtcgcgtttaatttcttcctaactcaagagtttgattatgccaaacacggtcatgtttaacatgtttaaactatattatatgcacccgatgtatgcaacagtccctccttcagaaagatcaattgtataactccacctaaatgaaacgatttggtcatcgattcaattttagagaataatgttagattttgtctcttcggaagtttcaaaatgaaatgatttggtctttatcattaattcacttttctaaaagtatatatactcatcgtattgaggagtatgctcaatttgccttgttttcatatcctttcataggtttgtaaccaagataacatgattattatttttcaaagtaactttactttcctttgagtcttttgaaatgtacgtatctcatgcttgcttctatttacaatggcgtattatttatgtgcagaagttcaaattccttggaagagtggaggaacaagt

SEQ ID NO: 90757 - DNA, 1017 bp, Eucalyptus grandis
  Intron number 1 from transcript Egrandis_v1_0.018007m (loc us Egrandis_v1_0.018007m.g) derived from phytozome v7.0 (c hr-ID scaffold_9; pos 23056435 to 23057451)
tcgcaggcaacgatcctctgcttgttcaaaccgaggttgctctgaatctcctgctaactaatgtaatagaggccatgaaccctatttgatgtttgtgaaaaaattggttgtgattgaagctcttttggtgtcttgaacgtgtattgatgctgtcgcgatgatctgaaccagatttttgttgttcgtgatgactgggaatgaatcgcttgtattagatcccggatgaaatgctcacaatcagctcaacaaaatgagctcttcttctgaacaagaacgagtttgtcgatttgtgagatcattcggtagggagttaagggaaatgagtgcggggatttaatgagccgtcagcaatgctcttctgtggaaagtggttcactgagcatctttagattttcttctaccctagacagaattttgggcaagtcaaatctcctattcctattgtccccaaacaggggttaggaacgcatagcatgttaaatgacgtaatttgtacaagatttcaagaaagcgctacaagagcatttgttttagcattcctaatttatgattattgtaatcaaatctcaacaaaatgaatctcttattctagctatcattgataatttttttatttttcttttaattgaagaaagcaagtcggtgtcatagagtgaaaccgagatccctccttcctgttcctcagtctttccgattcatgccgttctctgctctgctctgctttaactgtgctcaaacaagaggagggggtgatctgaggctttcaaaagtagacttgccttgcaacctgtcttggaagaaacctttcttgtcatcaatattctactaaaataggttttccttcttgactgattggcttttaagtagtacaataattgtcgatgaggatgcgttttgagcatggtttccgagagcatggtgtctgttcgaattgatattgcattcaccgagattctataagctagcttacatcaaactttaggatatcgactcccctccacctgctaacaaagagaa

SEQ ID NO: 90758 - DNA, 538 bp, Eucalyptus grandis
  Intron number 2 from transcript Egrandis_v1_0.018007m (loc us Egrandis_v1_0.018007m.g) derived from phytozome v7.0 (c hr-ID scaffold_9; pos 23057517 to 23058054)
agttgatcttccaaaaggaacccaagccaaacctggtcatcttcttttcctctgtttcctctggacatttttctatcatgcatttatctcaacattaactgctcagcatgttatttttcggtttcgtcacctaatgccaatcaaaagcgaggctgtatataattagcgcatagacactacattttaagtacacacagtgagattcatgcatttgagtattcgtggaggcaaagctgtaatgatagctttcagtctccttagtgtggcctgattagtcagttttgctcaatcttttgtttctggtacttcatccatcaccaagtttatcgtaggaagaactgatgcaacgttcaatggatccgcatcttaatttgtccatgataaaaagtatattaaccttcaaatcccaagtctaattgaaattaaaaaatcagctgctatcgcacactgatctttcggactctggaatctgctaactactagtctacttcgatatattgcagagaattccctcagagttttcggagctctatcatca

SEQ ID NO: 90759 - DNA, 603 bp, Eucalyptus grandis
  Intron number 1 from transcript Egrandis_v1_0.012750m (loc us Egrandis_v1_0.012707m.g) derived from phytozome v7.0 (c hr-ID scaffold_9; pos 26482567 to 26483169)
atatttttgccggcggaattgccgaaagaagaaatgtaagtttgtgtccatcgacatattcgattgattcccgtcactcaaaaagtttaattttgtgaattatggattaattattctataacttaccaattttctggtgcaaaagttttttgacatgtgtatatgaataatatcttcatccttttcgaagatttttaaattaataaagaaagttgaagttggaagcttgctggaagttgaaaacttgcaatgtggctgagttttcttgtttttgtttttgtttttgtttttttttaaacggtaggcggtggggacataggcacgtggtggcggtggaaatagcagggcgggttttctttttagtttaaaaattcgtaaaaatcgaaagagcaattcttaaaatttgggattttccaacagaaaattccattctcgaggctttgatggagtctctggacaggcttgtaggacgttatagcccgcaaaacgagaagcccaaggcccaaaatgaagcccagaccacacagagaaaggcccaggatcggccccgacccatcggaacggaaagggttcggctcgtctcgttccgttcccgtttttctc

SEQ ID NO: 90760 - DNA, 568 bp, Eucalyptus grandis
  Intron number 1 from transcript Egrandis_v1_0.020859m (loc us Egrandis_v1_0.020859m.g) derived from phytozome v7.0 (c hr-ID scaffold_9; pos 6145958 to 6146525)
tcggatacacaaatcgtctccaggttcctggtcaggtactctcaatgcttcccttgttgctgtgtgagaatctacggatttgatgctgttcatggagtcacccaagttgcaaatgcattcgggtcttcttctgttagcttggagaggttgggaaatgcaaaagcccctgcatttgatgtgggctgaatgacccgtcaaaatttcgcctttttcttgaatttcagccaatagctgtatttgggcttgtgggtgttggagattcttgtgggtttttgtttaatctgggttcttttgttattcgccttttggtttctgttgattctttgggtgctccgggatctgctttattttcttgtccgtatatcagaccatggactccaagaatcgaactttttctttttaaattctattcggtctttgatttgtttatgctgtttgattttgatgcgctggttcatgatgctgttgtgttaggaaaattttcggggttcgatttagcattgattaggagttactttggtttctcattgcagaaatttggtgatccaactggtattttcatctgatt

SEQ ID NO: 90761 - DNA, 892 bp, Eucalyptus grandis
  Intron number 1 from transcript Egrandis_v1_0.016723m (loc us Egrandis_v1_0.016723m.g) derived from phytozome v7.0 (c hr-ID scaffold_6; pos 35852404 to 35853295)
gaactttccttccatccggcggcgcagcaagtttggtacgccctacccaagtgaaaaatattatataggctacttttatgtctcgcctaaaaaccagcgttccttcgtattttagttttgtattgcaatatcgagtgaaatattagagattagagaggattgcaatctaggttttgcttaggagtgatacggatcccgattctcaaaattgggaacgagagactggaccaattgatcctaggattgagaacccctatcacttttttttcctcacaacttgatactatatgtaatgaagaaatagataattaaaaaaaaaacggttacttttattttttaaaaaaattaaaaatatatgtagttggtccggttcggttcttccttgggattgagaattggatcacccggatactggttccacttttaagaatcgaaaacgggaatggatcggccggtttagtccgtccgggcggttcttggtttgggctgtccattttattttaattatatatattcacatgctaatggatgcgtgaaataacaaataagtgctgaggtccatatttatgggcctaaacgcaccattgatctacttcggtgataagcatgcgatttgactgggctaagttgagttttagacttttatgcagtgattcatggcaaaactttgatatgctcactctgttggagacatcatgtcatttatctaacgttagacatccttacgttacaatttctctatgttcagggaaatgatcaaaattcagtaaatcagagcatcaaaacttcctctatgtaacgcatatcatattttccgttctcaatgtaatgttcttgcccccgcattacttgtgcaggttgcaattggacgatcatatacttgaagggggca

SEQ ID NO: 90762 - DNA, 1062 bp, Eucalyptus grandis
  Intron number 1 from transcript Egrandis_v1_0.001167m (loc us Egrandis_v1_0.001167m.g) derived from phytozome v7.0 (c hr-ID scaffold_9; pos 6252641 to 6253702 reverse strand)
ggaggaactggatctcagtggaaacggtttcacaggtaaggaactcttttgacttatatcatataacaattttcttttgtatccaactttagatgtattataacacaagtcagttcatgttgtggtctcacggatttaaatgtggcaaattgtaacttttgacttgacttgaagaagaagttttcattttgcgaaagtatcaatcatggttcatctagtgtgaattaagtagctgcaaacgtggatttggtgcaatgatgacaacactgagcgaataacggagaggatttgcagtacggtgtcttagtcatgtagctgctatactgctaagtaaaagatggaattagaaaccgcaaatatgcttgtcatttgataccttgctattaaaaaatttaggatggctacttaggatttttctgcttcttcagttgggggccagtcgagggtggacatgccactttgacgaatgatttgtaaaattcctgccatggatgatcttagctatccatcttctgcttatgccttctgctctgtaattacttgatgttttggtgttagcatcagtgcaaagccaattttcaaatgctgccaagcagtacctggtccctccagcttttggcttgttcttttgcctttaaagcgaaaatctctgaaatatttcaatttgtgagtgatagcaaaatgatttaaaagtatacgagatacagcttataagggtcaaagccaataggtcaatagcaaaagccatagtccacacatggttaatgtctcgtcagccagccagcttgaagtcttttcgataattcgatgacctttcacgtgttatttttccttgttttagtattaataagtattttttctttgtttattacagttattgtgttttactctgggaacatgagtaaattcatttttccataaaagtacatctatcttttattggtggccactttttcgaacttgtatatgttgtgaaatgtaggattgaatttgattatacattacctcacatttgtcatacatgcaggttcgattccagagattaattctaccacactgagg

SEQ ID NO: 90763 - DNA, 761 bp, Eucalyptus grandis
  Intron number 1 from transcript Egrandis_v1_0.018606m (loc us Egrandis_v1_0.018606m.g) derived from phytozome v7.0 (c hr-ID scaffold_9; pos 29633909 to 29634669 reverse strand)
gcgctttgctgtgccctactgtctccaaagccgaggtacctactgatcgagagaaatagaaaaggaagaggtgtggatttttgggatcgcagtccgtatcgtagtatcgctttcgaatttttccggctgaaatcgggaaggtccgataggtatggcgcacgattgggattttgatgatctggctgtctttttgggtcggagctgtagctctttagtcgcaatttgatcgattgcgatcagctgtttgttcgatgataatgtcgctgtagtttgtgacgattagtttagttctgttttgctttgctcgtcagctgactggttgttggcgtatttttgccaaagaaatgagaaaagaagaagaaatggcatgtgagggagctgcattgcatgtagtttaatggtctgtcgctgtaattgtttgagttttcctgattgtatgaggcttattgagtttatcgactgaagtgtatatgaatgcctatgatcaattggtttcttcttgtttcgctagcagctcctttcttgtagtagcagttgtggattatgactgattcttacttttctaattttgtgaagttgcttaagtaagacaggatcttctgggagattttctgtagccattagttgcttgtttgcatgacctgatgcagattatgatgtccaaacattgaaaagcatatatgtctatttgtttttcttatgttgtttgacattggcttcctgcaggtttcgagaagttattctactgatttggcaaagaa

SEQ ID NO: 90764 - DNA, 787 bp, Eucalyptus grandis
  Intron number 2 from transcript Egrandis_v1_0.023944m (loc us Egrandis_v1_0.023873m.g) derived from phytozome v7.0 (c hr-ID scaffold_6; pos 45988611 to 45989397 reverse strand)
cggggaccgaatcgttggaccgctcaagtgagtttcttcagtgaatttggaagtagtgctgttcggatcgacaattttggggtcaccatgtattgcctttctcggtatcttgtctcggcaagtgttaatggaggccggttaatgctgaaccagaatataacggggttcattgtattttcggtccgtttcttaggaaggcaagccgaaacaaagggcacatgtaattaatattgggatctgcatgctctaagagttatcaacaatgaatgtcgacgggtggcacaatcttttcctttaactaagcacaaaatgaagagtgcgttttcctttgaaaagtggagtagcactaggaaatcatacgaagatgggtagggagctgaatagaaatttgtagcgtcaaatttggctcatttacttttgcagtcggtgggaagagatggtcttattgccctttttcaggatgcgcgtgctaaatcatgccagttgcactgtaatggagatgagtaggagcagctgaccaatatgcaatgtccatgtccttctggaagcgaaggacatgagaagtatcttttttaccaaatgaagaatagaaataatatggtctccgtggtgtcaatcatcctgcttgttgctggggaggacatgtgtggctagaatctctgtcgggatagtctcattgtagattttaagcgtgatttgattaatctttgtgtctaattcttgtcacctaatgtgtttggatatcatggcaggtcggaagtttcagtcttcgatttatttggcactt

SEQ ID NO: 90765 - DNA, 979 bp, Eucalyptus grandis
  Intron number 1 from transcript Egrandis_v1_0.043939m (loc us Egrandis_v1_0.043939m.g) derived from phytozome v7.0 (c hr-ID scaffold_11; pos 9943156 to 9944134 reverse strand)
cttatcacctacgtcgatagcctccccacggggtaaccacgtctccttcttctttccatctctgcccatcatttggttttagcggcagagccgacgatttacttcacgagcgacagcaaaattttcccgggtcttgttgttcaacgaacattaaatttcaaaaaaataatcgtgcatgtcacaaattatgattaaactttttgaaattactatattaccttgtgcccataaattttgaatgagctagtaagctagttttggtgagtttcggtcgtatctttgcttctaaacgtttttattaaatgtgactgttttgtagaacgtcccatgtagtgtgttcttcgttagacttgttgggatgtgattgactgaaggtgtttgatcgacaaagaggttatatgtaagtggtggagagaccttactttcgtgatcatttagacaaaagtccgaaagggacgaacttgaattatggttcgctgtctctttattctctggttccatttgaatttgcggtggtgatggagctgaaagcatagacaagaattgccgtagtcagtcaatatgattatctttcttttggctcacatgattctcagtccttacatgtgatgagaagattagttgtcaaggcagttttgtgcatttgttgactgaaacccagtttgtgcttgattctgagaagagacggggcattctgggctgtctagcctcattttggtttactgaggataatcgatgaaagaagttataatctgcttcaagtgtttgatgcttcccctgcaaaattatgtaaaacatttatggtattggaaacagcattcagggtcgggggccatattgtatattttggaataaaggttgggtcttcaagtgcaattgccaagaacctagagactgtccatactatttagcttgctgtttttttcttttttttttcccatgatgatgaatccaacgccaatcctcgtctttctaaggg

SEQ ID NO: 90766 - DNA, 675 bp, Eucalyptus grandis
  Intron number 1 from transcript Egrandis_v1_0.004863m (loc us Egrandis_v1_0.004863m.g) derived from phytozome v7.0 (c hr-ID scaffold_9; pos 13747942 to 13748616 reverse strand)
gttggatatacagggtaaagtttgtcgtcatctgggtaagttctgtttccctcagagtagatctctatatgtgtcgatgtagatttgttgggttttcttgattgccccgggtttttgctcgagtgagatctgcttatccgcattttgtttgattcggtgatggtggagtggattttgtgaatgttgggtgtgttgcggtagcttcggtgtactttttttttttttttgaacaaagcttcggtgtacttggaaatgcgggttttgttcggcttcttgattgggcttgatcgggactgtcggtggtgcgaatgttgatgtggttggtatttcaagaaacttgcatgctcgtgttgtagattcatgttcttcctgtgcgttttggtcagtttggatatgactgtagatttgaagtgggttgtctatgaaatgcatattgaggatggttttggttacgcctagtagctcttattgtatatgttgagtgaaagtctgtttattttcacgtttcttccctgtgctgtgaagtttgtgagtctagctcgcaaagatggactaccaatgctaaatcgtcatgaagttgttgcgaagtccctgaaaatgcaaactatttatcggttttgtgttattgggctggtttttgcaggcgaataatctcgagattgaagagtattcaag

SEQ ID NO: 90767 - DNA, 710 bp, Eucalyptus grandis
  Intron number 1 from transcript Egrandis_v1_0.040643m (loc us Egrandis_v1_0.040643m.g) derived from phytozome v7.0 (c hr-ID scaffold_4; pos 14017825 to 14018534 reverse strand)
caccttgatagcatcaaagataattatcttatttagttagccatgttcgtaaagacattaatgcaactccatttaggattatgttgtgcaccgcattgaaacgcccgcataaaatatcattaattaatcgagttttttcttttcttgaatttgtcttgcttgaggggtttgctactatataaaggatgcgttgtgattgagagaagacacccacttgtgcaaaattcttccattcagggaaagatagaaagaagcacttaagccaagatggctagaatcagcaacaaaatgaccatgctcttcaacctcttcttggtgctctctctttgctgcagtgcgtctacaggcgaaaggatactgaaaagccgtaagttttgagttgattttagcagctaaacgtgaagaaacacagagaagaattttgattctataagaggtagctcgaaattagtgaggaaacataacaataaatcccttactctctcaatctcttgatatatctcttattcagtgaaatggaaacatatcgtatatcacattgtgtcaagcataaatatcttggtgtgatggacgtggtattcagggttttctcagcagacaaatcgagtcggcaatgtcttcagctagatagaacaaacgatactccgatagtaacttttttttccatattccgtttattactagctagtaaactcacattttgactttgg

SEQ ID NO: 90768 - DNA, 843 bp, Eucalyptus grandis
  Intron number 3 from transcript Egrandis_v1_0.023002m (loc us Egrandis_v1_0.020128m.g) derived from phytozome v7.0 (c hr-ID scaffold_11; pos 2131596 to 2132438 reverse strand)
acgaggatcccgacaacctgatcgagacggatcctgttggttatttttgcttttgttgatttcttaaactcttttcatgttaaatgcatgaagaattggttgcgggagtcttaagataaatatatttcggtttttcgatgcttctcagacttcagtactgttccttgtctcatgaaaaagctcaagcttttccatttctttatctagatgataatttaggagaatgtgaagtgataggttaaaattgctggacaagaaggatcaccggtatttaaattattctaattttaccttaaatgatgtatcgaattctgatttggttttttctcttagttttggtcaaggatgggtcttttatgttttagcagtggacaggcatcccccttctcttccttgaatctggctgaagaagaaaaggacagtcccggtttcccatttgttgtcttgatgaagagaaataggaagtggggcatctagagcacatgagcagtaatgaacaagttagttgtttttagatgtttgagaagggactgcaacagggaagactcgctcttattgaacaaagtcgattagcaattaataatcttaaagtccggtctggtatgttaaagatgcataaatgagataaaagtttatctctgttttgtggtctctaggatcagtagatgattgtgggaattacatttagcttcaaaattatagaactcagtcaaaatcttatctttaattaacatgcatgagttgaacaataattcatcaattgattttgtggtggttcattatgtgagttttttgtttttgtttttttgcaggcaacacttcagactacttatctggtggctc

SEQ ID NO: 90769 - DNA, 435 bp, Eucalyptus grandis
  Intron number 3 from transcript Egrandis_v1_0.019476m (loc us Egrandis_v1_0.019476m.g) derived from phytozome v7.0 (c hr-ID scaffold_11; pos 38860757 to 38861191 reverse strand )
tttattacatccaagttgtggtacgccttcattcagcctatgtcttgacattgtttttcatgtctatggtttggagttggtttcaatggactacggccattgcgagttttaagttccaaaatttgtctttatcatttgttttaaaggagagccatcattctttctagtgggttctgattgattaagctttagatcgattttaaaaaaaaatgaaggaaagcctcttctgatgcagaactgcctatatttttcatgtctatattttcaaatttggtttttcaaaccacggcaatcgtgggttttgaatccaagttttttctaaaaatgaatcgttttttgggtcttatgaatttggtttggactgctattttgtttattcatgtatcgctactacatttaagttccactttgattacaaatgcaggtgcagtgacc

SEQ ID NO: 90770 - DNA, 912 bp, Eucalyptus grandis
  Intron number 1 from transcript Egrandis_v1_0.025164m (loc us Egrandis_v1_0.025164m.g) derived from phytozome v7.0 (c hr-ID scaffold_6; pos 8571823 to 8572734 reverse strand)
tagtgtgaatcttggggcgatacttcggaaatcatgtatgtcgtgtgggattttccagggtatgttagccttgttgaagattggaggccgtttgaatgtggctgcattgtgatggatcagcggatgatccaagacctcgtgatggttctcgttgatgcgtgtgacgtctcgctgtgttcattctataagatttgagattgttcttgagattgctggtggattcttttgcttgaatacaagaatatataataagttcgatgtgatttggggatacgttaccttatgctctgttgcttgcccacttgatcattttcctcttgtctgattcaaggtagccaatcaccgtttgttggttctactttttaatggcacaggagtttgtcttttagatgttctatattgcattttcactcttgtgcccattgaaaagtagggattaacaaacgccaagctttgtgagctatgctgcatagcgctctcatttgttggcttttgagtgaagtggtgtgtgtttttgggtctggctgaaagattatctgggtcttccccagtattcagcctttagcttgaaagagcatctaagtaggttctctggggatatgttttgctgatgccctatactcttttttctagttttagtgacaactgatggtttgaaaactggatttttaaaaaaaagccgcagattgaaaatctttaccagtaactttccttaagcactgctattgatttgcctacagtctttactttactgtcatgtccgcatctttcatgtgcgttctttcattttcattattcatttatactggtgggcacttcacagaagtcgtactcctttgtatggtgtcatagaagttattatttatcgctatactcaactgcaacttatcattccttttttcctttaggagg

SEQ ID NO: 90771 - DNA, 242 bp, Eucalyptus grandis
  Intron number 2 from transcript Egrandis_v1_0.022901m (loc us Egrandis_v1_0.022901m.g) derived from phytozome v7.0 (c hr-ID scaffold_4; pos 18250607 to 18250848 reverse strand)
attgaagctaacactgataggattgtcgggacatagtaagggacttccatttgcattttaaatgagtttattattatggaaaaacctgaatcatatgattttcctacatgattcgatcagaagaacaggatgagccaacctgattaaatctcctaatatatatccttcaattttgctttcttttccttggttcaaatgttcttctttcttttttattaatcttgataattgacagtggatac

SEQ ID NO: 90772 - DNA, 852 bp, Eucalyptus grandis
  Intron number 1 from transcript Egrandis_v1_0.011690m (loc us Egrandis_v1_0.011690m.g) derived from phytozome v7.0 (c hr-ID scaffold_6; pos 26903093 to 26903944 reverse strand)
cagtgcatcagaagaagcgcctctcaaaaggactggtgagttcccccattggctccttggttttcacgttgttcttgtgaaagctgaacctgtcaactagagaagatgtctgtaggattcttgggaggattccatgtcatgtcctgttctaatgctgtctgtttccatgttttttggtgatcgtattaatcagagcacttaatgaagcaaatgctcgtgcaagttgctttttttgtaatctggcaaaagggaactagttgcacttgaaatctggaatcctgtgaagttgcaattttgccaacatttgagtttgcaagatttgggcctcaatgtttattgctccaacgccccaaaccccacttagcgtaggacattactgttctcgagaatgctgacttttccaatatttacggtggctaaatgatctgagaacagaatgaagcaaatgcttgtacaagttgcattttctaatcttgttctgtggttgagcattgtcaactgttgagaaattgaagttgtactctaatttcctttgaagttgcaagtgccatcttagagtttgaaatatatgagcttcaatggttatagctctaatgccccgatttagtctaggatttgcagagcctcactacgtcctcctatcttcttagtcagtggttatcaaagatttcctgacgagatacgtcgcaaaggaggacatcaagctaaccaaaaatccgattcaaatataaataacgaggccgtctgctgattcaattttgtataattgagggatccattatggatagtttacgccccaacactgttaacaagcctgcacaattctttgttattgttctttgaagggacaca

SEQ ID NO: 90773 - DNA, 832 bp, Eucalyptus grandis
  Intron number 2 from transcript Egrandis_v1_0.004733m (loc us Egrandis_v1_0.004733m.g) derived from phytozome v7.0 (c hr-ID scaffold_9; pos 33700141 to 33700972 reverse strand)
aggaggtttacgacgaagaaggcgctgaaattcaggtaacgttgtgttcttccttgctagcttaattttgaatagcttcgttcttggacccgtgttctggtattctcccgctacgtgaaaaagaagcactttgatgtcattgggataacgatgttgatggtttggggaggttgcagtgacaagggaatgcagctcaagatgaaatttgcaattccaagattgcgacttccggaaatccagtttcttgaataaacagttaactgatgcggctagtttgtctagtgaatgaatgagaaaagttaggacgcagtgctatcttcccaagaagagcagactatatgctgatggtgctggtcgtccggattaggacaactgatttattttcactttagttcgtgaaggactgtagagcctattgcatgcctttacgaagtttcttttcctaatgcttttcaaattgatggtttatacactatggatgagattgatatcgatggacatttttatagtaaatctactcaaacagacaatagaaggaaagggaaaacgggttttgcaacatctgacactatttataagcacaaaagaaatgctttttgtggtcacttaaatgggaaatagtcgctttactgccaaaggagagaggaatgaagaattagtttatttggcactcccagttgtatgacagataatagtgtgcaaaacttaatcctttttctgcactatgttttcaattgttttatggtttatttgtggattaccttttcacatcaaagtgtgatccttttgtggaacaggaggaaaacataccaactattgacaaggaaactcg

SEQ ID NO: 90774 - DNA, 169 bp, Eucalyptus grandis
  Intron number 3 from transcript Egrandis_v1_0.002086m (loc us Egrandis_v1_0.002086m.g) derived from phytozome v7.0 (c hr-ID scaffold_6; pos 16523128 to 16523296 reverse strand)
cccacaactcttactaagataccacttaccattctgtaagttgatcttataattcatcggatatcattatctcattttaattataagttcttagagaaaagaagcataattttgtttttactttggtactttaggtcagcactcggaaatcgcataagtggtattccca

SEQ ID NO: 90775 - DNA, 666 bp, Eucalyptus grandis
  Intron number 1 from transcript Egrandis_v1_0.046486m (loc us Egrandis_v1_0.046486m.g) derived from phytozome v7.0 (c hr-ID scaffold_4; pos 7928571 to 7929236)
aacgagggcggccacgtaagaagaagatgagcagtgttatctcttggcaatgaagtggaaggagatgagacatatggaagaagatgaatagtggcgtggaaaggataagaaaatgagaaataaaagaaaaacagaaaaacaaaattgccaaaccaggtcaattcagttcatttctcctacgtcagctgtcggcggcgccgcatcgaaggaccatcattttaatcgtgttcctttttcttttattatttattatttatttatgttttttcaaatcaagagattagtcatattttcaaatcaagcgactagtcgttggggaagcacgtgtggacactgtcaatttcgttcgcattgaaccgttccacggttgatagccatttcttccacaaagaaaagtcttcggagcacgccacggaccacctatatacgcaggtaacagcgtcaaggcaccaaaaagctgtgccaactctcagtctttcctagcaaaaagaaatctcccagtgtttcctcaacgagaatggaacttcgcagctcagcagatatcaaaagtttcaagaccagagagcttcaatcactcttagtcttgtttctctctctaggctttgccttcaatgctttggcatcgtcacagggcatcagcttccagactttcaacaatagtatcat

SEQ ID NO: 90776 - DNA, 585 bp, Eucalyptus grandis
  Intron number 2 from transcript Egrandis_v1_0.020137m (loc us Egrandis_v1_0.020137m.g) derived from phytozome v7.0 (c hr-ID scaffold_6; pos 50102109 to 50102693)
tgaccggcctttggatttttggcgaatagtgtgtggtatgtacttttgctggatctcgagctccggtttttcggttctcaaagccgggtattgatatcgaagctgctggtgaatatgtaatttgtcgatatatatatatttttttggttgcatcttgaattcttcgctgaataatgagtgaaaatgtttctgttgaattgggtaggcgaaagttttattgacaaaatgtttttgattcattttctcttgctacttccttcaactgtagcatcataaatgataaaggaggactctttttcagtgattttgatcaagtttctcccttcttatatgcacttcctcttctttttgtattgcccatttggtaaaagacatcacactctctgtgtgtttttcttgaccttaggaagacattcctcttgtattaatttgccaggaaaactttggcactatttcttttaaaagaacagcgaactaattgctagtaaatctcgcagaaggcaagcagagttttctttgattgtctaattgtgtttcattgactctacagagggcattgttgctggaggtactgctggtgtcgtt

SEQ ID NO: 90777 - DNA, 889 bp, Eucalyptus grandis
  Intron number 3 from transcript Egrandis_v1_0.020137m (loc us Egrandis_v1_0.020137m.g) derived from phytozome v7.0 (c hr-ID scaffold_6; pos 50102707 to 50103595)
tttacccaattgacaccatcaaaactagacttcaggcaagattaaatccttaagtgctcaaccgatccttttgtttgcctgttccccaattggcacactgcacaaacttcttgagtgtgaattggtagttgggaggttgttgcaacagatagtgttgtttagctcttactgctgcaactctagtgactggaagttaattttcttttgatgaatattgggctgtttgccaccaccgaccaagcagcatatttttatctggaatactgcctttttattgccattgttctccttatctaattgttgtatgaccagacattaaagcaatgttaacttcagacatatgcaatttattttgtttgaatactgctggtcacttcaagtttcttaacactcaaagcccttctatgtcaataatctcaacgaaacagctagaatttcagctgaaaccttttgaaccgacaggaagttataatttcattccctgtatttttggcaaatcgtttagatgacctctttgattgaaaaatatatacttcgccccttttaaagctatcattgcatgaagtttgtgattcatcttgttttgggccgtatatgagttgattttgtgcaccataaccccattgtctaatatatgtagagaatctggatgtgcaaaatgtaacactcaattacttaaaagttcaacatttgacaaattgtaggtgttttagccggaagagttgtttggaaaatgtattggattgcaactttttactttattttatatcattgcataacttctttcgctctccttcttgaattggtcattactttacctttgtagcttaactttggctctttgcattatgttcattggctgcaaatgactctgatgttaaggcagctc

SEQ ID NO: 90778 - DNA, 928 bp, Eucalyptus grandis
  Intron number 1 from transcript Egrandis_v1_0.019965m (loc us Egrandis_v1_0.019965m.g) derived from phytozome v7.0 (c hr-ID scaffold_11; pos 6362890 to 6363817)
ttggcggccgatttaaacaacagtggcttcatcaggtaggatgcacgattccagctccttatgttagttacaagtaattaggtgtttgagtgttgactggtttgattagtttctaaattaaactaaatgtgatagctgcattgctgcaccagatgagttggattacagaatgtcaagtcaaattagaaagaagcatttcgtattttgagatctaaaaatcagccatccaacgtatttgtttccttaatgagacgttgatgaacgtgagggctttatgtggcaagtagcttttgctttgcgagtgctttctcaagtgttgtccagtgctgagtctcccataaagttggctcgaaagtgttctgattttatgattaattactcgaggtcttgttagttgttcactttctattcatattaacataaaaatatacccattcgacttactgcaattggaaatggaattttaatagcacacttcagaattcaaaggcattgctctccatcaaaagggcataaactgggactgggatgatttgccttgttagttgtgaagaggtggatgtatgatttcaaacagtatggtgcattaccattcgaaagcttctttatgaactgttctctcattgtacatatgtgtatacagccgtttctgttcactgcacatatccttgctgaaaatcaaaatcaagagaggtaatttacctcttttgtaggtagaaggcttatctcaataagtctgtcctttcaatgtatagatttcctgattttcatagaagttattaactttacttcagaagttgctatgctgtttaatcaacatttggcttttggccaaagcagtgtaatcagatcgaacatttcttgtcctagaccggcagcagcaagtaatgttaaaaacaatctgctgtcttgtgcagtaaatcggagt

SEQ ID NO: 90779 - DNA, 732 bp, Eucalyptus grandis
  Intron number 1 from transcript Egrandis_v1_0.025887m (loc us Egrandis_v1_0.025887m.g) derived from phytozome v7.0 (c hr-ID scaffold_4; pos 31150584 to 31151315)
cgagaattcgtggacaaaatatttcagttcttcaggtaaacatttctgggtccgaaagaagacgtcaggcggaatatcttccattcctaaacaggcctcaaaatctaattttactctttcgcgaggtctgaatctcggccatgcactacgcttgtcattccccaagcatacagagtccattagagatctcgcaactttgcagtaactccgaaaaaggactcaatcgtgcgcgttctgaattctgatcatcctacaatttacacgtcgtgaatgcttcttttgtcaaaggctatgtagcattgtgttccaaaacaaactattggaaggctggacagaatccaacccgtttcagaagagctctatttactctttctcaggttaatgaaaagagttgttctgcgcacactcccgattggattcgtgatagtgactcgcacgcaatttctgatcatccaaaaacatatcatttagatggagatgggcgaactattatcatttggaaatcatattccaccaaatacattggaattttttcaatggtccgttgagaataaagcttggaatttcactttgtggagacagaatcgatgctgtcttgtcccatcctgcaaaagcgaatcaaagagtaagataacaaaagtgagaggattccactcaaccctatgcctataaattgctcttcaagactgcctggtagtgccaagcaagcacaaagaaaagcctgagagaact

SEQ ID NO: 90780 - DNA, 987 bp, Eucalyptus grandis
  Intron number 2 from transcript Egrandis_v1_0.017396m (loc us Egrandis_v1_0.017396m.g) derived from phytozome v7.0 (c hr-ID scaffold_6; pos 14979323 to 14980309 reverse strand)
agttcgcctaccccttcctctcccgctcctccaaggtattatactagttttcacttccaacgtcgtctcatcgcatcgttttgtcgggggcattttggtctctctctctccctcccctttctctgtctccgaggtgtgtcttgattatgctcttcgagtggtttttctctgcgggtttaatgcgtcagtgataatgttactcgcattcttcgctgcgcttggaagctttctcgagccctgttacctttgccttttaactgctttcatgaagacgtcgcagatgctcagtgtatggaacagccagttcgtatgcatgggagagttcagtcgagttaagtctcgggccgttaaaaagggttttaagtgactttgttgttttgttgtcgccggaagttgacctcttgacccgctcatttcatttccgttttgaagtttaacgtgtcgaagtgtcattcagattttcctgcatttatttggagttacgtatcctctcggggtttcaggattttttcctctttttctgacagtgagtttctcattcttaaaattataaacttagtgattatattcacttgtgaagacgccgagtagtcatttccacgacagtttctatcgatttggtacttctaaactgcattgataagttagtgtaagttgggggtcatgtcagggaacagctttgtaggacgacttaattgattaattttggtcaccgcaagttgttttgagttactggtttctaattgttagaggtgttaaagatgtttcatatacgggttagtgctaggactatacgccgagcacacttccgttggatttcctcgaaaccctaggttgatcagagtgttattactactagtggctagttccgaagagtgactattgcatttattgtacgtgtgccacggcacgaaatggtatccgatgcatttctgaaaagcattgtcttttttctctatgtaaacggttttggctttgctttgcagg

SEQ ID NO: 90781 - DNA, 971 bp, Eucalyptus grandis
  Intron number 1 from transcript Egrandis_v1_0.029005m (loc us Egrandis_v1_0.029005m.g) derived from phytozome v7.0 (c hr-ID scaffold_4; pos 39692351 to 39693321 reverse strand)
tcgagctcactctctagccaccgtctccgagccgggtagggattttcgtgatcgaaactcgttcccacgcacccctggtcgctctgccccgtctcgtctaaggatgggctgagctcgttttctcttggttcctacccgttttgtgtccaactgagtctttttcctttgatgtggagcatctttcgtgtccgtttgggtctagacctgagttcggattccaaagaaatggtcatgtcctgtttcataatctgctgcgcataacctgttcgatgaaatgcctcgatgaagatgtaatacatgtgttcgtgaaaaagttgcgtagatttgtatattgaagtttccactacatgttcaaatcataatatgaacattcgattcacatatatcgtttttgttttaaatgtcttgcatcggggagatataagatcatatctagtagcttgtttcctcaattttcttgttctacttaagctcgataattttctccagatactacttctttaaaattgattatttttattcttcagtttgctatttccgatatttaaagcaaaaatttgctaaagattgaagtcccagttggttcgagtatgggggtggtctgtgccaggtcaagttaggtatgggttgttaaaatcattttacggaaagtgggtctctatgggttaaatgagttaatttggtccaaccccataggcgacccacctaaactcgacccgaaccacttgcttgacacttcctcatgaaagtgacttcagaatctttgttttgttcccattaagttgttcttgagtcttgatattccgctattcttgctatattaatgtattgtttaaattttctaatatggcaataatctttctgcttctgatctgcatcttattctttttacattttttaagtttcattgagctgttcgatcggttgaactttagttatttcaggtgtatatcgctgcaaaggctagagat

SEQ ID NO: 90782 - DNA, 859 bp, Eucalyptus grandis
  Intron number 1 from transcript Egrandis_v1_0.039261m (loc us Egrandis_v1_0.039261m.g) derived from phytozome v7.0 (c hr-ID scaffold_472; pos 4150 to 5008)
cagggttgaccttggaatcggaccgaaaaaatagggtgcgtcgggtacaaggtccactacaaacggggtcgggtatagggtctagaaaaaggggaaccggttataacaaggtcgggtatagggtccaggtttagaccctacccaccctggacccaatcacccttactgtcaagtccatagaagataaatataactactagtagacatatattaagtgtgaataagggtggatttagtcatttaggggtggaaatagagctacctgaattttttcaaggggttcccttggaaaaataggaaattgaaagtctcacttggtgggattttcttaaattatttggagtgagaatcgacgatgctcaatcaattaataatgacaaatattatgatatgatccactttccttttttatcaccctattttctttccttaaataaaataggaaaatatcatcatatcaaatatatcaccatatatgtctatattgctatagctataaatatgaggacaatgtgttctaatggaatgagaaaaaagaagagccaaattcgtggaagctaacgatggctgaagtcttcccaaagtgtttttttctcattgtcctcgtatttgtgggtttctttctcaccatttactagatttcctttgtgagacaaagacattagttagccgcgaaaagaaaaatggagcaggccgggctccttatcttcctttatattctgaggttctaacactaataccattccttcattcttttaaggttggatgataaagatacggaagatggaggcgttttgctctgaaggactagggtcatgtgggaagggcgacgactgctagcaaaagtgctctacgagtc

SEQ ID NO: 90783 - DNA, 997 bp, Eucalyptus grandis
  Intron number 2 from transcript Egrandis_v1_0.026044m (loc us Egrandis_v1_0.021866m.g) derived from phytozome v7.0 (c hr-ID scaffold_9; pos 24536561 to 24537557 reverse strand)
ccggcttgaagatcgctcttgatttttgcggtgagctctccgctctttccgagctacctgtcttcggttctccgccttcgctgttttcgttccttcggcggagccgtgtcttcgcctgtccagcgtcccgtgccgaagtagttgctggagttcatctattcatgcgttgacagcagttcggagggtgtgcatgcaattgtaggttgcgattgtgcgattcccgttgcgtgcttatatgatgctaaatagatataggtgcttcgagattagaaagtccaatttccatggacgtctgtcttctaatacaagaagtctgcttcaattatagctttccttcacttgctgctgttggaggccttcgcgtttgcttatgttttgtgttatttgatgagtaatgtttgacttgatcaattatcttacgatgtttagtgctcggggtgccggttgtctgttatactgaagacagttaacgagtttgtcaacgtgatgctatgtacttacaaattcttgaaaggccaagcagtgcgtttgcatactctgatttacttttgttacttgctaggttcatttaaccaagtttagatatatttgcaatattcatcagtatagaatgaatgaagataattattactccagacattgttccttcctttaaagaaatccctacagttctcataaagttgaggtatatgtaatatcctatgttcagtttatgagagcatgcttaacatgggtggtttagtgttctgtctagtgcttccatgattgttgaccaaggaaatcctaagactgttgcatatattttacacgagtcaacttgtagatatacacgagtcaacttgtagatatgttatgtttctaatagtttcaactatacaagtgtaggaacccatcatggataaggtcatagctttgatgaatagacttttttgcaaatggagttgagatataacttcaatcagtatatttacatttgcttttatgttggatacagagg

SEQ ID NO: 90784 - DNA, 510 bp, Eucalyptus grandis
  Intron number 1 from transcript Egrandis_v1_0.024695m (loc us Egrandis_v1_0.024695m.g) derived from phytozome v7.0 (c hr-ID scaffold_9; pos 4662333 to 4662842)
catccgtcgatctcttcaacttgttctctgactagtgagtgcgtgaagaaaggggaagactccatctcgggaaaccaagaaaccctccgatgggttaggcttgatttgactttgactgactccccaaagccggaaccattttctagagagagaaagagagcaagaggaggcagcaccaagaagctgcctttgaagacagagagagagactgagactaggtaagattcttgcagtggacattattcctttgttaataattttttcttttttcactcagtatggccatttgggttggattgtagtgcagatatttttgactttatactaggggaagaaattggtaactttagtccattcgaatgatagaaagatggggtgatcgatttagcaggttcttctaggtgttaccataagagttctgtattcgtcgcgaaattttagattttgtactatatttattctgtatcattggcagaccgaaaagtttgattttggcgagccctacagctt

SEQ ID NO: 90785 - DNA, 941 bp, Eucalyptus grandis
  Intron number 2 from transcript Egrandis_v1_0.020995m (loc us Egrandis_v1_0.021026m.g) derived from phytozome v7.0 (c hr-ID scaffold_6; pos 36339537 to 36340477 reverse strand)
cgtgggtctactacaatctcgcgagtgttcgcaaggtaggcgacgacctttctcttgtgctgcattcgtgtgatgcggtgcggcgcgctgctgcatgtgcatctttgccatggcttgaattgtgtcgagtgaaatttcccatctttcgtttcgtatgagaggaagagcgcgtccttgttgctaatttgactgaactgtcaagtcatttggatcgttgcgcgatcgctgtgattatgtttctatccgtatcatgactgtgtttaattaccttgggtgaatacatatcttgcaacctaatccgggtcaacccaccgtaaacactctgtcgttattccctctccggctctgaagattgacacgctcgaaccttcattgatctctcttgaaggtttccagttccgtggattgtattagctaatccgacttgagagccatacacgctgtgccggcgattgtctagacctttctgaacccatgggttttttcttcgtcgtagaaaaagaaacagagaaggactgctggaagtggacatccacgttcgcttttcgtttgggtgattttcatttttcccaactgtttcaaagtaaaagaatttgcaaaggatatcgtgttctttaaaacagttgatatggataaatacatctccacatctgcgatatgtatggaatgacttggtctatcatgaaaagcgattctcttacattgcttcatgataagacattaatttatccgctttagatactagttgataagcaagtatgtatcaggcaatgctgtctcgaaatacctcgagcctctgagattgtaaataattatttttttcctgtcagaattgtatatcttcagctaagtcttttattcaccgaggggaagttacctccaatttaattttgacctttttcacttcaacctttcctagtggtcccggctctggaagcagg

SEQ ID NO: 90786 - DNA, 626 bp, Eucalyptus grandis
  Intron number 1 from transcript Egrandis_v1_0.033229m (loc us Egrandis_v1_0.032264m.g) derived from phytozome v7.0 (c hr-ID scaffold_4; pos 3986216 to 3986841)
aggtgggttttgaatttgttgtgagtttcagattttaatgtttgccaaccctagctaatatttaccaattttccaggcaaaaatggttttttatttattttatttttcaaaatacaaaatatccaagaggaaaggacacatttttccaatagaaggatgctaagggaaaaaaaaagaagaaagtattttgagagaaaatctgtgatttggattttaccggcctcttctatttcttcctttaaatcgaattatttcataattttagttctaaagaaaaaaaggaaaaaaaacaaaacaaaacctagtactgttgatctggcaccaaatatgttatgttgcatgcaaaagtctgtttacttatttattattgcgttagctatagtttctttgagaagatctttattgttgttggcaaagtcatgttggtttccttagcttttgatcgatcttcttttcatgacaagccatcaaatctcaaatgagaggcactctaaattatttatttagtgtcttgaggaaatgtagctccttcatagtttttttttttttaatttaatttactggaaacaattctaagagtgttagaagtttcctgtaataatgtgaattttttcagaatttgagca

SEQ ID NO: 90787 - DNA, 1002 bp, Eucalyptus grandis
  Intron number 2 from transcript Egrandis_v1_0.007119m (loc us Egrandis_v1_0.007119m.g) derived from phytozome v7.0 (c hr-ID scaffold_6; pos 35912933 to 35913934 reverse strand)
ttctttgggaggcctccgtctttcagctacagaaggtgatgcgactgtgaaatcatattattatgttatccagaacgaagctgtaaactaagcattttactaggtgaagcctccttcgtggagcagtcgctgtcgaatacatacgtcttacacttgtagtgttgcgctacgccaccaaagcaaaagcatcgatgattaaaaactagtttatttctggagtcaagtgatagaatcaaccacctctgtctgtctggtgctctagaaaatgcagcagccctggtataatgtgcttgtttactgagaacggctggtgcaaatgtatgaacttttaataacttgcctctgatttcatgggcttttacgtgccaatatttactacatttcacatgctcataattcagtataaatgtcacagagttggcttggtctttgtgaggacaaaataaagctttagataaactgtcaagaagaatgattttgcgaaagatgttcaattaggaaggagtttgttgaagtctgggaaaaaaagaacaagagcttaataatagtggcctcttgaagacactatggaggatgtattttttgatggagtgcaatggcaagaataattcttgtgactgaacttgctgagtgggagatttagtggttgttgctgataagtgacaacagtcatttcaattgttgttagttttcaataatttttttatttaagcttttactcaaactcatctaggtaagattgattagagattttgactgcaatttctataatgcttttggtttttcgttgctgattattttactcccagtcactcttttaagtaggggagctttgctgattgtttaccatgatagtatcttaaatcatatctctgctttttttctttcatagttccctttgcaattatttgataaacagaactccagtgacaagtaaactgggcaattatgtttgcgtcggtctgatttaaaaaatctacacctgcttttccttgcaggcaa

SEQ ID NO: 90788 - DNA, 704 bp, Eucalyptus grandis
  Intron number 1 from transcript Egrandis_v1_0.026706m (loc us Egrandis_v1_0.026706m.g) derived from phytozome v7.0 (c hr-ID scaffold_6; pos 33373583 to 33374286 reverse strand)
tgcctttggagtggcaacaacaccttgatattcaggtatattagcctcacgtaacatacttgttaagatcatgcggattcattagtctcggaaagcagtgcaagacgtgtttgatccgtgtaactaaatcgaatcatagaaagtgagcgtttgacaaagatttttgcttcctttctaagaaattatgctttcagaaaaaagaaagagaagtcataatcgatgtagatcctctctattctttaataatctatgcgacatgcataaaatctcgatgcttgatttggatcatctctattccatctttgatttgagtgatgatcttctacatcctgatgcaacttttaccgagacaacgagtacaacgtgatatatttggtttgttttggcaatcaagcgaacattacattgatggcaaaaagaaatttgatattacattaaactattgatggatattcatgcttcatcctcgtataaaatttagaggtcattgtttatttataaagtcctcttatcctagcctttggccggtttgcctgatgggcgatttttatgtgaaaagtacgtcttatttgcacacatgtaatcaccaagaatagggcagagcagcagacagtcgtaggaaaatacagacattaattgagcaacttacgtgcctcggttctcttacagtccggacagatacacttctacaacacaagaacgca

SEQ ID NO: 90789 - DNA, 438 bp, Eucalyptus grandis
  Intron number 1 from transcript Egrandis_v1_0.018101m (loc us Egrandis_v1_0.018101m.g) derived from phytozome v7.0 (c hr-ID scaffold_9; pos 23022162 to 23022599 reverse strand)
accaatcagtggccccaaagccccccgcaattcaggtgcgatctagaatttctcttggtcacacttgattaatttttctgtagaaaagaagtgcttgcgggtaataataccatgtaattatttctttgattactcttctctttgcagataagtggcctcttaaaaattcgatcttttatcttttagacttgatggatgaccaataccagttatttgtcagttcagtcggagcgacgtacttgtacagtcatgagtgtttagaattctaagaaacttgggctttatcaagaaatgtggaaatatttatgacaaatacataagacagattcggaggaacctagctaaaacttttgaattggagcgttctcgcatcaatcttagtttggactgatgagggttcattttaacataattggtgcagagagacgtgtgaggagt

SEQ ID NO: 90790 - DNA, 447 bp, Eucalyptus grandis
  Intron number 1 from transcript Egrandis_v1_0.054511m (loc us Egrandis_v1_0.054511m.g) derived from phytozome v7.0 (c hr-ID scaffold_11; pos 31809653 to 31810099 reverse strand )
ctcgaattgccattacctcgttgttgatcttcctggtacgaaaactatataacaatgtctttaaccattttgtgtgcagtgaaacatcatatctcgatatcatgagttttcggcaaagtgccgaccattcccgctttaattgaaaattttcttagaaccgttcccggtaacattatcttgggagtgttataattttttctctcttccttccgacattggaagtataaattaggaggaggtcaagaaattcatgttctaatctgtctcccataactgattaatgtagaagaagaatttgagaaattgcgtctaaaatgatcctcttaagctgttggaatttccctcgaagtctactctgatgctgggttttgatctaattttctcctctcttactcaaaaacaaaaaatataggtttcaagaaagaagacatcaagattcagaccgat

SEQ ID NO: 90791 - DNA, 918 bp, Eucalyptus grandis
  Intron number 1 from transcript Egrandis_v1_0.050179m (loc us Egrandis_v1_0.050179m.g) derived from phytozome v7.0 (c hr-ID scaffold_6; pos 44287790 to 44288707)
aggtcccggagaattaattgcggttgcttctggcgttgtcaccgctttccagttcatagtttcccaacgaaacctaaccataccgatgcccacttctagccttcttcgctcccgcgttctggtcttgtaagtttctgggagggagagactaggaaagttctcgcttgcaagctctctggtccggactctcttcgttttgttcccatcgcatcttgcccttctctctccatctctctcttcctctcatgagcatgatgtctccggtccctatcgatcaaagatcttttgggacaagtccgaaatgaataggttatttttacaattaatgagaaagtctctctccgagtttttcacaacgtatacatctgttgctttttgctcacccgatgaaacagattaagatgaagtgattgatattttaattaataagttagacataaaagaactataaatccgaaaaggtctttcgagtttgcaatgatgaatatcaattgtgtatcgagtgagatatggcttatttaaatggatttctattacttcaaataaaacaacggtggatcaaatccagggtcgagaaatgttcaaagcgattttttgagtggtgcaatcaacacttgaaattggtgattctagagacatactaggatggcccttggttaaagaagggtgttgaacaagtcggcacacactaaattaggtctttccctcacaaaaatatcatattagaaccaaaaaaaaaaaaaaaatcctccttctatgattataaatagcttgacgcaagatcgcaagcatttgtcaaactcaaagaggccaccccaaatctgagagaaagaagatgatgagttctagtggcagcgagcaaatgattcgatctcctgtgaagggaggagaaaataaagcatcattagaagggcttcc

SEQ ID NO: 90792 - DNA, 917 bp, Eucalyptus grandis
  Intron number 1 from transcript Egrandis_v1_0.031015m (loc us Egrandis_v1_0.031015m.g) derived from phytozome v7.0 (c hr-ID scaffold_11; pos 22666222 to 22667138 reverse strand )
gagcagctgtttcctcatcctcataaagaaaaacggtcagctctctatctcgtgcttgtacgcttcaaaaatggtatgtggaatgattactgtttggctgctgaggagaaaacatattgaatcttgaagaacgtgacttgtagatcaaatcgattttgttttttgttatgcttctacctcgagagctttggctcaaacttctactcgggtgtttctatcagttacacacttaagacaccagagaggagggttctttcatctgggtttttgccttctcttgtttcgaatagttagcccctggttttgacaatatttagtggagaaatgacttgtggttcaagttctgctatgagtactcggctctgcaaatctcagtttcggattggtatatgataagaacgagcatgagggtgggatgcttttacgatttttccgcgttgtggctgttgagaagataattttatttcctaaagttccgttcttgatttgtctgatacgaagctcattttgtgagctgcagacaatactttgtgatttgtgtcaggactctgattaagtcgtttatattgtttaattgactttaaaatctggtgctctttcagtggctggcagtttatggcgcagggtttcaaccctattttttaccttttgttgggattatttcaagctgagctaaatttttacatgctcatacataaaatcttgtacgagatttgcgagaatgctaatgttctcctttttgtacctagtatgcctatttggtgcacatcattgcatttattgagttcaagtatgtccccttgtccctgaaagagaagagattgtatctttacatttgtagtagtcgtgagtgtggccttttccttgctctgcagaaatatttcaaaactgggcatcaggttctgctatattgactc

SEQ ID NO: 90793 - DNA, 779 bp, Eucalyptus grandis
  Intron number 2 from transcript Egrandis_v1_0.017895m (loc us Egrandis_v1_0.017895m.g) derived from phytozome v7.0 (c hr-ID scaffold_64; pos 32327 to 33105)
caggagtggccgaccaatccgccatcattcaggtaaaaaacaaagcttatcctcatcatgtgatttgtttattttgactcaaatgttcagcatttagtgatgtcttcttttaatatatcttctcgattcgaatggcttagtggttagagaatgagcttatgcgcctttataagatgcccaatgagtttgattattcctattatcacacgtgagcaatttctattaggatcggatcttatttgatccaaaaggttctatttcataggccgaagataattaccatatgagatggggcttccttctaaatagaaaaaagggaaatatgtagacgcacatgatctttgtaatattcaatcgttggaagattcatgttgatcatgaggatttcacaagctttctcctgtgaagtctggaaagttaaaagcttgcttgctgtagtttctaaagtctgataaaaaagagagcaacatcaagaatctctcaacagaaaaagtgtaagaccgaagaaaataaggggtagagcacaccgttcaccaacagacaatactgattcaaacgaggcgtgggccagtcagaattatgaaaagagagtggtactttcgactgattttttatgactaccatgtcgtggaagtacgaaacagcccgcctaaaagttcccgatccgaacttcaagtgtcttgaccgatataatcagtgggcacgccttaactgcattgctggttcaatttttttgataagcaggaaggaggtgggtgagtattgcacaagagtgagag

SEQ ID NO: 90794 - DNA, 937 bp, Eucalyptus grandis
  Intron number 1 from transcript Egrandis_v1_0.032102m (loc us Egrandis_v1_0.032102m.g) derived from phytozome v7.0 (c hr-ID scaffold_39; pos 331224 to 332160)
ggaagtttagttggaattgctgcgaacttacccttgtatgtccaccatctactttaatgctggtgctggtgtggttttcagcttcatgctgtgtttccaccagagattgctgtcagaatagatgttttcttggcttgctattgttgttttttatttgcttatgaaattaatcagtcctatgactaggagctttattaaactaccgccttttagtccactaaggagtatctcttcccttgaaattcttgcctacaccttgttgacaaagtgagcctgctatttctaatggttctaatgcaccaacttcgtgtactcattttcaaaagaagagatgtgaactaatgtaggtcaggaccaccgcctgcggtggtccagttggataaggttcctatgatcttttgcgagaaggagaggagttcgaatcttgctgaccgcacgggatcttaagcgcgacgtcggggtggtgggtcttctgctagcattgccccggggtttgcccgccggctatcggcttacggggttacctgggtcatcaaaaaaaaaaaaaaaaaactaatgtaggtcaagtagtagagctaaaataagaattacgtttcttacatttgtccagttctggaaaatatttcctattttggaaagatgctggctcaatctcatctatgttgtctagctgatgcaacttgtgcaatgcaatttggaatttcctctgcataattgactaaaattggcattttactatttgatcttaaaaattcactttgtagagacccttcactggttgtagttcaattttgacttgtttccccttaaattgccacgtaatattagttctttcttggatttcgggcatatggcattaatatcacttttttttctacatatttcgcaattcatcatcatcattgcactgttctctgcagcaatttggcattgaagg

SEQ ID NO: 90795 - DNA, 795 bp, Eucalyptus grandis
  Intron number 1 from transcript Egrandis_v1_0.023924m (loc us Egrandis_v1_0.023924m.g) derived from phytozome v7.0 (c hr-ID scaffold_11; pos 22846324 to 22847118)
tcctcgaacgcaaaagacgcacccactgggaacccgtgagttgtcttcatcccttaaagaaaacaattcttcatgcgggttctgctcatgttctttcgtattgctctgttgggtcttcttgattggcagtgaaagagggagagcagagattcgatgaagttgcgggttcctgtttagtgtggtcttcgggtgggtattgggttatttggggaaatgtggttaaagggttcatctttaagttggatgcgatttgggaaatttcagctggaattgggtttatgggatttcgtttggtttttctgattgtttaggattcggtccgcagcagttcctgaggttctaatacttctatttgccattgtcggatgaaagaaccattttttccccctcttggaaaatttgggtgtccaatgggtgagggtagaagttggaaatcgatagaatttgagacagtttggctgaataatgtttaccgtgaggttttttagtaggataagggaataccagaggattctgctagttcatttgtgtgattctgtatgacattagtttgagaagattttcggtcattctgttccatagtttttttggctaacaggttattttgtcattctgttccttgctggattttaatagctaactttttcagtttgcttcttgccaatttagatgaccctttagtgatgatgagatcttcttccttgtgacactgtgggtggtcgaacttaaactgaatgattgacttcaattatatgtgcagagatctaaccaatattcaagaaggttcagaagatt

SEQ ID NO: 90796 - DNA, 950 bp, Eucalyptus grandis
  Intron number 2 from transcript Egrandis_v1_0.023924m (loc us Egrandis_v1_0.023924m.g) derived from phytozome v7.0 (c hr-ID scaffold_11; pos 22847171 to 22848120)
ttccaggtttgtttcaattgtactttatgactatctagcaatttgtgaagtcattctgcgtggtgtgaatttgtttccactttcttttattgaacttcttgatcaatctaacgagttacaaccactcgcccaagttgaataaaggcattgctctttcacctgattcattgggtctctggcctttgaaagcagaacattatgctaggtcttgatagaaattatgtacttggcttttccccctttcttgcacctctctgttgttatgtttgtcccttttatttgggatgaaattcttgtgagtagtggagtgaaaatccttgcgatgtgaagtttgactttgttaatgagtagctttagactttgcttgccatcttttagatgttatcagttcagatgagtttttcttttttgtacatctatatttggataataggccttagatgttcctttgcctcgggtaatttatgttttaacactgtcaacttcagtcagagctatgtagctgagctctttcatattaagtagattgtgaaattttgcatttcggaaacctataaaaaaaaagtcaacactttgcgtgtggtggaaaggactgaaaaggattttttcttattcctttctaaccttaattagctggctaagtcagaagtatgttttaaaaaaattcctccttatacttgtgtcagcatatggaactggttggaacaaaacttgcctaaggaatattcagtctattttaactttagctagctgtatacattagaagtatgtttctgaaagttatcctaatgcatgattaaacagatgggaacttgttggagcaatatttaccatttttattttctaaacaggcatatgagtttcagctgaatctcctcaatcattcacaatgtggtagtttctaacattaagtgattttacacggtgtcttcatttggttgtcttcagag

SEQ ID NO: 90797 - DNA, 524 bp, Eucalyptus grandis
  Intron number 1 from transcript Egrandis_v1_0.018700m (loc us Egrandis_v1_0.018700m.g) derived from phytozome v7.0 (c hr-ID scaffold_6; pos 5777972 to 5778495 reverse strand)
cgccatccgctcttctctcccgcctcgttcttccggtaatccgtttcggctgcgaatcttgtcgtttcgactccttcttgtgtttcgcgtttccgcggttgctgtttgattggttggtgacggattgcgcgtgtgattcgatccgtttcgcactgagagatctttgatcttccgacgatttttcgtcgctcggattttgcggttcggttgcgggtcggtgtgtttgagtttggatttaggtagcgaatgtgcttgcgcgagacggatcacgtttcggctttcttgagatgctgcggcgcattgtgactattatcgaaatggattcggcgttcttcagatttcggaatatttgtcttcttttttgcgtgacgatgatggtgtgatctgggatgcgattgcgaaggactcgtcggttaatcgatgatgctgcttatttgatacctacagctgaaatttggatgatcgtcattttcgcccgatggaactgactctgtgggtgctccgttttttctttggttacagac

SEQ ID NO: 90798 - DNA, 396 bp, Eucalyptus grandis
  Intron number 1 from transcript Egrandis_v1_0.029125m (loc us Egrandis_v1_0.024757m.g) derived from phytozome v7.0 (c hr-ID scaffold_9; pos 22183868 to 22184263 reverse strand)
cagctgcgggagcaagtgtgacaaactctgtacctgtaagtttggttggattcttccctttttcatttttgtttttgtgctttaacttttggagatttttattattattattatttttttggggggggcagatgagatttattgagatttattgttgacctgctttgtgttatcactgagggagatgtcgcatgaactgatgaaattcattcgtttggtttcttaattctttaataaatccttcagagaaactgtcgtaggatgtgtcttcttatatggtggagaaaagggtgatttgtcactattaagttttgactctttctagttttagattatctttgcacaaacggaaatatgttctcaacagttgttcggttttgtggttacagccgagaa

SEQ ID NO: 90799 - DNA, 354 bp, Eucalyptus grandis
  Intron number 1 from transcript Egrandis_v1_0.046879m (loc us Egrandis_v1_0.046879m.g) derived from phytozome v7.0 (c hr-ID scaffold_9; pos 23576992 to 23577345)
caactgaggaacaaggtaaacaaactgaaaaaacagtatggcagtttttacaaactcattttctcagtccggatttggttgggataatatgaacaaaagagttgttgtcgacgatccaaatatataggaatctcatatcaaggtatttcttaactttgtggtcattttgatatcattacagatgttaattttaaaatgtatgattatattgctgaaatatcattattgtgaaaattgtaggataatgtcgagtgggcaagattcaggaagaatggattcctcagtatcctgagctctgtattgtttttggtggtacatatgctactggggatcacgccatatgaagtgctgaag

SEQ ID NO: 90800 - DNA, 1001 bp, Eucalyptus grandis
  Intron number 1 from transcript Egrandis_v1_0.048873m (loc us Egrandis_v1_0.048873m.g) derived from phytozome v7.0 (c hr-ID scaffold_9; pos 29864405 to 29865405 reverse strand)
ctcagaagatcgagagggtcccagtgccggtgcaggtgcctatgctgtgctttaaatctctgcatgcggtttcgttcctcgtggccgcggtgccggttctcttcttctttggtcatttcgtctcgttgcccgatatccggcttgcgccttgcctgaaaacaatgagagaggttcattccgtgcgcaatgtaacgattagtgacattgcctgtgaaggccggcatttctgctcgtgattctgttgctgttggcgtactgtgtgttctgtgcacgttttgtccgtgcattgcagtaatcacgttggcctagtgtagggacccctactacccatgtgatccccgcgagaaagttccctcttttcaacccctatttcgcggcgcctaatattttctccacgttgaaataatgtggttaaatagataatatctattataattctgtagatggggaagaaatcacggtagtagcaggggaaggaagagggggtttagattgcagtaaaagctttcttcttgtcgtgcgatattattgatcggatgagtttcagcctgtcgacactgtacgcgggcatttgaacttgggcaagttttctggcttctttctttttcactttcggaaatagataacatgtagatgaaatgtagacgaaaaattttcctactggtgagtgttgagtggcagcctgtcgacacttcttcaaaccgaaactaaaatgaacaagagatagaaaagatgatgtggtgaaattgttagcttaattgcagtgatggggccaatattagttttatttttgcagggttgcaaactgtaatttggctaaaattttgggtggtgtctgtgatttaaacaaaccaatctcagagctgccgtatgatagacttatcactcgggccctgtgcttatttgacaggacaaagtgttcaaaatgcctgacgtcaaaagctgctgtatgatagacttatcattttaatgcttgtcacacttgcagattgaatcgtctg

SEQ ID NO: 90801 - DNA, 667 bp, Eucalyptus grandis
  Intron number 2 from transcript Egrandis_v1_0.008534m (loc us Egrandis_v1_0.008534m.g) derived from phytozome v7.0 (c hr-ID scaffold_6; pos 49204861 to 49205527 reverse strand)
ctcgtcttcggcttcgttgagcttgcggtgagtcaatcctcttgcctcgaactcgattgttttccctcccaggatcttccatttttattcctgtacatttttcttctgttttcctggtgtcgtggtcctattcagaagcaaaaagcaagctcagtgcctattgcactttcatttttttgactattgcacttacatgctatattaaaatttgcttctttttccagcccacggtttagtaataggaactgaaccattatggaacagagaataattatgctttagctgctcttaatctatccacggcatgaagcacgttgaacatcaagctctttgctgaaatggagggaacgaaattgcttttaaaggaacgctcactaactgcaggaattcaataatgtggaaaatgtgcgactagcgtgggattatacatggttctctcattcaatgatgaccttacactcagaattttcacaattttttaatataccaatacaaagaccactatgttatggattagaatattctgcataagtgaaggtcaaccccctacggggctaccatactgtcatgggaggacatatagaggcacaataataatgaaatgcactatggtttctgaattggatatgcagggttttatactactgtccatccaagcacatctcca

SEQ ID NO: 90802 - DNA, 937 bp, Eucalyptus grandis
  Intron number 1 from transcript Egrandis_v1_0.038893m (loc us Egrandis_v1_0.038893m.g) derived from phytozome v7.0 (c hr-ID scaffold_4; pos 36666047 to 36666983)
gaagagaaagtatagagtggtaggttatattataatcatcttagtacactttgaagtgaaattcaaatatagaaaagcccatgaattcaatcaattggcagatgaggaagtatctgggcaacattcatcattatatttcccctccaacagtttttgttatatattcccatatacataggaaaatcctttattctcatgttgaccctacttctcttaatctataaaatttgactatctgttacttattttaaaaagaaatcaaccatctgttaataggcctactatcaatatcgttgttgccattcaaatcacaagaatttggctcacatttcagccatacaaatggaaaaaaaaaaggcaaaaaaaaaaaaaattcttagaatgccttagtataaaaggtttgagaaggcgaacttggcccagaatgggtgaaaatcttctatttcatatagtgtttctcatgatgtcttgataaatcctaatgagtctaataattcataaaactcattttcataaattaatggttgagatttgtcgagatatcaaaagaatcaccataccagaaagaaaatccatgtccagccaagactcaaaatgccatcttctcactgtatgaattggaaaagaaaactagtttttactgctcaataaatatcggatattaaattccgtttggtaaattgggtcgtactaatttagctagcagctattagctaaggcaaaaccttccaattccattaatatctatatttcaagctaagctctagttttctcctaccaagaacttgaccgatggccataaacctgtcttgccaccaagaggtatacattttattctcttattctggtaccttgttttttacattttccatgaaatacaaggttgactatattagtttagactaatccatggtttgaatggaattcctttccaggt

SEQ ID NO: 90803 - DNA, 864 bp, Eucalyptus grandis
  Intron number 1 from transcript Egrandis_v1_0.049542m (loc us Egrandis_v1_0.049542m.g) derived from phytozome v7.0 (c hr-ID scaffold_6; pos 9024917 to 9025780 reverse strand)
cgtttggggacaagcggtgcacccttgctgcgagggtgcccagatctgggcccgctggccctcgcggggggccggcggccatcgcttgccctgggcgagttgtcgccggctctcacggggggccgatgaggcctcgcccagggcgagcgacggtcgccggccctcgcctggggccgacgaggcccgcccaaggccggcgaccgtcgccagcccctccggcgatgggtggtggcaacggcggcgggggagaggaaacactgatttttttttaaataaattttttaacttttctttttagtttttggtgaaaataaaataaaatgaataaatctaattgtttagtttttaaatctatttttttaaatgaatcaaaaataattaaaaaatctacgtggaaaataaaaaattatttaaaatgccacgtcagcattttttacggaaaatgctaactgtgttaactttaggactcaaatgaaatattttgacaagttttaggacttatttgctctttttgcaatttttagaactcaaatgcattttcgtgacaagttttaggacttctgcagcacttatccttttttttttcatgcccaactaaccccgccaagacaataaaaaagaaaaagaaaaaagaataccatatatgtaaccccagtaatgtcatttcttaaagactttaatttctaccaaaccacatcttttctttcccttctcaattgttgcagtaaaaaccttgacaagcatttctttgaaattaatcgtcaccaagtaaccgagagattaatttccaagaagagtttaacattaaaattctaaggcactaataattttccacacccaactaaccttaccagggctcttccc

SEQ ID NO: 90804 - DNA, 886 bp, Eucalyptus grandis
  Intron number 2 from transcript Egrandis_v1_0.007187m (loc us Egrandis_v1_0.007187m.g) derived from phytozome v7.0 (c hr-ID scaffold_4; pos 9708509 to 9709394 reverse strand)
tgcagagatccagttccgttctctcttgcaccgaagtaagtgtcttctgtctttatgagtaatcggttttccaaagtttagatgatggagctcatatgtcattggatgctgattgggttgccaagcactgtggaatgtctctctgttttgtgtttttctttgaatatagtaacaatatatctagcttttataagttacagacgatgtcccgtggattggacacgacatgtaacgtcataagaagtaatataatcatttggatgttcatttaaggactgactctttagtgctcaaaaggagggacagagaagagcaggaatgataagaactgagaacatcacttattccttgattgtcttaaagaaccaagtttctctcaaatataaagttgaattctggtcatatttggtattcgctggtatttttgttcgtccaacctggaaagattgtcttcaggaagcactggagcttgttttcatttgtaatttttgaagtcagaagcgaatgctgccttttttcaaacgtaactgttttcactcgttccatcaccaaatgaagaatatgcttgaatatgccagaaatcgaccttcgagtcgataactctgcattggatgaacttgtcaggccatgtaaatttcaaatatccaaattcatgtgatagttgactgtctttggctgtaggctgttgtgaaccttgtgtgtctcggagcaatttttacttgagctgttgatgctggctttctgttcaatgactcgagttggtttaaacttacttttccagatatcattctccttacacaactactagaaactagatttcatgccaagaataatttttccgtctcttatgttcttgtttcatatagtatccacttgttgatgcagg

SEQ ID NO: 90805 - DNA, 937 bp, Eucalyptus grandis
  Intron number 1 from transcript Egrandis_v1_0.016783m (loc us Egrandis_v1_0.016491m.g) derived from phytozome v7.0 (c hr-ID scaffold_9; pos 25242706 to 25243642 reverse strand)
acgaggtggttcccggagtcgtggagagccttaaggtacgggcaaagtctgttctttgttttcggcttgtgtgaacggctggtgttcttgttgggtttagttgtgtaaagtcattttgatatgctttagtgagtaacgacgactgagtgacgatttttctgtggctagtttagtctcttagaacggagacatgtttatatgttgatggattcacatgtgaaacatggcggaaaattttgccaaattctcgggtgctcgtgaaaataatgctggctgagaattgagaagcatactgctcctgagaaatcaagtaggttgctgctgcaaaattgtgggttcgtaagttgacatttccgaattgtgtactccctgcgtgttatgaatgggtactgttagaggtgccgcctagcaggctaagctggttgactgatggcatggagtgttagctgtcaggtctggccggctggaatgcggggattatttttaaagggatgagacttgcatcattttactaggataaggcctttgctgaaccgatgattgctcgtgacttgcctcaatgatgttctttaatgatgagaaggatgaagaccaccgacagttaaagcgttgatgatgggatttttcctagacagatagaacttcaaagctttattgattggtctgcttctacatatgttgccgttgtgttttgtgtcactaagcacagctctctcgattgtaagtgtcgattacttgatatgcaatctgttatcagagctcccatcaaatactatatgtttctgagtcagattgttcctctgccgtcggggtgtgtgtgtgcgtgtgcatgtgtgtctgtgtgtgtttgttgagttaaggaattttgtagcctctgttgctcattgaatgatttgctaggtgattacaaagttctgctcagaacgcattgcaaaat

SEQ ID NO: 90806 - DNA, 558 bp, Eucalyptus grandis
  Intron number 2 from transcript Egrandis_v1_0.011363m (loc us Egrandis_v1_0.011363m.g) derived from phytozome v7.0 (c hr-ID scaffold_11; pos 22606427 to 22606984 reverse strand )
gccaaacgttcttcatcatcatcaagatcaaaggcgtgagtctcttcctcttcatcttgttctttttttattcatattttctaggcatctatgaagattttgtgtctgatcttgtctatatttattttttttcctcctctcccttgctgcatattttatccttccgttcgaaaaatttcctgctcaaagtttgctcaattctgatctacatggaaagcatacggagattttgaaatcagaactgtctttactttatttttttgctctttgactttggagacatgaacgaagaacttcagtgctttcaagatgaattatctttcatatttaatttcattcttcagtttgtttcatatttttttttttctctaaagctcagaccgtgacatataacaaactcaagatcatgaaattttttctcccttttctctttcaataaaaccgaaacttctttgggtcttgatcaagcatgggcaatcatgttcataatatttctctttttaatagaactaatgactattgcgaataattacgttcatggaagcagaaaacaccggg

SEQ ID NO: 90807 - DNA, 547 bp, Eucalyptus grandis
  Intron number 4 from transcript Egrandis_v1_0.024542m (loc us Egrandis_v1_0.024542m.g) derived from phytozome v7.0 (c hr-ID scaffold_6; pos 41429110 to 41429656 reverse strand)
cttggttcttggagaagtacaaaccgtggactgctgtatgaaccatctcatacttcatattttttccttgtcaaagtgatgccgctgttgcttttgttcgtatatttgacatcgtgatgattgtgagtatgccttacagaaatttgtaggctagagggttgttcactattctttgggctatttgacaatgtttgattaaccacagcattggatatgaaatgctgcatgtactatatactgtcttgtcttacgtacttttttactctgcatctattattttttgaagttttgaagagagacccatatccaggatagatttgcgttgcatcaggtaggtcgagtatgtcgctatgatagtattggaagtagagagtggtgagaaataatttaagctgttggtgatggattatttttgttggttgctctatgtgctggagtttgctattccaaaattatctattccctctgtctccgtgtgtatgttcttctttgtcatggcgaatgctggttgtttctgcagaagaaagcctcagtccagcatttgtac

SEQ ID NO: 90808 - DNA, 942 bp, Eucalyptus grandis
  Intron number 1 from transcript Egrandis_v1_0.024542m (loc us Egrandis_v1_0.024542m.g) derived from phytozome v7.0 (c hr-ID scaffold_6; pos 41430362 to 41431303 reverse strand)
cggcggccagtcaaactcgccgagtcccagaacgtagactctctctctctctccccgctttgctctgtttcgtttcgtcctcgaggtgcttcgttggctgtcgccttcctcttgacattttcgcttcgcgatccccattcgtctcgtcgccctggcccgcttacttcgtctgtaagttgacaagatgatattttcttttccccattagttatctgggtaatatatttgtaataggtatttatggttgtgcggagtttatttcggtaactccagttgatatttccacaaatgcccactgcccatgtctgcaattcgctctccggttcgatgggcagaataaaggcgagtccttgatttcgtttcgcacccgctgtttgactcgatgatgatggtatgcatgtggttttgttgcttgattcgtggatcctctgtttttgttctgctttacggatcgttaatctcgaattgtgtggctttatctcgatcccgtggtgtttaattatgaaaaatagagagagtgcgtgcggagttgttgtgtgaggataagtgcccaaaagagtggaaagttcttccaggaaagtggtttcgatctgctggaaataaataaataaataaatagtggaaaatgtcaatataaaagcatcgacccttttcgtcttctgtgataataagactcgcagttgcagaatccatttggcagcgaggaagtcagttttgagttctttatacaggaaatctgcctgtccacccccaagctttctcgacgaacgattcttctgtatatatttggttttatcgcttattcgttgaccctttgttgttgttgttgttctgttttgccggtcgtaaatctcaaattatgtggctttagtttcgatccctgatcttgtcttttaaatgcagatagagagagcccgtgcatagttgttgtccgagggtgta

SEQ ID NO: 90809 - DNA, 1022 bp, Eucalyptus grandis
  Intron number 1 from transcript Egrandis_v1_0.003456m (loc us Egrandis_v1_0.003456m.g) derived from phytozome v7.0 (c hr-ID scaffold_11; pos 44937772 to 44938793)
tctctctcttctcaacttgctttctctctgctcaggtccgatttcggtctgtttttaccgcttcgattgtggcgattctacttgattttagcactttggtgtgtctcagtcgctggaatctactagttcgagtgtttccgacaacagcgcttgaagaattgggaaatgtagcttcagttatatttgtcggtctctgttgatagcaataagaagatagaagattagttttttcgcgatactttgaataatgctttatggtttattaaaaaaaggaaaaaaagaagaaaaacttgttaatactagccggccaaatattctaccatgcgatattctgcgataatgtatggaatagactatctggatagatgcctcggtcgttgttggtgaccattacagtgggttttagaagcgaagctactaagcatgcgttttgactgacacggaatgagttggaatgctgtatttgcctttacgtgaagtatgttgccaacaagagaatacctaaaggaatccattgcttgttcctttgcttcaacagaatttatctgagtaaaggaacatactttgctcatatgtcagcccatgaaaaaaaagggcattttaaataattctatttaacttaggtaacgtgttccttttactgtgatttctgaagcaccaacttttccttgttcaagctagaatgaccccatagaagtaattcaaataaaaaatgccgttgcattctcttttgaagaactcttgatatgcataaatatgaagatgcctcattacctgagctaagccacgtatttaactaaatggttctgcatattaaaaaggggtgacatgcatagccctccactgttttcattcacatgaagatgaaggagttaattcataggggcttttatattatttctatttatgaactagtctgtaactttgaaaaagctgggaaaacaaatgacccacgtattttaacaggttgttttctttttatgccagggctcccttcatcacatatatacttgtttccctcc

SEQ ID NO: 90810 - DNA, 613 bp, Eucalyptus grandis
  Intron number 1 from transcript Egrandis_v1_0.027619m (loc us Egrandis_v1_0.027652m.g) derived from phytozome v7.0 (c hr-ID scaffold_4; pos 39901581 to 39902193 reverse strand)
aatttcccttgatcgttcgactgcattatttttcggtgagcgtgtccgagtctataatggttccttctgatctgtttttttttttttttttttttttttttgggggggggggggggtgtggggtgatggatttgctttatgatgttggttctgagaagatggctggtgcaggaacataaaattgcttcggctttgtgttgggttcaatttgattttaactgcagttcagagaagatggctggacctggaaaatgaaattggttacgactctgtcgtgattgcctgctagatgttcgtgaaaatttctgtgagaaatttgacttaaaaggtttgaaacttttggcgtgtgtagttcgagttagttgcgtaaatcagaatgttcataaagcctccctgtttcagtatctataatatgtttgatacttcgcgttgtccaggaggccggttagttcgggtccaaatacttgctcctcttatgcatgcaattatattcacatatggagcaatctatggtgcggttttgtttatcagtaagtttgctgcttggtgatcattctagatgtttgtaacaactgcagaaactgctctatttcagtattggatagcccatctg

SEQ ID NO: 90811 - DNA, 967 bp, Eucalyptus grandis
  Intron number 1 from transcript Egrandis_v1_0.042113m (loc us Egrandis_v1_0.042113m.g) derived from phytozome v7.0 (c hr-ID scaffold_4; pos 5524936 to 5525902 reverse strand)
tcatcatcctcaggaactgcaactccacatcctgggtaagtccaattctcgaagagtttaccaacatccgaattgagtgagttttgcagtggaatctatgcatcgatcatgagaagaaaaatgatgtatcgaattgagatgggcacaatggaagggggagaatataaccaccatgcatgcatatattcacttctctcctgcaactctgtgttttgttttgtattgtgttttgaagatccagatgtttaaatgtttcatttgaacaagctgaaactttcaacgccagaagctcctaccccaggacttttgatgaatcctaggacgtttaattctgcttcttcgcctggacaagcaaaattacaaaagtgccttttttgacctgaaatatttgatcatccttcatgtttatttttgggccaaatttgaaacgtttgtagtctttttaatcgaccatgtgagtctactgtattgacagtgaatcacgccattaatgccaaccaaaaatcaatatatatatatcaatttgaaattttacggtcccacgtgtgattctatgtacatgttatggtgaatctagtgaatatggtattacattcatcaatcccagctgttctccaaaaaaatgaaaggtctagatcccggctatttccccaaaaatggaagctctagttcttcactcgaagaaagatgaatagaaagtaaatgtttaacttaaacaccttatcttaacacatgttactttgtttgctcaaatattattaacatataattaggtagttcctatgtttgatatagacataacatattcgaaattatgaatctggtaatagtcgaaatagtcgcctattctgattcattgtaactagtcgtcaagtttatttggattctactatattttgtatcatttatgttctttctctcttaccaattgaaacccttaattaaattgctgtcgaatatatgacag

SEQ ID NO: 90812 - DNA, 577 bp, Eucalyptus grandis
  Intron number 1 from transcript Egrandis_v1_0.040546m (loc us Egrandis_v1_0.040546m.g) derived from phytozome v7.0 (c hr-ID scaffold_9; pos 23769069 to 23769645)
acttccaagaatttcctctgtgcgatatttgccaggtgctcactgcaatccctttattcctcgcagaaacctccttgaccaataattggttaaaatgataatggaatatggtggctctcttgtttgtctgaggtagcagttgagtacatttgtaacttaacgataccgatgatttccacaatccggagctaatatctgaacacttcgtgcctaagaagaagataatacctgaaagtttcattacttctgcacaattttctgcaacacaggttggctcaatctttttgcttactcgtcttttgttacggaaagggtcaactgtgtattatcaccaaacagctgggagttgtctggatatgtttatcgaagttctaatgatggcaaacgtttttaacttaagttgtgtaatactttgtctgattgactttaatggcgcattatgagaaaagtcagataattggtaggaccaaaaagttcaccaaactcgtccaatgtcatcctttcgattttgttgacttttttttttggttttgaatgtgtaggagcagcgtggtttgattttctgcaaagaagatag

SEQ ID NO: 90813 - DNA, 662 bp, Eucalyptus grandis
  Intron number 2 from transcript Egrandis_v1_0.033114m (loc us Egrandis_v1_0.033114m.g) derived from phytozome v7.0 (c hr-ID scaffold_6; pos 1632956 to 1633617 reverse strand)
aagcaagattgagaaatgtaaagttccgcctcttagactattatgttttgctattattccaatagggccttaatattgaatctttgtttttttatattttgttcttgatgatttatttcaattttagatcgtgggtgtcagaatcttcgatgccatgtggaaacatacttcagagcatgtcacgtcacatgtctccgatgacaagaactatgtttactatctcgatcaaggctgaaacagtgacattcttttgaactggaattttgagcctaaggactcatccgttatggactcgtccaaaggatggaatcactttctagaggtgaaaaggttaggcttgagtattgccacaatccgccacattcatgattattgagcatacttaaacgcaaagaaacttgagctttcgaggtataatgtgacgatcagatagacgaacaaaatgcacattaatgtgaaatgacaaaattcttgatacggcagctcattccatatgtgaaccatattaggaagactaaggactcatccgttatggacttcctgggctcttcgtttctacataaatatgtcactgcaatgatagggtatgactttctgagagaatttctctttgaatccattctgcaggtctacctcaaatctcagtccaagatcgcctacga

SEQ ID NO: 90814 - DNA, 849 bp, Eucalyptus grandis
  Intron number 1 from transcript Egrandis_v1_0.007731m (loc us Egrandis_v1_0.007731m.g) derived from phytozome v7.0 (c hr-ID scaffold_4; pos 33023191 to 33024039 reverse strand)
ccgacgaaatcgcatatcgcccaccgccaccgcaggttcgttccttgttccgtcttcgttctcttgtattgctttctctctttctcatgctcatgagatggagtccttgaagttcgactgatggaactgttttcgtttggtttcgtttttcgccggcgggttagaattctggggagtcgaaacatcgtggggctagttgtttggttcgcaagtcgggtgggctaacgtcttaggttcgttaactgctgcgtaactgtcacgccctcatggtgtttgaggaaatgtctcagagacaatgaatgaaggtttgtgttctaaggcgtgagaagtgcaggtatcatgtgctttgaactggcggtgggatgtcgatctcttaaagcacgacgctaaggcgtgttcttttgtagtacacgggcatgtatcttttagaagatagagtagccaccatttgtccaatgatatgcatgttttagttctttggcccatttacatgttggtcaagatgcgaatcaggggttctatgatcagagtcgcactgttctcatattgacagtaatgctagcatcggtgtgacctcattgccagcagacattctaaactattccttttgttttattgcagttcactaaacgctcttccgaagacccaaaagttagtttgccctaaaagttcgtcaacgataactgtcctgaggtctcaaagatgtgttggttctgtatctcctttttcatctttaaagattaagtatttcccatgtcagcctctagtgcttgagggaagttaagcagggattgagttttacatgcttcttgaggttggttttccaaaattcatataattatcagaggg

SEQ ID NO: 90815 - DNA, 698 bp, Eucalyptus grandis
  Intron number 2 from transcript Egrandis_v1_0.009373m (loc us Egrandis_v1_0.009361m.g) derived from phytozome v7.0 (c hr-ID scaffold_4; pos 20405893 to 20406590)
cggtgtcatctgaggccgggacttgcgccgcgaaggtcggatttacatagttattgccatcatttttcattgattgtggtgcttttgtttgttattagctcggccatgtgctttggtctctatgcacatggggaaggactgaagtggagtcaatcaagcttctttcattgtttaattatatcgtgtgtaacgatgttggtctgagtgtctattctaatttgctggcggtgcccacgtgttttctaagatcatgttgcctttctattggtattatagaacgcgagacaattttattaaactaatggacttgatttgtgttgtgaccgaatttgttttgtctctgctctagaggaataagcatggctcttattatgaaactcctgttgccactaaataaaagtcaaccaaactattttgtgaagaactggattataaatagtgggttaatctgaagatgcagtgagacctgtctatatcattgataatgataccatgaaagatgtcaacattatgatgcttacagttacttcaaaggtcatacatgagagtgcttttattgtgctgtaacaattttaatgtcaaatttctagttcaataatatttacatagatgcacttttcacattttggatggttctaacaatatcccatttctttccttcagaataaggtgccgttgttgtcaactgaggcattgca

SEQ ID NO: 90816 - DNA, 796 bp, Eucalyptus grandis
  Intron number 1 from transcript Egrandis_v1_0.025013m (loc us Egrandis_v1_0.025013m.g) derived from phytozome v7.0 (c hr-ID scaffold_4; pos 34855869 to 34856664)
aggcgcgcctatcttcgcttctcagcttgcccaaggtaatccctctttacatctctcggcaccgtgtcgtttcggttgattctctgcctccgttatcggaacaatcggctgaaattagagtgtgttttggactccttttgtcgattggggatgggggtagccgatgaatcgctgagttattacctgttaacgcggtacttcgccagcccggaatcggatttcgtcggaaaggaaaagcctttcgttctttttcgttttttttccgaccttggatgtgactaaccctatatggcctctcccgcccgattgttccttcgcatgctaatccggtgttgatcctttcgttaaactagcatgggttggcatgcaagtgccagtgttcgttattggaatttactgattgggtagcgccactcggttttgttatttctgccccctcgccaggtgatgcttttattttccctgctctaagctgtttgtggatttgcccaacaggaataatttttgcccacttctcttcattttataggattttcgtccgtttgcgcattccattctctcctgttgtgaaagcctggcattgcgacgttttttaggtttttgaattatgctcgtgcattgattagtgagatttaagttcattctcattcattgatggccgtggctccaatggaagttaacttgttaggaggctgcttatgtgatgcttcttaagttttgcctgaccataagatggtttttggatgtggcgcgctgaattctatcgtgcatgataatctctaggtagcacgacgac

SEQ ID NO: 90817 - DNA, 503 bp, Eucalyptus grandis
  Intron number 2 from transcript Egrandis_v1_0.043510m (loc us Egrandis_v1_0.043510m.g) derived from phytozome v7.0 (c hr-ID scaffold_1007; pos 12941 to 13443)
cgtcgattacccgaccttcaggctcgtcatcgtcggtgacggaggcgttcttcctcattttcctagtttcgatttgattgaacgactcgactgctcgcttgtgttttttctttgtattggtttttctcgagtgcttttcatgtgatctgtgtgtgttggggggatgggatcgttgcttttggtagtgatttcctaattttttcggtgtagatgcttattatctggaattaatggggaagtgttcttgcgtatgccttgatcgaggatttaccgcggaaatgtatattttgccttttaaaacttggttgctggaatggaggtgaaaatcgattttttatgggttagggctcccctaagaatcttgggcattgatgttcttgatctttggggagtgttgttttaaagtttagttcgcctcatttttactcgctgttaccgcccgagctgaactatttatgcatttcgcaggcaagacgactttcgtgaagaggcatctgactggg

SEQ ID NO: 90818 - DNA, 702 bp, Eucalyptus grandis
  Intron number 2 from transcript Egrandis_v1_0.020443m (loc us Egrandis_v1_0.020443m.g) derived from phytozome v7.0 (c hr-ID scaffold_4; pos 19641349 to 19642050)
ctgcccaggcgctcttcaccattgctcgctctgaggttctctctctctctctctctctatgggctgaaagtgcttgcgttgaaatggtgggtcgaattcggtagtgtgctcttcacatggacggcccttcttgcttagtatggcgtgatttcgtaagggcctactttcttgagttgggaaattcttgtggagctccttaggattttaaatttcatgtcatagttgggctgtgaagaccatgtttttttgcttgatggccgctagctgcgctctgcaactttgccgatatcttctcgtggtcaaagactctttggatgatgtccgccccatcgataggttcttcctaattcaccactcaatttgttccctctgactttgcccatcgagattcagagggtaattcatgaatgcgtgaaggatgacgaggggatcccttttttcttgatgtgttgtgatggtcgcatcatgtaaggagttaggctcctcactgtgtcttctatgtctgtctctgtctgatcttacaactttgcccgttttatttgagttctagtcaagtttctgctgcatcattatgcgtgcaactctagttttattggttttgacctttccaacattggtcttgaatgcctgtctatagtttagatgcagaaaaaacttttgcagatgtaaatgagtttttcttgcagggtttgagaggtcttt

SEQ ID NO: 90819 - DNA, 895 bp, Eucalyptus grandis
  Intron number 5 from transcript Egrandis_v1_0.045582m (loc us Egrandis_v1_0.045582m.g) derived from phytozome v7.0 (c hr-ID scaffold_9; pos 30282661 to 30283555)
ctcgagaaagggatagaagaacactacttcgtgctgtaagtttccctagctgatttcttttggcaattatattggctttgcaatgcattcatgcagcattccttgaaatttcttctggcatgctccttgtattggtttgcgagaattaggaatagtctacatcattgcctacttaagagtagggatgagtatagtttcaggatagaacctggaacttgagaaccggatcaatgcggtttcaagttctaaggtatgcaaagtaggttccaaattccaaaaattaggaaacctatttcgatgggtaggttttagattctagattccactaacctagaacctagaacctgaaatctagaacctggagcgagttttgtgtttttcttagtctatgtttatgtgcgatccttcggtatttcatggcgttcaataataaatgtataatttggaactactagtctgagttttcattttatgactaaggcttttactttgttaatgctttatatttttctcatgtctgaatataaaatatggtcaatgaattgtagcaacaagtggtagtcattgaaggtgataattcactgcaatcattcaattaatagtatgggtggaacttggataaatcctagaacctgtatgcaagataggttttaggttccaaaaatcgaaaaacccaacagttaagttccaagtggaacatatatggaatccgaaaccgctcacccctacttaaaagtataaatctcaaaaatggtcaaatttctgaatagtgacttagggtttagactagtactgttccttctattgtgttcgtttatgctgcttatacttgtatttctaattttatttttgccaaaaccatcctcagtgttgtttcctttcatctctttaacag

SEQ ID NO: 90820 - DNA, 780 bp, Eucalyptus grandis
  Intron number 2 from transcript Egrandis_v1_0.031834m (loc us Egrandis_v1_0.031834m.g) derived from phytozome v7.0 (c hr-ID scaffold_104; pos 88472 to 89251 reverse strand)
tctttcttgcttctactgttgctacgctttcgaaggtaacgcatttggcccgactgttttcgatgttttttgtctactgtgaaaattgcctgcgattctaagttgccctgcttcttttgaatgattgtcgttgctcttcggattatttcctgtacctgctttgagatgtgttcgatcgcaattatggagagaaacgggtctttatccttttgtcttactattttcgatgtttttgtttgtgaaattgcgcctgggatttgaagtcgttgctcttcggactgtatttcgtgtacctgctttgagatgtgttcgagctccattatggagagaactggtcaaatcctttggagaatcttgattggcatcgatggttgaaagcgcataggttcaggttgaaaattggctgtcgaaattctgatgctcagccggttcttgattgtgattctgtgcttcaattaatcactgtctccaacccggcctacttaaatggaggaccgggatgacaaattgctgtagagcactgggtgttaggatgttcattttctactgaagtacttagaagtgtatatatgggctagagtgaattacaccgaaaaattaaataattttccttgaaaataacttcttttgaaaatattttctaataaaatttaagttttcgtaaggtaaacggagtccatatttcgagttgatttaccaagttgattatgactcgaagttaaagattgaaagtgcggaatgacagccctcccggtgcaaggattatccaagcaacaaggc

SEQ ID NO: 90821 - DNA, 779 bp, Eucalyptus grandis
  Intron number 4 from transcript Egrandis_v1_0.008405m (loc us Egrandis_v1_0.007670m.g) derived from phytozome v7.0 (c hr-ID scaffold_9; pos 25986406 to 25987184 reverse strand)
gaaggaacttggagttgacgaatcaataatagcaagtaagtttccttactaatcatctggagttggccttttaaggattcatcatttgtctaatgaagttgacattgtcattgacaatgaatgtggtctcttcagtagtttgactttgcaaactcttgcagtcaattgaccgattacttttttcatttttagcttcttttttttttggtcataaccacctatgaatcaggtgcctgaatattagacctttgagcgagaattttccatataatccctgcacgctttttttggagaattttcttgtcaattttagatgacatgttgatttggaagttatctatctaatggctacagtattttaaatattttatgttgatccaaatgtgatttatggggatatttcacggtgcggcctataaacacacctgattgtaaagcattctcatcttcttgtacttaggcctttgagaatatttcttaagcctgtcaatatttattgagaatttatgcagctcatctggaagaattggatcaacttctgaagggaattgccatgatgaaggagctcacattacggactagggattatttagtttcttttggttgatccaaatgtgatttatggggatatttcacggtgcggcctataaacacacctgattgtaaagcattctcatcttcttgtacttaggcctttgagaatatttcttaagcctgtcaatatttattgagaattttatgcagctcatctggaagaattggatcaacttctgaaggga

SEQ ID NO: 90822 - DNA, 633 bp, Eucalyptus grandis
  Intron number 2 from transcript Egrandis_v1_0.047724m (loc us Egrandis_v1_0.047724m.g) derived from phytozome v7.0 (c hr-ID scaffold_9; pos 37780740 to 37781372)
gcacttcatattatatttgtcaaaggaggatttaggtttttttcaacttttttcaccaaaatagaagactagttttatttcgtacatggcatgagcataacagagaataagagagatgcaaagacactaaatcttttagtaagatgtttcctatacatgatccggcaagagcacgttgggtgttatataagtcaatcactttgaattaggtcctacttatttgaatatctgatgcaataccgcatatactaacaaataaattttaatgagaaattatagtatacttaacatagtgctaggatacaagttacatacgaatactagtttacaatgttactatttttgtgtccaaacaacgaaaagacataactcatataattaccaacaacaaaaagaaagatgaacacttacgattttatatacaaatcttatttacggtttgatcccctagcatgattggttttatatggagtatattgcaagggaaaataaaaggtagttctgttataaactgtagatagattttttgaataatattctcattgtttctatataccctttgtttgtgatataattctttgttttatgacgatgacagacccaacctacttgtcgagtgaatatccgaagacc

SEQ ID NO: 90823 - DNA, 475 bp, Eucalyptus grandis
  Intron number 2 from transcript Egrandis_v1_0.029501m (loc us Egrandis_v1_0.029501m.g) derived from phytozome v7.0 (c hr-ID scaffold_6; pos 44834789 to 44835263 reverse strand)
cctgcagaaggaccctcctgtttcttgcagtgctggtttgtgcttttagctgtttactacttatctttgattgattacaacgagaagctgttagttctcacttcttaaatcttgaatggtttgtacatattttatgataatctattcagagacatatctatctgtgtgggctttttttttgtttgggatgtgatggtgtacaaatcaccaatatgaatgcatgctagtgtttgcacatggagccttgtcattgtgcatggttaggtatgcactagttagcacctcctttttacgtgatgtgaggatgtatactactcaccaccttttgttttaggttatgatatcaggtctaagcttctctttttcgttgttgaaatcaaacagatgggaagcttttgggctaattttgaaaggcaatttgttattatttcgcatctcattatttttttcttcctgtactcaggtcctgttgctg

SEQ ID NO: 90824 - DNA, 596 bp, Eucalyptus grandis
  Intron number 1 from transcript Egrandis_v1_0.018141m (loc us Egrandis_v1_0.018141m.g) derived from phytozome v7.0 (c hr-ID scaffold_9; pos 26481501 to 26482096 reverse strand)
ccgacctcggatcccgcaacgagtccggtgatcaggtacctctgcttttgctgcattcgtgtgaacgtgggttctgtgcctcggcttctttctatttccttgcgcttgtcttagctagcggaaacgtacgttcggttttcccttttgttcttcagtttgtctgtggaatagccattgaccagcttgatagcgatcccgctctgatgcagcattctgctttgatcttttgatatatgaataatgagctcagaaatgaatttacttattccgagtagaatggcgcgttcgccgttatttagagaacgagtatagggagattaaaatgccaactaaagtagctccattgccgtgaactttggtagtttcactaccttgttttgcataatcaagaacgaacatttatgcgctctgcactccgagatgatcagaaaaccagaatctagatcagacccggatacggtttctcccctttcctggtcattcaatgccttggtcgaattgtcatgtttatgttattgagtgaagtatgtgaattgtgattttgtctgggcaaaattccagttgcaggaggtacgtgctcaagaagatcgtggtcc

SEQ ID NO: 90825 - DNA, 599 bp, Eucalyptus grandis
  Intron number 2 from transcript Egrandis_v1_0.021760m (loc us Egrandis_v1_0.015106m.g) derived from phytozome v7.0 (c hr-ID scaffold_9; pos 31877315 to 31877913 reverse strand)
cacgtgctgttgctgccgtggagagtctctaataggtaatggacgatagagcgatgcattcgggttttgctgctcgtgttactgtagcttcagaagagtagagttgcccgaagagtaggattttgcttggagtagtttcgaaagctctcggccccattgatttcagcgttaggaagctaatgtttcagaaatatgctcaacatgtatggtgcgccgaacccggtttccggtagattcgggaggaacgggtttcatctggtcatgctccagtccgttcttcgacatgatttcgagttatatccgttttttccttctttgctctgttcttcggacaatcagaaacgacacggcactcctaagatacacgaaaatcaaacacagtgcagagcatacgcatctttagatgattgtctttgcttgctgattaagataactgcatcatctgtagtgaatatctcttcagtttatgaatatggttatgattgaaaaatgcgcgccacaatgcaacttcttttgccaggaacacggtccctgtatcctcgagctaactcgatcctgtctctaaactgttctgttattttcctgaagagatttccgtt

SEQ ID NO: 90826 - DNA, 630 bp, Eucalyptus grandis
  Intron number 1 from transcript Egrandis_v1_0.007542m (loc us Egrandis_v1_0.007542m.g) derived from phytozome v7.0 (c hr-ID scaffold_6; pos 50610417 to 50611046 reverse strand)
agtgcaaagggtccgctctgggaagaggtctccaggtaattcgacttccgagttctatcttcctagctgtttctacttcgatctgaagcgaaagctcgagcgtttgcgaagttgttggtgcagtagatctgcttttcttttgaatcttctccccactttccaaatgtttcaagaatatctccagggtctaggacgataatcttgcctatacatgtgcggttcttttgtccttttcttcttggggttgctcgtatgtggatttaatgaaggtgaactttcggtgagggggagagtcgagttcagatcgagggaactcgtttgtctgtgctgtcttgtctttgcttttctgttgaagtaaacaagagaaatcttcgttaagcttttacttcagatgagttcctttcaattatctttttgcctctctctctctctctctctcgttgcttattcctagttcaatatccagattattgtttgataattgtatgtccctcgtgcggttgtgcgctcgaggaagatacttttgggctgttgatgtttttgtccgtggatgcgagtgtgagatttgtttattctgtgactgttgttttcacaggaagctgagcgagcttgggtatcatcggagtgcca

SEQ ID NO: 90827 - DNA, 475 bp, Eucalyptus grandis; identical to SEQ ID NO: 90823
  Intron number 1 from transcript Egrandis_v1_0.043243m (loc us Egrandis_v1_0.043243m.g) derived from phytozome v7.0 (c hr-ID scaffold_2457; pos 5391 to 5865)

SEQ ID NO: 90828 - DNA, 441 bp, Eucalyptus grandis
  Intron number 1 from transcript Egrandis_v1_0.021483m (loc us Egrandis_v1_0.021483m.g) derived from phytozome v7.0 (c hr-ID scaffold_4; pos 191980 to 192420)
tcgaattaggtactagccttattcttgagcaatggagtagagaggtggtccttttctctcgcatttaacttgtgattttcttataaaagtctcttttcttcctttatatattttaggtgataatggtgaaattaatattggataattcaattccattgtcgttggtggtctaattcaacaaatgaaccgaactttccatgcaccaactctctgcaaattgtctctgacgacaaagattgaacaagaagggtcaagattgatgaatgcgtgatcaccaaggtcttagacttcaagaacaagaaacaaagtttgactcaataacaaaaaccaagtttgactttgtcaccccaaaaactctcaaagagctctatatgaatccaacccatcacaatccaacccatcacagatcaggactcggaagaagaaggacattgttctaat

SEQ ID NO: 90829 - DNA, 725 bp, Eucalyptus grandis
  Intron number 1 from transcript Egrandis_v1_0.042627m (loc us Egrandis_v1_0.042627m.g) derived from phytozome v7.0 (c hr-ID scaffold_4; pos 37839464 to 37840188 reverse strand)
cacaacaattacaaaggtgtgtgatcttgtctttgttgattgcgtttctgaataagagaaatagatcatcgcagccctgttagcaaggttaagtagtttgtagctcagaggtgtcaagcctggactcatcgttttggctgcttagaatatcgggagtgaatgtttcgtgagaaatcgatacaactgaaatcgtatgcatcaaaatctgcactcgtgagttttaaaagcctatttgggtagccagcgtactgacacctttaacaactatttgcaggcgtttttcttctctgcagtcaaagctgagacacactgatgttatcttttgttaaaatcaagacatttcatgtggagaatctaatttccccttcaaatggtgttcgtaaaattatcgaaatatgtaggatggaatttattcactggtcaaattactctaattgtctctatgtgcgcatgcgcctttttttaataaacacacataacaaaagaacacaatctaactcaacatgaattgtaattagctgggcctaggatggatctttcacttgctgcctctgtctgatctgggatggcatgcatgttttgattagtaaatgtgcttcctgcttgcttgcctacttatgttttgcttgtcccgattttcttctgtcctgtgtccccaagcattttgaaatatcaaattgttggtttcagttcagctgcaaattcgaaagtacatttgcaaacca

SEQ ID NO: 90830 - DNA, 664 bp, Eucalyptus grandis
  Intron number 1 from transcript Egrandis_v1_0.031009m (loc us Egrandis_v1_0.031009m.g) derived from phytozome v7.0 (c hr-ID scaffold_4; pos 36840468 to 36841131)
cttctttttctcctcgtttggcaagcacgtacaaggtaagttccatttgggtttactcaaatttattggtcgattttcagatcaacccatggcatttgatttttttattccattcatttaattttcaatttcgtgcaatcaacacagctgaggaagaatttatgcaatttctcgacgaattatggatcgcgacagacataagactaatttttagaaaattaagtcaaaatcacatgggtgaaataaatctcgtcctaatataaaattcctaagctttttcttaataataaacttaaatcccaagattggttaccttgctctgattggagatgagagatcgcgtattaatttactcaagatatcgtttgattattaaaaacaaaaattataaggatgaattttacccaacgagcaaataaaatatacattctatgcttttgacttaataagcatttcgttgaaccctttcaagttaaacgcttttgaatttcctcagatgcatttcccccaaattgaaccaaatcgatgtaaatctatcatcacaaatcagagggtgatgaaaagaaaaagtgtagtggcaatttgaaatcagtatattttcttgtaacataagtaaatcactaaaaaaggttcactccgtccaatcttccaacaccttcttctt

SEQ ID NO: 90831 - DNA, 688 bp, Eucalyptus grandis
  Intron number 1 from transcript Egrandis_v1_0.052076m (loc us Egrandis_v1_0.052076m.g) derived from phytozome v7.0 (c hr-ID scaffold_89; pos 71288 to 71975 reverse strand)
gaggtaacaaaatagtctcctgatcactggtttaccaacttaaaaattgtcttcttccccattaaatatattttgccattcaatatagattttacatcgcccatgcgtcagagacctggtcccagcctcaatggacccgggccttaatggacccagcacgatcattagagacttgagaaccagcgttaaggttcgcgtgttcaaacctagagttttaggtccaagccctaatatttaatgatattttgcaaaatgttttccaacttttttaaaaaaattcatttttttttctgattttaagcatatttttccgttgattagaaaaaaaaattcattgactcattttccttaacgacctgaacgctagaaaatgtgcgaacgaagtctaagggtgtgtttgtttgaggaagagtgtttttctaaaattactttccaaactttcgcttgtttgatttgttaaaaatgattagtcaaccaaaaacactatccgatcaaagaaaatattcatgcataatattatgaaagtgaattcctatatttaagaaagtgggaaaaaaatttctgatattgctcatcttgaattttttgatacttttattttaaaaattgatttttttggattttttttcttttctttctttttttattttcttttccttcttcctcctccatcaatcgcccagcctca

SEQ ID NO: 90832 - DNA, 521 bp, Eucalyptus grandis
  Intron number 1 from transcript Egrandis_v1_0.020698m (loc us Egrandis_v1_0.020698m.g) derived from phytozome v7.0 (c hr-ID scaffold_6; pos 51045528 to 51046048)
gaacgcgatagctgaaaagcttcaaggaagatcgggtatatcaaaatcctgtgtctaatgtattttctctcgaaacttcatacttttatgtttggtgactggataatatcattttcagtcctgactgtcgaataaccaccttggaccaactccagcattcttttcgagcatcttgaattctccgaacaagggaatatatgaactaatcaattggaaacttaatgacaaaacgattgggaataaatcgatcgcatctctaatttttctcatcctttttccaaatgcgtgcatatgtaccattactaccaattatgttttgaagttttgtgcaatcagattgattgatatttgagacaaaagggttaagatcataagaatacttgtttacagattcaaggccctgcacatacattgttcacttaccttatagaataaactgaattgttaacccttaccggggggttcatgtttcattgtcttaaataggcaagagttgcaggttgaggtggttcaatcagctg

SEQ ID NO: 90833 - DNA, 648 bp, Eucalyptus grandis
  Intron number 1 from transcript Egrandis_v1_0.022940m (loc us Egrandis_v1_0.022940m.g) derived from phytozome v7.0 (c hr-ID scaffold_4; pos 39637769 to 39638416)
atccaggtccgttttttcctttccgattccgccctcgccgattgctttcccccctccggcgttcttcctgattccgggggaaacggttcccgctctcgccgttgaatttggggcctcgcgaatgaggatttcgatatgtctgatcgaatgtcgattgtttgattcgtggaaggttgagttgggcgatcgagttttcggaaatgtggtggaattggaaaggaatcattatttttgtgaggtttctttaggtagggtttccccttcatggccgttctaatctgctctggtgttgaaacgtttgcgcgggagaatgtgcgttgggggtgtaagcggttttaagctaatggagttagactcgcggcttaatcgagcttgactcaagaagttactgagcaattgtattttacatatctacattacatttatactaaaaaaacattgagattgaaaatattgttcatcttctgagtcaagttgagctcaagaattaaactgtatcggcatgactgaactcgattctatgtcacccatgatgatggtgtcgtcctgctaagattttgcttcagaagaattctgcaattattcattgattatgttgtcaaataaccttctgaatgtaggatacttttcaagaagtcaagtccaaat

SEQ ID NO: 90834 - DNA, 851 bp, Eucalyptus grandis
  Intron number 1 from transcript Egrandis_v1_0.014380m (loc us Egrandis_v1_0.014380m.g) derived from phytozome v7.0 (c hr-ID scaffold_9; pos 31987083 to 31987933)
gccctccggcgtcggcaagcgcaccctcctgtctcgtgagttcggctcctctcggcttaagctagtgatttcgagtctgtgcggttcctcgtcgttcgtaatttcgaacccgaatcgaaggaaggcccttttttttttttttttttttttcttttttgtgtgtgtctacagattttgttggtatcgggtcgtgtctcatgtagttgaagcccgcgagtgattggattcctgggtttcgttctctttatgctttaatgaaaggaaaacaaagaaagggtcgacgagctggacttcgttacggacctggatttgctgcccgagttgtgcttacatttgctttctgttgttttggtttgatgttcctttctcgcaaatgaatatgccatcggtgtttcgacagatgggtgaatatataggcattttttgtcagagggttgctttgagttcctttacttagtgagagttgatgcatcttgacgtgctggagggagaatttaatctgcacgtcttttggtattgtggtaggaattttttttatgctaatttaggtagttgaacactcataaaatatgcaagaacttagacgagtggattgaagtgttgcgaaatgcaagtttaagatacattcttcgttgcttccaagcttatgaagattactgtactgttttgtaatggataatctgtacattgttttagcttatctgtgttatttctctatctattgcttagtgtgaggtaaatattcggatgcatttgtgttctctgaatattgaagtattctgcttacttatagcttacaatattggttgatatcagggttgctatcgattgatattgaggaaagtcctgac

SEQ ID NO: 90835 - DNA, 509 bp, Eucalyptus grandis
  Intron number 1 from transcript Egrandis_v1_0.046886m (loc us Egrandis_v1_0.046886m.g) derived from phytozome v7.0 (c hr-ID scaffold_9; pos 29530578 to 29531086 reverse strand)
cccagcctccgtttctgtcgacattacaacatcaggtaaggttgtgtgcatgttgaatttcagctgcttttcttgtcctggtatgaaagttctttatgtctgttcacctaccaagcagaaaataaaatgtcttcatcagggcatctagcacaaatgccagtctggatttctgtatttgtttaagtttgcctccagcaaagcggtgctccaaattcgttttcttcagatgaaaatttttggaaagctgccgtgcaagtatcattaaattgaatctgtttgaatcttggccagtggcgaaaatttgggaaaaaatatatatatatatatatatatggcatctagatgaccacattccacatttagcctccgcgatgatgtgattttagtgtaagatgcttcgaccttgcaaattggaggacttaacatggattcccctgacggccttgtgaggaaaacctcaatctaacaatttcatgaatcgttctgttttttgtctaggagggacacga

SEQ ID NO: 90836 - DNA, 669 bp, Eucalyptus grandis; identical to SEQ ID NO: 90399
  Intron number 3 from transcript Egrandis_v1_0.054412m (loc us Egrandis_v1_0.054412m.g) derived from phytozome v7.0 (c hr-ID scaffold_1797; pos 7729 to 8397)

SEQ ID NO: 90837 - DNA, 661 bp, Eucalyptus grandis
  Intron number 1 from transcript Egrandis_v1_0.041623m (loc us Egrandis_v1_0.041623m.g) derived from phytozome v7.0 (c hr-ID scaffold_9; pos 29242283 to 29242943 reverse strand)
agaagcttcacgccgaggtaagaagagagatgtgattaatcaattacttctagttttcatgtgttgtctgtcttgccgcttgagtatgtctgttttggtttttctttttgatcagaagagaaccagaaaaaacgacaatctttgagactagtactcactacacatctctagtctctataattctgcaatttaggaataatgcagagaactgaacatactaaaaaaaactttgcctatccatttagtcctctcggataatcccttcatagatcactcagtgacacgagacaattatttcatggatttttattttagatgacataggtaaaacgagttactttaaaggcaatcgatgttgtacataacatgtaaaaattgctaattaatactagatacagaagactcagaactcgtattaatttccctatttgtgatagaaatcctactttattagttgaatgctagaggagattagttctatctgaagatatcccaatagttgagttcaatgcaattttcttgctagttgataacttctcaaggcgactccagttgcttttctttgattatcgtggcatctgcaaatacaatatacttctaactaactttttaagtccaaaaccaatggtgcagctattggttctcaaaggaagggacacaa

SEQ ID NO: 90838 - DNA, 772 bp, Eucalyptus grandis
  Intron number 3 from transcript Egrandis_v1_0.007876m (loc us Egrandis_v1_0.007860m.g) derived from phytozome v7.0 (c hr-ID scaffold_6; pos 37141749 to 37142520)
ggttttcattaaagtaaataacttctcgtttctttcccttgaactgctccttttgatattcgctgattcggtttctgcattttgcttaatgtttttattgatgtcaactaaggtaatgaggtgatggactgtatgaaatagacaaaaaaacagatagtgcagtgcgtcactgcatctttgggatgtctgctagagggagagatggttcacgtttacagttgaatggtgttaactctgcatgatgtataaggtctttcatcaatataatttgatgcacgtggaatgttgcggtcataatgatgttttccgttgctttctgcaggtatcataatatttggcctacttttcaactgtagcttatatgagaatcatttctgttctacatgctacgatacttatttttaaatggcgtctctctatttgaattgtctgttgtctactgtaccagtcttttggtgtttgattcatggtgctttggcttgctagaagtttatttttacttcatgaactgtaaattgttagattgaacttgagcagtctattcttatccattttgtttatacaacatacaaatattaaggcagcaaactttatggggaagtgaactaccacttctgatcttcaaaataagccactgtcctagaatagataatgtatgtgctgttatcgtacttgtccctctattatttgtcatatgctatttgttgctttcaatatttatcagttcttttggttcaatttgcagaataagccccttattccaaaagtggtc

SEQ ID NO: 90839 - DNA, 715 bp, Eucalyptus grandis
  Intron number 1 from transcript Egrandis_v1_0.001582m (loc us Egrandis_v1_0.001582m.g) derived from phytozome v7.0 (c hr-ID scaffold_9; pos 23397303 to 23398017)
tagttcccaaccactgtggtgagttcagttcagatcaatcagtcttgtccgagatgtgttatacttcatatatagaagtatttcttactaggtggatgggtgaattcttttgagaagaaggagtggaatgtgtgaatctgaatttcacttataggtttagttcagtttagtaattgttacaagttcattcttgttttgtggtcaagggcaatgtcttgttagtaatgagggcaaatttcgaaaaatgcaattttttcttgttggttttagttcaatggaggtgtctcttctttttctttctcttttgaattcattattcagatgcattgcctcaaaactgttctttcgttcccctagcccttccttcttgtacaccaactagtacattctttccgattcagataagatatttcgtccttgggccttcccattgttttgattcagacatgttgaatgcaacttgtagtgcagcgtagagcatttttgagccactctatgcaacctattttggaacagagcagagccccctcgatgaggtctcatgttggttcgaatctttaaggtgaaaactgttcattgtgtttctgcaagtttggagaatgattgatgacgtgctactttttgaggtcatattattgcatgaagctcttctctttaaaaagaataaaaaatctgtttagtcaagcatttctttgggttttataggttggttttc

SEQ ID NO: 90840 - DNA, 883 bp, Eucalyptus grandis
  Intron number 2 from transcript Egrandis_v1_0.016383m (loc us Egrandis_v1_0.016383m.g) derived from phytozome v7.0 (c hr-ID scaffold_6; pos 44470659 to 44471541 reverse strand)
ttctagcaacaagaaacggcagctggagactttaggtaaatggaaaagagatgcgttttgacgggcctatgggtgttcacacctgtccccggatctgggtttgtgacttttgcaacttcttgagaaaaaaggtggtgtctggtcttgtggtgctggatcagctgtctgaagtcatgtggcgtctctcttttatgctaattctcctggtttccaaacttgggtttctgattggctaaccaaatggctgattggtcgttgttgattcatggtgctgtgcatttgcgtgtgtttgtggataccatttcactaggatacgtctttaaataagggaaagcaagctggtatctgctgcaacttggggggatctgttgttggggtctgacttcagatcttttatgttgaatgacttccgtaccccttatttcttgttctgcaattttccatttttctgtcttcggtttatgtggaccttgccttatgttattcctgtgcttacttggtgaggtcagttgcagccgctgttttggttttcgcgactttaaacgtcggggaatttgctttgtgaagattttgacttcttcccccaatgctctttttatgatttctcattgcgtagcatattaaaaacaaatcatatctcgaatgttccttttttttttctggggccagatattcgaactgttcattgctatatacctttttatatgtagattttattgcttatgatttcttttctgctttgattaatagagttctcaaatgcttttttgttatgaagaatataatgacctacctttcttgtttatggttttgcctgggaataagttgactgactgattaaaaaatcttcttgcaggatcacttggaattggatttacaccac

SEQ ID NO: 90841 - DNA, 357 bp, Eucalyptus grandis
  Intron number 2 from transcript Egrandis_v1_0.013985m (loc us Egrandis_v1_0.013985m.g) derived from phytozome v7.0 (c hr-ID scaffold_798; pos 7309 to 7665 reverse strand)
cagttttggatcatcttattacaagacatttgttcttcacttatactaatcttccacctggccgcttgactgatttatgagctgctgccgtaaacaatgagaactttgcacgtgtcgcggttaaacacaagctccatttacaccttcggcatgggtccagtgccttggagaagcagctttttcatttctttctttcttgctcgtgacattgtatcaccattaaatttcttctgtggttgtttgatacataacatgacccgtaaacaatactgtttgacttgtctatgagggtaatgactattaggtcttttggctttttgtttttccagatcaaggatttcgtaaaggaagttcagg

SEQ ID NO: 90842 - DNA, 581 bp, Eucalyptus grandis
  Intron number 1 from transcript Egrandis_v1_0.032533m (loc us Egrandis_v1_0.032533m.g) derived from phytozome v7.0 (c hr-ID scaffold_6; pos 17962551 to 17963131)
cattttcctgctcttgtccttggcttttggatcaggtttggcaatcatgtctctcacttatccttgttttctgctgctgttatgagttcctttcctttgattctgttttgtctttctggaagtaccaatcccgaccctacccaggaccactaggcgtgccaaaaatcctaggatctcagttgctattagctacattctttcttttgatccacgcacaacttaaaaaagtgaagggggctctaccgtttggtcccagtagctcgagcttcaaagctgtggcctactgtccctacgacaacagacccacttaagtttaaatggtctgttcgtttcagctgatgcagtttctgtctccagtctcatctgcacttgcagttcaagggatttggtgcctattaccacctaaattaatacgtagatatttcttcagtttctggtggagcattctgttatgaaactggaaagaacttgtcactgaattaagctaatttcaacacgaatcggcagatttttttgccatacagctaatatttccgcattatctgttgtttacctcgcaggggctcctgtaactgttgtca

SEQ ID NO: 90843 - DNA, 847 bp, Eucalyptus grandis
  Intron number 3 from transcript Egrandis_v1_0.021244m (loc us Egrandis_v1_0.019180m.g) derived from phytozome v7.0 (c hr-ID scaffold_4; pos 36829780 to 36830626 reverse strand)
gggttctggcaggaagcaacagttagcttccgcaggtgagttttctgggtctaattgcttttgggaattaaataggtcaattttgttagttgattttgagcgtgggtgacccgtttttctgcatccagctcaatttcgatatcagacttccttactgaagataagagcttaaaaaggaagctttgacaagttttatgaagctaacacggaataggagtaatctgtattggagggggaacgtttaacttaacaagggtcttagacaatgaactgggacactggttgatgtcggatcatgtaatcggtttggttttcatatttactttgagactttggccatatctaatctatcttggcaatgacgtttctctaatgtactttactggtcttctaagtgttcatttcatcccactattttagttgtcaaacccgattaaggtctaatgccagtcttattttgtcattgttatattttgggctaaggttggtgtttgagatgcctgctctgtttagtgagagggagaggatgagaaaagccttgtttaaagccttagttcagaatcttattgttttgatctcttaagtgagaggagaggacgagagaagccaatagctgttgagccttagatcagagcttgagtgttttctctagttcaattgcttagccagtttattttgttcaatttttccttccaacataaggatatctcgccttcttttataaaggaaaagcaaagttaggctcactgtttcatgttaattttgctctggtcaatttagaattctttcagtgatttactttgtaatgatatatttgccaggtgatctattgtctggttcagctgga

SEQ ID NO: 90844 - DNA, 697 bp, Eucalyptus grandis
  Intron number 1 from transcript Egrandis_v1_0.021244m (loc us Egrandis_v1_0.019180m.g) derived from phytozome v7.0 (c hr-ID scaffold_4; pos 36831149 to 36831845 reverse strand)
tcaacagcaggctccttctgcgctccccttagcaggtccttaagcttcactcccaagctgcatttgcctctctctctctctctctctctaatcttgaaagttgcgtcttttattagtggggatttcaagattgtcagcggccttggcctgggtttgctgttgatttttttgtttttttttgggtcgggtctgctgttgaatttgcattccttatgtcttgaaggtttctgggttttcttaggtggccttgaggatgcttggtgttaaagattgtagaatgggttggtgagagtgtggaccttgtttgagtctctcttccctttccagtttctttatcttgttcgtgaagactttttgtggtttctttttgtttggtgagcagttaacacatccacacctttttgtctttctgttctgagcctttttgagcttcaagcttttttcccctcttgtccaattgtactcgctttcctttccttcttttgtactttcggttgctcgattatttttttctgtgatcttgatctgctatgcttctgttcactttgtcaattcttctctgtagtggaaattcagagtcttgcaagagcttgtgcttgttttgaagatatgctaagttcataatctcatgcctaacgctgcttccgtttttgcattgccagtaacttttaagatttgaagcttggtttaaaaaatt

SEQ ID NO: 90845 - DNA, 891 bp, Eucalyptus grandis
  Intron number 3 from transcript Egrandis_v1_0.022718m (loc us Egrandis_v1_0.022718m.g) derived from phytozome v7.0 (c hr-ID scaffold_9; pos 21503896 to 21504786)
gtcgcttggttgccataactggacgtgttcaaaaggtcagctggtgcagagtctgtgatcaatgtttcaccgatctattcttttttatcttccaccatatgcattgtgtggtcttgctgatttttctgtatgagtaaacccaagaccatggagtaggacttgtaagccgtactatttgagcacacctgtcgcaagaagtcttaaagggcaaagcttagaaagacctagaagaataccttaaaatacaatgaatgagctgttgcttcattgctaaggatatatgctgactcagagctctccgtgagtgagatttttgtgcctaatgaatgcatggttctggaagaaaacagtgttgtatattggatgtggataatccacctatttcaaaaacacttgtacacaagtaaagatgtgaaaattttcaggtcattgcaaatgatctaccccttctccttcacaaatatttgaagcatatctaagataatcatgccagataaccaccaccatttctgaaaatgtagggtaattgaaatagaattttgttgtggtttttgtggctcatcgattaacatttgcactctaatacatttcgtcatatagtttgacacaagtggttaaagagcatctgactaaaaaatctaataacaaccacctgctcttgtgaattgtgactgctccttttgagctgtgggtgacataaacagatggctgaaatttatcttttctatcttcttttttttttttttggggggggggggggggggggggggggcttattttacctctgattgacctgcataacacagacaattcattttatatgagtacttgaaatgtaagactattgtcatttgagtgtggagtgtatgtttttttatctccaggtgaggg

SEQ ID NO: 90846 - DNA, 944 bp, Eucalyptus grandis
  Intron number 3 from transcript Egrandis_v1_0.009125m (loc us Egrandis_v1_0.009091m.g) derived from phytozome v7.0 (c hr-ID scaffold_9; pos 16759147 to 16760090)
aagaggaatctccacagcataagtccccggagcaggtatgatttggtaattttggtttttagtgctttactctcgtcagaagatgaatgctactttgatggaagactctatgatcgtagtctgaactggtaggtaatgtgccattgagccactgcatctgttttggctagcagtagaagttacgctattatgtttgttttccctattcctgacaattgttggattccacctgctgtagctttattaggttttccatcttgaccaaggttacaattgtttttctctttatgtacattttccttggatctttcttttaggtgataaagtaattgcacttttgtttgaaaagatgaacttatcaaattgcatgcaagaagtgaattttctctctcgttctatttcttctaactctgcttgatggtaatctactttgctgtggaatgatgtgcacctattggtttagggttggtgatgttgctattcatctagattctccttaatggtttgataattttccttctttcaagtatgcttacacatgtatggttacaaacgtctccatccatgtcaaacgcagtacttcacttattcattcttaggcaattctatttgttctttttcctgtgtctaatgtataaaaataaagttacaattttttttttctttgttttgttttgcttcattggttctactgttgtctgtggtaagctaaacttgtgactttgtatgattacatctttcatgctaattgctattgcttagtgaaatattgtgaatcttgatatactctttttcttatgtctagtgttgataactccttctgctatacatcctttagcctttcatctcctgcatggcctccagttagaaatgttgtaatacttgttaattgggatggtggcagcgcagagattagttcgtctcactttggaacatccgcaata

SEQ ID NO: 90847 - DNA, 842 bp, Eucalyptus grandis
  Intron number 1 from transcript Egrandis_v1_0.013470m (loc us Egrandis_v1_0.013470m.g) derived from phytozome v7.0 (c hr-ID scaffold_9; pos 23438206 to 23439047 reverse strand)
agaaggagcttctcatccaaatcaagcagacgcaggtgagtttgacgtggattggggaaaatcttttggacacgtatcgagctttgtgagctaaggattggcgatcgatcgtctctttttctttctgaatgttcgtgtccatttcttcgattcgtttgttgatatgaggtttgagtggccctttttgtggttattggccgtaaatggaactcgtaacttgcttttttggaactcgtagtacttggctagtgatatttatagatctcttacgttaggttcgttgaaggcttttccggcggcaccgaagcgcttagttatcctgcattgcgtcgtatgtattgggtataagtggcctttcgcctctttttctattattaataatatttagattcttgattttcagcgggaggagaatctaatcttctcttcattcataattgaaccttttcccttcaagttcgtttcaattgtttgggcaaggacaaagattgtttcgcattttttgacgactactgccacacgcttttaatttcaaatctgggagttacgacattgcctttcactattcgtagcgaatttgaattaatttacatatagattgaggcaggagctggggttagataataagaattgggtggtgtgaaaccctcaattaagtgtctgcaggaaaatggaatagaccaatgggatggatggtgagtgcttattatttgtacatatcatatgtggcatctgtttgcatccctggcaattctatactgatgactgggctgtatatgtttacatgggtttttgtgttttgcgcagaaacctgaccttgcaggtttgggcgagtttcttaa

SEQ ID NO: 90848 - DNA, 388 bp, Eucalyptus grandis
  Intron number 1 from transcript Egrandis_v1_0.030178m (loc us Egrandis_v1_0.030178m.g) derived from phytozome v7.0 (c hr-ID scaffold_6; pos 6085776 to 6086163 reverse strand)
tacaggtaataatttaccttcttctagttcttcgtcaatgctcgtaatccagctgaaaccgaatatttcgcacctgtataaatcagtcatcttaattaatgacgccagcgaagctaggagatgttattattgacagacccgaaaataaggcgagaaaacagatcggtgaattttctgacagacaataaattttccattttgaggctcttctgtcctgactttccctatttgatccgatatttattttttcgaccgacaattattggtggtgaatatattcgaaataataattttcctcattttttggtgggtttttttttaatgttttgttttgttttgttttgtttttgtagaggtgacagcgctttctgcagtctcgagtgccggc

SEQ ID NO: 90849 - DNA, 851 bp, Eucalyptus grandis
  Intron number 1 from transcript Egrandis_v1_0.016538m (loc us Egrandis_v1_0.016538m.g) derived from phytozome v7.0 (c hr-ID scaffold_9; pos 17471594 to 17472444 reverse strand)
cgccgttaacaaggtcaaggaccagggagcttgcggtaatttcacatcttgacctctcttagctttttccccctcttactttttcactttgcctgcgcggatcacgttcgtttcttggagatgaagtttcccatttttagtctttaacctctatttaataattttaattataatttattatcttgtcactgagcatgggaaataccaccattttatgaatcgatttaggcatgaattgaatatcggaggagtgggttttttttttttttggtcgaagagaagtgggttgattgtatatatatttgtatggatcgatacgaatcctatcgatttgaatatcaaacccgatatgatgactttttgaaaattgaaatcctacccttatctctttgaggtagttcagttgtgttggctagtgattttgaacctgatttggttagtaatcttgtttgttttgcgctgcaacaagaaaaaagttcatttttttagttaagtctaacatcgcattttagccaaaaagaaaaaaagggggaaagagaaaagtcttgacatcacatggatagactaaaaccagtgaagtatacagttgtcttcctacatcacttggggtttactcaatcaaattaggcttatgtgatcatcatcaattgagggtttgacaaattaattcagatgcatgaacaacgttttggcattaaatcaacacgtttctgctacagattacccgtttgctgtattgatctgcctctgcagtaatcacaaatttagctcatcaagctgaaaacccaatttgtttttctccctcatctttaacaggaagctgctgggccttctctaccatagccgccgtg

SEQ ID NO: 90850 - DNA, 607 bp, Eucalyptus grandis
  Intron number 3 from transcript Egrandis_v1_0.016388m (loc us Egrandis_v1_0.016388m.g) derived from phytozome v7.0 (c hr-ID scaffold_6; pos 20179604 to 20180210)
tcgtcgacgccattaaggaagctggcaacgttaaggtttgttggttggttcatttgattctggtttgggggggttgctctgctttcattttttttttctcagctttctcggtttcttttcagaagctttatgtcgattgctttcgtttttccaggaagaaattgaaattagaactatattaggtggggtaggtctgactgaatcttatcacgttcattcaatggttcctaactcagtagatcttaatgcgactacttgatcattaaaatggaaggctatggataaagcaacctagcctggagatcgatcctaaaatacattagctcgctttatctgaacaagaaaagaagagaatgagtcttatgtgaaaacagtccttgtctaattacgtgtcgagaatggagcaacgacagaagtggatctgagaatcgagattccagtcaatatatgagacagtggaaatcaagagaaggcaatttagactctttataccgaaagagatgtatctgatatcttcatattaagatcaggcttcttggtaactgacaatgtcatgatgggatcgatcacacatgattgcagagattctttccttccgaattcggca

SEQ ID NO: 90851 - DNA, 713 bp, Eucalyptus grandis
  Intron number 1 from transcript Egrandis_v1_0.050166m (loc us Egrandis_v1_0.050166m.g) derived from phytozome v7.0 (c hr-ID scaffold_9; pos 36855116 to 36855828 reverse strand)
cacacggtacaggtgggggaggcacaacgaacaaggtaccggttctactcgagtaatgaattgttgatcttggtgttagatgaaagctactcttttttatttctgattcgtgcagcccataatgtcacgtgctgaagacgtgatgcaagaatagaaatcattagtcgctattcgctaatgtttaaaacttggccaagttgaaccgccagaattataactcatctgggaaatatagaagcaggatgtataacataataaaattgaaaaactattcgaacacgatttatttgtttttgaaaattggtgatttctataactgtgaatgttgttttgcgtacatgagttatttccataatgacttatggaataattaactgtctgtctcgtatatctttattctaataagttgttttatgaaactcaagtgatgagttaatctcggaattacacaatattaccaatgatatctcatgtgcaattcaaagagtgtgtactttttatatgagatatacgacattacggtgaattatgaaagatcatctattttatatttttcactcatgcacatttacctactatttagaagttggtgtcacgtgcttgttactatcatgcataatgtttttgttttacaagttactgcattgactattccttacattctaatgattattacagataattctggactggttaagtgagtatctaacttc

SEQ ID NO: 90852 - DNA, 938 bp, Eucalyptus grandis
  Intron number 1 from transcript Egrandis_v1_0.044440m (loc us Egrandis_v1_0.044440m.g) derived from phytozome v7.0 (c hr-ID scaffold_6; pos 37088634 to 37089571)
aacatcactgctctgttcctcttcttggcgccgatgtgagtaaccccttcaaattgcagaaaacatcgagtctttcattgttgggcagagaagatgtcgttctttcttcttttcttgaactttgtatatcaggggtgagcatgtttctagaatataacctgaaatcgaagaatccgattttgagttccaaggtaggtaagataggttttatgttccaaaaattggagaacctgtttcaacagataaatttccaattctaggcagatggaacttggaacctaacctagaacctaaaacatgaaacctaaaacgtagaacctaaaacaagtttttgtgttttcttggtctatatttttgcgcgatcccacagtatttcataatgtccgatgataagtgtataatccaaaactactagtctgaacttccatcttatgaccgacacttttactttattaatattttatattatttatatgtctaaatataagtcgtgattaatagattttagcagcaagtaatgatcattaaaggtaatgattcactgcaattaatgataaaagtggaatcgagtagaacttggagtcgaccttagaacctataacaggataagttcgaggttacaaagtatacagagtaggttccaagttccaaaaaatataaacttatttaagtgagtaggttttaggttccaaatggaaactgttcaaccctactttgtatgcaaatatttgcttaaacttcgttacagaactagaactgggatggacttcttcctttctaaattgaatttcaaaagttcatattagaaccttttgctctttttactgactttccttcttcctttctttcgggttcattcaatcgattgcaatgatcaaattgttgtgggtggtgatgatgcagaataacattcataaggatatataagagcaagtcta

SEQ ID NO: 90853 - DNA, 682 bp, Eucalyptus grandis
  Intron number 1 from transcript Egrandis_v1_0.000301m (loc us Egrandis_v1_0.000301m.g) derived from phytozome v7.0 (c hr-ID scaffold_4; pos 3768785 to 3769466 reverse strand)
aggtaggaatcttacggtatctgagaacctagcttcaattcaagtaatatttctttgtttgatgaacaatcttgatacggttgttattttatttaacttgtgaccatgcacatcaacagagtttaatattgtaagacctattaacaagcttacatttggtagctagttacccaacctttacatataagaaggcattagattgaaattgttcactagcacattgactctcctttcttttatctgtttctactgctttctttttgaagaagcttggcaccagtaaatcctcatgggactgcagcattccttgccgctgctacattctgtgtgatgttgaaattggtcttttgatttaagtgataaactaaatggaaacatccttatttgcacgtgagtttttccaacttctgttgatcccaagttcaatcctctgaggaagcaaatcggcatccgcttatggttaaattttaaattccacatctgcttgtctgctgctgctaataccacaaatttcgatgccatttgccaacttatgtctgaccataataggttgcaatctgtgtcatgctgtaagtcttcagaacaccaacctgtaacaatctcaaatgatgctgtttaacattgacgagcaaactatgagtctgatttgccttgtaataacaccttcctttctctttggcag

SEQ ID NO: 90854 - DNA, 1024 bp, Eucalyptus grandis
  Intron number 1 from transcript Egrandis_v1_0.017287m (loc us Egrandis_v1_0.017110m.g) derived from phytozome v7.0 (c hr-ID scaffold_11; pos 2809392 to 2810415)
cgccgccgccgcttcgacgaggccggaaacacaaggtacagaaaatcaacccccccccccccccggggattctgctttcgccggtgccgattcgagctccggccctcgcgtcccggctctcctgggaccgcgatgtcgcgggggttctggccggcgccagctgatcgaggtcgattggagccgcagtttggattcatcgtgcctcgatctctcggcttcggaccggataggtctcgatctgctcggtagtttgttggatctggtcttttgagttgaacggtggaattttggtgatgtttttagcgcgtgtgcctaggttgacctcgagcgcatgtgagtccctagttggtccgcggtgggtgtgctgggtggaatcgatgagaggttgatgtaagatgtgtgcctgggttgacctctgaggcgatgttagatgtagagattcatgatggaatgggattggaatccggcgtattagatggttgatgtggtgatatcgatctatcttttaggatttacggtaagctgattccaagctatctgattccagaagttcgatttagtttttcaattgggtcatccaagatcgtttctttttatctttttttttcgaggagcttgggttatcttgttatgtttcgcttctttatacactgggtttctcgtttgaaaaagtgtcgggtatctctttgttttcctctccatggtcgatcttcagaagttctttggagacttggtgtagctgtcctgttcaaggagtttttccagtttttgcgaatggatcaaggaaggacatcaattttccctcttcctcacctaggcataagactttttaaatgtcagagctgaccgacgttagaaaattgcttctgggcatgtattacaaaaagtcatgctttcggtagttccacaagcttagcttattgttcatgcaagtgccctttaattctttttaatgagcttactgatttttttttcttcctgttgcatagacgaattgcagagctgtgctaaaagttgtctcttt

SEQ ID NO: 90855 - DNA, 981 bp, Eucalyptus grandis
  Intron number 1 from transcript Egrandis_v1_0.021705m (loc us Egrandis_v1_0.021705m.g) derived from phytozome v7.0 (c hr-ID scaffold_90; pos 219503 to 220483)
accgctctcgtcaccggcggtagtaaaggaattgggtctctctctctctctctttctctctcagactcaccgaacacttccttttttatgttgttcatttagatgatcgatcaactgtcatggtttaggttaagaaaaaaaaaacatcataatttaggcatttgaagacagtcaatcctgtgcctatggcaatcaaactaattttatatctgttaactaacgacaaacctggaagcaaatctcaaccgtccacgtaaaattcgtgaattgatctcgtaatgacccatggatgaagttgggaggaaggtaaggttgcatttgtgttttagagtatgtacttaaacttatatgactactgattagggtgcttaaaataaattatttgtttttacaatttccattttgtgtgtgtgtttttaattttggaatatctattatagcaaaatgggtatagttgcccaacttaggactatccgggccagaaaaattcaagtcaggcatgttagatagggctttcaactatagcaggtgcttttgaatctgattatattcgatttcatagataaaatgctagacaactaatttcatgatcactcaaaactttatatgacaaagatgatgagagatcaattacttcgaggattcgtagctggataggctggtttatgcatttttgtttttttatttaaagttttgttgtctttagatgttaatagctcatagacatgtcgctagctagtagaatttgcattctccgattgtcatgatccagtgcatttaaaggctttaatcatctgttagacttcaattgcctgtgcaatcaaatcttccgcacattccaaggtatcacgtgtcaacttcttctattggcaaagaagaagggcttgatctgttctcgtttgcaattacaagttggtaaatggtcataatgtcgtcccgtgcttaggcgtgctattgttgaggaattagcggggcttgggg

SEQ ID NO: 90856 - DNA, 981 bp, Eucalyptus grandis
  Intron number 2 from transcript Egrandis_v1_0.022684m (loc us Egrandis_v1_0.022684m.g) derived from phytozome v7.0 (c hr-ID scaffold_11; pos 26444522 to 26445502 reverse strand )
gcatcaacatcggggtaatttgttaatcgttctaactgattaatcgctaaactaatggtgaaaagcattatgatttcctctcttcttttgagcatctaagttcctcagtttcgttcataggtgattttccattgacttttaagtcgaaaatcgaatgattttcctcgtcgagatatattgttatgaataatgtccaagtgaacttacgacttcttttcaaaaaatttgaaaatttaatgagtattgtgaattagtgagtgtctaaaagctgacatctaggccccacgtcattcactttacaccaagatcggaaagtgatgatgcagatgagtcaaaaggaggggtcttgctggagaattgcatcaaaaaagagaatgctatataattgatggatgaagtgtcttttgtttttttcttggccaaaagcatagtgatgcttcacatatgtgtttggaagaagaataataagaggtgaaagaaaatctaggtcatgaaaatggagtgaaagaagagaaggtgcagaattagacagttttagtaggactcatcgcattcatgaactatgcacttggtacacttgatattatatcgactgatttcccaaccttaacctacccatggatttaaatatgcatgtaaatgggtttttttttttgtgtatttagaatcaacaaaattatgataaggtttcaatatcgagttacctaaatttgtgacatcggccacacatgaatttatttaatgtatttatcctgaaaacaaaaataaatatatatatatatataaagttattgatatggccttgggtaatgtgtgtgtgtgtgtgtgtattgcatctctctcgctctcagtcctcgaatagacattgctaatgtatgtagaatgaagttatgcttggtaaacgggggtcggttgcatgaaagatgatgaaacgattgatgtgaaggtggtttacgaggaagaagtggggaatctgtccgt

SEQ ID NO: 90857 - DNA, 682 bp, Eucalyptus grandis
  Intron number 1 from transcript Egrandis_v1_0.019832m (loc us Egrandis_v1_0.019832m.g) derived from phytozome v7.0 (c hr-ID scaffold_4; pos 33865517 to 33866198)
ggtcagcaagcccaagttcgaagtggagaatcttggtaaatgctcagaaatgtggactcttgttgcatgcttctattgttggttgtgatttcgagcctgcactgaagtggcagctcgatggttttttctttttcggtttgatgttcagtactgccatgccaagagttccaagagattagcagtgagaactttttctgtgtgtcagcttcatgttcagaggtgttttttcctgtagaagtgggacctgggattgtttagatatggagattttaatggctgtggttgttcagcaagaacggtgagtaaatatcgtttcttttttctgccttttccgtgagttgggttaatagtgaaatgtggagaattttgagctcgaagagtggggaaagattctggacgtgcagttgtttggcttatctgaagctattatgctataatgttcttcttgttgatctcaagtataagtgatgagaattgctgatgttcttgcgctcaggtctgccagaagttttaggtcgaatctctctcttcttaattgaccacattgcacagagtgcaaggctttttaaagactctttttacgtttgtaaaggctttatctgttccttgtatcacaaaacatcaaaatcattttatgaatcggattatggttgatcacatcagaacttgattttgcaggtga

SEQ ID NO: 90858 - DNA, 961 bp, Eucalyptus grandis
  Intron number 1 from transcript Egrandis_v1_0.015092m (loc us Egrandis_v1_0.014341m.g) derived from phytozome v7.0 (c hr-ID scaffold_12; pos 170258 to 171218 reverse strand)
tcactcaggtacctgaaagtcgagagcagcgccgtcacctgcggatttttcctttttttgtttgggaatgagattgtcgagtcgtgttgcttcgattgccggatgcttagcttgttagtttatcgcgcgttgtttggagattcgctttgcgattcctcagtttctcgtgctcggcggaaatggattgagagcgagtttgcgtcttgagtatcaattatcatgcgatattggattatcagagagtctccgtttcacagtagtgatagtggttctggtttaaggatgatgtgaaatggagaaaattgctgaggcttcatgttcttcgtaagtaatccggcagattgcagtgttgggcgttagacctgcttaggatcatgttgtcgtgtatctctgtgtctgttaaattaggagagttgaaagtaattggaaatgaatgttgtgacattgagtcattgatcattgttctgggaagattcagcccagcgctttcctctctgcaaagacgtgtgtctcctttaagaagtgtattacagttaaatttgtgcttgaccaatcagcagcaggctggagattattaacccttttctttcttggttgctacactaaaattgggaggatagtgaaaatcctccgttttttgttgggattggcatggtgcctgaattggtttctgggtgttttttaaggaagtggaccttggaggaggtttttgtacttctctgtactgtatatctttgctgtctgcttcagtgataaatttttcatctcttacttaattgcaagcttttgatctctctatttgtttaagactttggaagtgtctactcttactcaatctctatctctcttgtttgtaagatcattaaattcgtcttttgaaatgactttgctcaactggttggcttgtggcacagctcattgggagaacaccaatggtttacttgaataatttggttaaggg

SEQ ID NO: 90859 - DNA, 444 bp, Eucalyptus grandis
  Intron number 1 from transcript Egrandis_v1_0.053953m (loc us Egrandis_v1_0.053953m.g) derived from phytozome v7.0 (c hr-ID scaffold_148; pos 20039 to 20482)
actgcaggtttttttttttttttttaaatttgtttttgcatttccttcatcctgttttgcaaaaatcttggaccttgtggatcattatgtatgttctttattaaacttaattctttgattgccatattggaatataaagttgaacgaacatgagtcagtggctggttctttcaggcatatctaggacttcgtttgatttaattgttacacataattcttcctgtttcacacttcttttttttcttttttaaagaaaaaaatggaattgaactgaagacttcatacttgagaaaattaatatcctgagttttttcttcttcctctcctatgtattcatttctttgaaagcaaatgctattggtttcttgtgggcacgttgcatactataacctttgactaattattgcaggccagaagatcttcgaaggtcaattgggcaagttt

SEQ ID NO: 90860 - DNA, 728 bp, Eucalyptus grandis
  Intron number 2 from transcript Egrandis_v1_0.053953m (loc us Egrandis_v1_0.053953m.g) derived from phytozome v7.0 (c hr-ID scaffold_148; pos 20449 to 21176)
ccagaagatcttcgaaggtcaattgggcaagtttggtgctcttaaggacatttatttgcccagggactactacactgggtgagcaacatcagccaattacgttaatgctatcatatagtagactttggtttcagaatcctttggaagcttctatctgatacaatttttctacttatctccattttgagttcacaagtttcatgtttgatgctgatttaataaaacttaacgagtcttttatccatgcatctgaaaatttctgtgtcataataattcaaatcaatgttctccttggattttatttgcaaggaatttgaatacatgattcttattcacagtaaatttgtagaaatattcaagagcttgtgcatcgaaatgttttttcctagtaattgttttactcagtttgtcttctttcactgtttacattttggtaaaattatcttcgggagattgactcagcatgctaaagggttcatttttgcaaactttaatttggatcagagggcagctttctgtgttctcctttgttcaccagttgggtgttttattgaagttgttgagatatttacccagtgaaaataaagttttaaagagatcaatcaagtaattagagttcatttgaagatgatgttaatggtagtgaagagtggaaggaagttgggtttgaatacattgagaagatgttccaagtcttgaagaatatcaagtcatcttaaaactgacac

SEQ ID NO: 90861 - DNA, 846 bp, Eucalyptus grandis
  Intron number 1 from transcript Egrandis_v1_0.011589m (loc us Egrandis_v1_0.011589m.g) derived from phytozome v7.0 (c hr-ID scaffold_6; pos 43346444 to 43347289 reverse strand)
gcaccgacgttcccaagacgcgcttcaggatcaaggttcgcatcgttgtttttctttcgtttcttggattctggtattttttaggattgatgcgtctttctatgttgagaatatttcgcaatgtgcttttttggggcgtcggtattgttttgctgtttgcttgaagagtgcgagcgaatgaggatgtgatttaggaaatgctggtgtgaattagcaagtgccgaatcttgacaccatacagcattatcatttaccttgttgagtttgagaagaaaagtattttttttggtcgattagaagaaaagtatttgaaatgtagttctttgagtgcgcttatcacattgttcatgaggtttgaagaaggtgggtgccggttcaatggtttctcttgcaagatttcgaacttctactgctccttgtgacggctctgtgatattacttgtatttctttctgttaaattctaattgtttgtttagagtgcgtgtgtgtgtgtgtgcacgtgcgtgcgtaaaattacctttctcactttgagtgactaccattcaaagtcttgtgagggaaaagtccaattggtaaaccttcgcattgctgactgttcagtaaaattttgtgtactttcaaaagaaaggtccctcccaaaacagttatccagcaaactgttatgacactggttccatgagaataagaggtttacaatctataaaaatccatacgctcccaagccccagtactctactatgacctgaaatggtctttttgtgccttttctactgttcatatcaaagtggctaattcttgctgcttttcatgctcatttaggctgggaaaactttaagtgcaagaaa

SEQ ID NO: 90862 - DNA, 532 bp, Eucalyptus grandis
  Intron number 1 from transcript Egrandis_v1_0.022128m (loc us Egrandis_v1_0.020644m.g) derived from phytozome v7.0 (c hr-ID scaffold_4; pos 38899786 to 38900317)
tcgccctggccgtcttggttctgttccacggcctcgtgagcttcccctgattcttttgcgtagtgattcgaggctgttttttttttttttttttgaattatctcttaatctgagtatggaaaagaaaagaaaaaagcctgcttgaagtgtgatttagaatttaaaggcggaaagttcgatgcttggtttctttaaacggattttgttttttgttggggttcttcccttggattttctagaggcttattgtttgctggatggaattcttggttgtgtctgtggagtatcatttcaatttgtgcacacaattgttttgtctgcaagtttccggcaattagagttcctattgcagttattagtcctggattctcgagaaatgagtacttttgtgaggaggctaattgcctgttgttgatcctgcatgccattttcttgccaaggatcgcccaaatttactagagcttgttggctattgattatttttgtttgaaagaagactgaaataatagaaattgatgtaacgcagttggtg

SEQ ID NO: 90863 - DNA, 920 bp, Eucalyptus grandis; identical to SEQ ID NO: 90348
  Intron number 2 from transcript Egrandis_v1_0.024234m (loc us Egrandis_v1_0.024071m.g) derived from phytozome v7.0 (c hr-ID scaffold_11; pos 958972 to 959891)

SEQ ID NO: 90864 - DNA, 969 bp, Eucalyptus grandis
  Intron number 1 from transcript Egrandis_v1_0.036088m (loc us Egrandis_v1_0.036088m.g) derived from phytozome v7.0 (c hr-ID scaffold_884; pos 13715 to 14683 reverse strand)
cgtagtttttgcgcaaattgtcgagttttgcggtaagcttggatgtttttgggattttttctctcggcgcatcgtgtttggatcttttgtttattgtttcaggatctctcatttgttcgtgctttctcgagtcttgggcctttcgaatttcgggtgaatgagtggggtcggtggttcgtattggtggcttgaaatttggggtggagggaatggaggaacgagtcgctttacgtgcgtccgctgctgtagttttgggattggccaagcttgggcttgtcttagttgctgttgaggtggaatgagtgttagctaattgctgcaattgcttatgtctattcggttttagtggctcggttagaactttaaactattcgttttttgtttcatctgctccgaattggcttttgggtaggttgtagggatctgcattggtgattgctgccctttggaatcggtaaaaaattttgggttgcttttgttttcccccctaattgatgggaaatcccatttgtagtgatcgggaatctgaagaacatcaaagggttatcattgactgtaccctgaatggttcttggtgctcttaaaagagaaacccaaaaacaaaagaggaatgtattgcgtagttttaacagtgaagtatgttagtgtgttaaagttcttcttttcatgcagtcttgcatgtaattgtttcccgaccatgatattgcgagtaattcctcatggaaaaggttgggttcatgtgtaggtctgttgttgtgtcagctggtcttcttaggatttttgggagggaggttgttgagcctcctttggttgcttcaagtagagagcaacagggaaaagtgagaaattcgctgttctttttagtctctggctgctagtcccgaaggtcctgtttcttggagtattttgacttatttatacatattttttctagggttacttccaagcactattctcttgtattgaggg

SEQ ID NO: 90865 - DNA, 838 bp, Eucalyptus grandis
  Intron number 1 from transcript Egrandis_v1_0.021724m (loc us Egrandis_v1_0.021724m.g) derived from phytozome v7.0 (c hr-ID scaffold_11; pos 30521646 to 30522483)
tcaaggtcactgtttggaacaggaccctctctaaggtactctctctcatgtgttcttgcacgtctcttcatcgtgatttcgtttttgggtggatggtgtttttgattctttcgttgatgtggagctcgttttgttgcgattgtgttcttgggtgatgttttatcgtcctctttattgtacatccagacttctgacgatatcgtctggctgatgaatggccactgtcctcttcactgagtgtttgatcgtgtaatctggtgaataaaagaaagaaggataaaaaggaatcgaatttaccaaacggtctaatagaagagagatgaggcttaattaattgcttctaaaaatcgatttttttcgccaaaaatttaccgagtgtttgattttgtgctgattattgaatatactgcactggtcggaatggattcacataatttgattggttcgcagatgtgtaaacatttgtaaattgcaatcacgggtgaggatagaacagtgggatgaaggaaagtggcgacagatgatgtgtataaatgatcatcttatctttgcacttaccccgctgaagtcttgctctagttctttatctagtaagtggatggggaaacttgaaagatgagggtgcttatgtgaggatcagtgtcgaaagttaactgatgaaagttggctccaccggacttgattggatctgcacttatcatattgatttatgatgtctggatgatgcatccagcatcatctgctttacatttcccaaatctcatcaaattaatttactggggagttgcactctcatgcagtccttgtttcgcttctgatgcatttctgtttcagtgcg

SEQ ID NO: 90866 - DNA, 876 bp, Eucalyptus grandis
  Intron number 1 from transcript Egrandis_v1_0.034327m (loc us Egrandis_v1_0.034327m.g) derived from phytozome v7.0 (c hr-ID scaffold_42; pos 62872 to 63747)
tttctaaaggtctattgttttgaaggccaaggcttagcataaattacgctatggaggtcgttgaattctgctaaccttccgctattcatataatttcgtttgttgatgagacccaccactcatacaaatgtcccaagttgatttaatgaaacataacattaagtacattccactcaaagatttactccttgaatagaaaaaataattgatcgtatacacggatttcagggtgttgatccttcaagacataattcttcggcatattaattaattaactaactttgactgaacgagtgaaaggtagtctcaattcttattcttcatggacacataaaataatgcacatgggaagatgggaaagatatctttagagattaatggcacttggttcattttctgcttttgtattttacttcttctttatctaaagttgtgtgctttacagataatattattcattttctaaattcaactgatatgaaattgcaccaagaaatatggagaaaggacattacaaacgagccttcataaggaaaatgaaatttcaagctgtcccgatgacatcgtttttaactaaatttacattgcaagtttacaaagatagattcctcaaacaatttcattgtccatgaaatttgatggtccttcactttgacttctctatcaactcggctactctactctccaacatcctcacaccttgcatgagccatttgggccttcctatttcaaatgatatgtatgctatcgaaatcccaattacgattcctgatgcatagccaatccacactattttttgtttgaaccatttctcatgcccttcgtggtcgaaagttaatacagatgatggtggaggaggttgagtatcgccagggc

SEQ ID NO: 90867 - DNA, 768 bp, Eucalyptus grandis
  Intron number 1 from transcript Egrandis_v1_0.016674m (loc us Egrandis_v1_0.016648m.g) derived from phytozome v7.0 (c hr-ID scaffold_4; pos 36531681 to 36532448 reverse strand)
agggtccggcgcatcggcgacggaaggtgggaattccggcgccccctctttttctctgtccgtccgcgtcggtttctgcactcttttgctttgttcagtcggtgcatcgctcgctgaattccgattgggattcgtccctccgcgggctccgaatcggtggtggttttgccccgtcttcgaattgccgttctctctctctctctctctctctctctcgctccgtctctcgctcgctcgttgcttgattgggttcttgaatgtcggtcggggtcgatccccgtctttcggtttttcgattttgtgggattttgcgtgttgtggaattgggagagaaaaaaaggatgaatttttggtcgtttctttaatgcgattgaatttctcccccgcggagtgaattagattctcgcgcatctgtgcgtgagggcattttgtgaatgatcggaaattcgggaacgagaaagggagcacggcctagtgtttgtggtgtaacaaaattacgaacttatgggggaattttttgttcggtttcgactccaattttctagattttcttttacgtacagaggtgtgaactctaaattttttagttttactgtactatgttgaattataaaagtaactataaatgttgtgccttgatgcgttcggtgatctaaatgtcctttttttttttataaaaaaaataaaaattctaagggtgatttgattgtggttgattatgatgcttaggtaggttttgaggttcgagaaggcatctatctggagctt

SEQ ID NO: 90868 - DNA, 716 bp, Eucalyptus grandis
  Intron number 3 from transcript Egrandis_v1_0.011802m (loc us Egrandis_v1_0.006385m.g) derived from phytozome v7.0 (c hr-ID scaffold_6; pos 43735841 to 43736556)
tcgaacttgcctcgaccagacctcaagcaggttttaattcgttcgcatcttgaactcctttaggttgtttcgttcacgacgcgttctttttttccgccgctaaagtgcggcgatcctctgctgttttcgttatgatcagagaattacgtagttcaatttgtggaattattagccagttgtaacccaagtggcttcttgattcacatcactgcgtgtcgtcgttcggttttggagatttaattgatatgaatggccaaaacagcaaatgggttgcggatctctctctcttatatttatttttgtttgtaaagtatcctgaaatggtaaactatacctggggagaataacaggttattgatggttgataacttgctatgcatcatgaagctgtaacgtcagtcaaattatatgtcgggtgataatttcttgttaggtttgcatcttttcttggtgtacggtggaagataaagtcctcgttgaaagatcagcctccatgaatagaaagaatttcatttgaccatcattgattgctctagatccactttactttttgtaggtgtggtttcttaccctcgaatctgtacttacatgattcttgttttggaccacagtctgctctatttttttttttttttctgcatgaacaattcaaactcttttcatctcttgttttctcatcaggtgtgggcaattgcagattccaagcgacagggttt

SEQ ID NO: 90869 - DNA, 1046 bp, Eucalyptus grandis
  Intron number 1 from transcript Egrandis_v1_0.042358m (loc us Egrandis_v1_0.042358m.g) derived from phytozome v7.0 (c hr-ID scaffold_9; pos 13640283 to 13641328)
ctcccttccttcccccgcccccgcaagcctgacgtgtatgtatctctcgcgcgtgtctcttgtttgttttccctctcttcttttctctggatcgttgccaaaatctggcaccgtgggaaatgttggtttttgctaattctgttctgaggccacggctgcggttagggccggcaatgagatcacggagttactgtggtagaacagccctatggttatgtagagccagtgattggtcaataaattagagcctcgggtagccgtcgccaggtctggcaaggagcctcgccagccactagcgaggtcgacccttgccttggctaggtgaggccctgccggatctggcagggcctcgccctcgccaatggtcggcgaggttgaccttgctaaccctcgtctccggccggcgagggcgagcctagccattggccggcgaggttgacctcctcggccctcgcctctagctagcgtcggtcggccaagggaagagaagatgggaaaataaagaaaaaaaaaagaattcaaaaattcaaaaaaatatttaaaaattcgaaaaaaaaataaaaatatatttaaaaatgctacgtcagcgttcgccagacggccggccaattttggctggatggattgaagtggcacaattgtaaaatgtttaggactaaattggccaaaaaaaatagtttaggactaaattgacacaattacaatagatttatgacctttttggtaattcttccatcaaagagggagtgatgcattattttaaacatagctttggcctgtaaaatcttataactggccacctcttttcattattctcgcaatatcatttgaatttgcattaattttgcagcgcgagacatgaagggcaaaacaactggagcgaagatgatgatcaaggatgccagccacgacgagttgccttctccaaatggcgaccagggctgttaaagaaagcaagcgaactatgcactctttgtgctgttgagatgccattattctcttctatcctagcggcaagcctttttcctttggacacccatctgtgg

SEQ ID NO: 90870 - DNA, 358 bp, Eucalyptus grandis
  Intron number 2 from transcript Egrandis_v1_0.017793m (loc us Egrandis_v1_0.017793m.g) derived from phytozome v7.0 (c hr-ID scaffold_4; pos 23820592 to 23820949)
cggagtctctgctctggactatcttagcgctcttggtaagaattgaaactgcattttactttcgaggatatgagttgtgagattgttaagaatatgtcatgccatatttgtctgggcctatgagtagaaagaaacgaacatctgaatgcatattgtctatgcagactctttttttttttttttttttaccaatatcttcggatttattcaatctcaatcaaagatttttcttatcttcgagcaggagtgacacggcattgctcgttcttacgttcttttatcgtgtgtttgtctaagcaagcccttgtctggaataattgtaggaatcccaggatttgcagcgtggataggaataacg

SEQ ID NO: 90871 - DNA, 726 bp, Eucalyptus grandis
  Intron number 1 from transcript Egrandis_v1_0.003517m (loc us Egrandis_v1_0.003517m.g) derived from phytozome v7.0 (c hr-ID scaffold_6; pos 39712468 to 39713193 reverse strand)
gaggcatgtagagcatatcctttaccttgaagtggggtccatcccttccctcaaattttcgcctatctgcaaaaaaataaatttagaaaatccgcaataagggccatttacaacacccaacaataatatattaataattgcagttaaccaccaacatattattcaaatggcaacaagggagcaaacaagttattgatttgtcattaccaactgcaacttcttcctctccgtcgccatcttctttcttaaaaattcaaagccaagtcgtcacaactcgaccttccctgtccatgttcttgtcaaatgccacctctctctctctctctctctctttctcacacatacacccaccagggccacagcccaccttatgggttgatcggtcaaacccaacggttcatcttctagttatgcagttctctttctactcgttggctgtataggtcgtcttcttttcgcagaatttttcatgtgagttttttctcttccctctttgaaccgatatgtgtgcctgcaagccttcacgctttggtaggagccttctcgtcgagtaactatggaaatagagacccgtttgagagttgaccatgcgctttcaattagtcagctcttatgtttccatgaaaatatcttctgcaacatgtgccgttgcagtgttgattccggtaattacgtgatatggaagcgtgacagaagctgaaaaggctacaagcaaccgaggaggat

SEQ ID NO: 90872 - DNA, 974 bp, Eucalyptus grandis
  Intron number 1 from transcript Egrandis_v1_0.021283m (loc us Egrandis_v1_0.021283m.g) derived from phytozome v7.0 (c hr-ID scaffold_6; pos 11813007 to 11813980)
ggaggaagttaggcggaggcacgcttcacatcaaggtccgttctttagttttatcgcgtcgctttggcttggtcactgatcacgagaggctttctggtcgactattatgttgggtttggcacggtggaatggaatggaatcgggaaatgacggggaaaggaatgggctggagtgatgattccaagtcttggtttttttcttggtgaatagtgggaaacggaatggaataaaaatccttgtgtttgagcagcgtgattctggataattttgggagttttgagcttgtggcgatttggtaatgtggagagatggtcgccgtttaacgagcttttgagattttctggtcgattgtcagtgcttagttcaatttgctacaatttgattttgtgataattctgggagatgtgaggttgtatcggtttgttgatggggtctaatggccatcgtttgccagcttttggcagtttctgataaattcttgttaacttagggacttactttgagccttctattttggttactttgaggttgatttttctaattgattcaaagtactgaactggattatatttctatctacttatgttccatttctcatcaactgagctgtcttacttcaatatgtttctagtggatttcgtcacttgctgcggtttcttttctccttctttcatctgcttgtttgtacctaattaagctccacgaattggcggttccatggttggtcacttgagttttttgtgtctaggtttcaagtggttgaagaaggatttaatgatttggttgctcatacgagtatggttgtttcgtttgatgtaaaatcaaattatcttatgggggcaattcccatctgggtgggtactgcctcatgttgatgcttgatagtcctcatttttgcatctggttctgctgaatatggaaactaacgactagctgtagggattgttcatccaggtcagcaaagctcatagctg

SEQ ID NO: 90873 - DNA, 167 bp, Eucalyptus grandis
  Intron number 3 from transcript Egrandis_v1_0.023539m (loc us Egrandis_v1_0.023539m.g) derived from phytozome v7.0 (c hr-ID scaffold_6; pos 16469095 to 16469261 reverse strand)
cccacgactcttactcagataccacttactattctgtaaatttcttttcatacatcaaatttcattatcacaatttaattataggttcttagaaaaaagaagcataattttgtttttactttggtgcttcaggtcagcacttggaaatcgcataagtggtgttccca

SEQ ID NO: 90874 - DNA, 822 bp, Eucalyptus grandis
  Intron number 1 from transcript Egrandis_v1_0.029737m (loc us Egrandis_v1_0.029737m.g) derived from phytozome v7.0 (c hr-ID scaffold_6; pos 41190932 to 41191753)
ccatctctcctcctccatcgatcgtcttacgagcggtactcgtcctctgtccctcaagatcggcgttcttgattcgcatgcacggagagatcgatttagttttttcaatctcattacccgttcttgctaggtttccgaagtactgttgttattcaacctggtctggtcgtggttagctaggagaggcgaataccttcttagttgttcacgtttggagtgctttgatgatgtcgttgtatcaatcagattgtcgtgattttgagttggttcgaatcgaatcgtctgcatttccttgaaagaagaacaaccgaatactgctaaatcgagtgctgcgtcattctccgggacaagtgttgttattatttttcttttctttttttaatgggccctcaatggtggttgaccgagctgcgcgaatgaaaccgcctcctctaatgacttgattggaagttttgcaagtgtagtgacctgattatgaacaatgaagaagtggtctgagtaactatgtaatttgtctaagctgaagttacatgataaacagctgttttccttcgaattggtcgcaacttgaggttgaatctagctttacagataggaatagttggtatcaatgatgaagagacaatcagatatctatgggcggataactaccaaattgtatcgtacttcttatatattaaactatgtattgcaagagccagccaatttctttctcctcaagtgccatatagtttcttggccaagcctgcaattaaatttaggtagtttaaaattgttatgtggacttttcttttccggcagagcttgatcggttactggaag

SEQ ID NO: 90875 - DNA, 935 bp, Eucalyptus grandis
  Intron number 1 from transcript Egrandis_v1_0.016491m (loc us Egrandis_v1_0.016491m.g) derived from phytozome v7.0 (c hr-ID scaffold_9; pos 25242708 to 25243642 reverse strand)
acgaggtggttcccggagtcgtggagagccttaaggtacgggcaaagtctgttctttgttttcggcttgtgtgaacggctggtgttcttgttgggtttagttgtgtaaagtcattttgatatgctttagtgagtaacgacgactgagtgacgatttttctgtggctagtttagtctcttagaacggagacatgtttatatgttgatggattcacatgtgaaacatggcggaaaattttgccaaattctcgggtgctcgtgaaaataatgctggctgagaattgagaagcatactgctcctgagaaatcaagtaggttgctgctgcaaaattgtgggttcgtaagttgacatttccgaattgtgtactccctgcgtgttatgaatgggtactgttagaggtgccgcctagcaggctaagctggttgactgatggcatggagtgttagctgtcaggtctggccggctggaatgcggggattatttttaaagggatgagacttgcatcattttactaggataaggcctttgctgaaccgatgattgctcgtgacttgcctcaatgatgttctttaatgatgagaaggatgaagaccaccgacagttaaagcgttgatgatgggatttttcctagacagatagaacttcaaagctttattgattggtctgcttctacatatgttgccgttgtgttttgtgtcactaagcacagctctctcgattgtaagtgtcgattacttgatatgcaatctgttatcagagctcccatcaaatactatatgtttctgagtcagattgttcctctgccgtcggggtgtgtgtgtgcgtgtgcatgtgtgtctgtgtgtgtttgttgagttaaggaattttgtagcctctgttgctcattgaatgatttgctaggtgattacaaagttctgctcagaacgcattgcaaa

SEQ ID NO: 90876 - DNA, 343 bp, Eucalyptus grandis
  Intron number 1 from transcript Egrandis_v1_0.038828m (loc us Egrandis_v1_0.038828m.g) derived from phytozome v7.0 (c hr-ID scaffold_12; pos 746964 to 747306)
ctgtggaccgtcgccgtgccggagggtagtggctggtcggggcagggtcggaggtggaggcgcaggacacgccgaggtgctttcggccgacggggaagtgtctaggatttaggagtcagagaagagggaaagtagtacatcagcatggacggcggccgcgttggaggatgggaggagtggaggtcttaggttttgaagtgagatgtgggggcttctggaattttctgaattttgttttttttcctgcatttttattaattttttggatttatcattttcggaaaattggacgatgaaactggcggggataatctggaaattacccagtttattcgtattttaa

SEQ ID NO: 90877 - DNA, 870 bp, Eucalyptus grandis
  Intron number 1 from transcript Egrandis_v1_0.008804m (loc us Egrandis_v1_0.008804m.g) derived from phytozome v7.0 (c hr-ID scaffold_6; pos 35887798 to 35888667)
gcccgagaggatctggggaaagatttcgatcccctgtaagtcccccttttctcgttcatcgctcgcatctcttgttagggttcttcctgggttcctgatgtgatgatgaggagattgttccttccctctttagctgggagctagaacgctttgtttttgtatgtcttcggggggttctgtggaacgtgggatttttgtgctgtttgagctctgtgaagtgttttagctgtttcgtctatcgatcttgattatcatgatgagttgggtcgttctctgggtttggtcaccgccgccagcaccgtacggatttttgttaagatttattttcgttttcgaaatgaaatttggggtgtcctaagtgcttcatggacattagaaggagttgctaattttccttgtaattttgagtttaatttaattctgttatttgggattatgagtatgaattagaaagaaacctgggacgcatgatgtggaggcgactcgagtgcaaactacactgaattggagggtgcttcctgtgcttcagagggttgcgtaagttagagatgactggtgatttgtcatggggagatgcttgttttttcgctatgattagttgatttgtgaaaacgcgcctggagaacactgtgtatagtcaaatgtgtgaaatgaattgtggatcaaattcttgcttgcatcgcccttccggcagaatgttattctttatgaaccccggatcatatgtttaaatgggattactattggggcaaaaacatgatctagttcttttgtttgtattgatgctttttcaaagacgattttgcatgcaatttttaacagaaattctctggtggtcagcttttatttggcggtgatcttcgattcgtg

SEQ ID NO: 90878 - DNA, 1011 bp, Eucalyptus grandis
  Intron number 1 from transcript Egrandis_v1_0.007364m (loc us Egrandis_v1_0.007364m.g) derived from phytozome v7.0 (c hr-ID scaffold_6; pos 15516623 to 15517633 reverse strand)
ctctacaagtccggcttccagacttgggagtacaggttagccgaatcggagctccagccgaacttgtgctcgtgctagcttgccgtgaaatgtggagtgatcggatgtgtgtcgtgcttttgttagtgcgattgtcgtgtaggcgtagctgctgttttcgtgagtgttgcggcgagatggtgtttaagttagcttgtgtcagatgattgaaaaacctatttctttggcctgcttcatgcttgtgtgaactggttttccagccttggcatggatgtattgggattgtttatagcagtatgatttgtgctgcgtctgctgttcaggatttgctggtgattggtgtgttaagaatgaaaaagcacagagcttgtcgattgtgagtcacgtgtgaattgacggacgtggttggatgtgttcgagttagcttcagtcaagtatgaagtgtaggagattaaggacttcatctctcgcaattttgatttgagttttgtactgcatttatgctggaagaaacaatttggcaacctagaatggagtataatagccgaggaacagcaagagttacctgtttttttggcctaggttggagtaagatgagccgaggaacagcaagagttacctgtttttttggcctaggttggagtaagatgagctgaggagcagcaagagtgacgtgtcaaacattgagccccacttgtgcatttgcaacagagacattgttccttttttcttttttttttggtggatagactctactttagtatgattgttttgttcttttggcaattcccacctcatctaaatttgattgaccatatacttgggcaaaccttttctcttgcttttagtgaagcgccctttcttacgctctttctttgctggatcactatggtgcttgacctaatttctacgtcttcaataatttgaatcatttgctatacttattggtcaatctcctattactttctcattgcagttctcaattcgcactccggtcatatttgtacttaa

SEQ ID NO: 90879 - DNA, 737 bp, Eucalyptus grandis
  Intron number 2 from transcript Egrandis_v1_0.030531m (loc us Egrandis_v1_0.028324m.g) derived from phytozome v7.0 (c hr-ID scaffold_9; pos 23288397 to 23289133)
gaagcaaactgctggcgaactacgtctccataaaggttcttgttccccctccttgtggtttaacatatatagctttgcttctacactatggtctgtcaaagtggccccagcactagccactgtttctctattagttgtttcctgcatttgaatacgtggcttagagtaaagatctgatgggtcttctactgtcttatcatcttatacttttctataattgaatctattgatgtcacaagccacatttctgaccatgaaaataatgggggactctgtttttgccccttttccctaattcagatttgagcatgtttattatgtatcttctttgtatcgtcaaagttatggctgtctcgtgctagaaatgggttacagaaccattatatactgctctcatgatttgcaaatcttcagttttgtataaggaataagtgggttctcttcggagagagaatgataagtagtttatacttgtaaccttacctggttctgaatgtttcttactccattccaagagttttgttttttggtcaagcattccaaaattttattgagtttgagcttggttaactgtctttggatcatattggctaattgtttggtgtgcgaggaacgatattagtggttactttggatctcgggtgccatatttagctgcaaatattcatgtgttaagctaattttgggatttcgtttttgcagatattagtgagcttaacttaccaaaaacttgtacc

SEQ ID NO: 90880 - DNA, 917 bp, Eucalyptus grandis
  Intron number 2 from transcript Egrandis_v1_0.012556m (loc us Egrandis_v1_0.012556m.g) derived from phytozome v7.0 (c hr-ID scaffold_6; pos 47982096 to 47983012)
gtgggatatcctcggaccctattttggtgctacaggtgtgatttctctttttaattctattcctagaattggttcattcttatgctaatgaaggttgacttaatgtggggaggatgaattctcatgaactcttggtgatactcatgaagattcaaggtcagtaggattatcagatagagattgctgaaatgatgatttgtgattctacaaccgcaattgaagtgacaacaaaaattgatcagttaatattgatgatggataatttcttacaaaggggagtctgtttctagcaacaaatgcgaacgtacttaacgtaaacataatttgtttttaacgttaacataatttgttttcaagaaccataggctcttgggtgtccttgtgcccatgtgcttctcatcatactttgtgagcttttgtccggagagtacttttgaaacctcaaatggaagttgaaccttgattttgacagttatgttcaatgctcagagataaaatctctcccattgaaaagtacaagcgagggatccaagtaggtcatcttgtaccaactttttggtttgttttagctatggttttatcaaacatcttaacttaaaacattgaagaagacctttgtctttgactcagaccagagatagtacacgccagcaacaattaagggtttcagattggtgcctttagtttgcttctaagttgagagacctggctgagcgttcctgactctaggaattcatgcataaaaaacagtccaatgagcaaattgatttatcaagagtaagcgcttggaagctaatgtttgctagcagttaccagttcatcaagtagttgggttcaaatcagatttcagtgttattaatttcgattgtttcctttatataggttacatacttcaagtgtgggggagtttcgcttgg

SEQ ID NO: 90881 - DNA, 697 bp, Eucalyptus grandis
  Intron number 1 from transcript Egrandis_v1_0.031351m (loc us Egrandis_v1_0.031351m.g) derived from phytozome v7.0 (c hr-ID scaffold_9; pos 18236776 to 18237472)
gttgtcatttattagtaggctacaagggtatacttttagcagctatgggcttagaaggaaacaatcaaatatatcaatttgcataggcagttgtgggacaagaaacatacgagacataacactggtttattagtatgattacagaagatttaagaattatagactttacaaattcaaagtattggactttcttgtgtgataagcaaaaggaatggtgcaagcactagaaatttgatgcctaaagcagaacatagattttgcttgagacatctttatgagaatttcaagctacatcacaaaagactagaacttaaacttttgctttggaagactaccatggcaacaagggtatgtgatctcaactttgcaatggaagagtttaagatagttaatgaaaaagcttatgactagttgtccccaaagcctccagtacaatggagtgagtctctaaacaagttcaaaatgcgatgtttccttgaacaactagcataaaaagctttaacaagagcatcattgatgccaaagagaagcctatcattaccttgcttgaagttataagagtgtaactcatggaaatgattcataagcaaggagatgggttggctaactacaatggtatgatttatcctaagatccaggagatattggatcttcaaaaaaaaaaaatcagcattatggattgcatgaaatggggaag

SEQ ID NO: 90882 - DNA, 678 bp, Eucalyptus grandis
  Intron number 1 from transcript Egrandis_v1_0.010864m (loc us Egrandis_v1_0.010864m.g) derived from phytozome v7.0 (c hr-ID scaffold_11; pos 32257140 to 32257817 reverse strand )
ctgatttcctcaagtcccagttggtgattgagaaggtactcactcaaattttacagaaccttggtcaattatcttgaagatctgatgatctatttgcatgtgcaatttttcattacggcgcatttaagtgtattttctccttgctatctctgagatgttatgaagatgtttgttccttcctaagaacaacccacgtctctcgcaaacagcttgatgaatttgtggacattcggttttcttcatctctgtgttgtttatcctggaatggatatttccggtctttcatgagcatctttgtgcctattactgtggatggaatggtcaccttttaggatgtcatgcatgtgcttcttagttccatttattaatggaactcccaaccacaaaatttcatgttagatcagaattagtgaatgattgatcctgctctttctgtgacacgaatatatcagtcccttttgtaaactccttaatgcagagaaccagaaccaagtgatcgtggacgttcaaggcatttgattcatgctacatactggacctctgcctctgctctgttttctctctccatatatatgccatgattgagtttggtctgagattgtttttccatgaagaattgaagatggtctgagaactcttgaatcttttctcttttcaggcttcagatttctggacaaa

SEQ ID NO: 90883 - DNA, 273 bp, Eucalyptus grandis
  Intron number 2 from transcript Egrandis_v1_0.000244m (loc us Egrandis_v1_0.000244m.g) derived from phytozome v7.0 (c hr-ID scaffold_11; pos 22488180 to 22488452)
tcttttgcttccacttccgggaaagtaggagccaggtaattcgtggcacgtgagtcttgcttttactcctattcacgggaaaagagttcatgattagcattgctgcttgttaatttggtttttggtttttggtttaggggtgaggggttagagggtggttagggattagggcctacggtttgttttgatttacattatagctccttaaatgttcttttcctctggacactgtgacatgcttcttgatgctgctgttttgtacaaaaaaggtcg

SEQ ID NO: 90884 - DNA, 870 bp, Eucalyptus grandis
  Intron number 1 from transcript Egrandis_v1_0.010238m (loc us Egrandis_v1_0.010238m.g) derived from phytozome v7.0 (c hr-ID scaffold_2080; pos 3263 to 4132 reverse strand)
gatccatcgcaaggattttggctttggaacggcaggtacgtctcgttgagaatgagtaaaaaacgtgttgccttttctcgctctttgattgctcggtattgagctagagtagcttcgggaccctcgagcttttcctccaccatctccagctcgttccagagagcagacaatttgttaaaaatggctgtaatggagagattgccctgttttaattctgatagggcttgttttattctctatatgtatgaagtgcttttattatgctccttctaagatgacaagagtccacatttcgctttgaagtcgagcgattaagctggtagcgaagttgaatttcagtggggtattttttaatcacatttttgatggacttcttttgtctactttcatgtgaatgggggactttgccaccctcgagctaatttgaactctctgtcacaaatagaaccaccctctccctcccctctcattttccattgtaaagtaatcgtaccaatagctgaattgaggtgcttcgattttgcttgctgaaaatgtccaattatttgcaattgtgttttggagtccacacgtgtgccagtggtgtttgatcaattataatcaatgcatccaagctaggtggtcagtgcatgttcaccactcacaatagatctttactgttggtctatatcttcatctgttcttcctttgccaagactcttttaaattaagttggcatttattgtttaggtttatgtttcttttaatttgaaaacatttttttttcaccgagaacgtactcaaatgtctttatccaactatgtccttcaaattgcggctgcagtattcaaattgtggctgcagttcagttgcagatcacacaagcatctc

SEQ ID NO: 90885 - DNA, 884 bp, Eucalyptus grandis
  Intron number 2 from transcript Egrandis_v1_0.037961m (loc us Egrandis_v1_0.037961m.g) derived from phytozome v7.0 (c hr-ID scaffold_431; pos 35291 to 36174 reverse strand)
atcgaaaggtactctctccccccctccgcactgattccacatttttacttgctggcacagttgcaagttatgttttcatgcgtatccatctgcaatcaaataataattaggagaatattggaaacagcgaggctgttaagagcagtaggtacaaatttatcgcactatgtgatgattattgctgacatccctaggttcgtgaaaatatcctgctaaagggaggttcttaggctagatgtagctgatataatatggtgctgatgagaggtttcgtgcttgaacatgtcatattttctataaaatgggtttgagttgcattagagatggcacggtatacacatactctgactgatacagagatatatttggataagaattttttttctggtaattgcagttgtttatgattggctaagaaccttgactatcatgtccatctttaattagttagagctttgttgagtagcgtcataggttaagtatgatcctggtgccaggggtgagaagtttcattcctaaatggtatgtttcatattgttcattaataggattgcaccaccccatggcttgcatggatagcactacattcacaggcttcaacccatgctgaaaaggtctttggatgataatgttttgctagtgggtgcacttgtctgtgataagtacaaaaaccttaatatgattccgatctttagtatgtaggttgtactaatgtattttcgcatgtgcttactgttcttttttattatttggggtggacctttgtgttttatgcttaaccatgacgtaatttgatttggagattgatagtaagtcttcccagcagtttaatattatcacgaaacttgttaccatttctgtgcagactagggctggattagatt

SEQ ID NO: 90886 - DNA, 566 bp, Eucalyptus grandis
  Intron number 1 from transcript Egrandis_v1_0.037961m (loc us Egrandis_v1_0.037961m.g) derived from phytozome v7.0 (c hr-ID scaffold_431; pos 36424 to 36989 reverse strand)
agtcctgcctcggcgacaacccctacgttcgcgtaacgatcttctccttctccttcttcttctcctctcctccaatcgcacctctcactcgtttgctccgcctctcttggttttgtgttcgccgcctctggatccgttctcttggtttattccgtaggtcggccctagtttcttgtttagctacctgttttttttcccccttcccgaacgagggtttcttgttcgatggattgcgattgtagttgtcaatttgaggtttcggccccttttgggttctggttttctcgagacggcgttggcttggatcactgatcacgaatacgtacgtctcatggcctgtagcatctctttgcgagctcaaaattgtcagccattttcttgactttatattctacctcattaaccgtctgtcatcggcagctcatcctgcaatttctactttttaaggttccttagctgctgggtcgacgtgtctgtaatgcccatgctctgatttgttttcatctgacctatctttctctgtgtgctgttgggcgtatgtacttgaatgcagacgaaggcacagt

SEQ ID NO: 90887 - DNA, 673 bp, Eucalyptus grandis
  Intron number 3 from transcript Egrandis_v1_0.011004m (loc us Egrandis_v1_0.011004m.g) derived from phytozome v7.0 (c hr-ID scaffold_11; pos 18618748 to 18619420)
gagttctggtaagctcatctcactttattcgtgtgctagtttagcatttggccatgaatgaagcctgaacagaattagtcatcaggaaatggcaccccatcactgaggagagaaaaaatctgaatacacactcagctttgcataagtattttgtaaccagtttatcactgggaagtgaggccaataaacagtatcatttactatttagatgtctggtttcttagcgtgacaaagttaactccaacaagcattgatagaacattcctgtcttagacttcagctgaaggtgccttcccacggctggatatggctcaaaagcttctgttatatcgaggacaaatcagttagctgtgctagtatacagggtttaaaattgcacagtggttaggtgtgcgtgctagtgagttctcatgcctgaaatttcatgtccaaatcattaatgagatgagatgctgcaaacattttatccaagtttagattcctctatctatataatacacttcgacattgatccaaggaccaagtcaaaggataggctttttccccttccaaagtatttcagacggttttgccaaatgaactgaatcatcttacttgtcttatcggttttgtcttgaactcattctagcacagacttacttacaaatccgtttttgctgtttcgaagctggga

SEQ ID NO: 90888 - DNA, 290 bp, Eucalyptus grandis
  Intron number 1 from transcript Egrandis_v1_0.023825m (loc us Egrandis_v1_0.023825m.g) derived from phytozome v7.0 (c hr-ID scaffold_9; pos 24506516 to 24506805 reverse strand)
ctcatcatcaagctccatagccttcttggtaacaagtaagtggattgcaaaaacaaatccgattcataatatgtcatgatcgtgcgactaatctgttcctatgataacacgtggaaacacaagaacaagaatcaggagaatgagcacctaacacatctcctaatctgtgttctctaactaaatcttctcaaaacgtgaattttttccccttcacattagattaattcaaatgggttttcctttatattgctacaggtggtctttaattgccgggagattgcctgggagga

SEQ ID NO: 90889 - DNA, 620 bp, Eucalyptus grandis
  Intron number 1 from transcript Egrandis_v1_0.029803m (loc us Egrandis_v1_0.027090m.g) derived from phytozome v7.0 (c hr-ID scaffold_9; pos 11432966 to 11433585 reverse strand)
gtgggttcttgttttcccggcgccgcttctcttttcttggtgttgggtctttcccggctccgtttcttggtcccttcttggtgggttttgccgggttggtctttcttgggtttcgccccgcgccgcttagctgcggtctccgtgatgtcttcttggaatgtgttgggttttagtgggagtgagcggcggtgctgaactcgtgtcgcggagactgtcgtggggggtgaaagaggagaggggcaatgttcagaagctccggaaaatgatttctttcgagggtaccatgttgttcgtttgatttgattgtgatgttagttattcctttgatggcttccgtatggagagatgtaataacgaaacctgtgctgatgttggcctcttttggtttagtctatgttattatgcttgaaaaggtacatcgtttgtttattgaggattgcgtccttttgaagtttctaagcaattagaagaaaattattggaagcactaccagttttagatcccatcacaatagtttaaaagacaaagtgtacgcctagtggactcatggctgattgaccctgattttccccttttcctctgcaggatttgaacgttgcagaaagttagttaggagagca

SEQ ID NO: 90890 - DNA, 920 bp, Eucalyptus grandis
  Intron number 2 from transcript Egrandis_v1_0.038447m (loc us Egrandis_v1_0.038447m.g) derived from phytozome v7.0 (c hr-ID scaffold_6; pos 17969741 to 17970660 reverse strand)
aaagcccttcaatcggtctacgtccctggctggaggtaaagtctgcatcatccataagctaatcgaatctaaatgagctactagcttaggccccatttggttcgacatttgaaatgggcttttgggctctaaagaggtttggccaaatacaaacacatttggtttaattttttgaacgatttgacaaaatacaattgcatctctaaatggctctaagggcctttaatccaaagtagctctgaatgtattttgggaagttgcatcttgggaatgcaagtcccacaatactgttcatcttctttagagaaacgaacgaaagccgacgactaccggcgaaggagttgcccacgccgacgactgtcgcctgaccccgacgactatcgcgtgacctcaagcgttgcctgggtcgcgcgactctagcattgcctgaggtctggcaacctcaggcgacagccgcctaggtcgcgaacctcaggcatcgcttgaggtccaccagcaacaggcgaccaccacctgaggtcaagtcgcaatcttaggcgtcgcctgaggtccaacattctcaggcgaggttgtccggtggccaaatctagccatcaaacattggccgccagtggctagattattaaaaaaaaaaaattacttttttatatatataaaacttaacaaaagtcttttacaaaatgtaatttttaccaaacgacattttaagttaaatcgtttcacaatgcactttaaaattacaatttaccaaacactatttgcattttcataaacccatttagctcaaaagtatttgtattttgccaataacatttgcctaaagccgaaccaaatgaggccttacaaacataacaatctaaattatccaactatttgattctatatatcgtaggtttgtgccaactagtgtgaacaggagg

SEQ ID NO: 90891 - DNA, 315 bp, Eucalyptus grandis
  Intron number 1 from transcript Egrandis_v1_0.004905m (loc us Egrandis_v1_0.004905m.g) derived from phytozome v7.0 (c hr-ID scaffold_4; pos 36964803 to 36965117)
tcgcgcagcttgaggaggagagccaaccgccccaggtgccgccgggctcccgaggcgccacgtgtcggtccctcggccccccgtctcctcggtggatcgacgaaggccactccctcctcgggcgtctcccgcttttctccaaacgacacgtcgtcgcaaaaccgaataaaataaaataatattaattcaaaacaaataaattaaattaaaaaagaaaaaaaggaggaaatccgtcgcctcttccgtttatcctctccgagcctcgacctcacagtcacagccggactcctcttctcctcttctcctccctccgcc

SEQ ID NO: 90892 - DNA, 735 bp, Eucalyptus grandis
  Intron number 2 from transcript Egrandis_v1_0.004905m (loc us Egrandis_v1_0.004905m.g) derived from phytozome v7.0 (c hr-ID scaffold_4; pos 36965223 to 36965957)
ttccaaccgccacttcggcgccttcgccggctcaggtatggctcagtcctttcgccgtccccgccgcggatcccggccggtttcgcgccggacgcggtcgcacgagtcgttcctttttccgctcgtcgcggctgttttgagtgaggaggcgtttgttctcgaggggcgcgcttcggggcttgcgtgcggttctctcgcgcttcctttttggttagttgcgtgcggctctcgtgctggagtgaatcggcttgctgggaatgcggatgcgattgagagtccgacgctttcgcgttcggcgaaggactgtcctgcggacgatggcctcgccgctcgtttatcttccagtagggaaatttagtaacgcgaagttttgatagaagcgcgtccgtggaattcgcgcatcgacggctcgtccgccgtgaatactttcgcatggcgcggattccaagtttgcattttgtaagagcctgagtgtggattttgagatgttgctgacgaaaaggtttagttttgcttctttctaattctagggcttcttagtcgatgcgatcgcgactttttattggttgcgggactcgtaacttattcagctaatgtcacttcggtgtgcttatcctcttgttcatctttaggaggattaaaaagggttttattgtttcggtgtcgtgcgtatcggggaagtttttgagcttttacattctgaggctaattgctgtcagcattggcaggcaagtt

SEQ ID NO: 90893 - DNA, 816 bp, Eucalyptus grandis
  Intron number 1 from transcript Egrandis_v1_0.021545m (loc us Egrandis_v1_0.021538m.g) derived from phytozome v7.0 (c hr-ID scaffold_11; pos 13376378 to 13377193 reverse strand )
cccgtcgtcgtggtcgtcgttgaaatttgctgaaagtgagttcggttgtgtttatttgacccacgtagcaaatttgagggtcgtgcgattttggggtctccggaattgagtcgcaagttggttattttctcgtggaatctttttttcaagcgttgtttcaatttggtctttcggttactcggtggacacggtaatagcatgtgctgttggtggcatttctttgctgaccgttcccttttttttctcgccgggtcgatcaatgtgcgtcggaatttctctctatattgtataatggatgtgggcaagataagtcatgtcatgttatgttatgttctgtgttatgtcatggttgtcggttcggcaagttcgtacatcttaggctcatgatgctgttcgccgaatcggttgaaagggggtgctggcaatatgccctttacggttgttggtgcgtggaacgttgggcatttgagaatgtagtcgaagaggatacttttaggaagtggtcttggtactctggattagcttagggtcagaattttgatctgttgcctggaaagatctttggcttcactatattagagtgcattggggtgttgtcatttggtttccttttgtgccgggatttatgatcgaaagacattgtgtaatcatcgcgtctgctactgattacaaatgggatttattttggccctaagtggacttttcttttaattgcaccgtctaatctatttgttccttatatgagaaaagtaaatggatatgaggtttgtcatctttgcaggaatttatggttgactttttcgtgcttataggaag

SEQ ID NO: 90894 - DNA, 634 bp, Eucalyptus grandis
  Intron number 3 from transcript Egrandis_v1_0.015221m (loc us Egrandis_v1_0.015221m.g) derived from phytozome v7.0 (c hr-ID scaffold_9; pos 6496335 to 6496968 reverse strand)
gctgccctactcaggtgatcatcattaagctcacatgtccgcatacatgaagttctatctgtggaagcctcctcaattaagccagtcactaaaaattcttcaatttattccctttatatgatataatttggcttctagaacctcaaggctgtgaaaatcgacatattaggccgacagctcacattttacatcttaatagtcttcttttaagccctttggtggattattttttggttggagaaaaatcattggtcgaatgagactgaaagaatctccacagaaaggaattccaacagctcatgaaaatggattcaaacctggatccaaaacagagagagagagagagagaggagaaacgaaagacagaaagggggggggagggaagaagagaccatgttcttcaaaaggaactacaaaaagaacgcgaaaaagtacataattgttgataatgcttctaggaaataagaatctcgattctcatcaacatcatttgagttcaattggcttaacacttaccatacgtaatatccatgagataaagaaaagtcacatagttgagttagctaacacatttttttggcaaaaaacactgacgtgacattcagaatagaacaagttcggctcgaccgaaaag

SEQ ID NO: 90895 - DNA, 996 bp, Eucalyptus grandis
  Intron number 1 from transcript Egrandis_v1_0.015177m (loc us Egrandis_v1_0.015177m.g) derived from phytozome v7.0 (c hr-ID scaffold_9; pos 1730571 to 1731566 reverse strand)
tccctctctgcacctccctcttcctcctcctcgaggtattcttcatcaccccgattcacctgttccgtccctagggtttttgccctgttgttggctcggcaactctggtgtgccgttccgcgtcgtggaatagggataggatgatggcttgcgttccgaaatggacagatcgctcgctcgctcgctcgatcttcgttgttctttttggtgtggtttctgtgtgatttagtgtggagtacgcgaaggcgttcgattcggttttcggctggcttatgctgcttgtcttcgtctcgattaggcgctccgaccggtgtggagtatatagctaccttctatgccgtcctaagaaaagtcgagataaacctgggcaagacgattttccttttttttttgttggctttttaatggttttatccttgtccagccatatggatgctgctgttccgtgtaaaatgggaatggacgcagcttagcagccgcacaacagttcgccaagtttaaaacagtgtcgtgatggaaaattggactctcaagtctctttctttaggagaagcaggaccatatttcttatgtgaaactagtgcttgtaattgatttagaaaatctgcaaattcccttctttctttgtctcctctggggaatcccttttcctgcttgattagttgaaattgcaaaactgatcgttatattgaggtgctttttaagttgaagtgttttttccccctagattggcggcaatctgatgtctttgattgactgtgccgaaatatttaggcttatgcatttggggtagcatggttttagaatccgagacctttgttgactgtagataatcgccaaactctgtgtctgtgctctcaagagcaccgcatttggggtagcatggctgttaacttcggtctattagtaattgcaaaagtggtactttttgagttcttacttctcttatgtttctttttacttacctactgatatcatgcctagcaggacaagatt

SEQ ID NO: 90896 - DNA, 1045 bp, Eucalyptus grandis
  Intron number 1 from transcript Egrandis_v1_0.021068m (loc us Egrandis_v1_0.013473m.g) derived from phytozome v7.0 (c hr-ID scaffold_4; pos 23599204 to 23600248)
cctatctcggcacctgcttcgccgccaccggagaggtctgaaaagctcgaatctttttccccgtctttcctcgtcggttctagacctcctgtttttgtgggtctcgatctgttcgttgggcgttgcgattgctgtttgagggaggtgaccgcgcgatttcgatggaggttgggatggagtgtctgattgtgggcttttcctttgtagttgtcgatcgattcgttgtcctttgatctcctgagatacgggtggtcgccttaatttcgattcctttggattagaaaaatcatagcgtaagcagtaatttttgtttttttgtttgtttgtgtgcaatttggcataaaattcatttgatttgggacgatagaataaggtagctgatgggactgtctaagatttcttgtaatatgtgaagttggagagattttgattttgatcctaccaaaggagattggatagaaatttctgtgctttagactttgatatgctcttgtttcttgttagtgtgtggattgaaagaggggttgatagcttgctctaatttgtagatttatttgatgggtcggctgagaatagccggcaagagatttaggtggagaggaccttgttttcatcagttcattgagtgctcttggttgttgcagatggcaatggcaaacatgatatagctagattttgccttttccattttttcatttggaatgttaagggtttctattagccggatcacttatgtaattgtctgtgatgactaatgtgggggtggggactagaacttttgcacagggagaatatgagcagagccaaaactagctgagaagaaaggctgttgctgtgctatcttaagttgatgagaaatcttttagtctgatgcatctctcatattgtaacattcacctaagacttagattcgctccaatgctggtggtaaaatggatgcacgagaaaattgcagcatgtaagttttgaacatcacgtgtctcacctcttgaagctctttttttatgtaggtggccaacgtaaaggttatcaggaacaagcagac

SEQ ID NO: 90897 - DNA, 930 bp, Eucalyptus grandis
  Intron number 2 from transcript Egrandis_v1_0.030435m (loc us Egrandis_v1_0.028893m.g) derived from phytozome v7.0 (c hr-ID scaffold_6; pos 5830107 to 5831036 reverse strand)
acggtgcatttcaagccgctctgggccaagaactggtaatttgttcatttctgtgcctctttgatggagcggagttcgtactcgatattgttctgtgttttatgtttacgtgatgtgttgggttggttgagggacacaccggaaaagccaaaactttaaagcttagagatcacaaatccttagttaataaggggtttggaatttttggcttcttggtttagttgatgcgttgctgttccacttcgatttctattaacggagaagaacggaatcgtgtattagatcgtgcaatggcttggaggtgcttcgactctgataagaggaagaatttcaatagcagatacaaattgtaggggaagaggaagatttcttattcttgggtcgttaatcaggaatttgtgagcattcatgccaatgtttgtgcttctcatgtatgtttggttaggggaaggggggtgttggatcttactgttttgctcttattagcttctaaaatagctactgagagtggcatctttggttcctgggaatttccttttagttttatgatgcaactgtccctgatcttaaggtggatccgcaaattgttaacaccatagatttcagaaggccatcttagatttctgttcaaacatgatccttgatttttatgctatatgtttaattccacgatttgtttgatgtgaacaacagaagtagttgtttcatatttgggctggttcttcatttggcaaagataatgatgctctggaaataaagaggattcaatttttctgtatcttttgtttatcttgctcactcaaatgccctgttactactttgtggaatcaatttgctctctacctcctcaaattttactaaaactggtggctcagtgggaatctgatctttgttgtctcaaatttggcagccctcgttttggtatagcgc

SEQ ID NO: 90898 - DNA, 531 bp, Eucalyptus grandis
  Intron number 1 from transcript Egrandis_v1_0.007437m (loc us Egrandis_v1_0.005758m.g) derived from phytozome v7.0 (c hr-ID scaffold_4; pos 37376821 to 37377351)
tttcgctgcagtaattctaggctgcggtagtacaggtacacatgttcaatgattgtgatgttatccgttcgcctggaaagctcaagtaacaggggaaggagttgttaggatttagatgtatatctttttgtttccttcctattccgtgtctgtttttaatttgcaaatgaaaaaacaaagtccaaagatgccagcttttcagcacagagtcgaaccatgcctatgttttcattcttctttgaagcttttgcttaactgggccaccagctgttattgtctactcgaagtcctgaatttctttttttaatctgcaactactccttctgctgacttttggtttcggtaaatagtcttgatacattcacctgtttctctgtcctttcaaaatagtttcgatacattcacctgcttccttcttgatccctatttaaacccatgagcccaactattgtcgtgccagatttgagattggcttttcttgtctagtttctcaagttctgcttcatgttgaacagtccaagtttggtgaat

SEQ ID NO: 90899 - DNA, 672 bp, Eucalyptus grandis
  Intron number 2 from transcript Egrandis_v1_0.049589m (loc us Egrandis_v1_0.049589m.g) derived from phytozome v7.0 (c hr-ID scaffold_4; pos 30738121 to 30738792 reverse strand)
aagcaggatccttatttgtaagtaccatttgtagtcttttttaccagagaaacctagcccttgcctcaatatttcccatccgaaaaagaacatagtccttcatgctagagaaaaagttcaattgatttcctgatactccacttgtacattggaatccaaatgagatttcccggtataatgcattgtgttatcgcatgatttgtctaaacttgaacatacttgatcgctttgagttgtatcttcataaggatgtttctcttttagactatctgatttcactttggatattttgtttgttttccctcaccagttttatgcagtactacaatgttacaaatgttctcataaaaaatggattcactaaaagaggtggaatgatgttgctacacactcagccaaatcaaataacaaaaagcacgcagtctgcttgactccacgtccattcaacattcacaacatcatagtcatagctcgggtacgaaatgctttattattacatgcacatatgtactaatttgaacctaaaccattgaaagtggcgggtccttcgtataaagttttagtatcccagccaaaactgctcagtttcccaatttccaataacctcgtacgcatcttcgttggcacagatagagagagttccattgcggaagcaggtggaccacttcgaga

SEQ ID NO: 90900 - DNA, 883 bp, Eucalyptus grandis
  Intron number 1 from transcript Egrandis_v1_0.051726m (loc us Egrandis_v1_0.051726m.g) derived from phytozome v7.0 (c hr-ID scaffold_4; pos 29729380 to 29730262 reverse strand)
gcaagatttcggtgtcgctcaagctggcactgcgggcaaaatactgcagttcatcatctttacataaaggttgtttagacgccagaacataagagtttagaatgagaatgttcgagatatttgcttttggtgacccatctaactaaattgtaatgaagcagacattattccccggtttcaattccaaaaggtgcttgccctgctttgcaaatgcttacctcattctcactcaatacatatgttattttgcaatgttaacttcacttatccaaaaataaaataaaataataataacgaaaaacagagctctagtggagctaattttctaggagatttatttcattttgttacacatttgacgtaatagacctcttgaaaaaagttaatttgaagatttagaatttagagttttgcgttttatttccttgagagtcgcttattattattgcagagttattttgggagttatgtatggatctctaatctagagctgatggggaagtactaatgaattagaaattggtgtgattatgtactggagcaattgggatatgcatgcacatgagattccactagaaccttgtcataggtagcatctcttcttcccctaaaagaacgagtcgacaatgattttatttttctttgctacggaattaatatttgctacctatttggagaaaggtgatgctaattagggtgtgttttgtttgtatattagtgatgcacattatcatgtactgctttagtcatattaactagttgttttcccattcaaattttgcagtgcttgtgaatggcctggcctgcaaggaccccaaaacggttcaggcaaatgacttctccttcagtccatcttccaggcaacacatcgaacgcggtcagt

SEQ ID NO: 90901 - DNA, 643 bp, Eucalyptus grandis
  Intron number 1 from transcript Egrandis_v1_0.015252m (loc us Egrandis_v1_0.015243m.g) derived from phytozome v7.0 (c hr-ID scaffold_6; pos 41762492 to 41763134 reverse strand)
aataagccgccgtttcggaagatatagcagccaaggtttggtttgattcttctctccttcttatcaactactcgcgcttcgctggagatcggcgtgcgttttttctttcttttttttttcccatagcttctgagagtttttagctgccattttttaatcttctttgtccgtgatcggtttagcttggctttgctgtaaggaggagagcatcagaactgagcttaacctcgctggttgtaagttgaagaaaactgaacgatgtatctgagcttgtgctttcctttacgttgcctcctcatttggtcatcgttcttcagcttcatgttcagttcctgcttgtggacagtccttagggacgaaatgatttgtgaaaccatagactggagggttgagggtcacttagaattcatcctgaaggaattgtcatgctgagcaatttgtcttttgtttggataagttaaggttgatagtggtaatgatgaggtattaataagtgtagatcagatgctggggaattgatatctacattaacagagtcgtaaaatcttcatcgttgctgtattaggctgatgtatccatgttgattttgtcttcaccttttttatcaggtgtcagtgtggaagattcatcttaacgcgcggtc

SEQ ID NO: 90902 - DNA, 1009 bp, Eucalyptus grandis
  Intron number 1 from transcript Egrandis_v1_0.029921m (loc us Egrandis_v1_0.028362m.g) derived from phytozome v7.0 (c hr-ID scaffold_6; pos 45217317 to 45218325)
agactctcgacgggcccgattccggtgcggtcgaggttcgttcgttcgctcgctctctcgtctcttttcgaggccgcgtttgtgcttctgttcggtcgcgagtaggggaatggaacgaagtgcgcgattgcattgcgttcttgaacgggaatctctgtcgtgtgtgttcgaggtttgttgtggtgttatgatgggtctttctttattggacgttgagtggatgaagtactgctgttgtttggtgtgcgagaatttcaacaattgatttcgagggaaattatgagaaaggatgaaaagagaaccttggttcaggagagagaattggtttctttcaatttgagtatatagaagttggtaaaaaaaattcggatcaattaggtttcggagacaccaacgcgactggatattacctccttacattagttagttgagttcaaagatagagtttaatgtctctgctctctttattttcccttgaatccgataccaggttgtttaggcctattttttctcgcattgatcgcttaagagtcgataatagtgcaggggcatcctttttgatatctcagtgctgctgtttgtatttcgttgagtagaagatttttggtgtggagcttagtaatttcgtgtttagagccaaatgactagacctccttcttccctccctatccatatgctcgagattcagtcatgcttcccgtctttcgactactgagttgaatcatgagacaatcataataaaaaaggtctggcatcttatggaaacaaaagatttgccgtaaaagccacacattgaagaaagtataaaatcttgtgcatctcttgctgtgaaaattggatggtgtgcttgtcattggtggaagacttattgcatagttgtttgctgctgtccttgtttgcaagagtataatttttttctgatgtttttcagatggctccgaagcagaaaatcagaataaagcttcgatcttattgggtgcccctaatagaggactcttgcaagcagata

SEQ ID NO: 90903 - DNA, 699 bp, Eucalyptus grandis
  Intron number 1 from transcript Egrandis_v1_0.048659m (loc us Egrandis_v1_0.048659m.g) derived from phytozome v7.0 (c hr-ID scaffold_1518; pos 910 to 1608 reverse strand)
gcaccgtctcgttcaccgccaaagcgtcctcccaggtgaagcgtctcgatctccccggcgtccgcgatggagagagaatcgccgtatcgtgccctgtctaggcttcggtcgcgagagatttcgcccaatcgtagctgattttgtgggggagcgatcgcttggttttgtcgtgaatttattcatctaaagcaaagaatacgaatttacgtgcctaagacgtagcctctgggtagacgtttttgttcaattttatttatttatttttcattaaaaatgtgaacttttttggggaaggaaggaggtttgcgacgtgtttaaggatagcaggaagatgggcctttctctgtttgtatgcgacttgcgatgttgcttcttcaaagttctcgttttgattttgggttggttaaatgcagttttgatttgattgatcggttccctttcgtcttctgtttattcagcatgtaaaatggcatcgttgaatttattttctaatgatgaatgcattttaatttggaaaaataaaaattgagattatgggttggctaacagtgaagactatagttgtgacgttttgaggtttaagtttctatcttattttatgttacttggtgtttagaggatttggtgttgtaaagtgacttgatgatattgaaatgctgagcaggtgtttgagccttgtaaagtggacttgtttgagca

SEQ ID NO: 90904 - DNA, 853 bp, Eucalyptus grandis
  Intron number 1 from transcript Egrandis_v1_0.025770m (loc us Egrandis_v1_0.025770m.g) derived from phytozome v7.0 (c hr-ID scaffold_4; pos 20340883 to 20341735)
ctgctcccccaccctcaacgccactgtggagtgtcgtaagtgcaaaaaacgaaagatattatctttttcttcgttctctttttgtaatataaatatatataatataaccataatcgtcctttaccaaatttattttattttcgtgttctataaagaagcttacagtaggacccgttaatcaaataagtgaatgtaaagaacaaaaaagagttttcttttctttttctttttttggagggggggggaggggaggggaggtcatttcctattcattgaggacacttaaatttgaaatgttcaactttaaagtagtgatcctctacaacataagaataatcggcttatttaaaaactgtattttttttctacttattaactgaatagagatttatagcaccataagcttgatattaatggacaaatgagaatttttgcttatagattaaaaaaaaaaaaaagatagtaaggctaatgattgatcatcttccctttagtacatgtatattcttatgaatcatttgaattgcgagggacgaaaatccatcgatgcaaattaaatggaattgattcgatcccaacccatgtcgggtcattcatttctccccaatcaaggagggacgtaggacagacatgacattattctaattattacaagtacagtacagaattcaaagttgaaatgccactatgattgaacttttcgagatttgaattcggcttctaagtcgattgcttgacctgcatttggcttgcatttcttgattttgtgtgtttccactagcctcgatgatgatattaaagtcttgtgttgggtccagctgcaggcactgggactggctacggagaaaagctt

SEQ ID NO: 90905 - DNA, 302 bp, Eucalyptus grandis
  Intron number 2 from transcript Egrandis_v1_0.009769m (loc us Egrandis_v1_0.009769m.g) derived from phytozome v7.0 (c hr-ID scaffold_6; pos 41426828 to 41427129 reverse strand)
ccctcgggtttgttttcagactctagaagctgcactagctttcttttattcctgcatgtttgattttctctttccgaagaatttttatagtgtctgtctctctacctgtttcttttgttgattgttctttccccatcgttatcaagctattaaatttaacaattttaaagcatttcaacctctttcgacaaacatgatacataatgatgaaccacctggaaatatggcacagtgagtatttgcatgtcggctttttattgacttacattattttatctgcagaatttgttctataaatatta

SEQ ID NO: 90906 - DNA, 858 bp, Eucalyptus grandis
  Intron number 1 from transcript Egrandis_v1_0.023738m (loc us Egrandis_v1_0.023738m.g) derived from phytozome v7.0 (c hr-ID scaffold_4; pos 24394608 to 24395465 reverse strand)
cccttccgctccttccaagccggtcacttgcaattgtgggttctgtcgtgcccttttgattgtgcgtgcgtgcgtgctcatgggtgttcttaatttcggtcgcccgtgagattttcctgtgatgggtataggtagtgtgatcgaatgatgggggagctattcggtgtctgcaattagagcgatcaaatgggttgcgggatctaccgaaacgtcgtcggaaagtcgggttttttcgttgattttggtgttgtttggtgaattgtgtactgcagcgtgttgtctgtgaggttgaagctgcggataatgttggttcaatcttgaactccttaggggccgcaagggaacctgatgttgttacatggaaatatgagtttcttttagtatgaaaaatcagagatagggtatcgcaaacgaaggctgatggtttgcattgttgaagagtatggagattggaaacttattcgtgcttgacatgcctttcgacctcgcaggaaaacaatcgtgcgcagaaatattacagtgggagagtgaaccgccttcagatatttttctccttcatgttggcttaacttcttgtgaatggctttattttggccattcaaaacatctttccttaatcgcactttagccatgaagaagaaagagatttccttgctggttgtgttacagtataaaagtatcatacaatagcacaccttggtttttcaatcaatagttttggatgccctgagaaaatgacatctcttgacttgtcctgcagtgtttgcaattgtagataatcattctttccttttctctggaaatataaacccttccgtgcatcctttgctacatttactcacatatttttccttgcag

SEQ ID NO: 90907 - DNA, 881 bp, Eucalyptus grandis
  Intron number 1 from transcript Egrandis_v1_0.008006m (loc us Egrandis_v1_0.008006m.g) derived from phytozome v7.0 (c hr-ID scaffold_9; pos 7155362 to 7156242)
atttcgggtcagattcggcgcgccttgtctttgaattttgcggtttctttggttgttatttactgaggaacgtctctttcttctctctccgctcgtgattgtgtagacgccttagctttccttgtgtggttgactgattagtctgctccaagagacgacgacccagtcaatggaccatggtcgtggccatgaatatatattaaaactccttggcattattataaaggtgacggtatcggcataatttgagcagcgcttttggtttattcactatttctcttgattcttggattagcttcctttaatgttatcctaatttgtctgtggcgtttggaatctccggtcgagagattattttgggatagattttgcttttcagggcccaaaaaggggaagttagatgagacgccgaatagcttgttaagattatctgtgaatctttccatggaaaaacttagtcctaactcctggtctggaaatttttctgggaaatgtttaggcgcttcgaaccaggggaattagattgcagggcaattttaacgtagcatagcatgaggattgaggaacaaagaagacaaattaagaatgcccatctaaaggatttttacaatttgaaaaatgcccatgttgatatcagctgttgagtttttctgtttggctctggtgtttaagcagatgcttaacctgcctgctgcgtctgtgcttatggttgactctcctttatattctgggcactgaacgcaaatgcccgtgtagccatttgatttgatttatatcagtctcagatgagacagtcccttgtgacccttattgttcacgcatctcagtgtggcttccacctttcaggctacactactcctggatcgacgtcggtagcccaa

SEQ ID NO: 90908 - DNA, 919 bp, Eucalyptus grandis
  Intron number 1 from transcript Egrandis_v1_0.034903m (loc us Egrandis_v1_0.034903m.g) derived from phytozome v7.0 (c hr-ID scaffold_4; pos 3779575 to 3780493)
aagggaacgagtccaggtgaactctatctgctttctcctcctagtctttttgcttccctcttcaggtaaaactgagaggaggtcaagagaacgagaattctacctcaaccgcagcttttgcatgctgattcactatgctttctcaaacaattcctagaaacgtttggttaatttggaccagtatattcagagcatcattcttccagggacttggaatcgaagctctgttttcggtatcatgttggtcagtaattgacattttaggttgtgaatttgagctgctgatccaatttgatctttgttcggcagtatagcgcattgaaatgagtgtgaaaagaattacctctaggaattgtttcagggaaatggatgacgcattaatcttctaaggagaagattagatggtcgtactgggtttccaaatagttgatccgactgatgcagctcgtttaatgaaaccctagaatgggcaaaatacagttagtgaagatgaagaaaatctcaacggtagctttgccattaggcaaacatgtcaagataaacacatgcacccacatgaatatatccgtcattgccaaaaacttaagctgccaacgtaaagcaaggggatgtttgaatttgaatgaaaaatctccctactctgataccatatgaagctaaatgcagaatgactatgtatatatgttgagctggtagagaccaataatatatttcatcgctgtttcagacatgacctagagatatagtgttgtctgacttctgaaaaaatgtggccagaaggtagctcatcaattgcatttgagtgtagtgtagtgccttcgcataatctatatcgcagtatgcttctacaattacataggttctgatttttccttttcctttttcttcacttatggtgtgagaagccaagtgacaggac

SEQ ID NO: 90909 - DNA, 933 bp, Eucalyptus grandis
  Intron number 1 from transcript Egrandis_v1_0.049478m (loc us Egrandis_v1_0.049478m.g) derived from phytozome v7.0 (c hr-ID scaffold_11; pos 38351524 to 38352456 reverse strand )
aaaaggtaatcattctcatctttaaattgagcttgatgctctttgtaacgtattgatttaggctgtgtgttgacatttaatatgtaaaagttgagtgaacaccagaggcttaatgagccaaccagagttaagagctagaagatgttattaattgattgcgggataaacggggttggctttgactggtgtggaagacattgaaaagtgcaagattagaaactgtgaagtatgataggctagctaaatcttatgctcgagtactcatagtgcctatatttgctgggtatacatctgggtttttgaaagagcaagcattcggaaagtcaagaattgtccaaaaccatttctataatttaagtccttcactcgtttcaagaacccagattctaccctaaagcttgccctagagcacataagcttctcgtgtttccaatccctaagattttaatttaatacccatgagtgattcactgagtttatcatccttttctaatgtctggattggcaattgtcttaaaaataacctaatacagctagtcttaaaggaaaaaagaatatccatgttcttaacatcatgaacatgctttggaaaccaagtaatcatatcgggagtcatagacctcaattgtaaaaaggcaatagagtcattatgcacaatctcaaaaggaccatattgcatttgcataaaattcaagattatattgcacaaaagagaaaaagtcgaggttacattatgggtacaaaaatagttagggcttaaatttttgacgcaatcttccttttgatgataataataatttcagacttcgatcaccactagagtctgagtttttgagttacaattgctgaccacaacctctctagtgagatctacgtcctgatcagtagatcatttcgccataaaaagtttgttatttccactatgaacagtgc

SEQ ID NO: 90910 - DNA, 569 bp, Eucalyptus grandis
  Intron number 1 from transcript Egrandis_v1_0.018896m (loc us Egrandis_v1_0.018896m.g) derived from phytozome v7.0 (c hr-ID scaffold_4; pos 35263421 to 35263989 reverse strand)
ggtgaaactgaacaggctctccgattccgattccggtacttcacgcttgcattcgcgttctccctagctgattgagtttgtgaaatgtttagttttttggcttggacacctgctctacgatgttcgtgaatgggacaaatatgggtcttgagattttaggagaaagagcgtgttttggagattttgacgtgatggttgttcgtgggtaagcagagaaaaagcttgatgattggttgactagaagaaaggttgtgtttttctctttagttctttataatctgaattgagttcaatagtggagtttgcgagttaggatcgaagcttccggggagaccagagtgacacaagaattggccacaactgaagattgttctggtattcttcgtagagataacgacttaaaaaaccgaaaagcagtttgttgaacagttcttcgatttcttatggtaattaggtgtgaggagcgatgtttgaatgtgctttgatttgatttaacaagggtttttcttgagaaggattcattgcaatcttcaggaatagtcgaggtctgcttggatagacctggagct

SEQ ID NO: 90911 - DNA, 862 bp, Eucalyptus grandis
  Intron number 2 from transcript Egrandis_v1_0.030099m (loc us Egrandis_v1_0.030099m.g) derived from phytozome v7.0 (c hr-ID scaffold_9; pos 14696528 to 14697389 reverse strand)
gggaggtggaaaattaactttttgtcaacacaaaagtatgtagtgcaatctggttggtctcttcagtttggaaaatcttgggctattttatgttgtgcatctgaattgggtttaactttagtgcttccatacggtgggtatgcggctacttcccaatctttggatcactgcaaacatagctcatctttcctctgtcgaacatcctgtgcttcagcttattactcacatctacacatgaaggtgtcctgttaatttaatcaatcatgagtaaacatgtgatgcttcagtaaccgttgaactttaaaatttctattatttgtttttggtattatgagtgtatattcctctctccctgtataatgtcctcgagacacaaaatatgaatgcatgtatctctcttcaaattaggtacctagaagttcatcacgtccaatcaatttgcattttcataaaagtttttggttagattttttattggttgctgctttacaatctactcacattttcacatatatataaatatttttttatgtaatcatgaaaacttttgatttcgcctgatgaaattacaaattgcaattaataatgatgataactagaactctcaccaactaattggtgatgatgttctaatgtttataggcttaaatttggagattgaggccgaaccactttgaatctcctaggcgattttctatcccaactcttccttatacttgatttcttgttaattatcttttggaacccaattcacccttcttgtgttgtgaccattatccaagccaactactaaacactcatctcttgagtatgctatcttagtttttaattgggatacgtctgcaggtgggaaaatccattg

SEQ ID NO: 90912 - DNA, 335 bp, Eucalyptus grandis
  Intron number 1 from transcript Egrandis_v1_0.048997m (loc us Egrandis_v1_0.048997m.g) derived from phytozome v7.0 (c hr-ID scaffold_9; pos 37322557 to 37322891)
agttattacaatcaaccaccgcctccatccggttctcatcttcatccgtctctccttctttggttttctctgtttccccgtttcttgattttgaatactccgcaaaatgattgcttgcatctcctgattttaaatgttgatgcatatttcatgttctcagtagtcaaagattagattgaaaatggcaaaatggcagatctttggttttcttttagagcttaaacctgactctggtaagatgaacttcagattagggctaacttgcgtttatggctttccctgtgaaagtgtagcatatccgccaggaccatatccgccaggaccatatccgaagg

SEQ ID NO: 90913 - DNA, 495 bp, Eucalyptus grandis
  Intron number 1 from transcript Egrandis_v1_0.003874m (loc us Egrandis_v1_0.003874m.g) derived from phytozome v7.0 (c hr-ID scaffold_11; pos 30307663 to 30308157 reverse strand )
caggttccttcttctgtcaaatgttccctttggtttgttttttagcttatacttgtatttcgcagttgtttaagatcccaatattgaagtagcaatcaatgtacttgattttattaatgtcgcttaccaaaaaatatcactagtgtcttcattttagttgggaataaagtcctagagttattgtttcatatttaaaaattaaaatgaccgtctttagaaagacgatatatggaatcgtagcgcaagaaacaagcgtatattttatgcctttaactctacatagagctgcaattgtgcgtttttctttctacttccccctttcccctgcttctcgtcatctaaaaagggaaagttttcactataacatcaatctagagtcgtcgtagaagaaagtctgtttttcattcatattagtcaggtcttactagaagtcttttattgaactgaattatctgtgcaggtgttctacctcttggattggttgaagcaccttct

SEQ ID NO: 90914 - DNA, 951 bp, Eucalyptus grandis
  Intron number 1 from transcript Egrandis_v1_0.021761m (loc us Egrandis_v1_0.021761m.g) derived from phytozome v7.0 (c hr-ID scaffold_11; pos 4035432 to 4036382 reverse strand)
gatttgtggatccaagtactacgagtacacgggcggtaagcgtcagttggcaatgaacttgtacagcaatattgcatgattctaaacactctttcaattgctactttttcttcaaaaatggaaaatgaaaaaaaaatatttgaaatccaagaaattatacagaataaacatgttcatttacgtcaacatttgtgtatttgaaatccggagtttcgtgttatatattaaaatcaaattgtaggagttgcaagattttgaaaaaaccaaaaaaaagtgacagtgaaagtcacccctgtacacgatccattatcatttgcacgtataaatgtgcctagattatatttcctaaccacataagggttagactttcaatgtaaaaaaaaaaggtgcagccacatgactagttaatatttggtctagagtttagattttcttattttcttaattaattccttaattagtcactcaactaatctttcaagagaccgtcattaacaaattccacaaaaaaaaaaaaaatcatgtatcgatagggggaagaaattattaactaaaaatgaaaatcactatttctctatattctgttgaccgctaacaaaacaaaaggagtttcttgtatatgattttatttgcattcttgcaaatgcatgcatccccttctcatactcttttggacgcaattcaacttatacaaattggcttgctattgctattactctgttttctcgtgagttttgttttccatacttctttttcttcgattccttttcacgtcattcgtttcttctacaggtgtcctagatgatattgccattctgacaacttcagagtttatattactactaggtaagccacaatgatttgttctcaaagtgattaaaaaaaaatacttattctaaccaatcaaaattttcctcagtgcaattttgtgcagtaaaatttgtaatcggg

SEQ ID NO: 90915 - DNA, 980 bp, Eucalyptus grandis
  Intron number 1 from transcript Egrandis_v1_0.004202m (loc us Egrandis_v1_0.004202m.g) derived from phytozome v7.0 (c hr-ID scaffold_4; pos 36758770 to 36759749)
actattgttctttgcacagtcctggagctcccaaggtaagcaatctatcaaattcaagttcccttctgttaacagcaacgaagaaagggggggggggggggggggaagatagtaaaaggttaaaggtgtggggacacatcatttcaatcattagtgctgtgaagtatgcaggaagggagatttacctgttgagaatcccagcttatgcttgttttcggatcactagttcagagtcttatctgccgcagcgttcttttaagatttcccgagaagggtgttaccttatctttgtgtgcgccgttcacgtcatttcatgtactcggaaagatagtggagattggcatcgattgctttttctgtgagtttttgccatgagatctacgtttttgatgtcgtgagagcatttttttgcagtcccttattctgtttttccatttgagaagtttgcgattgagcatgggatcgagtcaatctatttctgatcgtgatcaatgcatcacaagcattaaacagtaccgattcgatgtaaggcagctctatccttctgggaagctgaattcaagtgcgttcggctaagagccacattcaggacattcctgctcttattcttttcctttttcacttgtttgctacaacatggaatttgattcgttgaaagcccagtttttcagttgtacaaaattggttgattagcatttgagggcaagctaatgaaagcttctcctttctccttttttttttcagtatcagccttgcgtttctactaagatgcttccaaactgtgaagcctaattgacaaaagcagaaaataatgttcatctagaataggcttcaattcaaactatttcgggtctagttttcaattttaactggagctgcttacagcataaggactaagcagcttttcctttatgtgccaagtcatttatgacaatgtaaatgcagggacatactctcggtgaatcggcatccattgttct

SEQ ID NO: 90916 - DNA, 582 bp, Eucalyptus grandis
  Intron number 2 from transcript Egrandis_v1_0.040093m (loc us Egrandis_v1_0.040093m.g) derived from phytozome v7.0 (c hr-ID scaffold_4; pos 12678027 to 12678608 reverse strand)
tcgcgaccccagcctctaaagaccctgaggtatgtaatgagtgcatcacttgggagcttactgtgacgacccagacctggggctgtacagaaagacggactaagatcacatcggcagtacacgggcgagactaagtgcatgtctcctatcccacatcacttagggaaagtcctagcctagtttataaggttgggttcctctaaactatatacatgtgtttttttgggtagtatgggctgtccgagaagaacaaaactgtgagaacttagtgtttaaagcggacaatatgtacagtggagacctgggtccttacaggtgatatcaaagctgactcccccagcgtcttgggcggtacagagggatactacagagggaccaactaagttcgcctcggtagtacgcgggcaagattaagtacatgtctcctattccacatcgcttaggagggaatttggctaaataaggacttagtgttcaaagcgaacaatatgtatatagcggagaccggtccttacatttacagtaattttcgatgatacattttactgggttttgaaaccgcttctgctctaattttacaga

SEQ ID NO: 90917 - DNA, 536 bp, Eucalyptus grandis
  Intron number 1 from transcript Egrandis_v1_0.016417m (loc us Egrandis_v1_0.016417m.g) derived from phytozome v7.0 (c hr-ID scaffold_4; pos 11686103 to 11686638)
tccgcgggggcgttcggtttgcggcagctggcaaggtgaattttttacatccggagccgtcgccgtcgcggtcgatgcgctgagttcgttgatgcgttgaggatcgtagcttgtactgttggattgctgcgtgttgtttgcgaagattttgtaggagcggacgggtttagtgatgcttgtcttggtgggttttgcttcgaattggtcaaactgtcagagagttattatcttttcttgctcttgtttatgatttgtgtcgaaggaattgtttttttagttgcatttgacttttggttgacatcatcgttcaaaattggccggaaacaaaatataaactgtgtcttggagaggatttagttaatcgggctgcgctcagattgtatttattggtggaagaaatattgagcggagttttgtgggagcatccgtgtcaggagattgtggttttcgatgttgcgcaatgcacttgaggtatccttacaagtttgattttgatgctagagacggaagtgagcgcaaggagcagcggcagcttg

SEQ ID NO: 90918 - DNA, 792 bp, Eucalyptus grandis
  Intron number 1 from transcript Egrandis_v1_0.038105m (loc us Egrandis_v1_0.038105m.g) derived from phytozome v7.0 (c hr-ID scaffold_9; pos 9594575 to 9595366)
tgatcttcaagttgtacccacagcacaaggtatgtttttattgtttatttacgaattttgtagttgtgctacgattgacatcaataaataagtatgcagacattccattgccaataatcaagatttaggtaagccaatgctaaatatagtagtctccaatgtgggtcttaagttatttgtgaactctctgatttatcgttgcttggttgggatcaacggatgtggcttaagtattactctgctatctgtttaattccctactttggctacttttgcttggtaattactgaagagtctcttcaaattgaagccctctgttagatatgtctcaagtttaagcctgaaaagaaaactttcctaattcaagtagattttttattttgaatgggtttcctaattgaatggtttttctagttggagaaggtttcctaaaaagaggtgtcttaccttggatttgattcttgcctatatataagaagttgagatagaaagagtccaagtttttcatagccaccttctataatccttgatttctatagtgaattttgcttctcctctccatgtgattttttctacaagggtttccatgtaaaatccggtgttcttctattcttctcaatttcaatttcattatagtttccgtatctaccatgacacccttgaatgttacaagtcttttgaaaaactgaatctacataacgtgtatgggatcacaaccactttttgcttctctatccttttctttcaataattgatctttttttgcgatttaaactgcagtgaaagctatca

SEQ ID NO: 90919 - DNA, 446 bp, Eucalyptus grandis
  Intron number 1 from transcript Egrandis_v1_0.039196m (loc us Egrandis_v1_0.039196m.g) derived from phytozome v7.0 (c hr-ID scaffold_6; pos 15832271 to 15832716 reverse strand)
agtcgttgcctttttcgttatctccgatctctctcgtttcgatgagcgactgttttcgttctccctcgaaagaccggtgttgaatttgtaatggcttcgtttcctttgtagaaagcgatgttgaacttatattcccattaattcaattcgttttgagttgacaccatctatccccagtcttgcttccttctgtgatgacgccaattattctgcaggacttatggttattgttctttcaatggccccttctttttagtaatttctgatcaatttgctttctttttcaggtttcctacattggttgagccacaatttccttgtatcttcaaatactgcaaagaggttagcactgtcttcgtaaagagtgatttagattacatgagtttgaaacagcaaagctaacagttactttctcttcaggttgctgcaagaatttgttgagagac

SEQ ID NO: 90920 - DNA, 828 bp, Eucalyptus grandis
  Intron number 1 from transcript Egrandis_v1_0.022542m (loc us Egrandis_v1_0.022542m.g) derived from phytozome v7.0 (c hr-ID scaffold_9; pos 26114207 to 26115034)
acggcggtcatttcctcttcttggtaggtttctctctttccagaagctgctatgatgcatgaactattatgccatatgtgtgttgcgatttcaataaaagggagaaggaaaaaacaccctacataagaaccgaataagcttttgtttggcaagtcctttctagtttggtttagcatgttgactgaaaatgtcacaaagaaaaacagaatagaaacttgctgttggtctggaatgctccttactggatgactatttgacttctgaatttgcactgtctcgaatccgaatattgtgttctatcatggtggaattctgcagagccattaatttttaaaagtactcctttggattgatattttgcatagccattctgcaatgggtcatgagataattatgccaagtccattccattgagtattaaatctgttaatgctagctctgctctttatcgatcatcatttctcctgagacattcaaaattgttcaaagatattttttcgtgctgatccctaaactctaggtgaaaagatatcagtactttcttttcaattaataaccagtgctatcaactctatttcatgagtatacgatcccccacaaccgcatcctaccctaattcttgctgatgtctctgtcggatgaatgatatcattgcattataatacttgtgaggcaggcatcagaaatatggtgcagtttagcttcgttgaagcattctcttcactttttaaagaactcaattcctctgctttttacagttgatgtgggtttagctttatgtgatgaggcgtattgtcattaatttatatatcctttgcatgcaggaag

SEQ ID NO: 90921 - DNA, 751 bp, Eucalyptus grandis
  Intron number 1 from transcript Egrandis_v1_0.043372m (loc us Egrandis_v1_0.043372m.g) derived from phytozome v7.0 (c hr-ID scaffold_11; pos 1294141 to 1294891)
ccattgttgcaaaaaataaatccttaaaattgttggtaaaatatggcttcgtattgggtagaacaatgaagtcgaatcgttagagtactcaagtcggactttgacgcgtgatatcactttctttaaggatttatttgccccactacgttgctaatggtcaccggcaaatttcctccaggatacaacaaagtctcaagtaagaatactagatagcaattctaatatttctccagggtctctcatgggaaacaattagaaacaatggctgtagtttctctcgaaagaaaaatgaaaagatggaagaagatatgtgtttgatctcaaaacaaacgtatttatctttttctttcgaatagaggcaactcttcaaaaggttgctaaagaacaaagacaacctttcgtgaaaaagtacgtctcaaaggttacgttgaaaagatataaaaattcggaattaaataaataataaataataaataattgtaacttttcatgaacagtcgtactgtttcaacaagattttgtagttaatattttatataaataaatccgaattttctcaataaataaaataatgatcgttggttaatgccaaatctcgtccacgtgcgcactcacatcttttcgatgtgggacaaggcacctctcaatttgttttataaacaaattaccaacacctttgccctcctaaccaacgcaatatcttgctccattttaagaattccttcgttcttgatagggaggcatcatactt

SEQ ID NO: 90922 - DNA, 450 bp, Eucalyptus grandis
  Intron number 2 from transcript Egrandis_v1_0.016036m (loc us Egrandis_v1_0.016036m.g) derived from phytozome v7.0 (c hr-ID scaffold_6; pos 44547401 to 44547850 reverse strand)
gcttgagtgagttatcatccacttttcctcgatagtgcagccgatgcttgttaagcttctctagggcggttcaatttgagcgcgctttaacgatttctcgagaagctcgtcgcttgaattcgtgcttgactgttgtcctcgcttgtacgattagctggtatgttagccgaggtctagctccgagagctgaagcaaataatggttcctccaacttattgggaaatcatcttgtttctttctcgtttccggtggcttagtagttgcggaccttgtgattactgggccgtgccattggaggattgaaatcttttgattaagttttagttttgaagtttcgaagaaacatagcatatgtggcaaataggaagggcttatctgcagttgtctttattttctttttaactgatttttgaaggtgcatcaagtgggttcaagaggcgtttccgccgg

SEQ ID NO: 90923 - DNA, 969 bp, Eucalyptus grandis
  Intron number 1 from transcript Egrandis_v1_0.010120m (loc us Egrandis_v1_0.010120m.g) derived from phytozome v7.0 (c hr-ID scaffold_6; pos 44409777 to 44410745 reverse strand)
ggccctggaagaaaacggtctcgcaccactcacaggtaaaacacgtttgagtttctactaaattccccttgtataagttttatcgttatcggtattgcattttacgaagagttcacttacttcatgcatattcatcatactatcatacctcacttgacaaggaattacatattattcaattctcctggaaactaacttttcggtcagatcatctaccgttatatgaatgcctttgatcacacatgaacaacgcaaattgatggattaatctccagggataatttttttttaaaaagtgtctaaacatattataagatgtcaattcagtcataaacaatttaatttagtcaagatagtgaaccttttaacaatttgctaatgtagtacttcataccaattttgattgaaaatcactgatgtagaggctaactgttctgtgtggttaaactgatgatgacatggacaacttacccaattttttaaaaaaattgcgaatattttccttcacttttttctttaattttctatatatatatattcttttttttttatttccctttgtcaacagatattcacgatgccctcacctggctttgatttggcaagggacgcgacccctcattgtggtcagcaagggctttgcggccctcatggtgctggccagggttgtcggcccacaataaacgaaagaaagaaagaaaataaactaaagaaaaaatgaagcaaatttttaaatttttaaaaacatttcaaaaattttccatcttagaataggccgttccacgtaggatggccagtgtccacgttggtgattttttttttttttttgttgataattttccctaaatttcaaagacttgcattgtatgccatttgtgacttagattgccttaaaaaaaagaaaaaaaaagtgaccgtaattaaatttgttgccatttgatgattttgcatggatatgcatgcttgcag

SEQ ID NO: 90924 - DNA, 745 bp, Eucalyptus grandis
  Intron number 1 from transcript Egrandis_v1_0.012345m (loc us Egrandis_v1_0.012345m.g) derived from phytozome v7.0 (c hr-ID scaffold_6; pos 24155101 to 24155845)
ggcggtgacgcgcgtcaaggatcaaggaagctgtggtacggatccagtgaattgagtgcgctgttttggtctgttttgttaatcgaacttgccctgtcgtgaatggggagctgagattgacgattgtttggcacttcggctcgtcgatttcctttttcagttagatattggtgcagatgcagatcgacaacacgttgaaacttgtttctgattggtacaattggattcagtgctttccagtcaaccaatttttggactttgtgcaacgtatgaacgttcgagtgacgattctgtgttcatgagttttcgtgattgcactttgttctacctgtgactggatatttgattggctgaaggactgaaaattcctgtatttacgtgtgcaatttgtaaaggataattcggtttgatgtgagttgtttttcaaacttctcattgctctggttggccttttggttttgaaaatggtggaggtagctaagagtagaattacaaagttcagaggcattgtcatgtaacatgcggataggggttcaattctgccaatcttctcccggtcggggtgaagaatcccttgtttgtatggactcggttaatgtgctttaaaacttgtatggggtgaaatcaggtctctccatctgatgagacaatctgtggaggcgacttgatagctttgatgcagagctgaatggtgtcgctgttctctgcaggggcttgttggtcattctcagccacaggggccatt

SEQ ID NO: 90925 - DNA, 926 bp, Eucalyptus grandis
  Intron number 1 from transcript Egrandis_v1_0.026531m (loc us Egrandis_v1_0.026469m.g) derived from phytozome v7.0 (c hr-ID scaffold_11; pos 44482838 to 44483763 reverse strand )
ttcaagtaagtcgtcgccgtcgccctttttcccttgttgtttcgtgcttccggccggcggagacttcgatgtgttccgagtagtcacgcgagaaaaaagtaatcggaaacctaggggagatcgaatcgacagcacttgggtttccttggacgttcgcgacggaagatgttggcttaatcgaactgattcgtggaattgtgtcccgccggctgaggatttatcatcgacatttctacatattttatttggcgatatatgtgaggagtgatgtgttcgtggctgtttgaactctggaatttcgtgatcgagtccttctgattctgaagataacaacagtggtcacggggttgcgtgttctggggtcgttgaaattgatagaatcgttggctcgatgatgtcttcttcgtttgcataagatgcctgggtagccaagtggataaaagatattttcctttagccatttccatgattctttctttcagcatcatcgttgctaggaactgaacttgcgtctgggctgttttgagtgtcagtcttatgatcatagtaacagccaacggtggtccttggattttggttttctcggggatgggagaatggaaaatttgtattatcacaaagcttttgggttaacttggtacgacagcataatcgacgtagaaatcaagttgaactgcgtatgggagggctccggcagcttggtcccctccagccttcttgagagattagtaaacggaaaaattcctgcgatgactgcaaagtttttttgtagttcgtttcatactttgcatttctgcgatgattcttgagaaacatcatgaagtttataacatcaactgggaaaagcaaaatgtacgagatgcattagctgatgtctttctttgaaagcagaaatcttccgagacaccagtttggtaatttgcaaa

SEQ ID NO: 90926 - DNA, 897 bp, Eucalyptus grandis
  Intron number 2 from transcript Egrandis_v1_0.001837m (loc us Egrandis_v1_0.001837m.g) derived from phytozome v7.0 (c hr-ID scaffold_9; pos 38772619 to 38773515)
agttcaacctcaccttacaagacaaaatccacttggtacctcctccggttgattttatctcttctcgatcgatccttctgaacggctccacccgatgacgcattgcttgttataaagacaggcttggctttggttttccatcattggtctatggcgttttatttatggacaagttactgccttcaatactaactgaatggttctttccacctgaaagtcggtatccataggtgtaattacatcggtaactattagcaagagactgcagaaaacagcgaagaggagtcaattgtaacagtatccaagatgaactaaaaatatctgaaattgccgactgcgagtgtaatttttgcaggcatgaaacatgcatgtttattggtttattttattttattattttttattttttctacatcccgtgatcatacaactaaatcacattttctggggacttcgtgtgtctatattgttccaaaattatcgaagaaggaaagctacgcaatttccataaaccagtgcacgagagatggaggacattttcaacatgtgtttgctttaatagctaatatgtgactagtcttatgtagttaactcaacaattttctgaaacaaattatagcagattctgagaggtcattgcaatatttaataattctgtcgcaacccaaattgtatttgtcttaaaaaatttagctaagctgatttgaaatgcgaagcaggtaactttcgactactttcaaagcttggtttcctgcaaatacttaaaacagtcatagaacatgcaagcacattattatcgactcgttgattttttcaagaaattttttctttgtgtgcttttacttcgtgtgttaagcactctgtctatggtttttaggctccaataggttttcggct

SEQ ID NO: 90927 - DNA, 639 bp, Eucalyptus grandis
  Intron number 1 from transcript Egrandis_v1_0.020836m (loc us Egrandis_v1_0.020829m.g) derived from phytozome v7.0 (c hr-ID scaffold_11; pos 32211720 to 32212358 reverse strand )
tccgagttcttgattccatctcgcagcatctccaggtacttggtcgataggctgatcggtttttgagtcgtacccacttttttttttgtcgggcttcgtgtgctgctagttcggaattcaagatcttccagtgttttaatctgacgggcgaagaagtctgcgtgctgattttctgtagttcttgataaaggcttcgagagaaccagagtcgatcggctttttgggttttgtttcttgatggttttgacttttgggttgttccgagagtttcttgctgaatgttttgccccatgtggtggttaagccttgtttgtgaatcctgcctccaacccaattgctagcagcgtcgtttctgatttgccttcgtacccattttcttttcgaaattggtgcttggtttttgcccttccttattgcagtgtctttgggtaattagttgttactttccttgttctttgtcttgaagactttgttgtgattacgcgaagctccttaatatatatacctccttccgtgtgtaatatgccgactttccttgctagcaatctcatttgatatttgctctgtatctgtagaaatataagagttattcccaattgttcaggtttctgcaggtaaccgttgcgtagcttttttacc

SEQ ID NO: 90928 - DNA, 923 bp, Eucalyptus grandis
  Intron number 1 from transcript Egrandis_v1_0.020577m (loc us Egrandis_v1_0.019182m.g) derived from phytozome v7.0 (c hr-ID scaffold_9; pos 23890617 to 23891539)
agctcgtcaagactgcggtacgtggtccgcccatatccttcattacttcaaagataatcccaagtgcatgagtgagcaatgtaacttgcgagagttcatacaccgtgatggtaaagcctagagaatacgaatagtcactttagacattcaaactttagcaaagtgattgcacaactcattcagaatacagtaatgcaactttctgtcatgtcgaattctgtaactcaacgaatctaccaaaacatggattggaaggcagccagagaacaagaatgctagtatcgatgaagtcggtgaagtagaaagtatgcacgaaaatatagatacaataacaagtgagataacgaagatataattactgaccaaaaaaaaaacaaagatataatttaacggccctgttctttcttgatgggggatgatcatcatatcagaaaacagttgcatcacccgggagaggaatcctggccatggacgagtcaaacgcaacctgcgggaagcgtttggcgtcgatcgggctagagaacaccgaggccaaccgccaggcctacaggacactcctggtcagtgctccggggcttggccagtacatctctggtgctatcctcttcgaggagactctctaccaatccaccaccgacggccgcaagatggtcgacgtcctcgttgagcagaacattgtccctggtattaaagtcgacaaggtaagtccctgtttacactgatttcagttaaaaaagtgaggcaataactgatatgtttccatagtctttgctgcatcaaattgttagctagttcatgttgaaaaaggctcattttaacatgtaaattttggtgtcttgattattctaaaaaataacgtaagatgtgtatgccttttgcggacaacagggtttggtgcctttggctgggtccaacgacgagtc

SEQ ID NO: 90929 - DNA, 1038 bp, Eucalyptus grandis
  Intron number 1 from transcript Egrandis_v1_0.009404m (loc us Egrandis_v1_0.009404m.g) derived from phytozome v7.0 (c hr-ID scaffold_394; pos 24493 to 25530 reverse strand)
tactaccagtatcctccggccactctcttctataggtacgtccctaagaagcccttttccagatatatttttcatgtatcgagcaagccaatcgcaatttaattttataactatgagtcttgatatataatcactatataacattcacagaaataataaaaaataaaaccctgaaagtatttaaaatcttttttttccgaaatgtcattagtacttctcacctaccatgtggcgtctaggggcggaattgctgcgttttattcacgcaaggataaaatcaagtgacatcttcggaatgatcaaatttccctttcatgtatgtgtgaaaagaatataaacatgaaagctttcgggcatagggtgatgcgcacgtacgcatttagaaggaacccatgaatcgatgacggactatttcgcaccttctccaacgtgcaagtcgaaatgggtttatataagaccaccttgatacatgtacgcatcgtcctgggacgatgtttgctatatgtactcttcaaagctttgctaaataacatagaagtctccttcttccgaccccccgcccaaccccaaaaaaaaatgttaatacgacaaaaaattcaaatttaatgcatctttcacaaatctattctgggccacaaaagaagggctaccactctttaggctactaagaaaataataacttgacgtgagttacaaatttttaaagaagtgaactttacaataaattatacttatttgttaaaagtgtactgatttgattttttacgtagtattaacccaaaaaacaaagacatcgagtaggaccatgataagttagatgagttagaatccacatgcaaggagatcaatcaacgtgaaaactgcaaaaatcttccgtattaaacaccgatgaggtaacattatgctatgtttgattaaccgtttttattgcttgtgttgtcgattccatttccaagggtttcttcacgctaatcgtgtgagcaacctcttcacctaatttcaggaacctcagaaagctgaaatacctgaagaacttcc

SEQ ID NO: 90930 - DNA, 981 bp, Eucalyptus grandis
  Intron number 1 from transcript Egrandis_v1_0.053670m (loc us Egrandis_v1_0.053670m.g) derived from phytozome v7.0 (c hr-ID scaffold_11; pos 36708663 to 36709643 reverse strand )
gggtctacaccggatcagctgacaggaaaatcaaggtgagtctttagactgtgcgaagtgttatccatcatcacgacacccattaatcaaacggtaaacgatgtttgctatacatatcatatccaaacacgttaagtcatgttttaaactcattctaccagaatcagatgcggagataataatgttcaaaaaatggatcacagctttgtctcggactttctcaaatgcatatttaacaaagaaaaagttcgattcggaagcaatggctgcgttgggaaatttcagtacacttgatatcgtaactcctgtttcttttgattgcttattaagcgctcgtttaatagaatcctttaaaaatgactcttgatgaatctccgaagtatttctgtttgacaatatctttctcctaaatccgacatcaagatctcctagtttgtaaggtatttgcaaactgcgaggttgtggtgcttgcgagtcaactagactctccccaaaattcaacgccaacttggataagaattcggttttgtggcctcgactcaatcatcctgtgcctaatcattcctaagcataagtgaaatcgaaagactgtccgaacttggtcccttggcatcgacaaccttgtccttttgttttaatataagagccattttctttaaatgggtctgtatcctgcaactgaacggtactcgtggaaagttaagaaagtacatgtgccttgaagtcaattgtagaaaaaaaaaaaactggacagccgtctgacattggagtcatttttcttactacttggagatcgaagattgcatcctttcaccattatcatcaaaaagtatcaatagcaagcaagtgggacaccaggaaaatgacctcgctccattactttttatgggtaatttagtttaatgctctttgctgtttatatctctaatcagtttgatggcaccaggtgtggaagaaggtcgaaggcgacaagaaccactc

SEQ ID NO: 90931 - DNA, 457 bp, Eucalyptus grandis
  Intron number 1 from transcript Egrandis_v1_0.012040m (loc us Egrandis_v1_0.007508m.g) derived from phytozome v7.0 (c hr-ID scaffold_9; pos 7959274 to 7959730)
caggtgctttaggtcgatttcggattgggttgtgaactgctggaatgggttgcaggatgtcgtggttaagctgtatgagatgggccgttccgatcctcggaagttcgtcttcgccgtgaagatgggcttgtctttggccctcgtttcgctggttatcttctttaaagagccgctcgcggatgttagccagtactccatctgggcgattcttactgtcgttgtggtttttgagttcagcgttggtattatctttgtttgtttcagcattttccctttctttgttttgccctgtttttgaagaatatagtttattgttcttatgaattaatcacgctgtttcattttccaagtgtgttgtgttcatgttttgctgttgaagaacaagggaagatagtgaaggttgttttgatttcaatcctcaggcgcaactctgaacaagggatttaatcgggctatt

SEQ ID NO: 90932 - DNA, 450 bp, Eucalyptus grandis
  Intron number 3 from transcript Egrandis_v1_0.012040m (loc us Egrandis_v1_0.007508m.g) derived from phytozome v7.0 (c hr-ID scaffold_9; pos 7960184 to 7960633)
caagaatttcaagggtgtggctacttccttggaaggtttgatcaatttccctgtttctagtatgatgggtcaatattttctttttctcattcaattacaggtgattttcattcttatcaatgaggattgatttgcatcacacagccattcaactttaaagtttaccactctgtcaaattaccgttacattcaaaagccagacgaagatatgcttttagagtttgattgctagcactaaacttttgacattgcttcagttttttcgtctgaatatatgattggtggcagtgatggaaatcaaagttcagtggaaaaaatggaaatagcgctaaaagattcaatgatcaacgtggatatttgctcctgattttgtatgattactaaacaagagagttctgcgtgctaatttatatggctaatttattcagggtgtgttactggatatttgga

SEQ ID NO: 90933 - DNA, 992 bp, Eucalyptus grandis
  Intron number 1 from transcript Egrandis_v1_0.004724m (loc us Egrandis_v1_0.004724m.g) derived from phytozome v7.0 (c hr-ID scaffold_4; pos 6946568 to 6947559)
agcgaaaaggtgtatagtccagaaatccaattagacaaaaaagaaattccaaaagtggattacttttgcaaaagtctgaggagtactggtgcaaaagtatatagtctagtaatacaattggacaaaaaagaaattctaaaaattgaatacttttgcaaaagtttgagtaatggcgccttcctcacttttttaactttttcttttttttttacttcgatagctccgttgccggtgcaatctaataaacgtaaaaattttcaaggtattcgcttagaaagtaaatcattttgttttcctccatcaccaaaccttcaacaaacctcttgttgatgagttatacgtaaggaaatctcttacattatattttacttaaatctgcatgtaggtgatgttcatgttaatataacctatcaattagatgtttggtttgaggacaaggaaattatggcccactcttttatggtatttcaagaattatcacaacaatcgatcccaattgtcgtgtaggtgctttaaaattaagcaaaaattaggatatgttgctaatgtaaaagtaactttaaacaagcgatttcaaccatccttgatttgagagttttaacttatcattttcttactaatcatcaaatcaagattggataatactaaatttagaaaaataaatatttgtatcggtaatgcattgaataactacactaaaattaagtaatgattctgattgctttgctagagtaatttacttcaggagttcctaattctcgacacattcatccgctcctccacagtataagaagcataagagatccttcttcatgattggcatcggtgcatcattttctctgctctcttgagagaggttagatcatggccggatccaagttctctgatccaccagccgaatctccgaacgactttcttgtctcctacgaatacttggacaatgaagcgatccaacagccaagaattgtggcactgctggccatcactgcttc

SEQ ID NO: 90934 - DNA, 1027 bp, Eucalyptus grandis
  Intron number 1 from transcript Egrandis_v1_0.022173m (loc us Egrandis_v1_0.022173m.g) derived from phytozome v7.0 (c hr-ID scaffold_90; pos 39793 to 40819)
accgctctcgtcaccggcggtagtaaaggaattgggtctctctctctctctctctctctctctctctctctctctctctctctctctctctctctctctctctctctctctctctctctcagactcaccgaacacttccttttttatgttgttcatttagatgatcgatcaactgtcatggtttaggttaagaatctctatgtatgtgtctcacaaacactgattaaaagatctgtacatgtgcgagattggccctgacatttaaagaccaacctggagcaaatctcaaccgtccacgtaaaattagtgaattgatctcgtaatgacccatggatgaagttgggaggaaggtaaggttgcatttgtgttttagagtatgtacttaaacttatatgactactgattagggtgcttaaaataaattatttgtttttacaatttccattttgtgtgtgtgtgtgtgttttttaattttggaatatctattatagcaaaatgggtatagttgccaacttaggactatccgggtccgaaaaattcaagtcaggcatgtcagatagggctttcaactatagcaggtgcttttgaatctgattatattcgatttcatagataaaatgctagacaactaatttcatgatcattcaaaactttatatgatgaagatgatgagagatcaattacttcgaggatttgtagctggataggcttggtttatgcattttttttatttaaagttttgttgtctttagatgttaatagctcacagacatgtcgctagctagtagaatttgcattctccgattgtcatgatccagtgcatttaaaggctttaatcatctgttagacttcaattgcctgtgtaatcaaatgttccgcacagtccaatgtatcacctgtcaacttcttctattggcaaagaagaagggcttgatctgttctcgtttgcaattacaagttggtaaatggtcataatgtcgtcccgtgcttaggcgtgctattgttgaggaattagcggggcttgggg

SEQ ID NO: 90935 - DNA, 883 bp, Eucalyptus grandis
  Intron number 1 from transcript Egrandis_v1_0.025373m (loc us Egrandis_v1_0.020561m.g) derived from phytozome v7.0 (c hr-ID scaffold_6; pos 34171314 to 34172196 reverse strand)
ttccgatcagtcctccgttaggaaccgcctctccggtcagtttctctctcttcagctgtaactgatgagagttcggagctgatctgtagctcctgctcttgaatatcggccgagtaacggtggaccttgaggaaaatttagggcttgagctatgattcttggagttattccggagcatttcttaaaattttgcgctcgtgctgatgtattgagctgtgtgatggaaatgaatgcgtctggcgttgcgttgggttccatgtcgctcgaatttcagttggtgcataagtaagtctgtgtccagttgtacatgttttgtgtgcgatttggagttgtttgagtggaaaaataaatctgtcctgaaagcacaagcccggggcttgtccatatcaagagtgtcgaggaagcactctacgcatcaataggacttgaaaacacttgtgtcgaagaatcttgtgttatggtgggtttgttttgatcattcccttgactttgagaacttagtttacgcaattgaatgctcgttgtgaattcccacacgaggatggatgttcttcaggcataaaaggattcttagctctagtggggaacaacatttgcatgagtatgtccctgagtaagcgattgtcaatttgattatcttgtgtattgaggtgagctagatgcaccttttgttcttcaccttccatactgaataggatggtttcatagagtcaattccataaacgttagttgctcattgaatttggcatcagccatcagaactctatgcttctatttaagaaggctagattgcaagactgcacaaatcaccgtggtttttgtttctcataatatttagttctctgaagcagggcaaccaacatctcttcctgctaaatttgag

SEQ ID NO: 90936 - DNA, 858 bp, Eucalyptus grandis
  Intron number 2 from transcript Egrandis_v1_0.019028m (loc us Egrandis_v1_0.019028m.g) derived from phytozome v7.0 (c hr-ID scaffold_9; pos 21661389 to 21662246 reverse strand)
cgtggtaattgcgtggcttttctttacttttgatattagtcgctaatgatcacacggttattttcttgttgtacagtcattctaccaatgatttgaattccatctctaaggggagggataattgtatgctttacacatgcaattcccaaatcaacatcctgcgcaatcaacatgctttggctgagaaagaccttcacttgttaaagtattagcgcccaatgacattggtcacttcatttacctgatttctttttgtgtttattgttgataatcttggattaggtgtcgttgggttgatatcatgttagaaaatcttttcaggtgattaaatctcaattattaattggatggagattagtgaatttggaagatagataaaatcttataaaataagatatgttgtggatttcgagaatttgacaaaagaaatttgaacggcctgaataatactgaaattccaaggactggatggttagtatatttgctctttctcttgaatgtgagattgttatagttccccctttcttcttatatctgaaagcatggtgacatggcaacaaagggggtataaggtccaatgtcatagaaacctgaatatttcgggtatgagatgttctagtcattgccctcccatgtcattcctacacatgggcttgtctcagtgattttccatcaggtgtatctcatttacttggcgcatggcaaacacagagataatcatgtccttcaagtgatgcaagttgatatacttgtttctacatcgaatttggttcttttctttaatttaacctttgttctttagtatgatcggagaattttgtgatgaccgttctctttgtaggttcgtacttactcaga

SEQ ID NO: 90937 - DNA, 803 bp, Eucalyptus grandis
  Intron number 3 from transcript Egrandis_v1_0.009893m (loc us Egrandis_v1_0.009893m.g) derived from phytozome v7.0 (c hr-ID scaffold_6; pos 19634643 to 19635445)
ttattggtgagtgatacagctaactacttcaatcacaataatgcttgtgatagatgcttggggtcatagaatgtgctgaaatcgatgctttgattatgttgtggtaaaaatatgggatgaatatgttgaattaatgtcgatggtacgaatgatgagattgtatatttgcccatggctaattggtacggatggaagaactatttttaatttattgtggaagttttctagagaaaaagtggacaggacaacatgatatgttttatctaatgctttgattattaaaatgttgcattgaaacagtaaaacctggcttagcttaggagcaggtagtggttgctcaggatgcatatgaacctaacttacatgcacagttagatcatatcacatgtagtggtaattgggggctggaggctcatatgcaggtggtacactgaagtttgttcaccttgggacagagagaccacattgtagacatcgttttgagaattgtagtctgagagtttctgggtgatgaatttaagctcaatttttactgaggattaagcatctgcatgttgtccaatgaggcactagaataggaaatttatatttaatagccactacaaaatatgcaacatctgtacatcttatactctattcacacacaaagttctctatgccatatgtgataatgatatgggatgctctctcatgaaattttaagtttctcagctaaataccttggaagtgtcttatttgatgtgtgcattctcaaatgtaccatgctagaattcgacatagtttctcaaattgttggatagatt

SEQ ID NO: 90938 - DNA, 749 bp, Eucalyptus grandis
  Intron number 1 from transcript Egrandis_v1_0.021447m (loc us Egrandis_v1_0.021447m.g) derived from phytozome v7.0 (c hr-ID scaffold_6; pos 26269542 to 26270290 reverse strand)
cgtccatcttcgactttgcatccaggcactggacggtacgttatccgcttaccatgggaaaattccggcaacgattcttatctcatcagcttcattgtggttgtttcggatgttcttcttccgttctttcagcttactttggatgatgacgagaattttcacgttctctgttttagtgactcgcacaccaaatgtttgacaaattgcaccgttttttggttttttttcttcccccgtttgaagttcttcttttttaccccttttcttgtcgctgctattgggcgtgaactgtttctgtaatggaaaatcgaagatagatgtacaaaaaaatttgcacccaacattaaaggacttgggctcaagttgctctgagcaccagccaagcccgattatagaatcctaagcaacatagctaaattcgaatgtggacatcctgtagcacctttgatttcttttcgtttgatactgttttacatatgcgaatcattcaatctctctagcagtcaaaggcttcattgtcctgaaatgtggcttcttggtagttggctcgaggaactagtcccgagaagcaaacattggtcggacagacccatgattgggatccaagcattgctctataatgtcactagaagggatatgaatcgatccctttataaatagtctccagttgaagtggacacctggtttggcattatctttacttcttacgcatgtgttctaggtggacaagatcatcaaatagcaggggt

SEQ ID NO: 90939 - DNA, 1042 bp, Eucalyptus grandis
  Intron number 1 from transcript Egrandis_v1_0.042205m (loc us Egrandis_v1_0.042205m.g) derived from phytozome v7.0 (c hr-ID scaffold_9; pos 31802227 to 31803268 reverse strand)
ccgcctgcgccaccgccatctcgtccccttgcttggtgagttcaaattcccattaaaatttctcttttttttaattcttttttattccttttttatatttatttcgatgtctttttttaccgaaagttgacggggcacgcgtttcaaaaaaaaaagtttttaaaaaacccactcttgtacgctttttcatttttcgtgaaattcacgtttttttttccctggaattgtcagatttcggttgcttgataagatagaagtattcaagtagatgatgtccccgtacggcttcttggtaatttcattaacgttgaatcggaagaggtcatcggttcgatagcgggtaggaacaattatttatctatttatataattaaaaataatttttctggtggaaattaaaattttagcaattgagtaattatgaagcaaatattctgaagagcctcccatataagttgactcctgaaatccattcttggtccaccctcccaccaccctttttttttcgatttatttatttattttcaaattaaattgcactccaattcgagactttgccacctactaaataaaagtcaaacattatcttaaaaagaataaaaaaattgccaaagttttctccttttcaaaataggttggaagactcgataaaaataattacttttctaaacattgtcgaaatcttatggtgaatgcacattaaaaaatgtgtcaattcaatgaattgatgttatctcgagaaatcatcatccatatatatatatattgctcagataatataaagatgtgctaaatgaaattcagaaaaaaagtagtaaattttgagaaaatggcccaccgaactcgcagccgaaaacgtgctggcttagctttgctgccggtccaaagattctatctgtaaagaagggtttgaccggtcaagcggaacccaaatcagatttatgacgtcatttttaattcacgtaaattaattgggaaaaaagaagaagaagattcattttattttaatttttttccgacagggtggtgtcatcagaacggg

SEQ ID NO: 90940 - DNA, 495 bp, Eucalyptus grandis
  Intron number 2 from transcript Egrandis_v1_0.034691m (loc us Egrandis_v1_0.034691m.g) derived from phytozome v7.0 (c hr-ID scaffold_9; pos 2653524 to 2654018)
gtattcctgattatagaaggttctttcgttaatgtttagaatgatattttacatatagcggacatttcaatggatagaagtcactgatgggtggagatatttcgttctggttaatttgagatataacagccactcttctcattaatttgttttaaactaattatatcaaagatgatttgagtatgttttcatggctattctatatcttttaatttggataattaattgactgggaagaactggaagagagatcttgctgtgatgctgcgtcatttttcatgcataacactagtcttcaaggaatgcactctgcataaccttgtggtatatatctattttcaacatatgtggtcatgtttgtatgattgcactatcatgttaagctttcatgctgaatgtgacaatttgtaattttgtctccattgtatatatgtcgactggttctttcatagctaagacaaacccttccaactttatttgttttttgcagtccaa

SEQ ID NO: 90941 - DNA, 1034 bp, Eucalyptus grandis
  Intron number 1 from transcript Egrandis_v1_0.020066m (loc us Egrandis_v1_0.020066m.g) derived from phytozome v7.0 (c hr-ID scaffold_9; pos 23454810 to 23455843 reverse strand)
ttctggaggtgaagcgagaggcagagagggctaaggtaacgaatgtcgagctctactgtattgacttgtgggttttttttttttttttttttttttgtgtgtggagattttgattcgcatgcgtctcttgttttagctgatgtgcttgtgcgtgagggagagggagagggagagagagagagaagctgggctggttttgtctgattgtataacgtgactgacgcgtcgtttattgcaggctatcttggaatctgtgggtaaattattttgcattcatcatcttttcaagttgagtcctgataagctggtcttttgttttgctgtgaaatcaagctggtttttaatgctgtaaatttccgaaacagaactaagacacacacacgcactctctctctctccccaagcagacaatatagagactttccggactctttctttttttctctttcggtggagcttgttgctggttcatttgatcatctttcatagcccctcagactggtaacataactttagcctgtgctggtgttcagctgtcctgtataggagtggattcatttgggaacaaaactatttaatctgattcagctaagagtatattctgcgtatatattgttttctccgtatttttatcttcttatccttctctgtgcctggtttcctttttcttgtttatatctggtgtggttattcactctgccctgatgggtgtataggttcgactgattcctttccttttggccatgtatcggttcgattgaattaattttgagaaatcgactgcattttaacacctccatgtctaactgcttatactttccccatcccttgccatctgaactgttcatggctacatagttaagattgttcacttgttggactctgtggttgggggaaaatgttcatttattggtgttatctctgttagcgagtgcttggtttttggtttctgcttttttatggtttctgatgcccattggtgcggaatgaacttcattctttgcaggaattctctgctcattggagtattaccc

SEQ ID NO: 90942 - DNA, 1012 bp, Eucalyptus grandis
  Intron number 1 from transcript Egrandis_v1_0.021032m (loc us Egrandis_v1_0.019861m.g) derived from phytozome v7.0 (c hr-ID scaffold_11; pos 40627828 to 40628839 reverse strand )
aggagctctcttcctccggccctctctctcttcaggtccctctctctctctctctgagcttctgccgagagtttcgtcctggcatccctttttcgtagtaatcgaattggagttgtttggtgatccgagctgcagtggccgattgggtctagtattatgaacttccttttcatttgatttttctgtgtgtagcgtgatttttcgagaatatgctctggtggcattctttttctggtctgttcttgaggaaaaattttgactttttttctttcagcatattttacacgttctgctagttttagcattgaagctatgtccgttagggtatagctattgctctcgaagtgaaggcgcgccctattactgttttgctggataaatgtggatataatgtaaatcttggccaacgccgacttaggaagaagataggattatgaatgggtaagggagttggaagtgcttggtaaaatcgatgcttcttttttttattctttcaattggtcatgtcaaatcgtattgtgagattttgtatcgttacatatcaggtattaattcagtttttgagaggtgcagtgatgatgggattatctatctcgttaatctgaacttaacctgaggacgaaaaagtcttccattcatgctcattctgagcacctcctttctctttttcatgcaggaaatgcctgcaatttgtgagattttttgcttttttcggaaaaaaaaaaaaaaattctctttttggctcttgcacgaccattagaaaaaaggttcttgtgtttccattttcctctatcagtagttgttggtcgctattgaaatgttgctcttgtggttcatctactgggtttaattagcttgggtagctgtgatatgttggtctatgtagagaaaataatgtacttgtagataattgatatcttatcgtctatctctaacgctcctctacagacaactcacttcctttactattcttgcagctcaaggagatcgtgaatcaaggtaaattggtatc

SEQ ID NO: 90943 - DNA, 833 bp, Eucalyptus grandis
  Intron number 1 from transcript Egrandis_v1_0.013056m (loc us Egrandis_v1_0.013056m.g) derived from phytozome v7.0 (c hr-ID scaffold_9; pos 23330685 to 23331517 reverse strand)
ctcctcttcagaatcgccgtctcgtcaatactcaggttcttttttttttcccttggcttagcttaatttctttttattctattttcccttgagctgcaatctctgcgaatttcgcttgtctagttgctctgaatttctttgggctgattagcttcctggaagatcgtgagggtaggttgaaggtgactcttttgtttgatgtcatggcaatgtgaggacaggacgatgaggggaacaaaaaatgtggagatcttttattttgtgcccctcgttttatagaaacttgaatttctcgtggttctttaatgttatctaattttgcaatctggattttgacttttgaaggttgtgacttcttgtttgaagattcctgtgttctgatgttactgtgattttgcatgaggtttaggttaggattgcttgagttaagacattagtcgaggtttacttcataaaagaactaaacatgtacatgggttgcttttacacgaagagtaaatggactttcttggaagaagtgaaaattctggacttgttttttatctgatgggaaacggattctgcttcaacatgcatgtccatcaccctctcactgcatgggttattcttcattggctgcagacatataagtcaaaatagttccttgttatattacatcatttgttttcggattgaaatatgtgaatgagggcctgagagttgtgggcgagaaatgagtcttgaatggaaaagtagttcatgaatttgatggaatgatgggcaataacttgttttttgtgttatcctgcaaatgcctagggagagtcctcttccagctcttgtgaatcatctga

SEQ ID NO: 90944 - DNA, 713 bp, Eucalyptus grandis
  Intron number 1 from transcript Egrandis_v1_0.023112m (loc us Egrandis_v1_0.023155m.g) derived from phytozome v7.0 (c hr-ID scaffold_4; pos 34952872 to 34953584)
cgtcgcttcctccgaatccagtcgcctgacccgtggtatcattgcttgctactcttcgagtttcagtgcttgtacttgagtgctggctgtcgtttgagtttctgtccatcttacctgcttgttgaaatgtctctgtgaaaacaagacgagttctttttgggtttgctctagtggttcaagcacgactgatgcttttgggtggagtggtagttgcagtaggtaccaatttcctgggagtggtgagagagtgagggttgtttggtgtcccgagtcgactaggttcttagtttgtggcacgaaccctataaaatttagctgaacatgcctcccaaacatggacatcagcatctgatgatagcatatggacacctcctctgtttcctcaacgagatgaattagtttgctgctacttttttgccgatttctttttcaccaaatgcgcttttctgtattttaacttattttatcattaaagaaaaatgcattcaaatttctacttctgcattaggcattatctgcttgcaattatgctctgatcacagtggatttaatccttttttccgaaattgttggtgtttttattctgtttagctggcttttcttgtatgctttttacacgatggaagtaaaatgaaatcttgggccttctttccctctgttgattttttctcatcatagcaggtacgctcagtgggacattgaccaactctctt

SEQ ID NO: 90945 - DNA, 706 bp, Eucalyptus grandis
  Intron number 1 from transcript Egrandis_v1_0.008464m (loc us Egrandis_v1_0.008464m.g) derived from phytozome v7.0 (c hr-ID scaffold_4; pos 31988433 to 31989138)
tcgcggtggccgagcacttcaacgggaagagccaggtgcgtcactaacaaaaccaccgtccagcgatggagcatatcaattatcgatcaaaacaactggactaacaataaaactctggatagtgacatttttggtcgggaactaattattgaactcgtatcacgtcagccaacatcaaagagacaaaaaagaaagccgattttcatcgatcatgtacaccatgaatattccttatagaacgtgctagcatcgagaattcattgtttcaaaacgacacggtggcattgcaaaaccatttagttgactacgcaaataacatcctcgcacttacatcattctttctcgttttcaatgcgccggtgttgccgtcaggaaaatgaaaaaaaaaaatcaaaggaaacagaagaagatggagttactcctaccatatttatttccacatattctatctgtcgtttttcctccgaatattctcttgcatgatggggaccgcctagaaagattggagcatttgggcgtgcagcgcccaacgttgtccgacagaatgagagagagagagagagagagagagagagagagagagagagagagagagagagagacagttttgaagcatgtaaggagaaaggttacgaaactctgtaattctctagttcttgctttgtgactctttttttctcttatttttcaaattcaggtggtggga

SEQ ID NO: 90946 - DNA, 990 bp, Eucalyptus grandis
  Intron number 2 from transcript Egrandis_v1_0.026820m (loc us Egrandis_v1_0.026820m.g) derived from phytozome v7.0 (c hr-ID scaffold_9; pos 27790720 to 27791709)
tggggaaacaggtgactccgcatactctttcataaaatgtttctttgttttcagcttacctttctatatcggagaacacgaaggcatcgagggcatgtgtaattgatgattccgtaactctttacatcaaattcaactgcgaaagtatctcctaattatcagatcgcttgactttctgacgatggcgcatgggaagaacatccaaaactacaacgcgaagatgagaatacagcaaaagtatctatgggccatcgaacatgtgacttaggcacttatctagacaggcctatcttttatgctgggcaatatatagcaaaatccatcctctccttgtttcttaccatacttttgggtaccccacgtctgaaattatatcgaaagacctcatgaaaaagacacgtccattcggggaaagagaatcgtaggagatttgcctggtaggggcctcatgcagttcaattacaacacacgggggaattacggacgttattgattgataggccactgtctaagccatgacttaaaccttcaaaataaacgactctgcgcgctcgacttccatgcgtcgatgtgaatatctcgcgttcagttcagctcacatcctcctctttctcgtttatgcggtctcttctttatgatgccgtgccaaggggccacgtatattaagatttctatttaaggccttctatcgtcaaaattggcttttgcacccgtacgtctctttctctttgaaaatcggcttttgcaccaataactcaaaagtgtcctctttctctttcaattttccctctctatagcttcgaaattcctcacgcagagttattgctacaacttggcagatgtaaaaggtttgaaggtgtgcgtaaaagagtttcaattagattttcatcgagcggtgacgcgtgcggttttttttgtttttgtaaataacgaccatttttttaccacttttcaggtggtccgaaatcgcgaagcatttgccggggagga

SEQ ID NO: 90947 - DNA, 529 bp, Eucalyptus grandis
  Intron number 1 from transcript Egrandis_v1_0.004823m (loc us Egrandis_v1_0.004823m.g) derived from phytozome v7.0 (c hr-ID scaffold_4; pos 30939983 to 30940511 reverse strand)
tctttgtgtccttgatcgtagtcatcactacccaggtttgaattcccttctgttccccctgttttttaccaatctttattttacgagaaatgtcaccattttcaacaagcgcattcgttccgttgataatgggaataattcgcgaaattatttttgtttttagaacttttcaaacgaacctggttaggtgatacggtgtgaggtttgaccaattgatttcgtaagaacttggttatctttcagtagcactgtacaaaggtttggtgcatgtttagtcgaacattaaatgtagtgaccttacaacatgaaggagaaactttattttgggagaaaataatgcactttgataaagtgataatttatagtataacactcaacaattggtaagttatcgttttcttctatgggttcgaaaaataatgaaagttcttttctttttatcttttgtctttcatatttaaatatatggttttggaaggttatatgatggtgcataggtggggtttgaatggtaggtgttagggttcgg

SEQ ID NO: 90948 - DNA, 585 bp, Eucalyptus grandis
  Intron number 5 from transcript Egrandis_v1_0.014646m (loc us Egrandis_v1_0.014646m.g) derived from phytozome v7.0 (c hr-ID scaffold_4; pos 17588767 to 17589351 reverse strand)
aggaaaacagtcaagctctcgaagtatgtcaattggctgttaacttgctgaaattccagtaacttcgtgtgatggtccatgtgtgtttccttaccttctgctctgtctattagttactggcactttgtttttgaaactctttcacacaagcattggtttttattggttcaaactagcttatcattgttaaattaatgaggaaaagaatgcagttaccattttcttgttaatactatctagtgggtttggctaaagatgtttggaaattgtaagcgctctcacatcatcttttttcgcatttatatctcctagatttggcatctggggttatattgtgagatggtttcgtgcgtgagactgtgaggtgcgaaatttttttaataagaactcactcatgtggtaggcaccatttgcttgaatatgattgatttcagttgtttgaataaaagctattgaagcatccgcttgttcttgggtgttttttctattttgaactatgctgtccttctagatatttcttcttctattcttgtcagtgccataagattcttagaattggtcattgctgtttttcagcattgttac

SEQ ID NO: 90949 - DNA, 936 bp, Eucalyptus grandis
  Intron number 1 from transcript Egrandis_v1_0.027070m (loc us Egrandis_v1_0.027070m.g) derived from phytozome v7.0 (c hr-ID scaffold_4; pos 16195150 to 16196085 reverse strand)
gccgccaaagtctacattgtgtgagtaccgtgtctcgcgagttgcctccttaaacgctgctccgttggctttcttggtgggggggtttattttttgtttgtgctgctctgctttcggatgctctggttttgctctgttcgactgtgaatttgttcgcgcaactctttcgttggctcgttcctgtttcttggtgatcggaattcgtatgtagtttcggtccattgttagtgggtgagagttctttcgacagttttgtcttgtgagtctcaagagaattctgggttttactctgtttcctgttcttttggaggatgtcaaaagcttggcatcaacttgaagataaagctattttctagaacaagattcattctctttgatggctgcaagttcacggagcgatttcgagtccttgtgggtttcgatctgttaatttgcaagaagccaagctgacgagtgatagtgaagtctgaccaaacttttgaatcatgattggaggaagaaaatgcaacacccggctgcccgtgcttttcttttcgccctttgagcccacgtggtcccctgcaattcatcattcttttgattcgcttgcactccaatatttgtaacgtgacataatctcagcaattgctctccctttttctttccgttatgaacagtatctgcaacttttctctgtctcttctaggctcacggcatgcacagaatggtgttttaagaaggctggtttagtgtattataataatcaatcctagtcgggccagaaacagttgacgtggatcttgttttccttggagaaaatgtcacatagcaataaacatgatgtttttaaaccttgatttgaatgtgactagtgaccaagttccagtttccaccgagtttctttaatttcgtttaatgatctgcggaatttcttcttcctgatgcagttactattcg

SEQ ID NO: 90950 - DNA, 989 bp, Eucalyptus grandis
  Intron number 1 from transcript Egrandis_v1_0.026815m (loc us Egrandis_v1_0.025547m.g) derived from phytozome v7.0 (c hr-ID scaffold_9; pos 36722201 to 36723189 reverse strand)
gtcttttggctggctctctcagtgccgttgttcaggtaatctttactaatgtgatcgatgcctatctattttggtagtttgcgttgctcaaggtttgtctccgtttgagaatcactgcctctctctaccctttctagatctttccctctaggcctaggtaattccagaataatttagtctttcttcgtccaagcaagttgtactgtaataataaattgccagttatacatgtattggaattgtctggagaaatatgaaagtcggttagttgacccactttaccccctataaataggagctattgcttcctttgtggatagtgttgtgtcgtagtgggtggcgtgaggagagagtctagtgctggaaaatagtggtccccattgtgtaggcataggagtctacaaaagagattttgggtagaaaagcaggagcgggtcacaaatgtgcgagtgcgagacaagtgtgtgcccttgtaataaatatcttatagtaaaggtattttgctagttttctaaatagcaagagtcggattttctcaacaaaagtaatataagagctttggctatgaggctcaacgatttcttgatagaatgcttgttaaattgggttaagatgttatagtttcttcattgttggataaaatttgagtaggttggtgaactgttgagtaatgctctcatcatcatatctatgatagtgtgggagtttcacatcgattatctcatttgattgtagtattttcttgataaatattattccatgggcttggtttcaaatagattgcaatatcggcatccaacactgatggagcatggatccaagcaaaagaggacattaaagtacgcagctgcttcaactgcccgacagccaatttttgttgattatattgtgtctctggtggttcagtgacctgctaagaaaacttgtctgacttacagattttttttccttaatatcttgaatttgctttcaggctggtgctttggatt

SEQ ID NO: 90951 - DNA, 1019 bp, Eucalyptus grandis
  Intron number 1 from transcript Egrandis_v1_0.029433m (loc us Egrandis_v1_0.029433m.g) derived from phytozome v7.0 (c hr-ID scaffold_6; pos 47881792 to 47882810 reverse strand)
cccctcttcctctttggccagttcctcaactacaggtaattcccaaactcccaaagaaaacaagaacgatttgccctttggtttgatgtacttatatgacttatctttggtggtcatgggcgtcgcactgttatggggtatacgtttgtttgtctattgttctgtactctggggagactaatagggaatttgccaggtttgggcataaagcctctggattttgtcggtagctacttattgtgagcttgaggagttaatgttgctttgtgggcagttgtgtttttgtctgtggttcgtttgggttgtcttcatcaaatgagtaaggtggaatatggaaggatatgtaattgattgcactgatatttaggctgaagagacctgtcaagcggttgtgctgtcaaacacctttatttttgtttcttcatcttgtttcatttctttttcttttggctacattatattgcaactgaaaatagcttggattcgtgcatatggagatttttcaactttttgtgaaatcagtagcacgtgcattcttggagctagtgtaataatctgaaagatgactgtttttctttggtatgctcaatcaccgtgaccctatggagggatgcttatatagaatgctgagagccttctaagtttacaaagcttatttcttgaaaaacgaagtaccagtgtatgatgttctgagtttctgttggcttacgagctaaaacatataacattggaggaaaagtagaaatgcagaatcataatcaaagtggaatcagaattagagtatgggtgtatgtccgaggagagaggagcaagcacataatttaggtttagtgtgagaacgtaggtgcgccttattttttcttggtcgttaccttcttctgccaaaagaacttccggagcatgccattgacctgcctttccataatagagctgcatgttctacaagaacataattttttggttctaaaagtaaatgttctgcagggtttatcagttgcttggtgaatctgggacctact

SEQ ID NO: 90952 - DNA, 889 bp, Eucalyptus grandis
  Intron number 1 from transcript Egrandis_v1_0.021581m (loc us Egrandis_v1_0.021538m.g) derived from phytozome v7.0 (c hr-ID scaffold_11; pos 13376378 to 13377266 reverse strand )
tttctcaccaccaagccgaaggtacaaacgagatcgtgcgttgcctctcgtcattctgctcaatttgttaattcccgtcgtcgtggtcgtcgttgaaatttgctgaaagtgagttcggttgtgtttatttgacccacgtagcaaatttgagggtcgtgcgattttggggtctccggaattgagtcgcaagttggttattttctcgtggaatctttttttcaagcgttgtttcaatttggtctttcggttactcggtggacacggtaatagcatgtgctgttggtggcatttctttgctgaccgttcccttttttttctcgccgggtcgatcaatgtgcgtcggaatttctctctatattgtataatggatgtgggcaagataagtcatgtcatgttatgttatgttctgtgttatgtcatggttgtcggttcggcaagttcgtacatcttaggctcatgatgctgttcgccgaatcggttgaaagggggtgctggcaatatgccctttacggttgttggtgcgtggaacgttgggcatttgagaatgtagtcgaagaggatacttttaggaagtggtcttggtactctggattagcttagggtcagaattttgatctgttgcctggaaagatctttggcttcactatattagagtgcattggggtgttgtcatttggtttccttttgtgccgggatttatgatcgaaagacattgtgtaatcatcgcgtctgctactgattacaaatgggatttattttggccctaagtggacttttcttttaattgcaccgtctaatctatttgttccttatatgagaaaagtaaatggatatgaggtttgtcatctttgcaggaatttatggttgactttttcgtgcttataggaag

SEQ ID NO: 90953 - DNA, 1063 bp, Eucalyptus grandis
  Intron number 1 from transcript Egrandis_v1_0.042285m (loc us Egrandis_v1_0.042285m.g) derived from phytozome v7.0 (c hr-ID scaffold_6; pos 25888529 to 25889591 reverse strand)
cggtacctatagaaatagcaaaaataaggaaaagggtaaatgttataaatttttttaaattatcttcttcgtgacaaatttttcgattttttatttctggtgtcattaaaattttgaaatttgttcatgataatataaacatgttaaattaaaatttgttcattgtgatacaaatatgttaaatttatgtaaatatatcctaaatggaattgcaagaggatatataatttttcatgacacaaaagaaaaaagaaaaaggaatataggtgtgatagctatcttgagaaaaatgttaaagtggccaaccactaagtggattagtttttttctggcagaaattaattctatggcgatgccccccacacagggcacagagttgtggcaattttccatttcaaagtggttgaaattagttttagagaaataattaataggtatataactatggttatattttcttttatctctagatagagtctatatccttcaatcaagtttttaattggtaggttatatattatatatattatacacgtttaaattttaactaaatataaatttgggcgatatttatgttcctgcattagtggagggaggtgaatgcttcctcgttcttttttgttttattacaaacctttgtcataatcaaggaaagacattgggtaacgcatgtcaaattttaaataaggactttcatgaggattgttacatgagacataacatgtataatccttgttatattttgaaaggtatccaaatcaatggtaatagatatggattatgtaaaaaagaattaaatgggttgtgcatttgaaattaaattcttttaagaattatgtggactgtataaggattacatgcttgaatcattaatctagttacatgtattctttggcagcaattagtctggccttctccttcttaattgtcagtgctttagcccttcacacgtggaggaggagaagcaaagagaaaaacttcagacgaaatggagtagtgctcttgaaacaccacagagtttgaatctttacggaggtagagctagcaaaagcaaccaataact

SEQ ID NO: 90954 - DNA, 548 bp, Eucalyptus grandis
  Intron number 1 from transcript Egrandis_v1_0.035424m (loc us Egrandis_v1_0.035424m.g) derived from phytozome v7.0 (c hr-ID scaffold_11; pos 14528085 to 14528632 reverse strand )
gttcttcaaactattatagaacaaccaaactaagggtgtgtttgtttcacagaaaacgtaatgtttttggaaaatgttttccgggaaaccattttctaggaaaacggttagttttcctttgtttggtgatacatgactgaaaatattttctagtgtttggattgcatttgaaaaatgattgaaggtgtagaagacgccgacgaagaggaagagaagggagtgaagccaacgggagcgcaggaggggctagggttggaggaggtggtggtgacaaaaaggagggggcgaaggagaaggagagaggggaggaggagttatggtttatattcacaagcaaaaaaagaaaagagaaaaaaagaaaaaaaaaagaaaaaagaaagaaaagaaaatatataataataacaaattcaaaatttttaattagaaattctttttaataataattttttcatcaagctaggaccttaaaatattttggaaaactgtttttcgcaaaacaaacacgccctaaagtttccaacttttcacaggatatagaccagtgttga

SEQ ID NO: 90955 - DNA, 280 bp, Eucalyptus grandis
  Intron number 3 from transcript Egrandis_v1_0.043347m (loc us Egrandis_v1_0.043347m.g) derived from phytozome v7.0 (c hr-ID scaffold_6; pos 16101130 to 16101409)
atttggaaaattgttcatctagagtctcttgaagagcttggagaatgaagttgggtctggctttttgagggtgtgtgtcataccctgtcaaaaaaaaaactcagtgggtactctacaaaattaatttgcaagcacgttcatttgatatggggaaaaagaaaagaaaagaaaagaaaaacttgctagtcatgtattgccactatatgagttgtttatcaaggaattgggaaagtcaaagccatagtcttataatctaggaaccatagaaccgtgcatttta

SEQ ID NO: 90956 - DNA, 1015 bp, Eucalyptus grandis
  Intron number 1 from transcript Egrandis_v1_0.006771m (loc us Egrandis_v1_0.006771m.g) derived from phytozome v7.0 (c hr-ID scaffold_4; pos 22652338 to 22653352 reverse strand)
cgacaatttttcgcctgccaaccggtaagtgttacaagattctaaatctagtaaatcaaaaatcaattgaatctctctctatctctctcttttaagtgagagttatcatgttagcagtgatggctgccatccatcccagtacttttttctttaaatagaacgataaacataatatttatctatttattattaccttcattctggtgaatgttcatactttttcttttaaaggacatgccacttgacccgttaaacacgagggtaatgttctgaaaagattcgagtaatattctcgttgcatgctctgtccttttgctcatcgactattaaacaagttcaaaccagttcatctctattagtatgcggactaagaaaataatattacagtttgtacataatatcatagtatggggattttcaaaaaagccagctacattcttgcttatgtatccaatttttttacgtacttaatttctttctacgctcttttctcgatcttcttctcttcactataatttctttctacgctctcttctcgatcttctcttcactttttgtgatttttaccacttctcttcgaattccaccagcaccatcatcatcaactctaccgatgatggcaacggcagcaagttagcaaccaccataaccaccacacgcctatctctcccattttctctctcatccagttcagttgttgttgttgttgttttttttttcttctttgtttcgagattttctccttatgattacttgcttttcagtttacatttaatgatagggcaaattgcaatatatttcctacagatccaggtatacatgcaagagcattagagaaacttcaaaaaaaatcatgacaaattcctacctagtacaggggaaaacgggaaaatttaataagagagaatgcaattttaatatttatgtctagatgcttataacagtctgaatcatggcatgttcctattgtgttttctaaggttggtggaaaatcttggagaagagaccagaagtg

SEQ ID NO: 90957 - DNA, 794 bp, Eucalyptus grandis
  Intron number 1 from transcript Egrandis_v1_0.041816m (loc us Egrandis_v1_0.041816m.g) derived from phytozome v7.0 (c hr-ID scaffold_4; pos 28964824 to 28965617)
agtttgaaattcaagctgaacgcttttcggtgcatgtattttaactgagaatacttaatgggtatctgtcggactcatgctgttgactgttgaggcttttcacaaagtgaacttgttatcatgtaaccagatcataatttttcaatccggagttctttctcattatatcccctggagtgctttgtattgtcttagaatccaccaatgttttccttttcagtttctgtttttcatctggaatcctcaacaatctatcagtcatcttttatatatgatgtcaactaaatttttctcataatcttgttatgctaaaaaatattataaatcgtcttgctcctcaatgctctcttagctgatcatatcacccctttctatctttacaaagcaaatggaggataggctagtttaattcttgccatactaggaactaattttggtgcagttgacatgatgtgaaatatccgatcgtcttttctcctttgcaaatgcactttcggaagcaatattcctaataatctgggtgagtgctttgaagagcccatgctgatctcaatagtgaggtggttttagatttaacacctgaatatcaccactaatatttagctaattgctttgatgtctgaaggtccgattagaaaccaacatggggtgggattactgtattgggctttaagacctaagactatcaaaacttctatggcgcaaaagattataggcaccaagttgactggttttaatgactctttattttgcatacaggcactccttgctgattttgaagtctctgaaggcat

SEQ ID NO: 90958 - DNA, 1043 bp, Eucalyptus grandis
  Intron number 1 from transcript Egrandis_v1_0.037782m (loc us Egrandis_v1_0.037782m.g) derived from phytozome v7.0 (c hr-ID scaffold_6; pos 40290644 to 40291686)
gctacgtcaacttcttctctcacttcctcggtataacgtcgctcctcccgtttcccgtctctacttctcgggtgcatgggaacgtcatcagttttttgaggtttcatgcacgtcattgtggttctggtcttgaaatgcctctgttgtgcgggcgcctggagtcgtgtgccgttgtcgtttctgcatgatgcgagcgggaccgtgagcaaacgcccgtgcgtcaaggaggaatatcgggttttcgagatgttcgttgatgttcattatggcttccatgtttattggtgatctccttttcggcctctgtggcttttcttgttaggcttgcgaattgatttatggcgcttgtcgttcgtggccgtgttgtccttcttctcgactagttcgagaaaatggtcggtgactacggttcttcctcgccaaaataagggttttatcttgccggtgctgttgagaaatgaaacgagtgtgtgattttgaaaagcgactgtgcttatggaggttgcggagccagttgttctttcgtttccttctttttacttacgaatgaattcctttgtttctcttaaagtttagtctattcacactggttgttgtggattatacattcattattagacagatttctcactgaagctcatcttggttcttgctttttccttgccagtaaagtgaaacaaggtttttttccagtgtccattttgaaatgattgaatctcttccattatggaagtgaacatatttttgacttcataactcgtttagaaaaagaaatgcagcaactgcctgccaatttccaagatcgcctttttttcctcagaacttgttaatttgatgtctaattgttcagtcacttaatttttgccttttataggagcactactacatgttcctgctactttggtctatgaattcacatgtgtgttcttgtgcaggtgtgctactctttttttgtattgtttaatcttgcaaataattgctctcttttgctgcttctgttttctgcagcatctaaggctttggcttgtctaaattactcaaag

SEQ ID NO: 90959 - DNA, 581 bp, Eucalyptus grandis
  Intron number 2 from transcript Egrandis_v1_0.042513m (loc us Egrandis_v1_0.042513m.g) derived from phytozome v7.0 (c hr-ID scaffold_6; pos 30032637 to 30033217 reverse strand)
ttctacttggcatcgcagtcggcttcgcaactcaagtaaaactgcgctattcttgtaccaagttttcattattcacgtatcatatgttacatgtataaacatgcttgccggtgtgttttttacccattgttttcgctaacccaaattcttacttagaattactagactcctacaagatctctctataggccattttaaatcctacatttaatatattaagttcattcaaaattgctatattttttctaaaaagaaagaactaatctggtcaaattattgattatcctgctgctgtccctgcagagtcgagaggtttagtttaaccatgcttcctttcaagtaaacgaaataagaattatgaacaaagtaacagtttgagccgattttctccatatctggatgaagagatttgatgataattactgcagactttcagttgcatgtaatatttatatgggctttaatcaaccgtgattgcataattggaattatgtgttacttttgagattgcaataaaatcaacctaaatgaacatgttggttgtaatcgaaatttacactccgttccactctgtgttatag

SEQ ID NO: 90960 - DNA, 737 bp, Eucalyptus grandis
  Intron number 1 from transcript Egrandis_v1_0.018792m (loc us Egrandis_v1_0.018792m.g) derived from phytozome v7.0 (c hr-ID scaffold_9; pos 36990953 to 36991689 reverse strand)
gcttaccacagagcggtgctgctggctaaatacgagtaagaccatttattggtcagtggttttgttgcattgttgaagagatgatcttgagtgattgatgtggctattgttttgatgttctataggatgaatgtttacaagtaatagaccgttattgatgaatgttcatgtctgttgcatatttaattaatttacaaagctcccaagtatactcatccccagttgcttttgttttcatcagacaagcttcttctccatcagaacttttatcaattttctggaatggaatttggttaccacgtggtgcctctgcaccttattcctatgtacagactttgtttgtagaaactgctgtttaacaagtgtaaagatttcgagagagagcttctgactttttcttagaggtagttgtcaacattgttgtgagaacgtgctagaaaagtccgaggggtatgtgatcgatggactagcataaccagcagattgcaatgccttaatctggaagagttgctaattgatgctgagtctaactcaagtatctgcaattaagctataaagatctcttgctttttgatagttggaactggaagtgttaattttaattgatcacctagtgtgtaaaaaatcaatgtcgcttattttcttttaaatcaatctgcatcgtacttgcaacctcacatccttataactgattaattgaaggtggcagccgaaagagcccactctggctgaagggc

SEQ ID NO: 90961 - DNA, 469 bp, Eucalyptus grandis
  Intron number 1 from transcript Egrandis_v1_0.006104m (loc us Egrandis_v1_0.006104m.g) derived from phytozome v7.0 (c hr-ID scaffold_6; pos 28884170 to 28884638)
tctgcaatttcgctgccgacgtggtcagcggtaaggtcagttctggaattctagttgttgttcttctccgtccggcaagagagattgttgttccctgcatttttcctgtcggttcgctgtcgtagttgcccgtgtcagttttctggtaaatgtcggcattgtctcagtcgctcgagaaagcgcgagccaagtataaattgaagtggtttctggtcgaagagatggaaagcacattaacgaattagtcacttaaaatgattgtgtatggaaattccctactccgagaagcagtagtttcaaaattttcttcagcttttccgaataatgtcggcatgaaattctgtttttgatcgttggttttcttttagtgtgcttagctgattgcatcggggacggattaattgacttgattatgcttgacgcttaatttgcagattaagccccctgctacttctcctgtggatcgctt

SEQ ID NO: 90962 - DNA, 614 bp, Eucalyptus grandis
  Intron number 1 from transcript Egrandis_v1_0.053327m (loc us Egrandis_v1_0.053327m.g) derived from phytozome v7.0 (c hr-ID scaffold_178; pos 26765 to 27378 reverse strand)
acttttaaggcaagaaggttatcgtgtgcctgtaggtctgttcctatgaatttcaagttgattgcaatagcgaaatacaatgttgtaatttatacatgacaaaagaagacaacttttttgttgttgttttgtctagttacgtggaagccctaaaattttcaatatgttgttaaggatgaaaatggacaagaatataagctgattttttttaatattttgatgatttaagaattggcaatgtttaattgtgatgaactctccaatggatatccatcaatgcatgttacatcgtggacttatgccagatattaagcaatccattagtgttctggagttttgttgaaaatggaaagtaagaactaattattcatattacaaaaaccgaattgaaaaaagctagatatatgcccatttccttcatttgttctcttttttagtttctttacattaaaaaattaaaattttacatgagatgaaatagttttaaccaatttaggatttttttttcaaaaccaaagtatgcacatcataattttgaatgagtgaagcgacttataaattagatatcagactatgctttttgatgtattagagttcgtgtgctttttatgcag

SEQ ID NO: 90963 - DNA, 742 bp, Eucalyptus grandis
  Intron number 1 from transcript Egrandis_v1_0.005077m (loc us Egrandis_v1_0.005094m.g) derived from phytozome v7.0 (c hr-ID scaffold_6; pos 41525766 to 41526507)
cgatcggacctggatctcgactccgatctgcgactgtgagtacgcatcgtcgacgtttgattgcaatgcgatctgttttctggataacgtatttgtcttcctttgttgatgcgctcggaggagcttgtttgtcgtccgatgcaatggttggctgcttttttttttttttttggtgtggatctcgtgtagtacgggttcttctcctttgtttttgggcttctgctgctttcatttcctcgatatcccgtgtttgatgaatggtcgggtgtatctgcttgttgaattcgtcgttcgtgttgctttttggcggatacggtttgtggctggggaggaagcggtggagagagtgaaggttttggtttccgaggcgatctggttgtgatttgatctgcttgatttgccggagagtggaaagtgaaaacttgatgtggccatgtcattttgccttgttttcattgagtccagtcggtcgagttacgctcgcaagagcaaatttttgggggctttcgtctatgagatcgtggatttagtcgcatctggtgcagtcattttcttgtcctcgttttgattgagaggcatgtgatctttccttctgatctgggtctttttaatcctctgcacattgatggaggatggaggatgtatagattgcgtcttggaatatgtgattgcattttattttcagttgacccgaggatctgaattactcttgccatggttgatttgcagaggttgctaggtg

SEQ ID NO: 90964 - DNA, 757 bp, Eucalyptus grandis
  Intron number 1 from transcript Egrandis_v1_0.018008m (loc us Egrandis_v1_0.017782m.g) derived from phytozome v7.0 (c hr-ID scaffold_6; pos 34049758 to 34050514 reverse strand)
attgcatcgtaactcgttttccgggttgattgtctttttcttcttcttgtccctttctttcttttgggttctcgcctgattggttctctgtacttcgtgatcgtttttctagttggttcggcggtgaattgttgatcgcttgttttatttatgtcggcgggcatgtcgttgaatggtcccttgtgcgagcaataaggagaaaataaataagaatgaaagcagaaaaggaatcatattcggccgcatcatcttaggactcgctctcctcgttttgtcgtcgtacctgaacgatctgtgctgagttccgtttgattctgttgaaaattatcggtgggatcggactttgattgtctctgtgtatgaatcttcgtgtgagtttattttcttggcttgtacttatacaggcttaaagttttttgctgtacttttttcaaggtttcttgaattcattgggtgcttctgcggatgcctcttttgatatgacgatgagtatttccagtgaatgcatgaagttcagaatgatttcagcatagtcgtctttgatggacattgccaggactttgtttattctattttgtcttttgtttaccgaatttccttttgatgaagcacatccatcctattgttagatcttacaagtgggatcttttacatatgcttgactaatgttagaagatgtctgctttaggagatgcctgtgtcggttttaatgtcttctaagttctaatgggtatgtggttcatcctgtaactccaga

SEQ ID NO: 90965 - DNA, 994 bp, Eucalyptus grandis
  Intron number 1 from transcript Egrandis_v1_0.028842m (loc us Egrandis_v1_0.028870m.g) derived from phytozome v7.0 (c hr-ID scaffold_11; pos 42443323 to 42444316 reverse strand )
acgcgcttgatcgcaaagcgtttagctcttttctggtttgatttctctttatcttcttttggcgatcatttgttggatttgattttgctcggatggtgcatgtgattttgacatgaccttcctgaacattgtgaaaaaaaattgaatctttcctgtaaatcggcagcgtaagcgtggtaaatgaagtggtaacagagcaaaagagtgtccttttaattcattcgtttttttttgctcaaaaaaaaaaaaaaaaaatttcattcgttttcaaatttcttatcagctgtgacaactttcttggcggaataaaggaatcgagcctgtgttaatcgttttccgaatcccggtactgctaggggcggttgatggatggatggctagtaaatgtcaaattgctgaattacttgtcaagaagtttgctggtcgcgatttggattgtcatcttttgtgttttggcgttgtaaaggaagtctagtgatgtattagaccagaaatggcttaaataggtttcgcgtattagtccgtctacagtttgtattcaaaatgataggggcggtggaaaaattcgattttgttgaatatggcatgcttgtttggacttatgtgttctttcactttatttgacattttgatttttgctacatgattccgaatcccagtactgctaggggcggttgatggatggatggctactaaatgtcaaattgctgaattacttgtcaagaagttcgctagtcgtgtttcggattgtcatcttttgtgttttggcgttgtaaaggaagtttagtgatgtattagaccagaaatggcttaaatagatttcgtgtattagtccgtctacagtttgtattcaaaatgataggggcggtggaaaaattcgattttgttgaatatggcatgcttgtttggacttatgtgttctttcactttatttgacattttgatttttgctacatggttcttatacctttctgttgttcttcagagctcaaat

SEQ ID NO: 90966 - DNA, 644 bp, Eucalyptus grandis
  Intron number 2 from transcript Egrandis_v1_0.021398m (loc us Egrandis_v1_0.020733m.g) derived from phytozome v7.0 (c hr-ID scaffold_11; pos 43348013 to 43348656)
cgatcagcagattctccactgacacaggaaggtgtgatcaagttctccttgattatctgaagtacgattttttgtacctgggttatattcgcaaactcgattcatctgcactttttcccctgctgtgttcacactatagtctataagttaaaaagactctggtcacgtgttcatcctgcaacgactcaagtgaggtcctattgaagctctagtgacggaacgtagaggttcatcttatgttaaatgccatctccatggtcaacatttggactctaccagagcaaattcacttgaagcacttcaatatctaggagtccacgatcaagagttctacttaccattgcaagtcaaaaacagtcagactttcgtggactatcaaacgtacaaaaataatattcctttttgcaaagtataaccaagctgcctcgttgactctatattgtcttaatgctcgtaagtgtcagcagaacacaagtaactcaattatatcagttcactttcatgagaagagacgattgatcgcttacccttcccctgttttatcttaccccgacgaaaaaacagtcataacccattatcatgcaatacaattctcataccatgccacaggaagctagaaggcaaggtggcactaatcacaggag

SEQ ID NO: 90967 - DNA, 951 bp, Eucalyptus grandis
  Intron number 1 from transcript Egrandis_v1_0.052444m (loc us Egrandis_v1_0.052444m.g) derived from phytozome v7.0 (c hr-ID scaffold_11; pos 18001763 to 18002713 reverse strand )
aacacctctgtcgacgacttcgacaagaccttcaggtgatggcttttgagaaaaatggggttcgtgtgggatcgattctttgattttcgtttggaagctactattgatttttaagagtttgcttataattctgataggaagtagagcgccagagagacagagacagttgctcaggcgtaacccgccaatttttaacaatttatgttattttgttccgaaataaaaaatagaaatctatttgataacgtgagttaatttatattctcgagaatagatgaatggctaggaaatagatttgaattagaaataattatttttgagactcttttcttttttcttttcatcttcgtccttttctagtcagtcactgggcctcggtgataccttgccgaatctgggggagactacctcgcccatggccattggtgaggctccctgaggccggtgagattgctagctctcatctttggctggttgttgatgcccgatgaccaacaagagaaggaagaagaaaagaagaaaaaagaaaaggaaaaaaagaaagaatttctgaagattattaaaaattaaaagaaattgtactttacaaaaaaaatgagggtcgtataaaatatattctaattctttttctattttggaaatagagattttatgcatttattaaacacgtttgaatgattcataactcgtctagtgatagaatcagaaaaaattatttccgagcataaattatttctagaaatagaatggttattaaaagtacccttactctattaacaatgaagctttttataaaagtttcttataacttgatggaatagaataattacatcaaccgactcattgagtttttattttttttattctattgttgtgaagtgatgatttctcgcaatgatcagaagaacatttagagctgatagattctttttaatgtctttcatagtgtca

SEQ ID NO: 90968 - DNA, 750 bp, Eucalyptus grandis
  Intron number 1 from transcript Egrandis_v1_0.009139m (loc us Egrandis_v1_0.009139m.g) derived from phytozome v7.0 (c hr-ID scaffold_9; pos 38199806 to 38200555 reverse strand)
gccgctccttcatcaggtatcttccgcttcggttctgtgtgttccccggcgttctcttctcgcggttgttaggctcgcttttgcggttgaactttgtgatttgtgttgcgcattgaggtctcgatggttgtcgttgagctagatctggtagcgcattgtttgggaagtggctgtaaactgctgttcgacgtctcgcggtgatgctctacgaatgagctagaggcagctaaatcagatttgcctctttgattgtgccggtttcttatccggaatatctgtgcggaattgtggtgttctctgcataagcattgttatgctgtttgtttcaactagataaagatgttttcagtaataaccaagcgtatgagcgaatcgtttaaggaaaaatggtgtatcagtcaatttctagactctgctaatatgtcggatcagtgtctactgctccccccaccccccaccaaatagtatgttgccggtagaagtaggtactggtatttcttttgttgagtctcttactagtccggagcaactagaaaatccttccctcctaaatctgatcgattagttaattaagaggtgataaatgtcattaatgtatcggtagatgtaacttatccaaatttcatgctcttgagtatcttgaggtgtgtttttactaggaatgaatctcccgttaatggctaagatgatttttgttccaattgtgaaaatacgacaggtttaagaatatcactttctggagaactgagg

SEQ ID NO: 90969 - DNA, 719 bp, Eucalyptus grandis
  Intron number 1 from transcript Egrandis_v1_0.018050m (loc us Egrandis_v1_0.018050m.g) derived from phytozome v7.0 (c hr-ID scaffold_6; pos 43183493 to 43184211)
ctgcggtccgcgaccccggtgtgtatctccatccctttacctcgtttttcccttctcatcggcaaatccgagtcgagttcgaacgctttgagcctatggattttttttcttatttgcctcccccctcttttttttttttttttggccttcgatgctcaacttcctctagtcgtgtttcggctgtagtttggtatttctgataatttgagcaaagttgacgtgggattttttttttttttttttgggggtcaaaaactgagattgagacgtcagaaattaatttcatttgctagaatgtgtaaagtctatttgttgatgacctccgcccccggagagagagcgaactgtatatattggtctggacgggctcgaacttggcccatggtacgtgaagagcccaatcggcccaataggcccatcgagagtagaattccaccccggattttggcgctaaggtctgagaactcatcaaattattttattctcaccaaaattgtcccatcttgttacatcctagggaagcaatcaaaggattagcagcaagaattaccattggcttggaagttgctttcactgaaatgaagaatgtcatgttgccccctgagcttcattagggactgttcattctactttcgcttatttcaaaattcgccctgatcacttagaaaagcttccggttttcctcatcctgcagctaaatccttgcgtctgctattgac

SEQ ID NO: 90970 - DNA, 800 bp, Eucalyptus grandis
  Intron number 1 from transcript Egrandis_v1_0.002001m (loc us Egrandis_v1_0.001995m.g) derived from phytozome v7.0 (c hr-ID scaffold_9; pos 25315241 to 25316040)
acccacctcaaaaggacccagttctagttggaaaagtgagtgacttttatctgtctttctcaaaaatttacaatttttggttgttttctggatctcctctgtttctgttgattagtactgggaagaccctgtgttagttggaacagtcgagggactatccttttatctggatcttaattctccttctgtttgtattgattagtttaggtgagcggtgcggtgtacagcacatgccttgaagcggtagaattaattgttcccattttcgaggaccaaagtgttcatcttcatcttctttttccttttctgatgatcaaagacccatttgaatctgatttatgggttttgagttcttcactgcaaaggataggtgaagttgcttatcttggagtttcgaaatgacgctctctcctgccgtggtttccattaatttaagtgcgatatgtcaatcctgacatcactacctaatgtcaatttgatttctaaatgggcttccttctcttttaaaatttattatgagcgtaacttacgcttagaaattgccgtccccggtttttgcaacccagctgatgttcgattgctattagaccatcggcttccctgaagaatcgggcaatatactccaaactttatgaattcgatcccaatcaccctttcaaacagctttcctgaaaagaactgttaattccttgatttcccctcctgaaatgcttttctgatagcagttcctaatcaatttttgttgatgatgtttcggcaactcagacaaatcagagcgttggacgaggccgacataaatc

SEQ ID NO: 90971 - DNA, 777 bp, Eucalyptus grandis
  Intron number 2 from transcript Egrandis_v1_0.002001m (loc us Egrandis_v1_0.001995m.g) derived from phytozome v7.0 (c hr-ID scaffold_9; pos 25316957 to 25317733)
gtccagaacttgaaactgtctgcaaagctctcgaggtcccttctaattcttctccttgattctatgataccagatgtttttgagtctgatttgctacaagaagaattagcaaaaagctgtctgcttgtcaatacaaagaaaagcatcaccatatgtggtaataaactattaaaaactgttgaaacataagatataacagattaagagctaggtatagtttctgaacagaaatttgcagtctgaatacgtcctatacgggctcttcggtacttcagctatatattcttgggaggcgaacatatcaaatagcattagtgtcttgcctctgttttcctcaagtcagagttcactgtttagtattttccagatcacaatcagtgtgctaacctcatgtaatgtgtcgtttggtgtgcgaagcatttttcctatcttgccaagcagagatgttggagacattcccacactctatagtccattttcccagtttcctactttgatggccatatggctaattccatttttttttctctatggattattttcactggagtcccaattttcttcataacgaggttatttgaaactgttttgtctgggcatatgttacatttgtttaaattaaaaaaaccgtttagattcaccaacagttccctctccaattattcataatgtacctcagcagacacctacaaatatcaagaaaatttgtcttctcatgtttaattagagctctttattgcaggctgttgatcttagaagttcccagaccttcagacc

SEQ ID NO: 90972 - DNA, 678 bp, Eucalyptus grandis
  Intron number 4 from transcript Egrandis_v1_0.025948m (loc us Egrandis_v1_0.022794m.g) derived from phytozome v7.0 (c hr-ID scaffold_4; pos 18673500 to 18674177)
cgtgctgccacaagtgtttatattaagcttgaaaagtaaagacattgtcttttaccaaaaaaacttggttgatgtccttatgaagattcgtatttatgtatgatgaaatcttatggcatacatctttaagttttaaggttttaaaattgtgcagtagtttaacttagggggcatttgattttgttttgagccaaaatgagagcattacataaacttgaaaaatgtcacatcactcatccaattttcatgtttgaaaaatctgttagaagtttcctatatgtaggtctaaagtttatgcatatttcactgcaccagtttccactgcgccaagtttttcaagtgatgatcaatgttcgagtcaggctttgttctgttttggggaaagtgtgtcaggcattttctagtcatattggttgagaaaatctaaaagaaacatttctgtgagcttttgatcttgccgtattctgtaacatgtatgaaacagaaaatactccttgatttgatctgccaatgccaaatatggcacttacgatgatgtccacagacggcttttttgggatcttcacagtagaagttgacatgttttactgcattatcctgttatgtgagtccttcgatattgatatatgtcaaaacatatatggtgaactcattacataatctttctcaggtttacgg

SEQ ID NO: 90973 - DNA, 1042 bp, Eucalyptus grandis
  Intron number 1 from transcript Egrandis_v1_0.012131m (loc us Egrandis_v1_0.009999m.g) derived from phytozome v7.0 (c hr-ID scaffold_4; pos 23937698 to 23938739 reverse strand)
tggcccagcatttcgacgtcgtcgctcgttgccaggtaaacgttggaagccgttgactttcactgaacatggcggcggagcataggttcggctcggttcttggtagaaaagaagggagcagtcctctcgtagaagggttttcgtgtgatgtgttacgtcctcatttcggtgatgatcggcgtggtgtatgtgagtatgcggcgtctgaagtgatttgaatggtcataaggagtgtgtatgcacatcttggaagttcatggttattatatgtctgctgcttagcgcggttcatgggctgttgcatgttttggctgattagggggaaagggacctgagatgtagatgagctcgattacggtatatagagtgaccctttagtcaatcttttgcgtgggagaagttggaatttcgattctttaagacttatcttccattggagtagaaaaaatgcccattgtgtctctgatgtcgaggacttattttggtggaacgtgcaaccgtgcaacggtgatgccaaagcagagtgtgataggataatgaaagttgttctttagctgacctgacatgtcatcctcgtgtgctgctatgggtgtgtggagttgggagcttagtattgatcttttgcaagcgatgctagtcttttgtgctttattatgcaatttctaaattctgagttatttttttgccatgttcttttcttttccatcccaacacctgaaaataatgattctaggaaaaagtgactattgtgatatgatatccttagattattgaaaggtttttttttttttttttcgtcaattgtttgaggcagaaggtatgacaaacacctttttctgttttgatttctcttcgcaataactaatagtcaagtgttggatatcgcgtgatattgtgtacatgacttttaactcatttagtctaattataggagtgcatatgttatcttgttttttggaacaattaaatcagtaattgacttctttagtgcgattacttcgtatttgatccttgaagattttttgacaccagggtggggcta

SEQ ID NO: 90974 - DNA, 641 bp, Eucalyptus grandis
  Intron number 3 from transcript Egrandis_v1_0.038897m (loc us Egrandis_v1_0.038897m.g) derived from phytozome v7.0 (c hr-ID scaffold_9; pos 7121832 to 7122472 reverse strand)
tgggtatgccttttctatacccttcgaatcgtttagaaatagtcaccactactgggtatgaattttgggaaaaaattagcggcacctgtggaaattcgtttagctatttatttttttcggtgatcatagcatccagtagtggattccttacagttttattgattaaacatggcctgtatggcttacgaatgtggtgcgagaagtggtaattgaaaagcaacttggcccttgtgatttttgctgtgcctctttgtttttttgtacctgtgttgtcatgaaagtatctccttagcagaggtatatgttctcttacatgggtaaagataaaactctctcctctgacgcatttcttgatccagaccttctatagtcaaccatacgaatgaggattatcctatcgggattaaattatttagtcgttaaggagcataattctctttggtatcgttgttgcctattaggataagtgattcactgaattccatgatcgattattcttaatgaacaatcatggattaatatgctctgaaaatgataaaaaagagctccatggatatacaatttcaatgtattatcttgctggatatttgtgtagtttgactcattagtcttgtggtacttcttcctcaggattttgggca

SEQ ID NO: 90975 - DNA, 945 bp, Eucalyptus grandis
  Intron number 2 from transcript Egrandis_v1_0.008571m (loc us Egrandis_v1_0.007860m.g) derived from phytozome v7.0 (c hr-ID scaffold_6; pos 37141576 to 37142520)
agactcctgaagctaactcgaccctgaatttgcaagtaattcccttcttttctcctgttcctgaacattcttgttggtgctgctttgatatgtagacatttgaggtttttggtggaacaggacgttcaaggacttgttacttgggttcttgctgaagggtttatgccgtcatgggttttcattaaagtaaataacttctcgtttctttcccttgaactgctccttttgatattcgctgattcggtttctgcattttgcttaatgtttttattgatgtcaactaaggtaatgaggtgatggactgtatgaaatagacaaaaaaacagatagtgcagtgcgtcactgcatctttgggatgtctgctagagggagagatggttcacgtttacagttgaatggtgttaactctgcatgatgtataaggtctttcatcaatataatttgatgcacgtggaatgttgcggtcataatgatgttttccgttgctttctgcaggtatcataatatttggcctacttttcaactgtagcttatatgagaatcatttctgttctacatgctacgatacttatttttaaatggcgtctctctatttgaattgtctgttgtctactgtaccagtcttttggtgtttgattcatggtgctttggcttgctagaagtttatttttacttcatgaactgtaaattgttagattgaacttgagcagtctattcttatccattttgtttatacaacatacaaatattaaggcagcaaactttatggggaagtgaactaccacttctgatcttcaaaataagccactgtcctagaatagataatgtatgtgctgttatcgtacttgtccctctattatttgtcatatgctatttgttgctttcaatatttatcagttcttttggttcaatttgcagaataagccccttattccaaaagtggtc

SEQ ID NO: 90976 - DNA, 540 bp, Eucalyptus grandis
  Intron number 2 from transcript Egrandis_v1_0.021177m (loc us Egrandis_v1_0.021177m.g) derived from phytozome v7.0 (c hr-ID scaffold_11; pos 15616889 to 15617428 reverse strand )
gctatgtcagtatttgagaccgagtcgtatttgctattctttatgttttgctgttcaatcaaagtgactgttgttcatgcgaggctgtctgtggggtgatattgttggaaaatgcttctttttgctggatgtgatgcagttgcgccagtactttcaaagggcatgcctccattaaatcaaatggctataaatatctttcaaggcatatttccgggggaattattttacttgctgagaaaacatatggtttccatgactcttgctttgatttacattacaataggtggtttcttcgagtcacaactatgcatggtgtcacgttatagactttttagctgcctctagaagtcaatgcttttgttgtagtatgttgaaatcttactttgagaaagtttgacacttttcatgcaattgaatgtcgctcctacttgactatcctccattgcctaattaaaagatcgagctatctcattgaatctaacaaagaagctatggcattgggcaggaactcgacggaaggcctttgagggttaattctgg

SEQ ID NO: 90977 - DNA, 577 bp, Eucalyptus grandis
  Intron number 1 from transcript Egrandis_v1_0.019889m (loc us Egrandis_v1_0.019889m.g) derived from phytozome v7.0 (c hr-ID scaffold_9; pos 25080625 to 25081201)
ccagcaagagctaccggccggagatcgtcgtcaaggtaaggatgcaaaatgcgcgtttttcagttctgtgtagagcttgcttttgcggggcggggggggggactgagtgagttcgggttggcgactcggcgggtcgactcgctccgccggcccggcattattacggaggaagggatagccaaatattttttttttccgttttgatcgcattgatttgtcgtctttacttcgtcgtttattgccaacgaagaaagttactgtcgcttttggccccccaaaaaagtaagaaccctttttttttttccttcaagcttttggattaaatccccataaattttttttttcacaaatttcatacaaaagtttaagaattttcattaatatgggaacgaatcattctggataaaatccggatttttttgacatggaacacttaacgagcacttaaaaagtcaaattttcttaacgaaagttctatttttatatatatgtaatgaatattgaataatgaagagggttttgaactttggatgtggtggcagaacgtggtgttcgagaacttcaacgtgcaggcggg

SEQ ID NO: 90978 - DNA, 858 bp, Eucalyptus grandis
  Intron number 1 from transcript Egrandis_v1_0.024932m (loc us Egrandis_v1_0.024970m.g) derived from phytozome v7.0 (c hr-ID scaffold_9; pos 37875623 to 37876480 reverse strand)
ccttctccgaggtaacccagctttctttgcccccgggtttttctctctgccgttcgccttggtttcgtgtttggaaagagtggaatttgtttcgggttagggttcttgttggttacccggacggtgtggaagaggactggaaatttgggatctggggaatttgaatttgtgctatgctttttctggactgagaacggcatagctgcaagttttgattttttttgtctttgggaatggtttacagtgtacccatttttgcatagagggtggcagccctgggttgttatcaatgaaatgagccgttttgagtttctgtgtggttgaatttcctgggttgctgcatcgtgagagactaaaactgaaaaggggcttaactttatttacggtcttggagttgggaatgttgatgtcatttcttcgactgcaactagttgattcagtttctcagtgtttgtattctttggtgctaattgaataatagcagcatcagcaagtgtgcagtaagtcctttttgattggaccttgaactttggattcagtggaaattgaggaatagagacactcagcaatcgcagttagtcgggaatttttttaatatactattaatatggaaattgttcaggtcctaatttgatgtgcttagtctgatagcctgaatggtcaccagtctgttttatgggatctcaactttctttgaaagttctcttttattccctgctcgggtgatttccaactttcggagttttgtgtattcaatgtggatgattttagtagaagggaggtctcatattttccaccttcatttctcggttggctaataaagattgtaggaccgccggagtttcttaataatagtgt

SEQ ID NO: 90979 - DNA, 428 bp, Eucalyptus grandis
  Intron number 1 from transcript Egrandis_v1_0.021522m (loc us Egrandis_v1_0.021522m.g) derived from phytozome v7.0 (c hr-ID scaffold_9; pos 2030451 to 2030878 reverse strand)
cgatctctacaagttcgacccttgggtcctcccaggtaactttcagacccttcctctgcttctccaggctctgttcctgaacaatttctgtttctgctcgtgttggttttggtgaatcataccattctgggaaatgggtcgacgagttttgccaattcttgggtgattttcttgtgaaaaaatccgttctttatttggatttgtcactgtagtatgaaatgcatttctcgacgggttgaacttttcatttttgacatgtgggtcaagaagaggggtgatttcttcatttgatttctcgttgtcaaggattaagcatgatgattttgactctggtttattagtcttcaagatctctcgcgaattcgaaaccatttgattgtctgctgagggttatgatttctgatggattttggctttgaatcgcagaa

SEQ ID NO: 90980 - DNA, 673 bp, Eucalyptus grandis
  Intron number 1 from transcript Egrandis_v1_0.011661m (loc us Egrandis_v1_0.011661m.g) derived from phytozome v7.0 (c hr-ID scaffold_6; pos 43409588 to 43410260)
acgagtttcaggtcccgtcgagttttcttgtttttcttgaattttctttttcttctctccttttgcgcgaaatgggtttgtttcgttgcttgtaaatgaatttgctggcgctgtttttagcgttttggttcgtgttcttgaattgtcgctatattggtttttcttttttcttttttggggtcaaagtcgctatattggttattcgatttgaatcgatgcaatcggctggacgctgattgatgtgggcactgaggaattttgccgtaatgtgagatattttggaaattgggttttttagtggctgatggggatatttgagctcttgaaatgattggtggaggttcatctttgatgatttttttttttacttgagcagtctactgggaaatatgcatgattttttgcatatatagaacatattagttgtaatcatgtgtcatggatgtctttcaagtcatccttttgatccgcataggtattgctctgtctgtcatttgacagaactttagcccggttcgttgacatcttgggctcatttactttcttgggcttccagctttctgtcattcatctctcatgagtttgtaagtattgttgttttggcattttggagtccttcctgagatgaatatgtgtttgtcgcagaaagagctaggtgggattttgaaagatt

SEQ ID NO: 90981 - DNA, 632 bp, Eucalyptus grandis
  Intron number 1 from transcript Egrandis_v1_0.011385m (loc us Egrandis_v1_0.011385m.g) derived from phytozome v7.0 (c hr-ID scaffold_4; pos 23911120 to 23911751)
cggcgccggcggcggcggccacggcgagctccgaggtaatttgggttatctttttggcagaagttggatggcgggtcgctcgtggaaagaggaatttcctcgaatttgtttgtctgatgacttgtgcggatgaagctgcggtgtttaatcgtgggggttgattttggtttttcgtcggcctggagacgatttggggtagatttgtggctcgaattcgtttggtttttgtgggggttgtcggttgtggctggggggttttggcgcgtcggggtttttttctttccgattatgcctgaattcgccgctcccgcctttcggttgaggttatgttcttgtggtttaggaacgatttgcgtgaaatttgggcgcgaatttgcaaagtaatttcatttatcacttggggttttctgcaattgtgaacccgttcatgggttcatggggatttgatgaatcattctatttttgctgctcttgggtcgcgatgtcgttgcttatgaagatagaattcgtgatgggttttgattaattgtgcgtaaattggttgcttttgggctgtggtttttcgttgctaatgcggatgaactgggattgctgcagctccacagattggcttgttccgcctgttggataga

SEQ ID NO: 90982 - DNA, 822 bp, Eucalyptus grandis
  Intron number 3 from transcript Egrandis_v1_0.048874m (loc us Egrandis_v1_0.048874m.g) derived from phytozome v7.0 (c hr-ID scaffold_9; pos 2151361 to 2152182)
ttcctgttcattagtagaaaatcactgacatatttcttaatttattattcctgccaaagatatacatatttcttaatacatatggttatgcatgtcccagattgaagtggaactatattgttcgaccttcacagttgaggagtccattgtttctgcatatatccattgtttctgcatatatctgtatgatatcgtcatgagtacctcttccttcctttctaattcttctgcactaaatggcctcttcttggattcttcactttcttcagttagattagctttcctagtgagtgcacatttatttatattatgaacaagcactctcatttcaaaatttcacccttcgtacatacatctggataatggaccaatcttgatcgagcaacttctgatgaatgcttttgctttgcatttccagtataaatgtcggttagagttttgtctcctctgagatttctttctatagggaacttcttctacttatcgttcaactcgtcacctagcattccgctttcaattatgcctccatttcacctatgtgtttatcatgccctgtgtggtgcaaattgatcttccctcgagagttttttttttttttttttgacaaatccctcgagagttaaataagtacggatttttcaccatttaatattttcttccttccatgccgtgctgttagtggcatattctttttaagggtgagctcttgtcatgttatatgttggagaaagtatctttcattcagtcgtcagctcataattcgtggttgcagttcagactctgatgtttgattattgcactgtcaattgtcaggtagtggtt

SEQ ID NO: 90983 - DNA, 817 bp, Eucalyptus grandis
  Intron number 1 from transcript Egrandis_v1_0.005926m (loc us Egrandis_v1_0.005926m.g) derived from phytozome v7.0 (c hr-ID scaffold_4; pos 40102289 to 40103105)
ttgcgagtcaaatcagtggtgttcttgccactcaggtagggcatgtgttttcttgatatagctctaaagccgtgtgttactttgtaacttgttaatgatgcttttagagcgcctgtttaatgcaggaaagagtatacttttgcattctattggggtaattgctaacattatgagtggttgtaattgcttcttggaacaagctggaactggttatggagatatccctcataactatcgcattaggaattttggttggtttggccagataatctcatttactattacaagatgaaaaaaaaaaaaagctcatttattctgaaaaacaatttatagctgtgggatggagcttcaactttcagttgggtccgaaatgaaggagagaaaggaagaggagagtaattggtaatctctaatcctctgttgggactgattttgagtgatgtaatttgcccccaatattgctggtgattggagagatttactggcaatggtaagcaagcaaggttcttaaaggacaaatcaactagcaacaaaccactagaattaacaaagagagttttgaattcttctcctaaaatgtatgcaaaagtttgtcaccagaagagctgaagaacagaactgaaacatatgaagtgtagatttttgacaccaaaggttgcaagtctatttcacttaccacgtgaaatataatatatattttcctaaattcatcctctgcagcatttactcagcaacatgacaaaagtttttttgttgcaattgttggatgccttgtggttatgtacgtatgatatgttatttgtgtaggccttgcttt

SEQ ID NO: 90984 - DNA, 933 bp, Eucalyptus grandis
  Intron number 2 from transcript Egrandis_v1_0.028661m (loc us Egrandis_v1_0.028661m.g) derived from phytozome v7.0 (c hr-ID scaffold_6; pos 26701922 to 26702854 reverse strand)
tcttgcgggtcggcatctccttcaggctaaacaaagtaaagatctttcacgaccccgtttctttattgtcatttcttccgggctttttgatgcatcgggccatttcgggatcttggagtcccaaatttgtttccggtgtggagatattgtggcagaagatccctggttgatggttttgtttagttactcgaattatgcaagagttgtagctcttaggtaagttagttctagcatatgtccagtgtcctttatgctcaatgactacttagttcggtgaagtgcagatcaaattccaatcagatgtctgtccagcttctacttcagggttatcttacactctctctcgatggaattgtaggaaagatggaactttgtcttaggaagttcaatttgtgatttgggaggattttagaatgctatagttgggccactattgttctatctccgcaagaaattctcaaatctatgaaattgaagagcctcgatctagtatggaaagggaaaaagaacaaaacctttaactggaagcgtgtgaaaagcgtggtgttacgactaggtttgtgctgttctcatcatctggttcttgtagcataactggggactccgcaaattgatgacccccttgagggagctctttagaaacattatcagcaaagtactttacttttgacagatgtatgttatcaatactgcactagctgtagctagccaccattcatgctgcatacgtatattaatgaaaaggcaaaaaatgatcacaaagatatgggcaaataatgccccagcctcatctctgcactgattcgctcaacctgcatgtttctttaatttgattatcgtgtcgcatatccaagtctatagcatttagaatctcatttttctgcaatgaattttgcaggttgtccagtgaattttgagttcctgaactacacg

SEQ ID NO: 90985 - DNA, 895 bp, Eucalyptus grandis
  Intron number 2 from transcript Egrandis_v1_0.019570m (loc us Egrandis_v1_0.019570m.g) derived from phytozome v7.0 (c hr-ID scaffold_4; pos 35069808 to 35070702 reverse strand)
tcttttattccagaaggtatatgtcttgttaatttagtgtttctcttttatacatcctgtgctgttgcttttctcttctttgtcattgggttctggtgaagtgttaaactgttgtggccaaaaaagaaaagaaagaagcgttaaattgtttgttacatcgccacagtgaatgagtaaattagatctttgtgatgtgagtggaatgaaaagtgcaagttttttatgcagatgattcttggtttgcctattctaatgcatgcgaatctgtgagtatggagcaaagttatttacaattaaatcagattcaaagtaccttctttctattatggctaggctacccctctctaggtctctaagtcactttagaagatgggatggttgctggttaatcgtgtaatatgtgtgggttatgtttggaggctgatgatgggtgtttctaacatctttcctgctaggtaccatctgttttaattatcacttgagtatctttgtaatcgaatattaaattgttaatgcaacatcactgcaatgaatcaagtaaattagttctttgggatctggatgcaaatacaagattttctgcaaatgatcctcagtttgttcattctgatacacatagatctgcaaggatggagcaaaattattcacgactctttagagcactgtattttctctgagtctctataatcagtttaaattggagattaaatggttgttggtttatcgtgtaacatgtggagatatgcctttaggctcattgcaattgtgcttattatcatttttgataggcactatatgtattgattatcatttcttggattctgagcaccttcgcattttttcttccccaaacttaatagtgagttcatttttgacccgattaagtggccacggg

SEQ ID NO: 90986 - DNA, 1014 bp, Eucalyptus grandis
  Intron number 1 from transcript Egrandis_v1_0.016077m (loc us Egrandis_v1_0.016077m.g) derived from phytozome v7.0 (c hr-ID scaffold_4; pos 35073080 to 35074093)
tcgatctgtctgcttcctttggttggccattgaaggtattgtctttttctcattgtctctctgtttttcttactgggtatcgttttagggggctttaagaattttctccatcaattagacttactgggcaatcaaattggcctgtgcggagtaaatatcagaaattttttagtgaattaggttgggacatatgtggtccttggtttttttgtagttccgtgactgatagtcttggaaaattactgactcgatgacaaaagttacttgcccatattgaggaaatgactatcactttgaggaacttattgttgcgggatagctaacccgtggtttttcaatggccgtgattatgttcattcgaattgccttgcaaattgttgtcggaaagatagttggagcaagaaattgttctgctgatccaagataagaaacaagagagtaagtggacaaccatatatacataagcgatagagggagagacggggttcaaacttcagagttagcttaactggtagaagcataagtgcacaatggctgccttttttttttcccggttgagtttaaatttgattattggtaggatcattggctcacttccaaaattttgggcaaatgaaaccggtttcatggtcgagctagtggcaatactcccgaacaactgcttttctttacacttcaagtttaatttgcttccttgattcaaggattagattttctgcattgccggcatggcattgtgattttccaggaaacttactggtcttttgcttttactgctctgctatgttcctttggttaatccgaagtcacgccctagattgtttttgaggtccaacctggtgtgtctgcatttccttggtacttcatttgttgttgccttgctaaaagtaggcttagagtttcatttgcagcatgttttgtggttatctttgacaaatagcaaactcaaatggcctagatgtgaccgcgagatacacaggttttctcaggacataaagagctgctagacagtag

SEQ ID NO: 90987 - DNA, 907 bp, Eucalyptus grandis
  Intron number 2 from transcript Egrandis_v1_0.018427m (loc us Egrandis_v1_0.018427m.g) derived from phytozome v7.0 (c hr-ID scaffold_9; pos 21390951 to 21391857)
agttcttaagaaaggtaatcattttttatctaataccaacactagggaagattaaaaaataataataataaatcaattccacttatatcaatttagtcataaacatatcggttacgcaattaagtcataatttttttgataatttatcaatttagtcattccaactaattttaatatgaaattgctattatgaattccagccttcctacatagcataaccgacgctaacattgacaatttttataatttcttaaaatattatttttcttttcttttctttcaattttctttcccttttcgttttccttcttcatccaccgatcatgaggtcttggcgatagctagcaaccaatcataggtgaaatttgacctcgctgacttgaggtgccattctcaagtgaggctcgagcttgccaagattaagagaggtggagcctcaccaactttaggtgagcttaagctcgatctggcaagcttgagccttgctcaaggttgacaagggttagcgaggctcaagcttggccctctcttgtggttggtcactagcctctactgatactcggcgacaggtagagtaagaaggaaaaataaaagaaagaaaagaaaaaataaaaacatatatttaaaaattaattttttaaaaagattataaaaattggtaacatcatgtagtatgactagtatctacatcaggaatttatcaaaatgtttatgattcagttagcataataaaaaaaaaattatagttgcaccgatacaaatataataggattaaaaaaaaattcgacaattttctctcaatacattgcatcacatcaaaataatcggatgcccccaggcaattatcctagctaattccctggaccagtacagttctttaacttttttgttttttatgcagtggctt

SEQ ID NO: 90988 - DNA, 556 bp, Eucalyptus grandis
  Intron number 1 from transcript Egrandis_v1_0.025236m (loc us Egrandis_v1_0.025236m.g) derived from phytozome v7.0 (c hr-ID scaffold_6; pos 30063829 to 30064384)
tcggcctaattggcgccacagctacaactttggcggtgggcgttttttttatttttaattattttggtcgtgttggtttcccgttgattttgcttctcattgttattagttcaaatgaatgttattggtttatcattggagatgtgtccgaggtttgtttcgtcgaacttggtatgaaaatatcgtgtcggaaatgatgatttctgctcggaattattggtagaataggtgcggtgaagatggtgttttgaagtcgaagttgttatttgtgtcgatgctttgaagatttgggttgtgtctaataggcacgctttcgttgcattcctcagagagtcagctttttttttttttttttttaattgaatgatagcatccttcatggtggtattggctatatttttggttagtattttgatcgtttggtgttcggtgttgatcgaatttttcgtgctagattttgttcttgtagttgcttctgattaaaacccagttcgagtgctgaaaactgcattaattcgcaggtttctcgtcttcggcaaaccgtaaattgggtcta

SEQ ID NO: 90989 - DNA, 607 bp, Eucalyptus grandis
  Intron number 1 from transcript Egrandis_v1_0.009994m (loc us Egrandis_v1_0.005306m.g) derived from phytozome v7.0 (c hr-ID scaffold_11; pos 36930058 to 36930664 reverse strand )
aagagaccagtgagtattctgattcagttcttgtttatatgggtgatcattgtgaaaagaatgatttgttacccatttttgtgcgtagctctcttcaattgctgatgagatagagaaaaggaagaatggttaacctggggaaaaaaattgggacttcaatatcaagtgttcttattattagaaataatatgctccaattgttgatgaaggggctgatgagttttttctttttgtttttcatttgtgtgggggatcacagtaaaagagcaattttacccatgtttgttagctttcttcagttgttgatggttttgagataaaaaaaggtaatctttgaaaaagagggacttcatggatcttggtatcggtgtcattgtgggagctgtaagttctgtttaattttcgttagggtgtggtttacatacttattacgggtagaaaatagaatttaccctgcataagcctacataagcttcagattgtgctgattgtgatttggaaaaggaattgcctggattgcattggcacacttcaagagatgtttgattggtttgtcatgtgcttcattgcagttgacggccaattgaagtgtgagaagtggatccgt

SEQ ID NO: 90990 - DNA, 535 bp, Eucalyptus grandis
  Intron number 1 from transcript Egrandis_v1_0.053129m (loc us Egrandis_v1_0.053129m.g) derived from phytozome v7.0 (c hr-ID scaffold_4; pos 19706627 to 19707161)
tgcctcactctatccagctcttgagcctatagctagtacgtataatttcgtcttgtcgacattgccctcgtggtgccataccttattgaatattgattgatttgatttgggaagagaagtagtccaaatggcccgaaactcaaattttttttttaagtgacattagaaacgctttctttttgtaagttttttttcaatttgtaataccagaaggatctttgcaaatgaatcatgtcattttccattcaattcacaaattacttataatgtttaccacatacgattttgatttagctttttctcccgatcaggtgcatgaccgcagtattttaatcttggccggtgttttaatagttaaatgttcagaagtcgtagccattaaaaaatgagtcacgggtttcattgtcttttcctggatgttaatctacacaatgatgcatagcttttgctgttttatattccctctgttgctgttgatgtaatttatattttcttaacagatttcgagactgtcgctgtacagccagtgtctcac

SEQ ID NO: 90991 - DNA, 933 bp, Eucalyptus grandis
  Intron number 1 from transcript Egrandis_v1_0.015345m (loc us Egrandis_v1_0.015345m.g) derived from phytozome v7.0 (c hr-ID scaffold_6; pos 9783199 to 9784131 reverse strand)
gttcagcaacggcaagaactccgcggattttatcggtacgcatgaacacttctgcatccatctgcatatggcttcgattctttgctcgtcttgtcgtatgtggagagccggatatctatcgtcttggccttatcacgtaatctcagtatgatatcgatttgacccgcgtacgtatagacaagcaatctgcgttccccaattcaaggatgaagttcggcactgttcggcatgtggtgtcacgggataaatttgacgtaggagcatacattgaacggtagaaatccgccgcggttttaagtttccgcggtatcatctcgttgtcacggcgatatagcttcataaaggacacgccctcttggaaaagcgaatcaacttcacccccttcgatgtttgagaacgatagagatcttccccatttctgcaatcttcgcccttctgttgccttgctatttctacgtaattatctactgaattattgctgggacctgtctgatttagatccaatggctagatcattattgcttttcttcgtgcatagatagaaaagagagagaaaggataaggatatagaaaggtttaatattatccaaaactccaaaccggtaattcatcacaaatttatccaaaattaattttttaccataaaacatataaatttgtacacatgtgataaatttactttaaattaaatttccgatcactaaaaactctaaaccgatacatttatgcaaattcaccttccgtttgtacttactataaactgatgaacttgtgcttactcccaaactggcataactgtcaactatcacgtgttgttgtcgcttaactatcaagtgtaccaattttgagtttttcataatattaaccatacctaatttttatgagcttttttgggcagctgaaaaattgggcttgccaacatcgccaccatat

SEQ ID NO: 90992 - DNA, 1029 bp, Eucalyptus grandis
  Intron number 1 from transcript Egrandis_v1_0.025426m (loc us Egrandis_v1_0.025426m.g) derived from phytozome v7.0 (c hr-ID scaffold_6; pos 11199715 to 11200743 reverse strand)
gcaaccggaccggagctcgagtcctcctcctccgggtatgtatcttttaccctcctcatatatgcctgtctgaactttctgttgcgattcgtgacgctttactataggatcttaaccttgtaatctagtcaaatttccagatcttgtatatctctaagaaacaaagaacactttaattcttaatcggcataatatagaacagaaaactaaacacaaactcgtagcaaaaatcatgtttggtcctgttttggaaacaactattgtggagttttctttcttttctttctttttaatcggaatttgttctctactgcataagatggttcatgtttccggtgagcacagagcgaagacttttattgctttaccaaaaatatattgcataattagttgagtggtcagtcaaatgcttcgtcagagatgctttagttccatgactgaactatattgcaaatctcaactcaaactagctttaggaaggcatacttgatgcttataaactggagagtttgccatgtatcctgggaaatggtttgtaaagaacccaagtaaatggaaaaacatgaggatgcagctgatcccgggccatgaagttttgctgtaagcggagtcaagaggcgagagtaggggctgaagggagagtgcatgatagagagattacgcaataaagagtgcgcacgaccatgaacattgaacaagaaagaaaaccacgttcctaatgagaaggtaacattgaaaacacaacaaaaagaagttacaaatctgaacagcaaatttcctggaacccagttaagcaagttttcttcatatctgagtgtgaaaagagaagttggttagaaatgagggcgggggtcactgaagcatggccttttttgctaaaaagaattggggattgacggagactttgacccaattcccagtccaaatttaattaaatgactcataggccccgacgccgttccttcaccccaaaaaatgcaaggtcttccttgaaacatatctgctcactcttttgtggatacagaaaaa

SEQ ID NO: 90993 - DNA, 727 bp, Eucalyptus grandis; identical to SEQ ID NO: 90560
  Intron number 1 from transcript Egrandis_v1_0.012018m (loc us Egrandis_v1_0.012018m.g) derived from phytozome v7.0 (c hr-ID scaffold_11; pos 32584841 to 32585567)

SEQ ID NO: 90994 - DNA, 817 bp, Eucalyptus grandis
  Intron number 3 from transcript Egrandis_v1_0.004026m (loc us Egrandis_v1_0.004026m.g) derived from phytozome v7.0 (c hr-ID scaffold_11; pos 29620164 to 29620980 reverse strand )
caaaaatattcacatttggttcttatcggcttggggtaccataaccttcttactgttcttactcatccagattaagaactttaaagttgtcaggactccttattatagcactttagaggatattcggttcatttttagtgctctatcgtgaattgaattataaaggatatgaacatatgatcctcgcgagggaggaagagaatagtggtgcgatttagtatgttcacgttcaggggttaaaattggcaataatatgtcgcatacatcttaaattctccttctgtcggagcttgtttgctagttttgtttcttggctcttatcccatctttcagacattctatttggaaatgctgattcttcttttccgtagataaagcttttctatcgcttattcttgttatgcacctctatggttgggttctctcataggtttcttttgtctgtttaaatcctggagatgctgtttaatatgtggaagagggggtgggggtgattccatcattgaattgttttgcttgaaactatatcacggtctagaatttgggactcaagctgctgctagagcgcttgaggtgagcacttaccctgaagttatgtcttgtttgatgtaagtttgtaattgtgtcagtctttccaagacaagatgagtatttcctgggtagtagtgattctattcggttatagaagcctattgtttgaatgactttcctatagctgcctacatatttataagtttttgttgcactgttctgatgtcccgattgagtttacagtagagctcaacttttctttcttctttttaatatttttaggtgc

SEQ ID NO: 90995 - DNA, 638 bp, Eucalyptus grandis
  Intron number 4 from transcript Egrandis_v1_0.010813m (loc us Egrandis_v1_0.010813m.g) derived from phytozome v7.0 (c hr-ID scaffold_9; pos 21529327 to 21529964 reverse strand)
ctggtctaggcctttttgctcgtggcttcccagaggcaagaaactttgcatccctgttttgttcatgtccaatttaaacagcttgcatctcagatggtcaaagaaatttctcttttcctagtcagatctatcgatagctctctgctggaaacaaatttagtacattagtcttgtcataggacgagttttgatcacaagcaggagctgaatagaattatggaacttttgcttttctcttgactcggtgggagacctggaaatttagacccgctcatgatgtgtgctttttgttcatagctcagatgtctctatgcctgcaaattaaatgcacaagctaatgtcattatgtggtggggcagagaaatggatctctttgcacgttagctgtggaaaagaattttgtccgcagatgtctattgcacttgcactctgtttttctaacagtaaagtctcacattccagcagtgaacatgttgcaggcagaaacagaaaaggatagtaccttctcatgatcattaggccatttttacttgcattatggtgtaggttgtgaatcacatggacacggtactgtacatgcatgtgtctagtcatcttgaaagtccttcaactatttgttaatgattgcagctggcaaa

SEQ ID NO: 90996 - DNA, 792 bp, Eucalyptus grandis
  Intron number 3 from transcript Egrandis_v1_0.014429m (loc us Egrandis_v1_0.014429m.g) derived from phytozome v7.0 (c hr-ID scaffold_6; pos 4980731 to 4981522 reverse strand)
ccagtggggacacaaggtttgtcatgtgacctcgaggagtattgactctttttgtattatcgggaatacatcatccatgcacacttctttgacattcccaatcctaggtgataatttggatgttgaatatgagtgcacttcacaggatgtcttactatgttgacttcctatggatgtaaatagactaagaaaaaatggactcgcacagctataagtataatagaatagttttgatgaaagtgagcattgtgacatccttttcgtgtggttgaggttgctcgaggtgggaaatggcttttcagccacttcatcttgttgctgactctatgtagcggggaagaggagacttggttaatgaatattgctagatgcaacttggatatttgtatctctttctaattatactttgacagctatgcaacagacattctggaattgttcaacaacttggcttatatttcttttgtgtgacatgtgtaagaaagcaactctgctaggagcatcctcagttcattgtttttggggtttgttttgttttttgcatttattcactgagcaatacataaataacaatgaaataggagttcatgctcatttttatcgtgtgtaactcttcagttggtcaatttgctctacaccctgccccttcatattctgcatcctgctttttttctgctcttttttttttaactccttttttaagcattcctgagctatggaagaggtggcagtggttgcaaattaacgagtacactttttctttaataacagggacaataaaaggactgacaa

SEQ ID NO: 90997 - DNA, 908 bp, Eucalyptus grandis
  Intron number 1 from transcript Egrandis_v1_0.016793m (loc us Egrandis_v1_0.016598m.g) derived from phytozome v7.0 (c hr-ID scaffold_4; pos 37566882 to 37567789)
cttgcgagcattttgggaagttgaatcgcttcgtggtaggtgagtttttgctggatcttgtggttttcttctttgtctgcccttgtagagtggattttcatctgtcgtatgatgtcttgttctgttctttctgttcctttgatttatgggtgagctgatgctgacgtaaaggactgaattttgcatctgggacgatgtcctggtttgttgcattgttattaagatagtggtaagatggtcgagcgaatacatttcgttagagcctcagttctgctttgtagattgctctatgactgaggcacgcggaagccggtggagtttgaaactgttaaaagagaaaggcaaattgtggggacaacattctactttgcatctggtttgcgcagtgtttatttgttagatgttgaaaagggtacttttatctcatcaaaattactaaacaggttgtgcttttcggttgtctgcggcacttgtgaagtcttttcgggaatgaagttccattggaaagaaccttaatgtgttgtggctggattccatgtgcctagataacttaacgttcatttaaagttgctagttaaggtagaattatcagctgtaaaacgtgaaggtaggtgtgtgacagtgtcaagattcgaatactcaattagaacattgtggtgtctgttatcttgttctccggttaactttctaaagcttattcttttcagttcctatgttttaggccgattctttggttatgcagggtttgattttctagatatgtttgttcctctattactgaaaatatgtggtgttgttcttcgatcttggagaccctcattctggttatgttaaagtactttactgatgattcacttgacccatattttccaggtgaaccctctactctgcaagtgaagcagaattag

SEQ ID NO: 90998 - DNA, 696 bp, Eucalyptus grandis
  Intron number 2 from transcript Egrandis_v1_0.020161m (loc us Egrandis_v1_0.020161m.g) derived from phytozome v7.0 (c hr-ID scaffold_4; pos 32199376 to 32200071)
gggtcgtaggcaacaggttcatcgttttccttcatcagcaccatcatatcatcatctcttaatttctaagatttctattcattcgtttccaaaccatacatcaaatcaatggaaaacaaccccccccaaaaaaaaagattacaaaccctaatatcgtcctaccaaatttacatctcgaaatgcaagcatattggccttttgttgggaacctttcatgattctggcgttgtgtgtcatggctttattgcacgagagtcgaaatggacaattcttttcctcatcactatacagtggagtccttggaaacttccatggaaattgactcgccactgaactttttcagtacaagcttttaatttaagttaccgtattatatgttgattaaatacctagaaacaagctcagagtcaaatctggtcctagtagcccctatcacctgcattgtatgggaggcgttagaaggacatagtcataggttgagacataagtttcagtcacatttcggccccactagttacattttcttctcccttgtgattctaatgtacatatacaacgccattaaaaaataatgaaagaaatacaagaagaattgaattaggttgattagataagcaaacaaaaaaacacttcattatgatagtttatggttctctctcgctccacatgtttgattgtgaaatgttatcgatgcag

SEQ ID NO: 90999 - DNA, 793 bp, Eucalyptus grandis
  Intron number 1 from transcript Egrandis_v1_0.004577m (loc us Egrandis_v1_0.004577m.g) derived from phytozome v7.0 (c hr-ID scaffold_6; pos 14892811 to 14893603)
gagccttcgagaagcgcgccgtctcccttcgataggtaagggggcctctcctcgtcttctctctctcgccctccgaaatctcctgtgttcgcgacgcgaatgtcgaagcggacgagtcgaatcgtcgggtcccgcgtggcgggcgcccagcggggaggaagcctcggcccgaaggcactcgcgcgagttgctccctcgctttcactggcaattggactttctcgttcaccgctgaatctccaatccctcggtggtttttttttttttttttttttcggttgggccgtcgcttttttttgggggggcactgtttccactttacctaacgtaatctacgggggaaattatgtgggcggccagctattatcctttgcttccaagtgcttctccgtcgtacttggcgtgtataagtcgaatctcgcctgaatttgctgatgtttctctagatccttagattaaggtttgatctgtgtatatgctgtgtcgttgcctgagaatggttctgggtttgatgatggcgatattggtcgaggtggctgtgctgtgagattctttgtcgagatcgccggttgagcttttcgggagtttgtgtattgtttggaggtagttttgcgagaaatgtaggacattgatgtcgtcgttgagtttaataacttagttctgttcagtttcttggttttccgtggcagaacggcgagtgtggaaatggctgatgtagcgggtcgtcgttgagtttattaacttagttctgttcagtttcttggttttccgtggcagaacggcgagtgtggaa

SEQ ID NO: 91000 - DNA, 973 bp, Eucalyptus grandis
  Intron number 2 from transcript Egrandis_v1_0.007021m (loc us Egrandis_v1_0.007021m.g) derived from phytozome v7.0 (c hr-ID scaffold_11; pos 29824450 to 29825422)
cctccctccacttcaacctacggggtaagcatgtattataggtcttctgatttactcagtttatcaaatcagagaggttgagtttacgtttatctgtttcttcttcttaaaatcagaagtttatattactttaaaaagagcaggcaactgataaaactgtccttaatgctcatttgcgacggcttactaggcgtcgcctgtgtcacccgtatactttcttaattggagctactgacggtccagcgagccggttgacaccagtgactgctatcggagccatccctaaaagccgcattaggggcagttttcctgtccctaaactcgcttgagaataatatccataaaagagctactttttttctgtcatttcccggtggggagagcaaaaacgtgcaaagctttgatcatagaaagacaccaattcgatgacaattattctctctagtgcaggaagatttattaaaatttcaagttaaaggatgaaatttttctttttttattgaaaaaaactaaagtaaattttctatcatatcggagaagatgaaaatgcaacttcagaaagttacccaaccacaagccattaaagaattccagcagtctctactttaggtttctatcaatggcccacagtcaaaatctacatatggactgccatggctggtcagaaaaaaaattccacttcccaagggcctcattctcttcatttggtttaccattaatttactcaactcattaagtgggaggcaggctatggccctgtcacaccgcccatgtccacggattagatttgttcagtttctgtctgaaatggcctacaaatttcatgaacttgattctatctccgcttggacaacagctgtccagtcttatctgtcaatcgtaaagattattgtcttctgatcgaataccaagtacaagcatagcctgcaataccaacaaaactaattttgattgtcttctttttccacagtta

SEQ ID NO: 91001 - DNA, 897 bp, Eucalyptus grandis
  Intron number 1 from transcript Egrandis_v1_0.008101m (loc us Egrandis_v1_0.008101m.g) derived from phytozome v7.0 (c hr-ID scaffold_4; pos 25477236 to 25478132)
tgagctgaggtgaagctgagagttctgtgacccaggtgagcaatttgatgttttcttgagttctcgattgatgatgaatttgaaagacgggtggtggtttttccgcgaagatgtgtgagggctttctgttttgaagtactctttttgtgtgttgcccggacaaagtttgcattttttcatggttgacgggttcttgattgagccgagatgttgttttcgtgatttcgtgagatgggtatgtcgtggaattccggggaggtgttttctcagctgatgtggctcatccagattgcaaatcttgcatgaattcggcttccttttgaccttctttatggttaattttggtcgggaatcaaaattaagctctctgtttatcgaattcgcatgttgatttctggtgggatctggtttacgcgccaaactttctagctttttgatccaaagtgcagggctatctgttcagtggaacctgttgttgatcagaacttcgtatgcataaaaaatttccgccatctctcattaggttctgcagccgctatgagatgcctttttctctctcttttttcccattctttctttttgactgtttggttcaacgatcgcagaggttaaggaatgaacatggtggctaaagtagtaccttttttctaatccttcatgtgatttgtgtaattgggattaatgcattgtgctgatacttcttttgattttttgtccctttttgtttatgcctttaataaactacaccagttactagaggagaatggtgcctttagtttggatactgattttgttcatctttgtggatgaggtgtttcgagcgatcaatgattgtaattgacattgtaccttttctccccagtggtttcagatattactacttttacgcaattggtc

SEQ ID NO: 91002 - DNA, 878 bp, Eucalyptus grandis
  Intron number 1 from transcript Egrandis_v1_0.020583m (loc us Egrandis_v1_0.020583m.g) derived from phytozome v7.0 (c hr-ID scaffold_781; pos 11354 to 12231)
ctctgcattctcgccatctcctagtaaggtctcatcatctccctctctctctctctctctctctctctctctctctgctatctctcttcagtttctttgtattgccagaaccgtttctcacttgaactgtgacaatcgttacatctctcggctaatcatgggtatttgtctttctttgaactgatatacaaattcatgtgcctcttccatgcgttgttgactctaaaagattgattaatcttgctgacagtgttttgcgattgatgggcaatggtcatttttctttggatggtaaattattattttcttccgatcttccggttatgaattttcgaaatgaaggtttggttactgagattttctgcttctttcccctttgactttttaaccactcgtgtgtctttgagaaacacaaaagatcactgcaaagccgactgatagtcttgggttcagatttctaacttgggaccctccagacatgattctttgacaatttgacatgttagatgtgtgctagttacatgtatgagagaagttcgaagggtttgagaatgaatataatgagtgaatcccgtgttaggaagtgagattgtgtctatgggaaggatccttcttgctaaaatggctctcattagtaattcttgcaccatgttccaatttaattaccgttttgcagtgcggcaatgttcagtcagtacttcgatcagagaaattaccattttcccctatctttctttctttccttcctttggtacgcacttgatctcctgtttgaatctgaggatgaaaatatcacatgataatgccttgacttaattgtagaatgataggagcaactaatgttgtccttctgatttcttcttcagctttcaataaga

SEQ ID NO: 91003 - DNA, 584 bp, Eucalyptus grandis
  Intron number 1 from transcript Egrandis_v1_0.008313m (loc us Egrandis_v1_0.008313m.g) derived from phytozome v7.0 (c hr-ID scaffold_4; pos 3315234 to 3315817 reverse strand)
tggacaaaaacgaagccctcaaagccattcttgttagtttattaagctaggtgactagttctcatatggacgtaaactactatttaatgacctgatgcagtagtaatagtaagtatagttaatccttgtttccgactctgtttttggtagatttcttttcatattttggccaccataatcatgagttaacgttaagcgatcattactagagtactgtactcgttttcaaacacatatcagccctatagtaccgtgattttcaaccagtgtcttgcacaacagtgaaacaaatatagcaaagttgatatgctgcgatgatatttcaattatcgtgtgctaatttttgtatgaagttagtcgtatcatgtcaagattgaaatctctttccatacccttcatttgggattctcttgtctaacttcacaaaaagttccatatttcaccaataaggtcgattcttctctaatacaacgcttcatcatgtattcagcttcatcaatcatgacagcaatatactctttctgatggcactttgaatttgtggaataggacattgtggttggcggaaccgatacgacttcgac

SEQ ID NO: 91004 - DNA, 728 bp, Eucalyptus grandis
  Intron number 1 from transcript Egrandis_v1_0.025529m (loc us Egrandis_v1_0.025529m.g) derived from phytozome v7.0 (c hr-ID scaffold_11; pos 4776806 to 4777533)
gccgcggcgcttggccgttgacgtctcgcccttcggtaagcaccttcatcctctgtgcttaatcagcgcagtaaaggttttttttttcctccttgctctggagtgcactgaaacgagcgttggtagacttaggtgcgtgcgccgattacggaagcttcaatgtgtgggaaccttgggttcattgacttccgttcatgaatctttcatagcgtcttcatttgggggagtctatgcggtgatgggatgttttcctttcgaaccttcaatcgattttaggttcattcgatgataaaagagagttctttccctgcaccaatgaaatgttcttcccaatttgcctcgtcaaccttgttttatctttacagtaagatgtaaaaatcagccatggattgttccaagtgtaggtcttttccctcttaaacgcgctgctgcatacgtgatgaactttgcaatatggatttcgttaaccaatctctaaatcaaaaccaaaagtggttgaagattttctgtggggaaattgttgccctggtttagattttggatggactggtataattatctaaattatgctatctgttaagaatttacttggatggctgcatattgctaaagctgtgcctcataaaagttcatgtggtcctttgtgtggagttttgtcatgatgaattagaaaccacggaaagtactaattggcttcgattgcaggcttactggacccgctctcgccg

SEQ ID NO: 91005 - DNA, 687 bp, Eucalyptus grandis
  Intron number 4 from transcript Egrandis_v1_0.016968m (loc us Egrandis_v1_0.016968m.g) derived from phytozome v7.0 (c hr-ID scaffold_9; pos 31365389 to 31366075 reverse strand)
gtgattgggaacatcacctctgtgctcaaggttagaagcaacaagaattccattatccacccgctctcgacaaagtactttctagtttcacttaaagataagtttttatacaccttgtgttttcttgcaatctctggcacagatggacacgattctatagctcaatgtaaataagcccaatttatatcgacaaactcgataatgaaacgaattcaaattacatgatctttaagcatgctcaatagagatacattgcattgacatcgctgaacatgagtgcttaatccgagctgacaggtgagtacgagatgccgacccttaagtacattctaaatgtaattcttgctccttcttttttccatatgccatgttttgatatccagttaagatctcttatattacttagttgttcttatatggctccatgtgtagcacaggcatagaattgtgcaagtatattggcgtctttttatttgatgttaagttggtatatgaacgtatctcaaccagttcatctttctgagaaattttaaaggtttactccactaaatacatacacatatagtgtgtgtttgcaaggaaccttgttgttctggcctcgtgataattagacttgctaaacatctggtaattgttatggcatttcagggggataatatggctttgtgattcttttccagggaatat

SEQ ID NO: 91006 - DNA, 877 bp, Eucalyptus grandis
  Intron number 1 from transcript Egrandis_v1_0.019990m (loc us Egrandis_v1_0.016352m.g) derived from phytozome v7.0 (c hr-ID scaffold_6; pos 8575330 to 8576206)
aaggtagtgcttttgtgcaggtaccgtaaacttaaagatctctcattctcacgattttcttgttgaattagtgaagtatgagcttgaaatatattggttctagtaagtcttctttgagaagtagctggtcaaattattagtcttgttctgtatgattcgatgagtcgctggattatacagtagtgacaacttcgatggtgcaactcgtgtatttgcttattgaaaaggtggtcttaaccttgaactttatattcaaaataaaaagggaaaagttccttggtattcaaatatgatgaagagattgtattatacctagcattgtgaatatctgcgattgtcagtgatagctgcttggatgatgggtgagctaagtttttatatgataggaagtgctaagttcatctcgaagattgtattatacctagcattgtgaatatctgcgattgtcagtgaaagctgcttggatgatgggtgaactaagtttttatgtgataggaagtgctaagttcatctcgaactttgataattctatgcggttaggactaactaatgcttactgcgtttcttcagttctccttaaatttctcctgcttctctttttcctaatctttaagaaagcttgtcgaaaatatctcttcatatttctgtatcttttatctcatggaagtttgaaagatttgtcaatcttgtgaaatgggatgatattgctacttcctatgaacgtgatgcttcattctcattagtatactcagtcaattgcagcatgacttttaaaagttcgtgttattttgtttctctgattcttaggccttttttaatcacaaatatgctgtgaaagaatagtgttaagaagtgctgcaattgacaggttaaagat

SEQ ID NO: 91007 - DNA, 873 bp, Eucalyptus grandis
  Intron number 1 from transcript Egrandis_v1_0.016731m (loc us Egrandis_v1_0.016731m.g) derived from phytozome v7.0 (c hr-ID scaffold_9; pos 30317639 to 30318511)
agaagtacatctacaccatcgacgacgattgcttcgtgagtgacgacggctcttccctttttttctctgccaatcccaatctgaattttccttgctctcttttatgcggctgttgttgttgggtttcctttttcttggactgtgggtagctacattgttgcgattctcggtctggtgatggtttgggacgaagccgtgtccttgatctgcattgcagtcgatcacttggcggacttttgttaaagacgagattttgatcttcactagcttgatcttgcatcatttttcggttgatagatcgaaacgagcaggtttaggactacatctgaattatcattacactccaaggtctaggcattctggctgtatatgcaagactcgagatctgcgtccttctcttttcggaacacgaatcgtatttccctaactttttccccagaccctttgaaagcagaaccacgtccctctccactttcctagtggaaactctagtcgccgcatctcgatgatgcagcctcattggtcgtcattcgatgaactgaatgaaagagttgacctgtggaagccactcttctctgatttagtttgtatttaatatcccatgagttgtttcgactggtacattatatcttcaccttattccgatgcacgatgacgaatttaagaatctttacccacattatacctcctcgaggccctgttacttctgagttgtgactgtaggatcgaagtaagatgccttctgattattgtcttagtcaagattgattaatctagtcaaccctggagtgaggtcactctcaatgtgaagatgacttttttcttttctggtcttgtttgtcgtatcaggtcgctaaagacccatcgggcaaa

SEQ ID NO: 91008 - DNA, 966 bp, Eucalyptus grandis
  Intron number 2 from transcript Egrandis_v1_0.030844m (loc us Egrandis_v1_0.030844m.g) derived from phytozome v7.0 (c hr-ID scaffold_9; pos 35119113 to 35120078 reverse strand)
ctctaattcgaggtactaaaatcatcttaggcattgagttcaaatttgaattgtgcagagcataatgcaagtttcagacctcgcgtaactcatacaactaatgccatatatacttgggatatgggaaccgtattagcgtgaattttaatgacggtttactgtctttggagatactatgaaaaattctagacttttcaagaaaagtccaggaccattggaaggccagacaactataagagctaccaccacgttctgataaaaggtcaaacatatgtgctcagtgcaatgcggaagtagtatgttcaccgataattgattcagtgaggttcatgaatagtcaagtttgctcagtagggctctcgtcataccagaattggcataattgttctcattttatgaggaaaaaaagaaaagagcaaataacatttgttgtatcgcattttgttatcttgcttgaatcatagctgcatcaatagtatcatgaattagtcttttttgatttatgtatacctctattgaattcagtattatgttgataacatggcggcaagcaaataggattgacattatgattattaattactggtaagtgctatctgatttttgcgcctcggtgattcggtttctgcatcgaccttgcctaacctctgaggatacatcaaactgcaatatctcacattgttaattggttggtgatcttgtacctttgatcgagcaacaccaattattgtttcgtgctttgagttattcctagtttagttctgtaagcttggcccctgcatgcaaagtacgtttttttagcagtcatgtaatcatctatagcagatgtactggttctctatgggtgatgaagaccatggtgtttgtattgtcttggtttccttggcaagtagccgatgcaccagagctttgaaagcaaatttgttaccgggtattggacataggcaatctccttgaagtggggaa

SEQ ID NO: 91009 - DNA, 774 bp, Eucalyptus grandis
  Intron number 1 from transcript Egrandis_v1_0.051303m (loc us Egrandis_v1_0.051303m.g) derived from phytozome v7.0 (c hr-ID scaffold_9; pos 12189308 to 12190081)
aagaagctgatgtgaatgatctttttgtctgtctcgtcagtttaatgtttgttgggattgtagtttgaggtcttggtgtttgtcatggtgcttgtgttataccgcaggagagtgatccggagatgaaaagggatgaacttagaagagtaagtttgttctggagtgagagatgggctctacttttgattttagattattatttgcttcattcatgcatgccatctgctggtcaattattctcttttctgtttggttttcgtggttttctaatcttgtatattgacgcttacattgacttaattttgtaatgtaggcagacaccattctctctccaaaaagtcgttccctcgccctctctggtcctccttctccttctgcctccagagctccagatatccatctgtctctctctccctctccaccacctgctcctccgcccccgctctgctaagaaaggtgaaatgagacgcaccccaaagagggccttagccactggctcagtgtcaacggccaatttccttattatagtcaatatgctcacgctcatggcttctacgacctgcttcgctctctctcgctctgtctaccatcatcgtcatcatcttcatcgatatgacagacatcattctctctccaataagtcgttcccttgccctctctggtcctcctccttctccttctgcctccagagcccctgcagatccacctctctcttcctctccaacacctgctcctctagctccgctccaccgaccactccccgggctccacctg

SEQ ID NO: 91010 - DNA, 646 bp, Eucalyptus grandis
  Intron number 1 from transcript Egrandis_v1_0.023923m (loc us Egrandis_v1_0.023923m.g) derived from phytozome v7.0 (c hr-ID scaffold_11; pos 11683741 to 11684386)
tcttgcttctctcaacactgttctcctgggctacggtaacaaactcagagttgttctctgtttcgtgagcgtttgactgctgttgtcccagttgctgggttacagcacattagcattgagcttctaatagtttcagtcggtttcctgatcattatccagaataaattccgtaccgttttggcctagatcaacctttgtatacactattgttcatggaatcttctgtttttcagaaacacattgtgcaaggtgtgaaaagtcaaagctttgtgaattctgcccttgttgagtagtctttagaattgaaccttttgtagtctcaattcgcttttctcaagcactcttgacataaatgttgctagtacatgtgctgttcgagtctgaagcacatccaaatgtggataacccagtgagattttctgtatcttcttgttgttggctaaaggaggctgctactatgtgaaccttttgttgtatcatatgattttctattatgtgggattggatcgggtttgcttgttaataaaagttagaactgccaatttgaatgtctcacaagtttcttcacctttccttagattttgaacagtttagtgatctcgcaaatgagttgatgtgcctttgctactctgcagatattggtgtc

SEQ ID NO: 91011 - DNA, 881 bp, Eucalyptus grandis
  Intron number 1 from transcript Egrandis_v1_0.050716m (loc us Egrandis_v1_0.050716m.g) derived from phytozome v7.0 (c hr-ID scaffold_4; pos 25583613 to 25584493)
gggtgcgtggaaacaacgggcgtaattagacaatgcccactgtctcatttttgggaaagttcggacttgcggtcctgcctctgatggggggcaatgcaaatctttttgtgaagccattctctcttccatggactcgctttgtcaggtaaattagacaatgcccactgtctcattttcagctccaagaagtagacatgcatttcatgtttcttgttttttggagtcttctcatgatcatctgacctttatgagatgtgttgcagattaatcagtgtcttttaaaagatcatgaatctcttttcatgtgtgattgcatatttggtgtctcccttcaaagaggagatccattcgtgtcctcctcatcttgccattcgagttagagaatgaagtattgtttagtccgttagaggatgaagttttgtttagtacaggccctcttggcattgtttaatccattcatttacatgcctggctgtgtttcatttgtaatatcgtgtatgctagtacgtattggtcaacattgattgaatttttccttggtctttattttattttatttttttacaaagcaatgtctaaagggaaacaaaatctctctatcatcacaatgtacaagcctgagaattgtttctggccagtttaaggttattagggagtgaatgctgcgaaattttcaccttccggtctgcatcacatagagtgaccagacattagattatggtacggggaacttgagcccatggcgaagtttgaacacacactactggatgataaacaagacgacagaaaattcatggaatgtatctcgactgattgctgaatgctgctaaaatggaggctgcttaatgaggacgaatctgcagcatttgatatggcctagg

SEQ ID NO: 91012 - DNA, 464 bp, Eucalyptus grandis
  Intron number 1 from transcript Egrandis_v1_0.006896m (loc us Egrandis_v1_0.006896m.g) derived from phytozome v7.0 (c hr-ID scaffold_9; pos 32164988 to 32165451)
tggtgagtcggagctcgagttggttttttgggttcaaatacccctgtcatggtctgtgttgtcagggaaatttagtcgtctgaaacgcgggtagttgtggattggttcaggcaaacgtttcatatcaagttccctggtacatgcattctgatctgattaatgagttccgtctctttgttttgcgtgctgtatcggtttgttcatcagggaaaaaatttgatccattctggtttgatttgtgagaaactgtgtagtggtccatgtgtctcaaattaacacctttctccttcaaaagggtttggaagatgatgtctggagttgttttctctgttagtgcctgataatgattcatctagttcatagcagtgatttgaataactgatgagagatgagagaggattaagctttgggtgttgtatctctgaccaggtagccaccttagctcccaacgtccctgcagcgta

SEQ ID NO: 91013 - DNA, 590 bp, Eucalyptus grandis
  Intron number 1 from transcript Egrandis_v1_0.004359m (loc us Egrandis_v1_0.004359m.g) derived from phytozome v7.0 (c hr-ID scaffold_11; pos 38880930 to 38881519)
agatgtaagtttacttcgacctctcttccatttgctgatgcttttttcggccttgcagtaaaggcatttggtgaaaccaaactagttcttgctttaattaatgaataaagcataggcaattcggtttttgcacaaatcaatcaaataatttgtagtaaccctttttagtctcatggataaaggtcatgaatatgtatttgatgcattgtccatttatccgctgtatcagttaagcagacctttataattctgttagccatgaatggaaatgggctccgatcacagtaatttctctcgtcaaacataggacattgaagtataagaacagcacctgtaaaaatttcctcttttgttctttttatatagctacggcttgaaactatcacacaaatgcattcctttcccatcccagtggacatatagcagatagtcaaggggattgcctttggggaatgaatactgatattgtgactggagactcagttgatgttcatagtatgctatttccatcatcagaaaggagatgcagaagtgggctactagtttcatgagaaatgaaaatttgctttgaattctctcaggttcctatc

SEQ ID NO: 91014 - DNA, 909 bp, Eucalyptus grandis
  Intron number 1 from transcript Egrandis_v1_0.006750m (loc us Egrandis_v1_0.006750m.g) derived from phytozome v7.0 (c hr-ID scaffold_4; pos 11387830 to 11388738)
gcaaaggttagaattttttctgggttcttgttgtcctctatcttcagatgctcgcatcgtgctcgatcgcttgtgaagatagtaatggtgtctgattgtcgcattcagttgagcactttttgatctggatttgaagatgttgatgttaacacatctgtagtgtgaggaagaagctagccaaaactaatgactgggaattgtggtatggtattcacatataatacccagtttggattagtttgatgtgtgatgcttttctgccctcttgtctttcggtcatttcacttgcactagagtccttcttggttctgcattcaagaaattgtgattctgccttctctgatattctaagattgacgatctagacataaagatatgtgctgtggactccattactgtggatccatgatttagttgagtctgagccgctttgcacttggtttattttactggaaatgctacatttagctgaaaagcttgatctggatttcaagattttaatggtaacacatctgtagtgggcaagaagctagccaagttaatgaatgggaattgtatatgtaatacccagactggattagtctggtgtgtgatgcttttctggtcttttgtctttaaataaatatcacttgcactgaagtctgttttgttctgcatctgagaaattgtgattctgccttttcttatattctaagatcaatgatctagctataaaggtatctgctgtggactgcattactggggatccattacttagttgagtccgagccactctgcatttgcttatttgactagaaatgctactggcagaaattgtaaattttgagaagtgtatgttgtaaatctcagtttttctgctggtttatggtcgataattaaatacgagattagctttgttttcaggtgaag

SEQ ID NO: 91015 - DNA, 250 bp, Eucalyptus grandis
  Intron number 1 from transcript Egrandis_v1_0.007508m (loc us Egrandis_v1_0.007508m.g) derived from phytozome v7.0 (c hr-ID scaffold_9; pos 7959481 to 7959730)
tcttactgtcgttgtggtttttgagttcagcgttggtattatctttgtttgtttcagcattttccctttctttgttttgccctgtttttgaagaatatagtttattgttcttatgaattaatcacgctgtttcattttccaagtgtgttgtgttcatgttttgctgttgaagaacaagggaagatagtgaaggttgttttgatttcaatcctcaggcgcaactctgaacaagggatttaatcgggctatt

SEQ ID NO: 91016 - DNA, 795 bp, Eucalyptus grandis
  Intron number 2 from transcript Egrandis_v1_0.023068m (loc us Egrandis_v1_0.023068m.g) derived from phytozome v7.0 (c hr-ID scaffold_6; pos 5311598 to 5312392 reverse strand)
gaggactcccgggttactttggctccttcgaaagagtgagtttgtttatgtttaattggtcttcttatttgagttggttattgcttatcgcgtgcttgagccggttttaagttctaatgttcaggtctatggtgcaagctttttcttctctgctggttgctttttcacatattttgagtgacttatgttgtgtctgtcctgtagttcttaccataaaaagaaagtgtctgcagttcttgagcaattgtagtcgaattattgaagtaagagccaaaaactactgtttggagtctgattaaatttgatctgttatttctgaattgtggtcttcagaggagatagggtagatcggcttttcttctctcgactctcgctttcatacctcagtgctgcttattgtgtagcctaggacaaaatgcgagtggtcatgacccgccgatacaccatttaatcactctgttaaccaacgacccgtttgtatgatgaccgcataatgttctcttgctgtttccaagggtttgtcctcaaagccttattttccagatggaaggttgcgtatgtagttggagcctttacaatacgctatggttgacattctcatatatcttaggtcacagcaatcaagtcatatcgacgtggattagttaatatgtctctcctctactaaaaactgagattgactgtcggtttgatctatgaaaaatgtggaaactgcaaattttacatggaatgctgaaaatcgtgacctgtatctgcataggagaatcgaggtgcccctgccggaggaaataggtt

SEQ ID NO: 91017 - DNA, 525 bp, Eucalyptus grandis
  Intron number 3 from transcript Egrandis_v1_0.044484m (loc us Egrandis_v1_0.044484m.g) derived from phytozome v7.0 (c hr-ID scaffold_9; pos 14445171 to 14445695)
ttctattagttgtgaagcttcaacatagaaaccttgtatgactgcttagattttgcttagagggaatcaaaaagctacttgcctacaagtttgtgccaaataaaagccttgattatttcttatttggtatgttgcactttaaccttcttatttgcaaaatgtaccatttgcttgaaatcaaatggtcaagctttcactagctgtggaaaccttggaaattttgggttttgttcttttaattgattataggtttttcttgaactatctttgataaatgagagtaaatatattttggtattgtgtgatgagcttcaccttaagtttttgagaggtgtcacatcctggcaaattaatgaattttggtacagtgatgcagatcccgaaaagtagggacaattggattggcctctacgttacaaaatagtctctaggatcactcaagggatgctctatttacatgaaaattcttgtctctaaatctttcatcgtgacctaaagcgtagcaatatcttgttagatagtgaa

SEQ ID NO: 91018 - DNA, 726 bp, Eucalyptus grandis
  Intron number 1 from transcript Egrandis_v1_0.009395m (loc us Egrandis_v1_0.009395m.g) derived from phytozome v7.0 (c hr-ID scaffold_4; pos 24015426 to 24016151 reverse strand)
ggtttcgcaattctggtgagtgatgcttcattcatgtcgatgaccctctgtctttcttctgatgttacgcatgatcgtgggctagtctcgggtgcccacaatgagttctctaagtttggcatttttttgttaactgctgttcttagactctgtttatgcagctcgtgtgttgttgccttctcttttgcttttttttttttgggtacggttcgactgatggggatggggttttacaatggtcatctgggttttagctgtagcctccttgtgctgtttctggaggagtaatttgattatcttgttgttgatttccactaccaaaaggcttcaattttgataagttgatccagcaacttggttttcttctccatgcatgtcctatgttgaagagaaaagtctgcttggttttaagttgatcaatgaaacagggaggctgtattcattttattctgctttagttgtaatcttcttgttttcaaatgataatatggctgaggacacctgggagaagcatgatactaatgtcattctcagtatcaatgtaaattttgcgtatgatcatgtttgagtgaagagtatgctttacaggcatagtgcacgtgcttctgtaagaaatcatgctcatttgcagttatactgttgtcacgaattgttgtttcctatgttagtaataacttattgaacaatgtgataaaataacccttgattacatcttagtaggtcatc

SEQ ID NO: 91019 - DNA, 1043 bp, Eucalyptus grandis
  Intron number 3 from transcript Egrandis_v1_0.001938m (loc us Egrandis_v1_0.001938m.g) derived from phytozome v7.0 (c hr-ID scaffold_4; pos 30674051 to 30675093 reverse strand)
gttcctcaacaagtttgggaaaagctctttggttggtaatgaccttgtcatctaaaaattttatgcaagatataagttccattttgctacatcattggacatattttctactttgacggttgttggagatcttgtgacataaggtggaggatatgtagaaatactgatggagagtacatgctcttgtggtgttttaatataattatcttgaagaagcctttttataagaatggcaaagtctctattgggttggtagagttagtttcatggactttatccgctgtgtcgagcaattctccccttgtctgtctctaaataaagctggttggtgttggcttaaaagaaaataattaaaaaaaaaatgacgctggtcagtgtctcatatgaacctgagaaggcatgagtatgctgaccagctcacttgatatagcttcaataggtgcctctatttggccctcatcgaattgtctaatttattattttctctttgcctaatttattaataaataaatggatgtttggaatgcataaaacagaaattgcaatggctttgctaccaataatcttctgaacatgatctgtctttttcataggtctttcacgttgaaacgagtatttgtactgtgtatcgaaaaatagaaaacagaaagaagcgaccaatggatatgaatagcaaaatagtgggttgctactatttggttgatttccatatgtggatatcctagttaatgtaatggctctgttagtagcccctgttcaatgatcgtctttgttttgtttgaaagcatctgcagctctgtctatagctttattcgcagtctttatattcctcacttgcacatccttgcctcaaggaatatattcttaaatcttgttctctaaaatgtttaaggggcatggttacttttttaattggtgttgtggtgaatttacatattacatattttaaggatacattcagctgttaatgcactgctggcaacttatcacgtatttctcttctatctcataggtataaaggagggccagctttacctaggaag

SEQ ID NO: 91020 - DNA, 653 bp, Eucalyptus grandis
  Intron number 2 from transcript Egrandis_v1_0.001938m (loc us Egrandis_v1_0.001938m.g) derived from phytozome v7.0 (c hr-ID scaffold_4; pos 30675276 to 30675928 reverse strand)
aaggaaggcaacctttactacgtcgtctctaataggtattgatgcctgctgccattgtctcgtgccgtgctgtttggttcgggcgcctttcgtctcgaatctttggccttgtcgctcttcgtatcgcggcggcaattatggcgagtggttttgtttgtcggtctttggttgttaattatggctttgtgcgagtatcaggtgttctgcacaagcaatatcagttattttgattgtaaagtgacgatctttaatgaaagagtagattgcctgatgtggaactttttcacggaaccgaggcgcctagttctgtctttaggcctttttgttgcatgtcttcttgtggaagttatgtaatcccaaggagaaggcgaacatgattttgtggattattccctattttgtcagcagttaattcacatgttatatttccgttaatgtgctttgtggcatgtggggatgagcgagtttttctccttatgacatactgtttctggtgtgctatgcaagcattcgcatcatcagggaaagttgtgcaactgagcgtgtgaatgttgacttgcctttatatatgcacatgatctgtggccgtaaactttttttcttacgttccttttgtaggtggtatagtggttggcaaaggtacgtcggacaaa

SEQ ID NO: 91021 - DNA, 634 bp, Eucalyptus grandis
  Intron number 1 from transcript Egrandis_v1_0.011345m (loc us Egrandis_v1_0.011345m.g) derived from phytozome v7.0 (c hr-ID scaffold_6; pos 36988112 to 36988745 reverse strand)
gaggtcggttggtcttcttttttcctttttggccatttctgttcttgctgttttgtgctttctgatttttgttctctggaattttcatcgttcagctagagtgcactatcgttcaagctgttaaaaagtgtatctccagcatgcattgagcccttttggttttcgttttgcagagattcttgtttttatttgcttgtcttctgatggtgtttctgtgatttttgtatgttctccactgcatgaatgtagttttctctgacctttttgctgttgaaagtattagctgtgctgttcattctcatccattctattcaatactcccagagattcaaattgtttttctttcgccaagtaaaatctagagttgcccatatccataaaaagaaaaatagaaaaatagagttgccataatcacatgctccataacttgaggaagaagcgacgagaactcctattttcacttctcctgtagattgctggagtccatcttgctgcaaaatttatatattcatctgaagtgaaccatgttctgatctttccacaattgtatgaattgtgaaattttaacgtaccctgactaactctgagtggatgattaggcccaggttgttcgtctattggtggcggagcattc

SEQ ID NO: 91022 - DNA, 1029 bp, Eucalyptus grandis
  Intron number 1 from transcript Egrandis_v1_0.002287m (loc us Egrandis_v1_0.002287m.g) derived from phytozome v7.0 (c hr-ID scaffold_6; pos 45337965 to 45338993 reverse strand)
ataactacctcgccttcatcttcgcccgcgccgaggtagctttccgcccgaggaattcggtgtcttttttgcgcgtgggcgggggatgagagtcgatgagttttccgattgtattggtcgggttctggtagggtttagtgggggccagagatggttttagccttgcttctgttttgattgctgaacgcgatatttcgttgattgggggtggttttcggaatctatttcgtcgtcttttgacgggaaacaagctaattaatatgtgtttgaacccgtagtacggctcattctgctcctgcaacgcttccttgctttttggttgaggtttatctcgattgtggatcacttgtttttcctaccagatacgtgcaaaatgttgcgttctagatttttggtttcatctttggaggagggtgattctagtagataatggcctttcacaggctccctaatacggttcatattttgctggatgttgataatccactgtcttattgagaaatatctattcgtccccttcactaaaaaggcttgcctacaagaggctgatcatgcctgaaatggctggtatgcaagatgtctatgtgaaatttggagctgccgattcttaagggtgttaaatagttgtgttagtgttggtgcatggtgtcaaatttctgtccatatgaacacattaagtcgtgtgtatttgctgctgccttctgtttattgtgtttatagtaattggaatttagcttcttggatctgactgctgcctttgaggttgcccatcagtatatttccaaagcatttgtgcacaactagccaccaaaatcttacttggtggcttgttgcaaagtaggattttagtggctagttgtacgtgaggtgcttttgtattgtctaatgaggagaaattatcttcttggcattgtgaggagtttggaagcttgaatttactttttttcatcagaggattcagtagcttgttgattgacaccaatctcctcgacagggtaaatcaattgaaattcggcaagcagctggtct

SEQ ID NO: 91023 - DNA, 607 bp, Eucalyptus grandis
  Intron number 2 from transcript Egrandis_v1_0.049311m (loc us Egrandis_v1_0.049311m.g) derived from phytozome v7.0 (c hr-ID scaffold_11; pos 28976675 to 28977281 reverse strand )
ttcgcaagacgggtgagttttatgttcttctggcttctccttgggaattgggatttatgttgaatccgctttagggtctagattggttacgttgcgtggagattgatattgttcgtgctgcttagtgagagttgtggttgaattatggggagtgttgggcaagtgttgacggattgttgggcgcgttatctctattgtggctgatgttggggctatggagagaatctcttgtgctgatatttggggggacttttgaatgagggttcgactgtactgcgtgggatagtatagtttcttcatgctgtttgatattgatcgcattggcagctatctatcaacacaacgtgaaaattctcttggttttttgttggctctgcttctttcattgaaaatggttgttaaaaaaacgtgttcatcttattatgacgtttgatgctggaaaaatagttggcctaagtgaaaaacttttcctttaatgttaatccactgaacctcatttatttgaacttctctgtaggtgaaaagttggattagaagtgggttaaaatatttttccttgtctcgcgcatcagttgattggggtattcaaattcctaaccatctcaat

SEQ ID NO: 91024 - DNA, 673 bp, Eucalyptus grandis
  Intron number 4 from transcript Egrandis_v1_0.010023m (loc us Egrandis_v1_0.010023m.g) derived from phytozome v7.0 (c hr-ID scaffold_11; pos 27366985 to 27367657 reverse strand )
tattgcctattaattttgacggattgtcaaaggtagtaatttaattttgatcctgttgtcatatcgctagacattccagttttgctttgtttgttgaatgcactcttgtgtgatcagtttgaacgtgttgttgatattctactgtggatgaaaagttttcagttcgtctttggagtttgaattcaaaaagtgccttcttgatagaattattatcaagtgcaaggttgtgtcttttctttacatgttgcatgagccttgtatagtcagctttgagttgatcaagaaataattaataatttgtccctccctctaaattcaatcattgttttatttttacaaaccttatgtcattggcatgtctttcacagatacttcttgaaccaatgttcagtatctgggaagtatgtgtgtgaacggataatttttggcggtgggagggtggttttcatggtgatattttaaaatgttcttatatgtgagagggacttgagtatgccaggacttttctggacctaagcccacatcttcatggttattttgctctattacatgcctaaacatattcattagtttgtctcttaaatttggatgatactttccccagtttgaaagatcaatgttttgcttttctattgcaggcagtgaagaagggagacaccatctttattggtca

SEQ ID NO: 91025 - DNA, 844 bp, Eucalyptus grandis
  Intron number 1 from transcript Egrandis_v1_0.008092m (loc us Egrandis_v1_0.008092m.g) derived from phytozome v7.0 (c hr-ID scaffold_9; pos 24448420 to 24449263 reverse strand)
tggtcagcgagagagccacgctctcatattggcaggtatacataaattaataacgataaaatatgcgtagcaagtaggatttagttttctagggtaaaacgcattgccttttgggattactttgcgctacttttcgcgttgatttttttgggtcttactcgtttatgaatttagtgcgacgcagctctttgcggaaaattcttgcacgaaccacttcaaaaacatcatgatagaccactcaagtcaaatgtctatatggctttgggtgtgtatgcattcgatccacacaagaatgactctttctttggggtcgtcttggtctcgaattaatattgtcttcaagccgcaaaaattctaaatttttgtcttgcttcccaacatcttttttgcggggaccttttttttttccttactatgatgttatttctccatctttgctctgagttcttagtaacccaaatgagtcccaaagcgggaagaatgaacagattctttctccaaccttccagaagaaagaaagtatgagagaaacaatgcacttccgtccctgttattgtcatatgatgaaaaatagaaaacgtctcaactcagccatatcttcatataaatcacatttttatgccatgtaattgattgatgtgtttcgaccaaaaaaataaaataaaatccattgatgttaacaaatgcatatgtagaaaattgtgttagttgagaagaaaaagggtacttagacatattaattcctcccaagtacagattaagaccgacggaatttaatcctatttaatgttgttcatttgtattgtccgaagaatatccagtgtttcaattttcatgcacgcag

SEQ ID NO: 91026 - DNA, 1065 bp, Eucalyptus grandis
  Intron number 1 from transcript Egrandis_v1_0.010616m (loc us Egrandis_v1_0.010616m.g) derived from phytozome v7.0 (c hr-ID scaffold_9; pos 38728553 to 38729617 reverse strand)
tacaactggttctccttccgccccggcaagaccaggttagggtttctgccctcttcttcctcccgcctcgtgcttcggtgcgattgtgcgtacggggtttctgtgcgttcgcattaggttcttgcgcctccttccttttcctcgattgcccgctttgccgctttactcggtggaccgagattacgcgtcaattcatccgcgtacgcaatgggagacgcttatggggtgctttttcgaggttttagctgtgttatagagtcgagatttgtgccctatttttcgttgattctggttatttctatattaactagttagtgagccgctgaagctttggggctatggctcccacttgcagaatttagtccgttttcgtttgttatcaggttgattgcgacgggtctatctctgaagttaggggccgaatattttgctttgcttgtgatgatttttccctacttctccagagaagggtagtgttcgcaattttcatttgctgggggcgttttctttacgctctcttgtcagatggtgacctcattaacttcgtgtctttgagatttcgttgccttcctcttacttcgaggattgctccttgaccaagaagcttcattttcggaataaaagaagtagattatattgcgaggttcaaggggatgttgataattatcagggaggtattcctaggtatcataggtaagatgactcctagtgaaacgacaaaccaccaggaaaagaaagagttggaaattatttcccgtatttccttgttgactgatgcaccaacaggtccaatgccatttaactaagatggtcctacatttttgtgaaattttcaattcaaagatcttctagcgggtttagtagaaaatctgctccgacacggcgaaaatatgctataaagtgtctttgttttcctagctatgggtggggagatgtcatgaggatttttttttctttggacacttgcaaaacaagctgtctgctctgatgtcgtgctttgctttacatggttcctcaacttgttttgcagcctgaagcaccaggtctattcaagagcctacatca

SEQ ID NO: 91027 - DNA, 558 bp, Eucalyptus grandis
  Intron number 2 from transcript Egrandis_v1_0.049776m (loc us Egrandis_v1_0.049776m.g) derived from phytozome v7.0 (c hr-ID scaffold_4; pos 39250698 to 39251255 reverse strand)
caagtacacccaaccaaagattgctgaatttccaggtacatcgtctggtttgatatcatccttgtcgaattgttggtttgttccctagcttttttttgtctaaatttgttgccaccggattcaattttatattgatgtgctagtggaaatcattttcaaatccagacatatcaatatttccagtgtgaaatatattgcactttttgaaattgtgataaagaagaaagaaaacatgcttcataatggagtttggattttaactggaaaatatccataaagttctaactttattccaattgcatcaattcaatcttaaaacatttttttgtcaatcgaatctaaacattttgcaatttgtgtcaatgtagtccactggaccaattttaactataactcgctaacataaatgtcaatcgtcctatatggtgcggttagctgacatagataactattaataatattttgatattttttgatattttttgaatttttttgaattttattttccttcatttccttcttcctctaactacctagaggcgaaggccgataaggtca

SEQ ID NO: 91028 - DNA, 984 bp, Eucalyptus grandis
  Intron number 2 from transcript Egrandis_v1_0.013208m (loc us Egrandis_v1_0.013208m.g) derived from phytozome v7.0 (c hr-ID scaffold_4; pos 39875491 to 39876474 reverse strand)
agaatcatcctgacaaaggtggtgatcctgaaaaggtaaatagtttgtttgtcatatcgttattatactcatgtatggattttatgtctgaaattcttcagccccttccccacaagatctcgctgaggaggtgttttgaaacagtctcttcatgcaaaatcgaccagctccatatagtatgcacgattccctcccccccccaaaaaaaaaaagaagcaaaaacacaccccaaaaaaaccatccccacaataaaattaaggcctttacccaaaaaatgaatggatactatcaacagaaactgaaaggttttgaaaagactcccgttcaacatggatgacagtgcatctcaaaacacatttcacaaacattgtcattaattaagcaaatataaccatgaaggtgcttatctgtggaacatgatcaactcaaagagtttacaagttaaacttacaaatgcctaggtttctgtcacatccacaatatacttatccaatgtcatagaaatagagaaggtgaaataaagaaagaattgaataaacagatttccacatgaataatggattttatatcttgattgaagtatgaaaatgtgagatgttttagttttcctctggtggatatctctttagtcctatctgatattcagatttttcgtcaattcaaaaggaaaattgtttttgcaaacattcgaaaggtgctcatgcccatcaattgccatctataaaaagtgatcatgacagatttacacatgttggggtagaagttttactggattactcatagtacagcaggacagtaatctgtatgcattttatgagtgctttaaggtagtatttgatggtagcattgtagtatagtggcagaattacttttcaaagtgaaggattggaagtaacatgcacttttatgtaagattcattaattgccattcatttcttcttttctctgttaatatggattagttcaaggagttggctcaagctt

SEQ ID NO: 91029 - DNA, 724 bp, Eucalyptus grandis
  Intron number 1 from transcript Egrandis_v1_0.015863m (loc us Egrandis_v1_0.015863m.g) derived from phytozome v7.0 (c hr-ID scaffold_9; pos 21740043 to 21740766)
ggcttccagattcgtcaacaagaatcttttcccgcgtgtgcttcttttgttccgtttgtttttctgcgttctgaaggtgtgttcttttcgggctccgttggagtgtgggtgtgtatttcttttttctttttttttggtgagggggagttggtaggaaaaggtctcgaatttgtgaattccgttgtcgtattgagagaaaattcggcaggaatggatcgcccacgtgttacgtttgtggtcttttgagcctcgtgtatttatagtaagtgtcggattcttgcttcgttattggccgacgggacgaacatcgatcacgtgttgagtcctcccttgaacttaatggtgggtaattggagagggcttggttctttttcatttttacccatcggttttgtgagaactttgcttacttccttggtattggcagcctactaatctttctttatttgctttatataagattcgatttgtttgaggattctgatatactgaattgactacatcactccaaatttgccgcagttgaattcttttaagttcatgattgtaatgaactgagagaatgcatcatagacaagatgtttattatggtgtgttctgtggaaactacattaaaaattattaccttcctcttttatggcaccgaagacgaggagttgaactgagtcatattttctattttcctgtagaattcgctagagagcaaggtggattatcgtcagaa

SEQ ID NO: 91030 - DNA, 394 bp, Eucalyptus grandis
  Intron number 2 from transcript Egrandis_v1_0.006610m (loc us Egrandis_v1_0.006610m.g) derived from phytozome v7.0 (c hr-ID scaffold_11; pos 44526429 to 44526822 reverse strand )
gaggtactggttcttgtttgttttgtttcgttttcgtcaaaactgtggtcgtctgtatctggagtggttgtccgagattgtcgttttgacgaacatatactatcttcgtagtaaaaatttactttttttctgtttgttggaattgataattgtggtaagttggatcgaattagcgaccaggttctttcaagtttgacaaaggaatgcttttgctaacttaggaagagaggtttgaatggaattgactcttgagccggcttatccgattgtcctggtcgatcaatgtttggactttggagatagattaactttgcttgtatgatggtgtgcttcatcattagcggcttattgttcacaccctcatcttgtgcaggtacttggttctgggtaaagc

SEQ ID NO: 91031 - DNA, 787 bp, Eucalyptus grandis
  Intron number 1 from transcript Egrandis_v1_0.019393m (loc us Egrandis_v1_0.019393m.g) derived from phytozome v7.0 (c hr-ID scaffold_11; pos 44913281 to 44914067 reverse strand )
ggtcaaggtcggttttctctccatccctcttgcgtatgtgatttttcttgtttgtaaggtggcctgtgtcgtggccactttctgatctgcaccgtgtctctctcctttccgtccctcctcctgaattgatccaactttgtgttgtttcatccaactcttgcaatttagcaaacgggtaaaatgtttaggtggaccccttgctttcgatggaatttgttcttgaaatgtcaatggctttagcagttgcggttgcaggggatgcctctgttagttcgatttgacaaaggagaaagaaaaacccagttgactttggatatcagcatatgtaccttccactcgagtaagcactgattttgttgtcacatgcaataattccgtggttgaagatgatggggttgggaacattcccaggaacattagacgagcccgtccagctagtttgacctttcctccctgacccataaaagagatagaatctttcttatcatgctcatagagaagtgagtgcttcagtcgttttccctatcctagttcttcgatttctcaagctagtttgacctttctggtaaattagagccccattcactttgatgtgttttcactttggagtgatattcaatgtcaaactcattctttcattcacttgctcaccatccagaacgagaaggcacgcttcttcaggtttcatatcggatgtcgcccgcatcttttcattagtaaattccgcgcttttgcctttttctgtttatcagatcgaccagaaaggaactgcacctggggccagaag

SEQ ID NO: 91032 - DNA, 645 bp, Eucalyptus grandis
  Intron number 1 from transcript Egrandis_v1_0.011598m (loc us Egrandis_v1_0.011598m.g) derived from phytozome v7.0 (c hr-ID scaffold_6; pos 14053584 to 14054228)
agatctactgtggtccttctaacgagggtgtacaggtcggttttgaattatttatttttcttccacgatgacaccgcttgatgggtttcgtaatctcactgtcttggtggtacatgctcatcgagtagcaaattcttcttcttgatggctctgtactttaatggacattgcgagctcaattcgccaaatttcgcgtaatggcctaatctgggagagaaatcacctaaaacgagcatgtcgattttcttgaagaaatcggggtgaccctgtgtgctttgtggacggtgttatcaatgagataagtacagttttgatattgtggatgaagtgttttgaggaaatgtatggattaaagaagagttgtatcactggttgtagctatgactttgttttccattgtaatttgggaaggaagattacatttttttggagctgcaattttgctcctgatgattaagtcaaggaaaataagccgcggtcaacctgtttttagtgaatcctagccatcttactgagtcatgatatagttcttaagttgctgcacaagattacgtgcacattctttctcttgtaagttcctgctctatggaatggggtttcagtgatgcagggtaaattggagcataaaggctttcctttcaactt

SEQ ID NO: 91033 - DNA, 790 bp, Eucalyptus grandis
  Intron number 2 from transcript Egrandis_v1_0.047012m (loc us Egrandis_v1_0.047012m.g) derived from phytozome v7.0 (c hr-ID scaffold_4; pos 21105101 to 21105890)
aaggcttcgccgacgcaagacatattgtcccacatgttcctagcaacaaacgaggatgggaaacacatgactaagctcgatatcgccgacaagattctcggctagctgattggtggccgcgacaccaccagtgctgcttgtacttttgtcgtttaatatcttgctgagcttcctgcgatctatgaacaagtttacaagggtaagatcttctttttcagtctattcttttcttttcttttttggttatatccatgtaaatattatgatatgagtaatatacacaattaaggagatagtaaatttttttgtggaactataattaaaaaaaagcaaaatctctaaacgtgacttgttaatatccaaaaagtcaattgaactaatcttttttaggaagagattttttacatttaaattctctaatcattttttaattaatctcaacaaattaattggtgaattagacacccatgtgacaaagttttttatttgaaattctttgagaaaaacgaaggtatatataaccagtgaagataatcccaaatttgcctaccaagcagcaaatgatccatgcctttgtccatatttatctgtatgtactgactcttatttttttttgtatgtaatcgtgcgataaacagagcaaattgagatcgcgaagtcgaaagctccgggtgagttgctgaactgggacaatattcagaagatgaaatactcgtggaacatggcctgtgaagtcttgaggcttgcccctcctctcaagggtgtgttcagggaggtcatcaacaacttt

SEQ ID NO: 91034 - DNA, 271 bp, Eucalyptus grandis
  Intron number 2 from transcript Egrandis_v1_0.021309m (loc us Egrandis_v1_0.021309m.g) derived from phytozome v7.0 (c hr-ID scaffold_4; pos 13084613 to 13084883)
ccagacggaacaagcgtcgtcccagcctcttcgatgtaactcatctcgacccccctcaagctctttccaagttagaagaaaagctaaattggccacaagtcaagtccttttgatataattaatcgtgatcagcgatttctcatgctcaaagtcttgcgatttccgccactaattaattattttatccaccacttttgtttattcattgttttggaatatagtaatccgcttgttggcgcactaatccatgtgttttttgccccaggtgggg

SEQ ID NO: 91035 - DNA, 881 bp, Eucalyptus grandis
  Intron number 1 from transcript Egrandis_v1_0.012593m (loc us Egrandis_v1_0.012593m.g) derived from phytozome v7.0 (c hr-ID scaffold_6; pos 48015470 to 48016350)
gtgggatatcctcagaccctgttttggtgctacaggtgtgatttctctttttgattctgttcctagaattggttcattcttttgctaatgaaggttgacttaatgtggtgaggatggattcttatgaactcttgatgatactcatgaagattcaagatcagtaggattatcagatagagatagctgaaatgacgatttggaattccacaaccgcaattgaagtgaaaacaaaagttgatcagttaaaactggtgatgactaatttcttacgaagggcagtccgtgtctagcaacaaacgcgaaagtacttaacgtaaatataatttgttttcaagaaccataagctcttggatgtccttgtgcccatgtgcttctcatcatactttatgaacttttgaaagaaccttgatttttgacagttgtgttcaatgctcagagataaaatctctcccatttgaaaagtacaagcgagggatccaagtcggtatcttgtaccaactttttggcttctttcagctatggttttattaaacatcttaacttcaaaacattgaagaagacctttgtctttgactcagaccagagatagtacatgccagcaacaattaagggtttcagattggtgcctttagtttgcttctaagttgagagacctggccgagctttcctgactctaggaattcatgcatcaaaaacagaccagaatttgaccctactatgagcaaattgatttatcaagagtaagctgcttgcaagctaatgtttgcaagcagttgccagttcatcaagtggttgcgttcaaatcagattttggcgtttttaatttcgattgtttcctttatataggttacatacttcaagtgtggggcagtttcgcttgg

SEQ ID NO: 91036 - DNA, 662 bp, Eucalyptus grandis
  Intron number 3 from transcript Egrandis_v1_0.017299m (loc us Egrandis_v1_0.010476m.g) derived from phytozome v7.0 (c hr-ID scaffold_9; pos 35041802 to 35042463)
gcggccaaattgcggagtacatcggtcggaaaggggtaatgccgctcatttcgatcagctgccgttttttcataggggtttcttttatcatttgtcttagtcaagtgtaagcaatttccaccttggtttgagttcttttggctctttgctcttctgccggaactttcattttgataatgtgactgatttttggagattttcagcactgaacaatcagcatcctgaaaaaaaggataagatgttcggtttgaagtaatttacgttttaaatttgatggagcttttggagtcatttgagtacctttcattaagctataagtagaggttgaagagtttggtccgtgcccccaagccttttccatggcttttggcttttcagcatgaggctctaaagcttcactagttttctattgcttattatgggtgaagctgctgatgtaattcactgcataaaacaaattgctgcatatggtgaatgaataccagtacaatctaacaaaatattctcattctggaactttattgctaatttcttgatttgctgagctgacctgttccttctaaatgtccaaaacaaacgtcactatgattgcttttgttatgtattctgtgattcttgtgtggacactgtcaattcctaaccatgcttaactgcagtctctg

SEQ ID NO: 91037 - DNA, 917 bp, Eucalyptus grandis
  Intron number 1 from transcript Egrandis_v1_0.015320m (loc us Egrandis_v1_0.015336m.g) derived from phytozome v7.0 (c hr-ID scaffold_11; pos 15422917 to 15423833 reverse strand )
gtgacaacacggcaacaaggtaatggaaaattaaccgaaacaagcaataataggttaggcttgaacctgctctaataccatgataaatttagagacaaataactcaaatgcaatttaacgaggttcggcttaagtaagcctacgtccttggaaatcctctctcaaagtttttttttttttttgttatgaattctttgagagagggattgcctttttagtgatagaggttcataattatttgctgaattacatggaatatacaagataacaaattgaacaagaacatatcaccaaaccaggagaatatcacataatcttctcttaacaagaaacgaacaccaaatcaggacaatatcacataatcttctcctaccaaaataggaggatcatctggttaacaatagagatatataaacataaattgtcatgaataatgttaatatttttattaattaattatttcaaatgatataaataattatttttaaaaagataactctcaaataagtagaaacaagggggccttaaccggtttctttaatgtcatcacgagcacgaatcacgttgaaagaaaatgcacgactgattgactatggagaagcaagatgaatgggggagttggtgagagtcacgcccaaagctaacccgaatttcctatttgattaacgctctttcaatcattgcgatcagcgaaaagattgattcttgcggaagggtgtgatggtggtagttgtaggtaaggggtggatgcattgacctaccaactaacctgtcagtcccatccaccacataccttcctaccattagcacttccatttcttgatttgtccacagcagccaggctcgcccgccactctctcactctctctcttcttcattcaggccatcgcaggttccgtgaaatttgtaagctcgta

SEQ ID NO: 91038 - DNA, 764 bp, Eucalyptus grandis
  Intron number 2 from transcript Egrandis_v1_0.007922m (loc us Egrandis_v1_0.007922m.g) derived from phytozome v7.0 (c hr-ID scaffold_9; pos 27766922 to 27767685)
atacaaaggtgattatcattcttgaaagctttctaccgtatattttctttcagcaaatcagacctgttcttccaccttgttcttgagcaggtgcagctcgaaaagctgactagagaacatcacaagaaaatgacagtattatagaacagcactgcctgctggatcattagtgtatgctggtgctaaatgatcttaccccaggcagtgcatatgcatagaactgcaaccctccacaaattcaaatggtacaactcaaaccaagcagtgttagtaatcccagttttttcagaaagaaatcagtagtcactatagtttggccacacaatctgtagtggagcccaacaaggcagccctagggggaatgaaggagcccaatagtttggccagaagaagcttcatggccacaggaagtaaacctcacataaacaatcagtaaataattgaaaacctaaagataaagcgggatgtgatttgaaagttgacgtggttttaggataaaaactaattaagtcaaactgacaggcacttgaagtagcttgggaagcagcataattagaaacctcaaaacaacaatcagtaaataatttgaagcaggaagtaaaccttgaaacaacaatctataattgaaaaccttgaaacagcacttgaagcagcttgcacagcagaataataagcaagggtgtgatttatcagtttatatgggtttaaaaatataaattaattaagtcaaatggacaggcatttgaagcagcttgggcagcagc

SEQ ID NO: 91039 - DNA, 548 bp, Eucalyptus grandis
  Intron number 1 from transcript Egrandis_v1_0.008600m (loc us Egrandis_v1_0.008600m.g) derived from phytozome v7.0 (c hr-ID scaffold_9; pos 31546461 to 31547008)
cgccgctgccgccagtcgccggtcgctatccgccagtccaccgtcgtccgaaaagaagaaattttatgtcgttattaaacaaatttttatttttagaatataaattttgtgtcgttatcaaacgattatttttgcctagaaactcttttagaaatagaaatagaaaaatctatttctgttccagaaactatttctggaacagaatggttgtcatgcgtgccctaactcaaatgagatttggaacttaaccaataaaagaagttggtgagtcgctttaaataagggtcggtgaattcttacaaaaagttggtatacttaaggccttgataagtaaaataataatgacaaaaagttactccattcggtgcgtcatttttgggccggatcggcctaggaaaatgaacccaggcccaggccctggcccgggccgaacacgagtatagcggacccccacgtgcatgtcacgtgacttccccttccctcctccctggccaagaccagtcagtccgacagagagctgctcctcttccccaagaaacaagaaaagc

SEQ ID NO: 91040 - DNA, 335 bp, Eucalyptus grandis
  Intron number 2 from transcript Egrandis_v1_0.039644m (loc us Egrandis_v1_0.039644m.g) derived from phytozome v7.0 (c hr-ID scaffold_11; pos 9916594 to 9916928 reverse strand)
tttgctcgctatcggtactcatctccatacccaaagtaaagcaaagtggaaaagcatagtggagaagttgaagaaactgcctctccaagaagtccaatggaagtcaaagataagttacaatgcatctggatacgaggcaaaacaaaattttctggacagcgcaagtttctttgtcaacaagaaaaaaacaaatgcaatatggagagctcatttctttatacgggaagtcgaaattgatgtccttatcaataagtcctcaatcagattgctgatcgtgataacatatggatgcttaatcagtcaagatatcttggaagagagattattcgtcgaga

SEQ ID NO: 91041 - DNA, 578 bp, Eucalyptus grandis
  Intron number 1 from transcript Egrandis_v1_0.014851m (loc us Egrandis_v1_0.014851m.g) derived from phytozome v7.0 (c hr-ID scaffold_11; pos 14480491 to 14481068)
caacaaggtctccaagcgcttgaagaaggcccgaggtgagccgcatttcgtcgcccggggcttttcttgcttgcttgcggctgcgtttttttttttttttttctctctctctctttccgttccctgtttggttttagagcgtgcacaggaagtgaaatgcgggtgatttcctgctctgtagcgttctgggtggtgaaaatgtggctccatttgagtgtcggtgaagagatttcgcgtgggagtagttggtttctctgcttttccggagtttggatgagggattttattaacttcatttcaagcttctatttcggtggtgtgtcttaaattctccggtctttgcttcaaatgaagctcttcgagatcgtaggaactcgcacggagttacctcgtttttttggggggggctagaaatataaaaaaatcttgccctcctagctttttgttttgcttgtgatgaaactgttgaaaatctatttatttttatttttttgttaatgtcaatggttctctgtttcgtcttagcactaagttacatataagttaatgttgtcttggttgcctgctacaagggttta

SEQ ID NO: 91042 - DNA, 714 bp, Eucalyptus grandis
  Intron number 2 from transcript Egrandis_v1_0.026219m (loc us Egrandis_v1_0.026010m.g) derived from phytozome v7.0 (c hr-ID scaffold_9; pos 10893969 to 10894682)
ggtgctgtccaaggtctccttttgttttgatttgtgggcttttttttttagggttattggattgatatcagggtttttcttggatgtcctgcctgaccctttgatttgtggatggctgacgtctgatggaagaacgggttctcgctgttacgattgttctttctcttgttgtcttgtaattctgttggttgtctgaagtagtttattcttgctggaaatttgttctcttttgtctgcttgacgctttattttcatggatttgtggtcagctgtgaaagatagattggcataaggatggaacatctttcgcatttggaatatcggtttcgtagataacaaatttgtcttttgatgtagagaaaatgaaccatcacttttagaagacttactgatttcaccatcaagctttttgatgaatacttaccttttctttctctggatattggagagtttgtttaagtcattgtccgtatgcttacctgcaactatcactttgggcattgatattgcgcacatattatgctcagatttatttgactttttatttatttgtgttttctggagaatcagattttatactctaagattaattttttgaactctacctgaactagttaacaaaactgttttgtttttatttctgtgttgacgctgtctggtcattgtctcaatttcacagatcctgctagtgcagctgcttctcaggcaagcaag

SEQ ID NO: 91043 - DNA, 990 bp, Eucalyptus grandis
  Intron number 2 from transcript Egrandis_v1_0.021962m (loc us Egrandis_v1_0.021962m.g) derived from phytozome v7.0 (c hr-ID scaffold_9; pos 20344739 to 20345728)
ttagagcattgtcctgaaatatttcctaagaaaaagtaagttatgttgaccaccttttcccctttttaaatataattctccgagtccctcgaggaatttaggaataatataaagatgaaagtacattggcgaagtcgtttcaaatgtctatgatcatagaaaagagtagtatgcatctgcgttccacgggtgtgaaattttttatttgaataaaattggactatttactttagtgtaaagcattggttatattgtatacaatttcctaagtcttcattttcgaacaaaatataacaacggaattcttagttcatgttagacattaataatacaaaatatcagtttttcattaacaattggaaaattcctaattgttgttgttatatgacatagggaaattctctatgcgatcaacaacataatttttaatattgataacaaatgacaaaaatcttccaagaaattacttaataggaagagttgcaaaaatgttagaattgtcaatagttgctaatttgaaacattaaaactcactaaaactaattttttaacataactcacgatacttaacgagacaaaaacaaaatcttcgttggaagcaaaataaatagagagtgcaagaaagaatcttattgctaggaaaattatcaatttcctacaaattagagtccgatgtgctacttttagaggcaatattaaaagaaaaggttgctattatatatttaaatgaatattgttactatcaatattgctatcataaaaggaaatgataaagatggcaaaaaattagagaaaattgatgtatcaactatcaagtgatatttggtaaatagttaaacatattaagtgaagtcattcactactaaatggcattggtattccttctattgggaggatttctttaatgaattgaactcgcatttgacattattgttctcacagaagtttctaacttgtccgattcaactttcgatcagtccaataagaagc

SEQ ID NO: 91044 - DNA, 1012 bp, Eucalyptus grandis
  Intron number 1 from transcript Egrandis_v1_0.025093m (loc us Egrandis_v1_0.025093m.g) derived from phytozome v7.0 (c hr-ID scaffold_4; pos 11515750 to 11516761)
tcattttctctacaaggggacagtgagataaacttgtcagttcattagctctttcaacctagaattttgaagtgggcttcttgtggatgaatgcgttgtttgttttcaccatctcctgtgtcttgcataattgatttgatcgccatttggacgatttgaaagtggagattgagtcacatttgggtaaaaagagacacagaaaagatagcaacgatccttactttgaggtctttatttattgttttctcgtttttcatgctccagtagattataattttcatacgttgccaatagtactaagatccttacttttctagtggatatttcagatattttagtctagctggtgcttgcttttggctttatacatgattgacgttggaaaagaatctacaacatagtgcgattgcagtatgacgtgtcttgtaaattcagtcaggaaaagatcattttggactcttcactgctgttggaacttggaagataggctggaaacaaaatccatccgaaagtcaaaaagttaacttttcagttacgtaaagcacatacaaaagatgctctacttttatcttttctttaagatgggagaatagtgaaatcatagtgtccttccaaaagatgtagaagaggacgaaggtgtctaatgttgggaccacatcgatcacatcctttggtacaactgtttttttttttttttttggtattatctagtaccttgtttgtttgattgcaattctggacccaaagttgtggtcccctcggattctcactaatcatgcatttggtatgcaaggtcgataattgtttggttccttcttgtgatcttagccgtttgtgggtccttgtttggtgcgtttggtatggttgtgctcgcgcaaggagtttcataagctcttttcagttatctatatatgcaggcagagtttgttggacctctatgaacttgagaattcattagcatctcttctttttcttgtcacagttcttattgcaattctcaagatagatccac

SEQ ID NO: 91045 - DNA, 975 bp, Eucalyptus grandis
  Intron number 1 from transcript Egrandis_v1_0.026573m (loc us Egrandis_v1_0.026573m.g) derived from phytozome v7.0 (c hr-ID scaffold_6; pos 45134737 to 45135711)
agttctttgtcagagagtcgttcacgattcgtaaggcaaggcgttcttcgcttttgttgaattgttttttaccctttctcgcgatctctcttttgtctttctcagctttggcctcttttgacttcttgtttggtttctgaaaattcggtggggaaatagtagaatcttgaaatcttgaaatcgactgtgatgggatgtgtgtgctgcttgtgattcgtatccgggacgaggtctgccgtcgataaagatcggtttttgttgataattcgaagaggggtttttgttctgtgtgaacgtcgaccaagcgcatgtgtatggtgatgattggaatggtatttcgagggagtggtaagaaaaaaaatcgaaacttggcactaattttgttatctggagatgggattgcttcttccttgtgattttctttgggtttttggctgttctcgatcgctgttttaatgaggggacagttcgtcaattgcctcagagggtctctcttgcaaaagagagggaggaagcaatgtgggtgtggaggggctgtaaattttttgggcgttgcagctttagagccttgttgtcctgtgcatggctgtagtggtggccacagaagtgattgagtgatttttatgtgttgtacttttagaaatttgctatgtgcaaggatttggcattggtaagaagttactgcacaatgttgagtaatcaatttttcttttcaggatgaaggattataagctgttaagtgcatatagactgatatcgaaaataagcttatattaaccgctatagtttttggaaaataagcacctcttaaaagctagaagccggggttgaaaagtcctctcaaacacctctgacgacttcaatttttcttcttcttttttcaccctctggttgtgcattggctgtaagaaactgcaaaagaatgatcatcttgttttggttcattgattaacatgctgatttttcaatctgcag

SEQ ID NO: 91046 - DNA, 1033 bp, Eucalyptus grandis
  Intron number 2 from transcript Egrandis_v1_0.040367m (loc us Egrandis_v1_0.040367m.g) derived from phytozome v7.0 (c hr-ID scaffold_11; pos 43558738 to 43559770)
aggtctataagaagcaattgaaatatatcccccctgtccgataatagtttagataggtttatcattacttatgttattatcaaatcacactaaatttctcgtgctcattaaagtgtatcgtcaatctaaaaacttgaaccaaacaattaattgaagggtttgcgacaaatttgaatggatgctcagatactatgttaaatttcagatccgatatttatattaacggttcactggtgatcggttttgatgtaatcctcgtttttatacagagcttgaggaaatattgaagggaagagagaaaggaggaggacttagctggggcgacatacaaaagacgagatacacagagagttgctcgatagttgatgaggctcatccctccagtgtttggtaactttagaaaagcacccaaagacattagcttcggtggctacgaaattcccaaaggctggcaagcaacatttctctggttgattacgggaaaaaaataaaaagaaaagcaaaattacctttgtatatactgaattaatgtgaaaagaaatatgtacatgattttcaatacggttaataccacaaaaaatctcaaactatatccaccatgacacaaatgtcccaaaattttcttggagtcactaaaaatcataaacttgcccattgtgacacaaatgcccccaaacttttttcctatgtcataaaaaaaaactcaaaactaataccagagtgaaaagatatacatgagataaaattgaaatagagggtatatataagtttaggctttttcaggacacataaatagtttgggtatttgtgtcatagtaggcaagtttaaatttttttgcgacacaaaaaaatggggatatttgtatcataatgggtatagcttgagatcttttatggtatttgccctttttcaatagttgtcaaatctttttaatcactcatttgtgatgtcaaatgatctgaatttgcaaaggtgtccatcccttgcaaatgaaaaatgtactcataaaaatgttatcgagaattaggtatt

SEQ ID NO: 91047 - DNA, 828 bp, Eucalyptus grandis
  Intron number 1 from transcript Egrandis_v1_0.025692m (loc us Egrandis_v1_0.025692m.g) derived from phytozome v7.0 (c hr-ID scaffold_4; pos 25455452 to 25456279)
tcgtcgtcggagggcgcgcttgatttccgtaatcggtatggtttcggatttgagcggagtgcttgagcggcgtactacattgggctgtgttcgtttttgggtttccgcgcgttggtcgattgcggctttcgttttgatgatctgtgctatgtcggagtcgaacgttgtcggttggttcgcgggtctttgtccgaaaactccaaacccctctcgcgccgtctttgtgttttggtcttcgggtcgatgtgatctgcgttatgcttgtcgtcgagagcgaagtgtggcattggggagttcttgattgccgtaaagttctgattttttcggatgatcaagtgctgaaagccgccccgccgagagccgtttccaagtttttctagtttagcatttcgggagaggagtgatgtcgcgatttttaagggttcttgaccgtttgtttctgggggagaaggtaagatttttttggagaatgtcaaagattgagtaggggccacccggtctatcagtttgacagcgcctgttgctccaagtgttatgttgcaggaaggggaagactttgagtttttggtgaaaggctcgaatgcgtgtcatgtgctgattctgttcagcttttagcttacttcagtgatctgtttttgtcggattgcgcgcatcgattattaagggcggctggacttttttatgcatccgatggatagatcctgttgttaaacttttggagcaactggtgcaattatcttctctatcaatatcaatgccggctttctggactttgattggcaattttctgcaggagattgaccgtttggactggctttggagtggaat

SEQ ID NO: 91048 - DNA, 790 bp, Eucalyptus grandis
  Intron number 2 from transcript Egrandis_v1_0.042836m (loc us Egrandis_v1_0.042836m.g) derived from phytozome v7.0 (c hr-ID scaffold_4; pos 28249700 to 28250489 reverse strand)
ggagaaatacctgaggaactgtccatacttgagaggttgatatattttcaactatcatcgaacaactaaccggcgagattccactagggatttttaacatctctggcattaattacttctatgttggttggaaccagttgcggtgaagctttccttctgatattggcaccactcttccttctctctagtattaccttggagggctcaataacatgttcaccgggataattccgtcatctttgacgaataccaccaatcttcggggactttaccttgctaacaataatttccatgggccaataccgaaaaatttgggaaggctaaagggcctttacgtgattgcattgggtttaaaccagttgcaagatgacttgagttttatttcttctttagctaattgttccaacttagaaattctctcggtggaagagaactcgatttacggatcattgccaacatccatctccaatctctccaccagcattaagcaaatttcaatgtcaaacaatctgatccatggaactattccttcagcctttggaaatctcttcaacttgtcgtatttgagtttaaagaataattctctaaccgatagccttcctgattctattggagcactttacaacttgcgggtactttttttgagcagaaacatgtttactagagagataccgccttcgattggtaatatgacatctttaaataggcttttccttccttcaagacaacaatttccaaggctacataccacaaaggcttggcaattgcacgcaactaatcgagctagagc

SEQ ID NO: 91049 - DNA, 719 bp, Eucalyptus grandis
  Intron number 1 from transcript Egrandis_v1_0.004553m (loc us Egrandis_v1_0.004553m.g) derived from phytozome v7.0 (c hr-ID scaffold_9; pos 22480794 to 22481512)
acagacgcgggctcgtgggtctctccgaggttcaggtacttgtctcgattccggcccggttcttggaattgatctctccaagcagctgggcatgcttgttcgtgttcttgggatgatcttgtgattgcttggggttcttcttctttttatcggttgttttttttccagctcgacgtcttttcttgaagttgccctggaggtagagggaatgggaaggcacccttaaggggccgattcttgaaatgtggaactttttaaggctcttcacttgcatgtgtgttggctgttcttgaagtggctgatcagggtcttgggcatcttgatatgaattgggttgttctttttcctgtcctaagtgatactcaacttgggaatttcacttacttctcctgctcaaggataggctcattgattgtctggttctacgtcgaactatttggattcagtgatgtggttagattttgctgctgggattgtatattttgatttaatggtccgacaccaccattgaattatgttcatttcatctcacatcttgatttgaatttttcttcttcttctttttttcggttaaataagcctctttatggatgtagtctttaccgaggatagtctaagagcatttggaacttgtgtacgctaacaattggccaggtagtgtttctgaacctaaaccgcccttctttcttttctggattaggtcatcatatccattgaag

SEQ ID NO: 91050 - DNA, 801 bp, Eucalyptus grandis
  Intron number 2 from transcript Egrandis_v1_0.003664m (loc us Egrandis_v1_0.003664m.g) derived from phytozome v7.0 (c hr-ID scaffold_6; pos 48519216 to 48520016 reverse strand)
tcaagccctgtggcgacctcctctggcgcctgcaggtacataacatacactatgcgcacacaatacattgcacatgcgcttacgtatcaaaaatgacatggataggtagaatcaatttccaattacgttaactaattgtttatttagtctctgcaacgtagatagcgtgctatccagtttgccgggcctctacatttgcaggagaagatccgtggccacacgccctcttttcttggctctactttccttttaaaaatttcgctctagctcaatccccctagtccaccaaaacgtaaaaatttaaaatgtgtactgaaaataagcttatcgccatattcaaagaaggaatgctagatcatatgcattagtcgggcgaagcaattgtctcgatctcgagacttggcgtttatagattagtagccaatatcctctggtgccactactaacggtgagggagagagtttttaccgaaagccgcttacaaaatgataaatcatgtcataaacacatacaaaagtcactttaatcacttaagaactttgttgtatcatttgtgaactaatctgagagttgtttgaatccccgccacactttcaacattttccttgcgttctgaaaatgagaaacaaagtcactcctacactcctaaacaccaatcggaattttactgttgttgcttgccataaagtttaaaatttgttaatgggtggttatacgaagtaatgggcaatctaaagctgacgcatgatgcctgatttccgggcagttcctgagggagaagcagttcaagcagacgatccc

SEQ ID NO: 91051 - DNA, 636 bp, Eucalyptus grandis
  Intron number 5 from transcript Egrandis_v1_0.023516m (loc us Egrandis_v1_0.023471m.g) derived from phytozome v7.0 (c hr-ID scaffold_11; pos 28871025 to 28871660 reverse strand )
tgacccattttggatttggctgcgattactgtggggtaagcttttcatctctctctctctctgtctctcaatgcaaaatgcaaaaatgttctcttttatatttactgaatggaaagaaaatttaaactatcttgaatttcaattgatgacaagcgattctcttatattagcaaaagataatggacgtaggcattgaaatttttatcattgttgaaactttttatttcttttggcccagatatataatattatatttgctttgttttggtatttgaggctttgtatagccgtagtttaattatataatcattgtgcttagtagcatattgtgcttagtagcatacagaactattgaaatagacttttagcttacattggtaattgccaatgtataatcaaatgatacctttataattctccttagcaatctgcatattttgaatgagcggcattgtacttttggtccctccaaagtctttttatctgaatatgtttctgcggatggtgtaaacaaatttctgacctcagtgtgaccaaccaattttttattttaactcattgaagcgataagtgagtattattgagttgattaagttgggattatgtatagtaatattctcgggtcttcatatacag

SEQ ID NO: 91052 - DNA, 762 bp, Eucalyptus grandis
  Intron number 1 from transcript Egrandis_v1_0.004817m (loc us Egrandis_v1_0.004817m.g) derived from phytozome v7.0 (c hr-ID scaffold_4; pos 15137520 to 15138281)
aattaatcactgtcgagaaggtatataattaatcgttcaatttttttaattaatttttctaaactttgatttaaaaaaataaaaatacaaaataatttcgattggttgtaacaaagtacaacagaaatgatagcactatgcttaattagtgatgtgataaccttaaaacagatcgagattggaaaccgcacgttattcaaaagtcgaaatatattaacatttgccatgcatcgtttcgtgactaatttcattggtgggctgagtgattgatttcaaaaccaacttcttttccatgaatctacggttgagattactaaggcactaatcagaacatgaacagagtgcaaaagatctttttttgtaaattcttgattacttttgactcgtattacttttgggttctttatgttagcatatgcttgttcaagtacacttgggcattttgatttcacttagcacattagcaagtccaaggcaaaaacttagcccattaaatggaaagagatcacatgaacataagatatattataaccatgtatttaggggatgtgggatcacaattaatactcctctcatgtaagcagaccccttacatgtgtacaactcgacttatttgtgtgagcaagttgttgtgaaccttccacgagctatgactttgagaggaaagtatcgggatctaaactcttgacagtgctcgaccacgtacttaaacagtttaacttggccataacttacatgcaagctcaaactcttcactcaggt

SEQ ID NO: 91053 - DNA, 854 bp, Eucalyptus grandis
  Intron number 2 from transcript Egrandis_v1_0.021739m (loc us Egrandis_v1_0.021072m.g) derived from phytozome v7.0 (c hr-ID scaffold_4; pos 36534568 to 36535421 reverse strand)
agatactggaatcacatttcgaccgaggaatctaggtaaaccttcttccctcattctgctcctggatgaaccaaatttgttcttatctcgatggatttttcatcatcgggtaaacgaatttcgttttgatgccattattggatatcggaaatgctcaacgtgttgtatgggttagataacattcgtggcaacatatgttcttgtggtgcttgggaattactggaagattggagtactgcatattttttttttttttttttgaagcttcgaataatctctctaagtttagttcagtacattgacttctgtgagatgattgcaccgtagatgatgaactttggatcatataggaacttagtactttagtagtggacattccttggagagtgacgtttctgaaaagatttggtgacatatgaggagtgcatttgcttgtttcttgaatttgttacaatactccgccaattgacatgtagctacttgccggcatgatatcctgtattaagcaagaagagtgcaatgaaactgttcacatgcaactaatgcaccaagaatttcttttttgtagagtcttatcgaatactcattattagaatagtatctttggtggataaatggcaaagggctatcttaaaatttgaagcaatccatgcattcaccgaaaatttataattggcggtgattagtgagtaagctagtgctcgaagatttgctttggtaaatgtttcctttactttgtgtcatttacttacatcttggaatgatcaatcttataaaaatggtaagacttgattttctttcccggcttgttacatgcagattccattcggttgcatatcttcagcaaatctggt

SEQ ID NO: 91054 - DNA, 825 bp, Eucalyptus grandis
  Intron number 1 from transcript Egrandis_v1_0.029202m (loc us Egrandis_v1_0.025024m.g) derived from phytozome v7.0 (c hr-ID scaffold_4; pos 36524885 to 36525709)
ttcaagcttaatcatcaatatcagctcttgctttggtactcctctctctctctatctccaacccgtccccccctccctccctctctctctctctctgtctctctttctctctctctctgcattgtaatgaagaagtacaagctaattgctaagaaaagatagaacaacgagagaacccaattcatcggttaggatttttaggtataaaagacgactcttttgttatcaagttgtggacttttcaggatcacttgctgcattaatctctggtttgttttagtcagcccagctgatacatgtctttaggttggtggtttgtattctaatcattttcttttcatggtattacgttcattgtaaaagcaggatataacgttgattctaaatctttgaattcctcatgtattgtgatagtcttcttggttgcatgagtccatttaatttcgttggttttgcctaatgttcatacagttaaacaggccctgaatcattacaaagtccgcttgatggataatcatctgtttgtttagattttggttaagtggatgaatgattctaagcacagaaagattgatgaagctctgaagaaactgtgtccttatctttaagaagcatttcctctccgttgtctgctaaatggaagttttgtttttgctttttatagatgccttttgaattatatcagttcttttgctttttcttttatccaagacatatatggcctatccgaactgaactttttcaaaaggaaaaagaaaaggaattttggtatgttgacatgattaaccacagtacttttctcttacggatagattggtctataag

SEQ ID NO: 91055 - DNA, 760 bp, Eucalyptus grandis
  Intron number 2 from transcript Egrandis_v1_0.032414m (loc us Egrandis_v1_0.032414m.g) derived from phytozome v7.0 (c hr-ID scaffold_4; pos 17668252 to 17669011 reverse strand)
cggagtaagtaacaactcgtttatagcgtatgtggttcctgttttagaagagggttttcagagacaattgaacgtgttgtcatttattgttcatcgtttgctttagttttctcaacaccggcaaggaattcttttgttagagttaagaaaaatgttagcatgttacgttgtgcgtgatctatttaaaaaaacatgtcgattgtggattcagatgtgacacaattaatggatgtctcatgtttggatttggcaaagtcttgatctattatagatagagagtatatgaaaagaagacggatgaatgaggatagggagaccaagcgaacgaaaggaggacagaaaattgtcaggccctgtttttatgtaaaggtgtcataaatgagttgctattgagtcgcagtaacatgtgatctctcaaaatacagattgccttctaatcaattctaggtcatcttcctaactactagtcaagctccttccggcgtaaaagaagatgagaaaatgaaaatggggaaacaattgcaatttgcatcaacatagcttgaattgtactacaatttgccggatcactagaagagaagatctccttttttagcccttactttcttaacatggcttgaattgtgctacaactttacctgtcttgatttttcttctcccaaatattgaacttgtcctttgccaatgtggaaacatcactgatcatgtgtctcattttttgacagctcgaagttgtaggtcctggagcatccccattgat

SEQ ID NO: 91056 - DNA, 800 bp, Eucalyptus grandis
  Intron number 1 from transcript Egrandis_v1_0.011323m (loc us Egrandis_v1_0.011323m.g) derived from phytozome v7.0 (c hr-ID scaffold_11; pos 42404010 to 42404809 reverse strand )
tcctcgatcccgagcgtcgccggcgcgttctccaggtatcctcgccgatcactggccttccttttgtttctaggaatatgtacttgcgcggcagtggttggtgattatctggcgccaattccgcaactcgtattcgatgaagagaatggaaaagttaggccggccggaaatggtagtttgtagacttgagattggattgttggcgagcttatcatctcgtgccgtacgcatgatatacttaatgacttatgtgggttcggaaatgactgtgtgttgctttgtctctcgccctgtttggttggcaatttgtcagcattgcggatgcttctgtggtgtgttggaggagctgaagtggagacattgtatgaaatacgctcgaatcggtgcaagtgcaacttgtgcgaatttgtatttcatcgatcatggatataacctgtaggatatattggcatcttgattaggttgctagaacatagagatcaggaaaaatcaggtggaaatgaaaatgttcaagttgggaaggagagtggaaggaatgagtttagcgagtgggaggacagggatcagcttccgaaacttcaaaggtcaatgatgacatagaatttgttatcagaaagtttggttgagctttatctttagtccaaatgctcaatgttgtgtactgtgttgttcgtgcatattccttctcgtgataagaaccttggtatttgttatctcttatgtagttgtttatcttttccttttgggtttgggtatctgattctcttgttttgtatatcaggttcatcagctggggactg

SEQ ID NO: 91057 - DNA, 762 bp, Eucalyptus grandis
  Intron number 2 from transcript Egrandis_v1_0.050141m (loc us Egrandis_v1_0.050141m.g) derived from phytozome v7.0 (c hr-ID scaffold_9; pos 22835362 to 22836123 reverse strand)
tcacaaagtcactgcacttgacctggtgtcttctggtatcgacccgcttcgggctattaattgggttcattcccatgtggaataagactaatcaattataacccaaaaggacttgagttcatgtgataagtcatatgaagaaataagatttctcactattttttaagtggtagcccaaaaaagtccgttgagatgcggtaataagaaaaaaagaaaagcaaaaaagattggatcttggaaagaatttattttacattaagttggcaatggaggtcgatttgtcatcccattgagccgaaatgttgtcagcatgttcatggcacactcttcttgaatctgaacggtttgattttcgtttgaagctctctatatcaagttttcatgggtcgatcaaaacttgcattttttgttaaatttatcattgatctcttgtgaaatttatgtgtaccgttaagaatgatgttcttgagatctttgctgctatgtgtctttagtatttattagagaaaaactttattcacccaattttgtttatagtgaaaattttgggggacttcggtcccatgttttttgatctcctcaagtttttcacgtaaaatatcatattgtgtttgtatgcttggtatttattttgctgtattataagatttacataagataggagattatattgttttgttgcattaatccgatattgttcggattgttattgttcttccatcacaagccaagtctctacaattgatctttgagtacttcaag

SEQ ID NO: 91058 - DNA, 836 bp, Eucalyptus grandis
  Intron number 1 from transcript Egrandis_v1_0.050141m (loc us Egrandis_v1_0.050141m.g) derived from phytozome v7.0 (c hr-ID scaffold_9; pos 22836190 to 22837025 reverse strand)
atctcgccggtgctcagggaggccgccaacaagtgtgccgcctttgatgtctccctctccatctccgatctcctcgacgagtgcatggcctgcgtcttccaatacctaggctccggcgaccgaggctggtgctccctcatgtgccattgagggtgtccaaacaacgccaagcaatggtggctgagcaagcgacggcggcccagcgacggcgaaggccgagcgatgaaaccctaatttcaatccccaaatgagttaaatggcgtcgtttttgtgagaccattcatgtaggacggcaaaacgacgttttcttaaggaggaccgaaaatgacggcgtttaaggccttgtcgattttttttttttaaaaaagccacgtaatcattttggccggaatctttcgccggtggcaccaaagtgattgtttttcctccgatttagcacttaagtgatccgacggaaacttttggcaccaaagtgagcaccgtacacaacttatggcattaatagggtacttctcccgttttctgttgtttgagtaggtgcacaattgcaattcaagaggaaaatgtggaatcacaagaacagtcaacaccactgatttcgtaattgctgaccaatgaaggttatccttcgctagcttcagtcaacaccagacgattttgctgaacaaaacccttcgccttcccccttagccgaggcccagttttgggtaagaaaaaacatcaagcaagaggcatatggacaagaaccttaacctagcatcacttgccctcctcatcctcttcctcttcggcttcgagcaggaggaagcatcacttgaaagcaagcactttgtgct

SEQ ID NO: 91059 - DNA, 751 bp, Eucalyptus grandis
  Intron number 3 from transcript Egrandis_v1_0.049672m (loc us Egrandis_v1_0.049672m.g) derived from phytozome v7.0 (c hr-ID scaffold_9; pos 22051849 to 22052599 reverse strand)
gatacaacctggcctcttcagactaaaacgggcaggtacaattcatagaatctattcctcttatcttatgcatgtaggattatttaattggttcaaaagcaaaaagagaaaaggttagaagatggcctttatgtaagaatagtggtttgatttctttaattcactatttcctgcaatcttaagggagatcttagtagtactgctcccatgttttgttccattaaaacgatacaagcagccaactgcttagcctcactttagcctcccacttagccagaagacattttatattgtataacaccgcttgctatacaaaaaaattgttgatctgattagtttccttccttggaatatacataaaagcggggggcggaaggaaaaattgaagatagtccaatggcaacttaccagtttcttccatctcattctttctcccatattgagatgtatatggattttctagcagatgctcctctcctttaatatttctttatacgtgtataaaatgtctaccaaattgatgtccccggtcgatctccatggcatcaaattctgtagaaggacaaccatcacacagcatttgtattagaaccctctaaaaagaaggaggttttgattgtctaaattaaagtgcctctactttctctgtttcaagatatgctggagaagcacacgtgatattacattatgcaaatgcaatagtaagtaccaatttcatttcagtagaaaatatcaaccattaccatttacc

SEQ ID NO: 91060 - DNA, 752 bp, Eucalyptus grandis
  Intron number 1 from transcript Egrandis_v1_0.027763m (loc us Egrandis_v1_0.027763m.g) derived from phytozome v7.0 (c hr-ID scaffold_6; pos 34601684 to 34602435)
ttcgacgtgccgactctcggtacaccttcttgaacgtgagtacatctgaatcaatttcttatcttcctaccaacttgatgttaattacgaattcctccgtcgtcgtcagaatgtcgattcttgcaatgcattcttgctcctgtgatgtgtttgtattgctcgagctgagcagttttcgttggattgactttaagggaaagtggtcattgatgtgtttggggcgcacccttttgttttcttgggtttgttgtggattggatttgaactttcctctgtgaaccagcctcgttctttaaatttgagtttttctggtgcttcatgtatgccgggtttttttgaggggttctcaattgtcatttggggtgaatggtgacttagagtctaggggtagttgagaggactagtaagggctcgacagagcaagcctttggagaatggacctattgtgctgcaaaaaaaaattcgatttttgcgaggttttagttccatctgcaattctagacagtttttcactgtttttgctgttggttatgcccttaatagcttgtatttcaatttgatgtccagtttaaagtgattaagttacttagcacgtgcctaaataaattcgataaaatggtaccttttttctcatgtgccagtcgacaatgtctctcgatttgcaatttctgaagacgtcggttagtcgtaggtgacactcattacattgttgttgatatttgactgctttggatggaaatagatctgttaag

SEQ ID NO: 91061 - DNA, 724 bp, Eucalyptus grandis
  Intron number 1 from transcript Egrandis_v1_0.040742m (loc us Egrandis_v1_0.040742m.g) derived from phytozome v7.0 (c hr-ID scaffold_4; pos 38327961 to 38328684 reverse strand)
cacaacaattacaaaggtgtgtgatcttgtctttgttgattgcgtttctgaataagagaaatagatcatcgcagccctgttagcaaggttaagtagtttgtagctcagagatgtcaagcctggactcatcgttttggctgcttagaatatcggaagtgaatgtttcatgagaaatcgatacaactgaaatcgtatgcatcaaaatctgcactcgtgagtttaaaagcctatttgggtagccagcgtactgacacttttaacaactatatgcaggcttttttcttctctgcagtcagagctgagacacactgatgttatcttttgttaaaatcaagacatttcatgtggagaatctaatttccccttcacatggtgttcgtaaaattatcgaaatatgtaggatggaatttattcactggtcaaattactctaattgtctctatgtgtgcgtgcgcctttttttaataaacacacataacaaaagaacacaatctaactcaacatgaattgtaattagctgggcctaggatggatctttcacttgctgcctctgtctgatctgggatggcatgcatgttttgattagtaaatgtgcttcctgcttgcttgcctacttatgttttgcttgtcccgattttcttctgtcctgtgtccccaagcattttgaaatatcaaattgttggtttcagttcagctgcaaattcgaaagtaaatttgcaaacca

SEQ ID NO: 91062 - DNA, 663 bp, Eucalyptus grandis
  Intron number 1 from transcript Egrandis_v1_0.039614m (loc us Egrandis_v1_0.039614m.g) derived from phytozome v7.0 (c hr-ID scaffold_4; pos 32040663 to 32041325 reverse strand)
cgcccaggcccacatcaagctcggcagcttcaccggtgagtcccccggtgggggagggggtttcgatcccctgtttttcctcgatcgtctcggcttccgtcggtccttcgaggcctgctgggccgtacgcggtaggcgaggtgtcggcgttatcggaggtggggtcgatggcgtgggtgaggaacacgaaggtgggggtagaagttcgtcgagtagctccgttcgtggtgcttgcttttcgtgacgatggcgtcgaattgaactcttgcgtgttttttgccgggaaaaagcggtttttttgagtttggcctgcttttcttgcccgcttgtctcttgcacgttcgtcgtcgacccgctcgttaaccccggaagagggaaaagaaccgaaaaaagtattgggtctgctttggggaggcgagctttactagcattgctgtccagtttggatgatctcaatgctgcttctttgtgactttagacccgagaaaatgtttttcctttggtaggaacgctacggatggatttcggatcttttcgtcgccgttttggaacggaagtggtttctgctttcttgatggagatgttcttttgcaattgccctggatgacgtgcttctgattaacgtttatgctgtgttttgtttttcatcagaggccgtttccg

SEQ ID NO: 91063 - DNA, 786 bp, Eucalyptus grandis
  Intron number 1 from transcript Egrandis_v1_0.024890m (loc us Egrandis_v1_0.024890m.g) derived from phytozome v7.0 (c hr-ID scaffold_11; pos 13871452 to 13872237 reverse strand )
acacgcttcgtgggctagttcccgaggcaaagaaggtagacattgtcgcagtttctgtggttgttggtttgaggcgttaccagttttagctggtccgatgatgttgactgtttgaattgctaagggcgacttggggaaattgtcagaagaaagggcatgattttttaggaacatgtcggtgcttataacgttattgctactgtctgaagttttctcaggattttttagcaaaagttttgagtggagtttgtgttacttgtgccgtcatgtttcttatttagtatgatattcgaaaatattttttgactattgaatgtttgagatatatatgatgagaagcagtctaaaaggagtcctttcaatccctgttaatcggacttgatacgttgattgttgagaaatggcttgggcagtgctctaattatccatcttcgacatactgagattctcatgaaaatggacagatggctgcagttcgaagttgttaattttgtggaaagcaatattgtgatccgtaaagtactagtgaaataagtcatttcaaaaggattcaatatgccagcgcagaccagaaagagtctgcccttcaaaagttgtattcccccaagatccattatgaatagatttcactgggtggtgaaagaactgggtttttttttttgaaacttgaatgcatggtgaatcactggtcttttttgcattcagagtatcgctttgtattgccaatgttgctgtaacttaagatttatgggaatgttagctaaattgcaaattcggatgtcacag

SEQ ID NO: 91064 - DNA, 879 bp, Eucalyptus grandis
  Intron number 1 from transcript Egrandis_v1_0.012375m (loc us Egrandis_v1_0.012375m.g) derived from phytozome v7.0 (c hr-ID scaffold_9; pos 34795683 to 34796561 reverse strand)
gccggctagggtttctccgggatcgccgccgcgaggttagggcccgccgcggtttccgcgcatctggggttcggtgtttttttgtgcgtcgtcgttgtcgccggtcggattcgggacgtcgcgtgtcgatgcggctcgcgtcgttgggtaggtgctgcccggccgggtcccgcgcgtgcttcggccgaggagcttggaggcgcccccggaaatgctccggcggcggctctccggatcgagagccggatgtctttctctccccgtctcctcctcctcctccctcggccgaattgacgagcgtcgccgtcgtgtttcgtgcttctggttcttgctagctttgagttcgcttattaaaagggaaaaaagaagaaatattctgaggggttgatttggtcctgcgttcgttgggctggcgagtcggatttattggatttttttttttttttttggtttttgcagcgagattgaatttttgaattgtgttcgtttgtggccgttaaattttccttcctttgtctccggttgcttgattcgaccgggtttcccatgtttttggaataccgatgtggcctgtcttgtcgatgtgtttgggtggattcgtttattcgtaggcctatgtggtttgaaaatctgtgattcttgcttagttgattggtttatgcaaaattccaagctcgagtctttttctggaggttaatcggagaatctcttagaacgtttttctcttggaaataagatgggatgggaaattggggaatgctaagaagagggtttatttgcttttctatttaatgttttgtacgcatggcgtttttagtcgttttggtatgtttttacgctgtctaaaaggtctaattttgtgctttgtttcccagagcc

SEQ ID NO: 91065 - DNA, 849 bp, Eucalyptus grandis
  Intron number 1 from transcript Egrandis_v1_0.013425m (loc us Egrandis_v1_0.013425m.g) derived from phytozome v7.0 (c hr-ID scaffold_9; pos 674526 to 675374)
cgcttgcggcggagctcacacgctcttcctgacaggtttcgctgtctccactccttttttgatgtttccgctgtaggagttttgtgggttcgccgttttaatctcccttgatcatcaattttgtttttttagtttgatgatgccgttttctgtcttgaaaaatttgaagtctgagttgtgtgcttgttagcaacgagtgggttattgaatgaggagcgatccagtagataagcgtgaattcgaaccttcaagctaagatagctgaagcaatgaccctggtatgaccgcggaaattgatgtacatctgttgtcatgatgaaagagaggtgggtgagaaaagtatacaatccttgaatttataaagataacatggctagccttcgcgcactgcattgacaagatggaggtcaatctgcgagcagaaatatcttactggatcagcgagctatttctttgcgctcaagttcttgcttttcatgccaaacataaaggttgattttgctgcaagaaaaggatcctgcagcaatatttttggaaaagcaatcccacggagcctctttacttgttgaaatttctttgtctagaaagagagttttttttatcgtaattgcagcaacggtgacagaacttggctgtactattcatcgtcttgattgtagggttcatttcgtagcactttcttgtggtttttaaacactcgctattttgtcttgttgttcctttaaagtccagttttaggagactaaaagttagttatctcaaaataccttgcaaagtttgtggaatttgtattgttttcaatagatgctcattaatgactctattatgtaacagaatctgggcaagttt

SEQ ID NO: 91066 - DNA, 690 bp, Eucalyptus grandis
  Intron number 1 from transcript Egrandis_v1_0.010544m (loc us Egrandis_v1_0.010544m.g) derived from phytozome v7.0 (c hr-ID scaffold_4; pos 40508963 to 40509652)
tcgatcccgcctcttcgattctccttcctctcgttcgttttcatgcactctctctctctctctctctctctatcttgactccctctgatttccccttttgttcttccttttgcttattgctggttttgcctttcgttcgtcgggctttcgtttctgggtaatccggttcgggcgttatcgttgttgctcctgtctgggttcgagagatttcgctcacgattacgctgctgtcgggtgtttcagatctctgccatggcgctgttgttttgtaggactattgggtcgtttctggggtccttagtttggctgcgggattggggatatcgtcggcctcttgggtttaactttactcccaatttgagttgtttgccttcagattctgtctctctgtggggcgagtgagatgtgacctcctgtaatctgttcgctagtttggagtcgaattgcttcttcaattgtcggaattcgcatgcagctcttgcttcgacgggtgtttgcaatttggggcgtgtcgatcctcgatgttctgctctgctcatcggggggaatttcctgcatgtccttacgtttgtcgtctttaatcggggaatgtttttgcaatgacaaaagaatcattctttctgtttttttttgggggtgcttatatggaatgcagaaattgaggaattcagctggtaggcaagcttctgt

SEQ ID NO: 91067 - DNA, 973 bp, Eucalyptus grandis
  Intron number 1 from transcript Egrandis_v1_0.047436m (loc us Egrandis_v1_0.047436m.g) derived from phytozome v7.0 (c hr-ID scaffold_4; pos 27780872 to 27781844)
cgacaatttttcgcctgccaaccggtaagtgttacaagattctaaatctagtaaatcaaaaatcaattgaatctctctctatctctctcttttaagtgagagttatcatgttagcagtgatggctgccatccatcccagtacttttttctttaaatagaacgataaacataatatttatctatttattattaccttcattctggtgaatgttcatactttttcttttaaaggacatgccacttgacccgttaaacacgagggtaatgttctgaaaagattcgagtaatattctcgttgcatgctctgtccttttgctcatcgactattaaacaagttcaaaccagttcatctctgttagtatgcggactaagaaaagaatattacagtttgtacataatatcatagtatggggattttcaaaaaagccagctacattcttgcttatgtatccaatttttttacgtacttaatttctttctacgctctcttctcgatcttcttctcttcactttttgtgatttttaccacttctctcgaattccaccagcaccatcatcatcatcaactctaccgatgatggcaacggcagcaagttagcaaccaccgtaaccatcacacgcctatctctcccattttctctctcatccagttcagtgttgttgttgttgttttttttcttctttgtttcgagattttctccttatgattacttgcttttcagtttacatttaatgatagggcaaattgcaatatatttcctacagatccaggtatacatgcaagagcattagagaaactttaaaaaaaatcatgacaaattcctacctagtacaggggaaaacgggaaaatttaataggagagaatgcaattttaatatttatgtctagatgcttataacagtctgaatcatggcatgttcctactgtgttttctaaggttggtggaaaatcttggagaagagaccagaagtg

SEQ ID NO: 91068 - DNA, 813 bp, Eucalyptus grandis
  Intron number 1 from transcript Egrandis_v1_0.039183m (loc us Egrandis_v1_0.039183m.g) derived from phytozome v7.0 (c hr-ID scaffold_4; pos 4481151 to 4481963 reverse strand)
caagaacgccagcgccctctggctacgagcatcacgttgtgccctcgccggagcatgtttcccgacgccattaccgccggcgcagtcttcatatagatcttagtcaatacccctcctcttcttcttattaggttttagtcatatttccttttttatagtgttatatggaaaatgaaagtattagaagccaatataagaaaaataggaatccgacttgtcggcttgtaccccggttgagagacaccgtgcgaagggtgacacgtcacgctctggcaacgcccaacgcatgcaaatacgccaaatcaaatgccatgcaaaaaacggcatgtggtttgcccaacgagttttgtagcttttagagctcgcaagaaacgcgaacccgaaatgcttgctacgcttcgtacaatcaatcattttgatttccttttctgtacgcgcgcgcatatatatatatataagtgcttcatctcttatatgtaaagaagtaagaggtcctaagtatttaaggcaatatatatagagagaaaacctaaatcaggagcacctgataatatctcaaggccaaggccaaggtcaagaaaacgatgataagataaggacatcttgacttacattaacggtcgataattggtattcgttcaaatgattggtttgtggaagatgtacgaaatgataaataagaggtcctaagtatttatgatcatcacaatttggcgactttaattctttaatagtatcaatgatagttagcttttatcatatcaatattccaggtgattaattatttctttctttttttttgccatagaatca

SEQ ID NO: 91069 - DNA, 706 bp, Eucalyptus grandis
  Intron number 1 from transcript Egrandis_v1_0.046360m (loc us Egrandis_v1_0.046360m.g) derived from phytozome v7.0 (c hr-ID scaffold_3579; pos 1503 to 2208 reverse strand)
atccctcttgatcttgagccatctatcttctcaatgttaatatctttccccggacttctgttatcgaggccctggccattgttggccccgagaagcttgaagagtgtgaaaagttcacctcctcatgtgaccctctgggaacgaccgctcctggtacttttttttttttttcctgttttctgtgagatcacatgagaagtgccttcttctatttcctttactcttaatcctctttttgcgcatctatattcactgtactttttgaatttattgacgactccccgtcccacttcaatgtcttgatctttctcctactgatttatgaattcgccagccattaccaggaagatgtttgaaaaagggtatatgcaataaagtcccatgattgtgcctagtttatatataaacaagcttgtcatatgtcatgcttccttgctcacttctcgtacacctttctaatttgaaccgtgttattcattattcatgccaacttttatatgccttgctagtgcactaacaattttcttactttcttaaacgatcccgcataataaacatgtttctccaaccaactttagcatgtcaacttagggctatataatatcgagaaaaataaataaagagttagtgctaaagttgacttctctaatttgatttctcttgtgtgtgtgtgtgtgtgtgtgtattcgctgcagcaaagctgctc

SEQ ID NO: 91070 - DNA, 496 bp, Eucalyptus grandis
  Intron number 2 from transcript Egrandis_v1_0.007182m (loc us Egrandis_v1_0.007182m.g) derived from phytozome v7.0 (c hr-ID scaffold_4; pos 17643309 to 17643804)
gtacccaataatcctggtgagacgaagattagatctttttctttagattttattttctctgttgtttaatggaggaatctttcatgcaccatctgcaaagcaatttgagctgaccaaagtttgacgaaagaatttaattttctgaagatatttagtggttggcttgtaacgccattcgcttttttctgtttttgattatggttggatatgtgattgttctttcgtcctctgctgctttagacactagtgacctcacatccatggtctgtatgtccttataattgttcttccattcgtttagttaagacaaagttggcttgtagagctggaaattctgcaaaccttcaattagatgctgatatctgtatgatgtcatgatttttcttcagtaagagaggatatacacaatgttgtttacattcagtttctgactttcctaatgtttgtgatgatatgcacagataggtgagtggttactgcataggagctccttcca

SEQ ID NO: 91071 - DNA, 970 bp, Eucalyptus grandis
  Intron number 1 from transcript Egrandis_v1_0.007887m (loc us Egrandis_v1_0.007887m.g) derived from phytozome v7.0 (c hr-ID scaffold_11; pos 42117154 to 42118123)
gtctcctccgagaccgccggaggcgtcggcggaacgtaagctgaaattcgcggacctctattgcttttgttctctagttgttctcgttttttaagcgaatttgttctagcgggcgaagtgtgtgatgtgcttgatggttttgagttttagctggtggatgttgtgttaggtcaattgtaatgttcctagaagaatatgctctgctgagtgttgttttgttccaaagtttgaattttgttctctttgttggtcgttgaaaggattgggttcctacttcctagtcggtatgtaagtttgccgtgtcattgtgcaattacttattcaattttgatattaaccatatctgcttcgtcattgccaccaatacgtttatattgaccatagaagtcagttcatgttctcgtttggtgtctagatgtcctcaatccttactgaattgtatcaatctctacctgggaatgtcattccaggatttgggttgataaaggagaaagcaaatttttgcatggcaaagattaagtgctttgagaacgtttgcttgaactgataatgtctgtcatttcatcaattaacatccaaattgtcagaccatagttgatttacaatagtagagaagtttggtaagagccttatggagaaattctggcaacctatccttatcctccatcagacgagcatatccgcttgtcctgtgaatgctgccctgttgactgactcaaacataggatggataacaatgggtctttctttatattcaggaacatgggccaagagtcttgtagttttcagtagacaactgtttgtgttgtgatgtctcttaattgtgttttatctagaattgcttgaatcctttggtccaagatcaaaggcttcttggtagtcatcattagctgcatgaatgtcctcattgacagggttgtcaactgcagatttctttctttacttcttcttaattatattctcaatgcag

SEQ ID NO: 91072 - DNA, 627 bp, Eucalyptus grandis
  Intron number 3 from transcript Egrandis_v1_0.054123m (loc us Egrandis_v1_0.054123m.g) derived from phytozome v7.0 (c hr-ID scaffold_18; pos 520181 to 520807 reverse strand)
ctcgtacactcactccagaaggtatggatttatcattcagcataatgaagaatttcacatgatgttgtggatttcagggaattgctttagaaagtaatggaatgtaagaaaatgaatattgcttcatgatgtaataccttaagcacttcagatatgaaatgtttgcagttctacaggtctgaaatggtttcaaaaatcccactgaccatcttttgattgaaggcattcagaaggggatagtcgtcttgtatatggacctgtccggtcagcccttcagactaacttgagaaagttagttgtttcccagttcagtctttcaaatttgtttgcccttttttctttcttgtagccactttgaaatctaattcagtttttaatctgttttgactttggatatcccaactttatgtgagtttttgtgccaaaacttttaaatgcatagctataggattgataactccattttattaaattaaatttatcaaaacattttgtcctggcgataacatatgagctcccatgaagcctgattacatgttacctgtgtattttaataagttccacctttagcttgttgcttgacttcatttgcaattttttttttttttttggcctaatgcaacagat

SEQ ID NO: 91073 - DNA, 1063 bp, Eucalyptus grandis
  Intron number 2 from transcript Egrandis_v1_0.005245m (loc us Egrandis_v1_0.005245m.g) derived from phytozome v7.0 (c hr-ID scaffold_9; pos 27307643 to 27308705 reverse strand)
aggagaggcttatctataatctgaaaagggtatgttttttttccttttcaaagcatgtgaaaagggtgtaaaatcatgtccttacgattttcatttactcgtaagcttagatggtttaagcttctcttgtcactgcagcgccttaattttgaaattttgggttcttgtaattttggattgactccagttttcaaatcgattggctgttgatggtcatgataaagcacgtctaagagtttctgcatttggtaagtaaacaggatagatttaaatggtctcagtatcaagaagtcttaaaagacctatggggttgaagcatgccaagggcgtacatcccttcctgtttaaattttttctcagatctgccaaaagcaaaattttctggagcaagtgtgggctgattaagtctagctaatgtgttccatctaaactatcataggagggtagcagcacattgtatatgttcatcttcttatacaccacatattctggtgacttcccttttcagagaattaagatcttcatctgtgtataggcacttcaattaggatgttctggcaaaaaagagtttttttgttgttgtactgtttgctctgtcataaattatagaacctgtaaattacttatttttatcaccggttgattagcttcagttacatgaggatcatgtgcatgaatgatcgtagagcttgctagttaatggagtgtcaagaactcctgttaagaagctagaattttttttttttttaatggaaaaatttccttcaagctcaggtttttttgtttattacttagtggcctctgtagtaagttcaataggacctttattgtttcgtttgcttttaatatatctctatgatgtaattgatgagtgtttgaatttgaatgggtatgctgagtctgtaactttataatgtcccaagtcttaagagactggattcttcctcgttttcttagctgcttagacacttatttatggtttctagcaattctcaatttatttgttgtctctattctaatttgtccaggccaagaagaaagtggcactgctcctgcagaagct

SEQ ID NO: 91074 - DNA, 924 bp, Eucalyptus grandis
  Intron number 1 from transcript Egrandis_v1_0.047087m (loc us Egrandis_v1_0.047087m.g) derived from phytozome v7.0 (c hr-ID scaffold_4; pos 14403217 to 14404140)
gtgtagagcgtgagcttgagatccacgagctcgaggttcgcttggcaacggtcgacgactagctaagaaagaagaagatgggaaacaaaaaaaaaaaaagagaaatagaaagagaactagaaaagaaaaaggaaataaaaaataattcgaacaaaaaaacaaagaaaggggaggagaaaatgaggatttgtagaggtgtgagataagagagatcaagtgaggaaaattatttccacttttgaaaagtggaaaatattttcctttaatttagaagacttttttcctttcatggaaaacattttccccaagaaatttattttccgtaaaacgaacgccggaaaatctgaaaaacattttcccggaaacgaacggaggcttaataaaatgtggaagtaagaatttaaacccctgcatactgagtgttctaatgacatggcggagtatggtgattactttagttctccaatttttatatattggatttgagatgattctgcaaggatttgaaatccacatggttacactacaatcatcttatttcaattagaatttatcaggcacgttcgttataggtaacacagtcattcttcttgtattgggggctcctagaggctagaagtaataatgcgatatcgtgtttgatgagacaataaacatttttaaataggcaggtttccaggttggagtgaccaaattttcttcctgagtgtatttttatccccttttcgaagcccttgtagttgagatttgacagtgcatgcttcactatataaaatggtttatgtggaattgttgagttaagtttgctccctatggttaacttagaagcatatttcatcaaaaagggacagaacagaaaatcatccttaaccaatgtctatttgtacagttgcatttgctggcgattgccaacctgaaagattc

SEQ ID NO: 91075 - DNA, 479 bp, Eucalyptus grandis
  Intron number 1 from transcript Egrandis_v1_0.045453m (loc us Egrandis_v1_0.045453m.g) derived from phytozome v7.0 (c hr-ID scaffold_9; pos 34247737 to 34248215)
ttgccaacatcaggaacaaagacaagctcgtcctggttttcgcctcatctcgatctcgctagttgatgagcttttcttttgatttattcagcggacttgcgacgcggacgtgatctccgttcaagactaatgcgatcaggacagcttcagaaacgtacgtcttcttatcgtgcgctaaccggattgtttagctgttgaggaatgtgcatccaagagagtgttgactccaaatgatgtatatgctaacatgcacgagccacctgttctggtcaggcttttggatttctggatccggcattcttgagaaggagttcgaatggctgctttcgcagcttgcaagctggcaaagcgatccgggggcgtttcctatgcctgtttcttgagatcgggcacgtttggttcgttgcccggatcaggggttcaatcatcacgttcctcgggcccgcctctgctatgtagacagttttctcaactcgtca

SEQ ID NO: 91076 - DNA, 425 bp, Eucalyptus grandis
  Intron number 2 from transcript Egrandis_v1_0.049770m (loc us Egrandis_v1_0.049770m.g) derived from phytozome v7.0 (c hr-ID scaffold_4; pos 14213872 to 14214296 reverse strand)
tgaccatcggagattattactataaagttttcccggtaatcaactgcgggttattcccaattttccacattttttaagccaattctctaatttctctgttttctgtagttagtaaactctgttctctttagctgtctcatattcatatggttcatttcttcttcaccgacctgatagcaataggagtttgttgcgatatggttgattgcggtgtgacgtccggatgagttcttaacaaaatcatctaagaagtgctttcaggacttgcaaactctatacctgcctttctatatcttatattttctttttttggtttataatttgatcagggcaatgtgaagtcccaggttgattgtgctacactaattatttgttttgtgttggctgaagcattaccatccttcaagagtgcttaccattgttta

SEQ ID NO: 91077 - DNA, 1043 bp, Eucalyptus grandis
  Intron number 1 from transcript Egrandis_v1_0.039654m (loc us Egrandis_v1_0.039654m.g) derived from phytozome v7.0 (c hr-ID scaffold_4; pos 21219503 to 21220545 reverse strand)
ctccctctcgcatttggcatcctttctttgcagaggtaatccatcctccagatctaatgtctctctctctctctctctctctctctctcttcctgcaattttctggtttctgcttgatctgctcgtggctttcctgatctctcccgtgctttgcttatgctttcgtctcgtcgcctcgttgcatgctcgtgtcccaccggctcttaccggatctgatctgtttgctctgattcgatccggtatcatcgactgctctgcgtttccgcgctttctccgtttgaatttcggaacgtcttggctctgaattgtgcggcggccctagttgggacccgagacaacaccgggttcgtctcttccggtgctgatctctttttttcggcatctggggccgagaggattcttggtggagagctgaggagggggaaaaagaagagatttttcttcttcccagttgagcattgtgtccaaatgttcacttgttagattcaagttcaatttttttttttttttttaaaaagcataggcatatcgtgcatacggtaaatctttttgctcgtgcgagtacttagctattgaatcataagtacgaccatcatgcagtgaattcagttgtaccatttgttcttccaagtcgtgcattagtcgagtcaatgatctggatttgcaggatttcgtcttaagggtttattcgggatcagatctaattggtaaaatggaataaataggttatactgaagcttttccacaacagttagaacgccttgattttgtgaagggtaagcatgttttaagcttgtatggatcaagaagatccatcagcagatacggtgcatgtttgcgaactgatctgcttttgtgccaaattatatgtcaatagtttatggtattttttctctgaaacgtactccattgtttggatcttaacatggcctctacttggcagccttacaaagaattgatagcatgaatttagctgtcctaatacaattattcttcttggtgatccagatctttcggtccagtattctttagctggctctcat

SEQ ID NO: 91078 - DNA, 911 bp, Eucalyptus grandis
  Intron number 1 from transcript Egrandis_v1_0.049256m (loc us Egrandis_v1_0.049256m.g) derived from phytozome v7.0 (c hr-ID scaffold_4; pos 40607451 to 40608361)
tgtccgtgctgaataagtaagtctctccgatcatcgtgttgggtgtcgccgtcctcattcgattcttttttgttcttgttcgtcttcatgatgcttgaatttgaattggcgtttcggcgcatcagttaagcttcattggtaatggactttttgggttcttgctaatgggtagcaagaatttaattggtttctcagctgggtgtttgaaccgggttggtagaagtattctagcgatttttgcattgaggggagtggtgaaacggtgatgatgaatatgatggtcctcaaaatcttggaggaggaggacgatcgacgttcactttaagggtggtacgttccattgcgatggggagtacttgtggatagcagagcctatcccgcctcgtagcttgttggttactagagggtcggcgctgctcggaatctgtcttggagcatttttgccattcatttgcgtcgaaggattatgtctttcagttcacttctaccagaagttcttgctttcaaaagcattgagcaggacatctttctctctggaaaagttctgttgaggacatagtagagtatttgtgagctgaagataggcgattttggactttggagtatgtctactttgtctactgaaactgcctcagtcatgctcgtcaagtttgcgcagtataagagaaatgcgagagcccaattgcagttcggcgaatatttttatctacctttcttgctcttttttttcttccttatccgtagcatctggtggaggaaagactttatctctgtggagttttgagacctgacatttgctgtcgcaatatggaacaccaaattgttcaaactgtcaagcattgccatctcaccttaatgctgttttgtaatgagttctcacaaacatgatcattttttacttgcaggtagga

SEQ ID NO: 91079 - DNA, 822 bp, Eucalyptus grandis
  Intron number 1 from transcript Egrandis_v1_0.041849m (loc us Egrandis_v1_0.041849m.g) derived from phytozome v7.0 (c hr-ID scaffold_4; pos 2250332 to 2251153 reverse strand)
aagaaaacctctactcccgtgcgacttcaactactttcacgatgagccaacatgggaagatgggctctcatttctattcaacaggttccggcatcttatcctttgttactataatgacatgtctattaattgtccataagtacttccaagattgattgtgtatcctacatatatgttatgtttgccatttgttttggacttgtagttgtgcaagcatttgtgcaagtttaattgtcacaatctaatattatagtgcactgaggagacttacagaaggccgaaatatggtcattttgactctatcatcatctctctttccctttatcttttctttgttgtctttttttcccctacatataataataggtataaaaaataatattctcactccttttcatctttctttttttcttattataatcccagttcacttttataacaagtaagattctccattcactttcagtatttacttttctctaattatattgcaattaatctcaatataattttcatttccatgacaatataacacaattgttggccaaaaggattataataggccaaaaaaattgtctattttcactatttcttcctttttggtaatatgatcttaatttgatatgatggcaaaaaaaaaatcaatttgctttactttctctttattttttagttcatttaatcagtttagatgttaattcggagtgagagtgggaaagacaaaccgattcaaaactcagaaaataccacatcctccaacctcgatatgattactttgaaatatgatgaagggatgaaaaacactatattaggcaattcatc

SEQ ID NO: 91080 - DNA, 659 bp, Eucalyptus grandis
  Intron number 2 from transcript Egrandis_v1_0.017156m (loc us Egrandis_v1_0.014346m.g) derived from phytozome v7.0 (c hr-ID scaffold_9; pos 29944856 to 29945514)
cgtgatgggcaaatggttggacttggtctccctgatgctcacatctgcagacttgatattctcaaaggtctcggagaagggtaaatctttttcatgtttgtatttttaccctttcttctccttaaacacatggaagataaggcatagtcttctcatcaacatcttgcttgtttaattaacctggacatgtatgttgttcctgtttcttcctgtctactgatttgcggaatacccttttcaacccttttggctcggacctagcaaaagactgcttgtcttgggtagacaacttgaaactagaagactggacagtggtgtgggcaagatattatgttttatttttataaagttcatcctttcccatgggcaccgttccaatggctgtcaattttttgatatcaaccatggacactgtagatggatggcagatatcggaaatcactcctgactattttctgtgtgattatcgcagcttgttttggttatgattgctataaaattcacggcagtagttgagagactgaattcttgggccttggtctttgtcgaagaaccagacataacatgagatgcctttctttgctgtataatatagatagcactgatctccaggcatattgcacatatttttcagcatgtgagaatttgccaaaggtggt

SEQ ID NO: 91081 - DNA, 580 bp, Eucalyptus grandis
  Intron number 1 from transcript Egrandis_v1_0.007649m (loc us Egrandis_v1_0.007649m.g) derived from phytozome v7.0 (c hr-ID scaffold_4; pos 11324965 to 11325544 reverse strand)
cgcgtcaccccgaagaacgagcgacgcctcgagaggtactgcctgttggtcgatggcgaccttgtgattttcgctttcctttttgtgaatcctgtatttactatcatctggttagcttgattttgtttttcttttcttttctttataacgaatttgaattggaggtaattcgatgatgaatttttcaattggatgcaatcaaattgcattctgggttcccttggatgttggaagcatcttgcaatattcctgtaggcttgttctaagtgcaaaatttgaatcctttgtatcatgatgcctggaattcgtggaaattttttgctgttttggtggttgtttggtggacaaatatgttcaacatggatgaattgggcttttgggacttagattttaacctatatgggagtgtttgcaatgatgagttgtcaagcctgtatcgttagaggattgatctgttctctttctaggttctctttagtacaaggctacgatgaaatgggttcgggatgtcctgctaactattcttttcttttttttaaatgtaggttcaagaataggaatttcttcaaggttactacaa

SEQ ID NO: 91082 - DNA, 890 bp, Eucalyptus grandis
  Intron number 1 from transcript Egrandis_v1_0.054814m (loc us Egrandis_v1_0.054814m.g) derived from phytozome v7.0 (c hr-ID scaffold_759; pos 17409 to 18298 reverse strand)
agcttgttttggggtcttgcgccctcataaaccaggtacgtcctactcatcattttccgaaaagctcttactgagattaaatttctgctcatcttgaaacagaaatgccatgtgaagaacaaggacatcaggaagttcctagatggtctttgattgtttccaaaattgatttggtgcttcgaacactttccctttagtagcttttctctattttctgatgataagaaattgtatagtttttctttgtgttgcttattgtatagcattgcttattgatttcgatggtctgttgattgaagtatttattctcgggccggggtactcagatttctgtctgtcgttagaatgtagttcaaaagttggaatcttgtggtgtctgttggaatgcatggatggaaattcgaagtgaaaagattttttttctgaagtaaagttctgcatatgaatagtttcacgtcgttaggagacctagagatagcttgcgggctattatgttatgttggtcctcttgatgattggttatgtagcaagtgtgtgaggtttattgtactttcaatcgattgaggtcagaaggttgccttttgtctgttaacttctgttgtttctggactaatgggatgaatgagtttgtaacgaatcagtatagccctgtgctataggggtgtgtgtataccgaatggcggcttcgggctgggggccgaatactttggcttttcggtttggactgatattcagataacaagttttcccaaaatcaaatcatttgatgattttgcccacccctattgtttttttcactttacttatcttgtggatctagatgaaactgaaaataatctttttctttgctcgttttactcaggtgttttactcaggtgaggaaggcggaa

SEQ ID NO: 91083 - DNA, 449 bp, Eucalyptus grandis
  Intron number 1 from transcript Egrandis_v1_0.052333m (loc us Egrandis_v1_0.052333m.g) derived from phytozome v7.0 (c hr-ID scaffold_12; pos 221009 to 221457)
tcgggctgccacaccattgcgtgacccttctgcaggtttttcttcagacttggtttctccggatcgatgctcgtctgtcttcttcgagttatcttctatcatagtaattttgtctaataagcttgttctaattgctcttcttaattctactctcaccttatctatcattcttatctatcattcacccatttaacttatattgacctatttattttttatacattttacatggcccgtggactagttggttaacggaagtgatgttttttcattaacattaccaatttactgtcttatcaaaagtaaactagtttgatttgatctgtggcgtggagaggcaagtcgagaatcatgaagcgacacttctttgctcttcttactgtggttaaaaatgttcatctagtcagttctgttctcttacacaatcctaatctataggggtttgctca

SEQ ID NO: 91084 - DNA, 967 bp, Eucalyptus grandis
  Intron number 1 from transcript Egrandis_v1_0.002065m (loc us Egrandis_v1_0.002065m.g) derived from phytozome v7.0 (c hr-ID scaffold_6; pos 29135135 to 29136101)
tggtacatttgccagctttttcttttacttcttttcttttttcttttttcaatagactatgggccgtgtaacgcgatcgttcgcgagttaggcgcttcatgtcctttcgtcgcgactgcgtggatggctgcgctgccgttttagttgctgagatgtgcgtcgggaaatttcctttttcagcgggaactttgtttgcctctgggtttttgaatctgagtatggaacggtcgagtgttgcatagaaaacgattgtcccatcgagggtgaatctgctggaatttgttatttctgatttggcaaaccaggggtgaatttggtcttcgaaagatgattttttttttttttttttgtttcgcggatgcattcggtatcatttatttatggtggaaggggttcgtgctacttacagtcccttccttgtaaatgggggaatgtgatatatcgacatgaacggttatcgaaaaggaacggtaaatatgggtcacaaagtagatagagattattaggacagctaatctttaaaaaatctggtgaattgctcaccataaaaagggcggacatcagactataggcaaaaaaattctacccatgccacagaaatcatgcagtcctgtttacaagcctcttataagtgcatttcagtaccacattgttattccttaatgcattctggcagggttttggactaatgatgttagcaaaccttatagccattgcctcgatttttagcaatgatgcaaggaggatttcaattgcacaccaagttaaacataagtagatattgtgggctttctttatatacttggaaaattttgctggtctatgccctcaatttgctagttttcttgtgcttaaggtagttctattcttctataaatagttctcgggcttggtttttctcaaatactcagccttttacattacttttctgactcttctaatttgactgtagttgcccctggatcag

SEQ ID NO: 91085 - DNA, 635 bp, Eucalyptus grandis
  Intron number 1 from transcript Egrandis_v1_0.008555m (loc us Egrandis_v1_0.008555m.g) derived from phytozome v7.0 (c hr-ID scaffold_9; pos 29597729 to 29598363)
tctcgagagtgtccccaactgctcctcctccctcggtacttcctaatcatatgaccatttccctgttctgaaatttgttccgtctcttctctgggacgagtttttggttcaatctgttcgatcgattacgttgatgctgggctacgaaattattctttgctttgagttaaatgagtggaattaattgtgatcgaatagctggctggtaatggtgaaatgggtgtgaattttttggtcttgcactgcagagactccctacgagagcatccatggaaattggttatatgcttagattttcttacgtggagttgtcaaattaatgctgatgctgcaatgaatgattagcagaagcacctttctgaggaaactttgttaatgtgggctacataaaaggcattcttactatccgactttgattgatgctttttcccttcttctttttttctttttaatctttcaggcatattgacactgattattctgattatttatgatgtttgttttgtgcgataattcttctgcaagagaagtccatagtcaattctgattgattggacttgaagtcttgtaagacatgaagatcagttaattcatgtgctgatgttcttctatgcttcaggttgtttaggtagaag

SEQ ID NO: 91086 - DNA, 618 bp, Eucalyptus grandis
  Intron number 2 from transcript Egrandis_v1_0.020733m (loc us Egrandis_v1_0.020733m.g) derived from phytozome v7.0 (c hr-ID scaffold_11; pos 43348039 to 43348656)
ggaaggtgtgatcaagttctccttgattatctgaagtacgattttttgtacctgggttatattcgcaaactcgattcatctgcactttttcccctgctgtgttcacactatagtctataagttaaaaagactctggtcacgtgttcatcctgcaacgactcaagtgaggtcctattgaagctctagtgacggaacgtagaggttcatcttatgttaaatgccatctccatggtcaacatttggactctaccagagcaaattcacttgaagcacttcaatatctaggagtccacgatcaagagttctacttaccattgcaagtcaaaaacagtcagactttcgtggactatcaaacgtacaaaaataatattcctttttgcaaagtataaccaagctgcctcgttgactctatattgtcttaatgctcgtaagtgtcagcagaacacaagtaactcaattatatcagttcactttcatgagaagagacgattgatcgcttacccttcccctgttttatcttaccccgacgaaaaaacagtcataacccattatcatgcaatacaattctcataccatgccacaggaagctagaaggcaaggtggcactaatcacaggag

SEQ ID NO: 91087 - DNA, 793 bp, Eucalyptus grandis
  Intron number 2 from transcript Egrandis_v1_0.002373m (loc us Egrandis_v1_0.002373m.g) derived from phytozome v7.0 (c hr-ID scaffold_4; pos 287602 to 288394 reverse strand)
tataaacagctcattacagcactttgtgcggcatcgtaagtagagagttacccaaaaatgaaataagttggacctgctctaagcgtgatgaaaaagtcatgcgggtggggtttgaaatcacaatgtgtcgggttagtttctaatctgtataagcttttcaacttatgacatgacaggaccttcgagtagtaagtgtgttcgtcctcctcactcaaggcttcagtttgatttactatggttgagcattttcttggggctactcctaggtgcataggcccctgtgcttccagttatcagctggcatgtgttgaatgggtgacagacacacactttgcagagtagtcgggagctcaaagagtcccgaacactcattgatgtcaagaaaaaaacttgtgacatgatattggtggactgggtgggaagagggggccctcgctcaatattggtgcaactttatgcaaaaaataaacttttgtaacttttatgaaatttttaatctaattagatacttcccctacattgtcaattgtccatctgccatagtttgatatataagagttattcacttttgtttgtgaatctgatgtagtgatatttactcatcctttttccaatatgtagctactcttctggatgaatcaattaggattactttggtcaaaaactgatgcaaattctaactgatggtctctggacaatttggtagtttcatagtagtctttacgtcaaaagttcatagttccttcttcctttaacagtttcagttgtattatcgaaaagagttcttcaagaa

SEQ ID NO: 91088 - DNA, 946 bp, Eucalyptus grandis
  Intron number 3 from transcript Egrandis_v1_0.028353m (loc us Egrandis_v1_0.028353m.g) derived from phytozome v7.0 (c hr-ID scaffold_9; pos 37938625 to 37939570)
ttttgcagtgtccataagtcctacgagtgctccaggtactttctcttcgccattgccgttgtcttttattttcttattcatgatatttttgtacgctcgagattgtgcgtgttcctttgggcaaaggacaaagcttgatttgatgtatttaatgttttatatgcatagttcttcttcttttggaacagatttccgcacggtcctacaaattgcacgcaaaagtcttaagctttttagaaagtggtgctaaaaggtcttgtccttgtcatggaataaatctgtgcctgatgttttggtacattattcttggtcacaaactggctatatgcagactaataagttcagcaaatgctctttgtttaattaggcctcgtggaaaattttgttggagatttattttgcaccttaagagaattccaagccacagatctaatgatccttccgaagttttgaaggcattgtagcgtaaccaattgatttgactttggtcattggagttgaaggagtctagcactctgtttctcagtttccatttcttaataagaaaggaaaaataacatttatggtgggcggtacttgggaaacagaaatgcattgtcttaatcaaactattcatgctgttatcatgcgcctcgaaggggctttggtggctgaaatcggttctttctatcctatttgcctttctaagccgtagcaaagtttcttgctttgccgatttgttaggttggttataaaaatcttgtctttgtctctatagtgtttttagctggatgcacatgttcaagtgcctccctttctaatcaaagtaaaaacacgagtggtcgagctcggccatgcctatattcgatctttccttctgaggcagaataaagtgcaaggcctttggtcatgttttggtttgattttttcagctctacctccaagctctgcaactattccaacagca

SEQ ID NO: 91089 - DNA, 898 bp, Eucalyptus grandis
  Intron number 2 from transcript Egrandis_v1_0.010020m (loc us Egrandis_v1_0.010020m.g) derived from phytozome v7.0 (c hr-ID scaffold_4; pos 39827203 to 39828100 reverse strand)
ttcatacattactggctgcttttctgattattctggtaagtcttctctaacattgtgcaatgttatgttttgttgcttcgtgtagcttctctccaccccccccccccccccaaaaaaaaaaaaaaaaaaaaaaaccccgccaaaacaaaagaaaaagaaaaacacctacacacacacacacaagcacacaaaggaaaaggaagaatccagtgaaattattccatgaagaattctcctatcgtgctatgttgtttctctgcctttttttagtactggaagcttctgaacatagaaatagtaattgaactacctgatcaatgttcgttcaaactgttgaattgaaggtctgtgataattagcaagagagacctttctcgaagactatgattctcaaatttaagctggagaacatttttcctttcaataaagtctccttacaaaagaaaaaagatctttcttggtatacatttgtcatccattgttgcttgggtatctgcagcattattgttttgggttcatcgtatgactcttactttcagttaataggaaatggtcacaagttgtcctgtaataagttcaaaatgtcaaactactatgcaatacatgttagcttgacaaaagcatctgccagttgtagtcaggatctgaggacttcgagaaaaggagataaactggatttatgctgaaaaaaagatctaagcaaataacagatgcagtccatcttgagtcagtttcatcattttgttacctttttcatatcttctattactcttcttatccagtatttgtttttccatcccgaggctactttttcaagctttctgtgtcggatgatgagatgatggattgttgttttggtgcagtggaatccacttctgaggaatctgagcattctttg

SEQ ID NO: 91090 - DNA, 494 bp, Eucalyptus grandis
  Intron number 1 from transcript Egrandis_v1_0.040236m (loc us Egrandis_v1_0.040236m.g) derived from phytozome v7.0 (c hr-ID scaffold_6; pos 52397123 to 52397616 reverse strand)
aaacaagatttcctttggcatttacttaaaggtgttttgagtggtttttcataaattacttcgtttcatcataaaattaccatgtctcgttgttcatgtgagatgtattgcataatcttttattctgagtgtttcctctacattgaaagatgtttccttttgagttattgtgtttggatcggttcataacagcacaacaacgagaaatgcttaacatgtttagttctattgcgttttatggatttacaatcttctgtcatctaagttttcatcacgacattttttgggccgcctttctttcctggttgtcatcaagttgctctatgacaatacttttaccttttagtgcccgggttacactgtttggaatctgttagactggaaggtagagctagattagtatgaagaacttatgtgatcgatatatttagtttgatgtatgatgcagtggtgttttctggacttgcaggtgtggtgaaatccaagaaatcaat

SEQ ID NO: 91091 - DNA, 767 bp, Eucalyptus grandis
  Intron number 2 from transcript Egrandis_v1_0.044556m (loc us Egrandis_v1_0.044556m.g) derived from phytozome v7.0 (c hr-ID scaffold_11; pos 22300632 to 22301398 reverse strand )
attccatcgacgcccacaacaacaccatttcccacgttagcagaatgtctctttctcccctcaatttcatgaattataccatcgtggattcctcgctagactttaatattaatcatgcaattgcacaccaatcttttctctttatagagttgactggttgcccaactaaatctctttgcaccgtattaatatttcattaaaaaacaaaaaaacattagccgattttttggtcgaaatgtatcaacaatacgtaatcacttatcatattaaaattactaatgaagtaattatgagcataatattaattgttcatggtatgattatacaaatttttataagtttaatcaatacaatcgcatattatatgcttagcatttaattatataaattatatttttagtgattaatgggaatgtcaaactcaaagatcatgattaaatatcaaagtgatgagagttatattcgctctaactttaatcgtaagggtagtttcagaatttcaatactattatctccttattatatatgttattcatactgatgcatggtagggctctattttgagtgatgcgtgcttttcacgttaactatatattcatttgctttaaacaaaaccttctttttttttttaggcaatttttgaagaattttttcattagaatcaattgagatttatgtatacatatcaatagatgtaataaagccattttgtaacatcattttgatgcctagtttttaagtaaggctagaataaagccttcgtgtcg

SEQ ID NO: 91092 - DNA, 656 bp, Eucalyptus grandis
  Intron number 1 from transcript Egrandis_v1_0.014074m (loc us Egrandis_v1_0.014074m.g) derived from phytozome v7.0 (c hr-ID scaffold_6; pos 27432633 to 27433288 reverse strand)
aggtaatggtatcgtacgtatcagcccctccgcataagagtacttagttggaaaagttataaatgagaatttttgctagtggagtaaaaagcagtacagatagctgctgcaagggttattttcttgcatgaagaaatgatttatataattttcttgggtctttttctaaatataagggacattttttttttctaatttgatatctttagttttccttttaaagccaaattaaagaaaatgaataaattgatctaccagtcatttcaaatgtttatttttgtcttttgctagaccagcttatgtgaaatattcgggtaaaagaaagaaagaaatgtaaaacgcttgaaaaaatggatttttcaaatgagccgatctaggaacaaagcaaatttggaggtgaaggtcagtcaacaggcccagaaaaatccagtttcatttctggtgatgcagaacttcgtggttgatgaggcctgttgattcatcttattcacagatgccattaatcacagaaaacagcaatttcttatgttctaagcactaggggtatctaattgagagcaaaaatcgaataccttaacttcttgattgagtaagatcaaacgatgaagaagaactcatggttgcatttttgattgctgatcatgacttccaggaca

SEQ ID NO: 91093 - DNA, 851 bp, Eucalyptus grandis
  Intron number 1 from transcript Egrandis_v1_0.011961m (loc us Egrandis_v1_0.011977m.g) derived from phytozome v7.0 (c hr-ID scaffold_9; pos 3823446 to 3824296)
gcgagagcgagaagcgagaagaaacgcgggttttggttggtaaaggtgctttttttattttcttggtttctgggtttttagcatctccggaaaaagcttttgaattgcattgcgtgagatctattcggcgttttgggttgatcagttgatccttacattccatcgattgagggcaatgttttcgtgttttttcgggttcgaaagaatctctttggggtggcgttgcatggtgtaagtgggattgttatgattgcattgctttcgtcatgacttgcttgcgatgctcttcagcgattgtttgttttgggttggtgctctaaggttgtgggttgatggttttgagttgggatttgcggatcttggggcaattctcaaacttttacaaacagggtaaggtgtttctaaaattgttttcggcgtttgattgaggcgtgtttcttttctaagagttggtaataggcaaatgtcaggatgggttgtttggctagaatgaatatatgacagagctggtaaatttcctccctccccagcgtcaaaatgtggattatatgtagttatggtgtttttgtctgcattgtgtttcttgataaacgctgccaaattttgctttggcttggccaaatatcagctagttcattcaaccacatggtcattttggtgaattatttgttctcatctggttgatgagactctgcattgggaacatgtgtgtatatgcctacctagcaatgaatctgtgcatatatgcctgtactgtgtttatagcacatgcaattgctacatgaattcatgtgttaacgctcttctttcctttgcttatatctacagattgtatttctggaaggagagaa

SEQ ID NO: 91094 - DNA, 904 bp, Eucalyptus grandis
  Intron number 2 from transcript Egrandis_v1_0.037948m (loc us Egrandis_v1_0.037948m.g) derived from phytozome v7.0 (c hr-ID scaffold_4; pos 38580527 to 38581430 reverse strand)
aactagaattgggtgagctagaccagaattgggaagtaagtgcatagatggcaatttttccttatttatggacttggaactcagatctaatctcccattgttcctcattagctcagtggtagagcggttgattgttaactgactggtcttaggttcaaatcctacttggggagatctgattcatttggattaaagtcatttcgaattaaagacttcagaatgaaagggttcactttgattgttaagagtaggtaatgtagttcgtatggttttcacatttttttatgccatttttgccgaatgtagtgctttcattgtgtggtttttggaaaattaattcgcatggtttagaatacaggtaaggttaattggccgggttggtcaatgcttgatagattagaccttgtgcgtataatagactcgagttctggcaaaaacatctctatagggatgtagttacctctacttctgccctggtaattgactggttaattggctggtttcagtgagatggagcaattctatcacttgatgagattagtgtgggttcttaaattaaaagacttgaataccaaggaacaaaagaaatgtgaaagagcacagagttgttttctggaccaggatcccatttcttttttccttctctctttgctgctaacaaaagaactgttgatggactaaattgcatatatgtgtcgtgtgaattatggattagagctatttttggatttatcgtcatttgataccgtctcgggattgaagagaagattcaaataagagtttatatttcatcatgtttgttgtttactcaatcaaagaaccatatatttcaaggattctcatttaacttcgattaattgtggcatcagttggcaggcaagcgagttggtattgttggacttgg

SEQ ID NO: 91095 - DNA, 914 bp, Eucalyptus grandis
  Intron number 1 from transcript Egrandis_v1_0.031739m (loc us Egrandis_v1_0.031739m.g) derived from phytozome v7.0 (c hr-ID scaffold_9; pos 24765427 to 24766340)
aatcaactgaaggaaatacccataagagaaacaaggtcagctgaaaaccaatcaccttaagtatataatttgctgtcttgcattctttttgcacaaaaatccccaacaaaaagagattgatatacaagagatagaacaataactgcaaagttgtatatctgcaagaacttaaaaatcctctttctcttcttcaatataatgagtctcattcgaaagaaaaccagaagaaaggcaagatatccaagatgagatatatctaatgcaaggtcccagtaattaaaactaaagcaagcatgggatccaacagatggcaacaacaatctatcttcagataatcaagaactatccacatacttttagtttcaaatgagaggtctctccatacaaatgtgtttttatgctgagatatcatttctctataagtttatgaccctgaaaagctagacctgtgattggcatgaagttttaaacaagcaatcatgaagacgacgaagtaattgatcaggacataaagatcatcaatggtaaaacctaatcgatgtaaagcgcccactgatcaatcacaccaggactttactgacacgggcttcacacaagcatcaatgacaactggaatcaaacatatgaaaatagtaatagtaacctgatcaacttccagtccataatactcgacaatcacttctagcaaagtttgccaaccagattcaaaatgataccttgtttgtgaaactttgatgcttgatcgagtgatctagtctttgtgaacactagcggatctattttttggttctgccctcggagccgagttaagacctccaaactcggtgtagttccgaatcccgatcaacttcaaatctataccctcggaaccaagtcaagactttcgaacttggcgcagacccgagcctcgtacg

SEQ ID NO: 91096 - DNA, 791 bp, Eucalyptus grandis
  Intron number 1 from transcript Egrandis_v1_0.008910m (loc us Egrandis_v1_0.004577m.g) derived from phytozome v7.0 (c hr-ID scaffold_6; pos 14892811 to 14893601)
gagccttcgagaagcgcgccgtctcccttcgataggtaagggggcctctcctcgtcttctctctctcgccctccgaaatctcctgtgttcgcgacgcgaatgtcgaagcggacgagtcgaatcgtcgggtcccgcgtggcgggcgcccagcggggaggaagcctcggcccgaaggcactcgcgcgagttgctccctcgctttcactggcaattggactttctcgttcaccgctgaatctccaatccctcggtggtttttttttttttttttttttcggttgggccgtcgcttttttttgggggggcactgtttccactttacctaacgtaatctacgggggaaattatgtgggcggccagctattatcctttgcttccaagtgcttctccgtcgtacttggcgtgtataagtcgaatctcgcctgaatttgctgatgtttctctagatccttagattaaggtttgatctgtgtatatgctgtgtcgttgcctgagaatggttctgggtttgatgatggcgatattggtcgaggtggctgtgctgtgagattctttgtcgagatcgccggttgagcttttcgggagtttgtgtattgtttggaggtagttttgcgagaaatgtaggacattgatgtcgtcgttgagtttaataacttagttctgttcagtttcttggttttccgtggcagaacggcgagtgtggaaatggctgatgtagcgggtcgtcgttgagtttattaacttagttctgttcagtttcttggttttccgtggcagaacggcgagtgtgg

SEQ ID NO: 91097 - DNA, 938 bp, Eucalyptus grandis
  Intron number 1 from transcript Egrandis_v1_0.010863m (loc us Egrandis_v1_0.010863m.g) derived from phytozome v7.0 (c hr-ID scaffold_9; pos 25932483 to 25933420 reverse strand)
accttggccgaactcattggtacgtccttccttcctcgccgtcgcttcttcgtgtctccgcctggcgattcgcgggcagggaaagatgctgcgcgccggtaaagtcgccagagggtgcggagttatgaaaataacaatggttctcctaattcacgtgtaaacttggtccggtacagtatggccttttttttttctttttaattgttcaaaaaggtctcatttaaagtggatgtctgtatcaattagattttcttaacccatcatgggctgaaattgttatatgtgtaataagtcataaaaaaattaagtttacaaatttgatatcaaatgggttccccactgagcactcttcctaatttgaaagaagtaagcggagagttcgattccccatcttctcgagattaggaggggaccgcgtagttaaaggagcatagggacttataattttgctaaattaggttcaatgtggaagtgttttagcaaatatgaattaacatgcatagggtatggattgggctaagatagggtcattagatttgcactgcatgaatattgatcaatttgaattggattgctttcgacctgatccacccgtttaacacacgcattgctttagttggcctcatcaattctaaggaaaaaggggagaccttttctttttgagttttttttttctcctgctggataaaaagtgttcactgggcggctttggggcatcaacatgtgctgcaatctaaaaattatggaattattcccaaaatagtattatatatgtccatttcctaacactgcaacgagttggtgattcaaacgggaagtttgtgctgtttttttggcggggttctggcttcttgttcctcttgtctagagagcctcaccagttggatttgcctttcccttcttttccctattcttttccttgcagaggatcgtactga

SEQ ID NO: 91098 - DNA, 996 bp, Eucalyptus grandis
  Intron number 1 from transcript Egrandis_v1_0.050810m (loc us Egrandis_v1_0.050810m.g) derived from phytozome v7.0 (c hr-ID scaffold_4; pos 40336746 to 40337741)
ttcggattttgactgctattcagagggaaagacaggtatgtttattcgagcatacccttgttaaatttgcttcattatcattgcatgcacatactaatttcttgcgtcttgcattttctatgaaacactgccacaaattcatgaagttccagctgagggtagaatgaaatataaaaagggaacaggaagccaggtgcatttagttggactgctatgggaatcatgcacttagtgccaaattatgacctgaaaatgtgggtaaggaggaaggaagaataagaaagaacaggaacagagtataaactccatttatacacacacacacacacacacacacacaaaataaaaacagagagagggtaggatttctttagcagtttctcattgttgacattgatttttcggtaatgaagaagtgagcaacttttttgtttgtcatatcattcctattgtcaaattttacttggactttgacttctcctctaattgttcacaataatatatcgctgattatataatcaaacttaaacttgggcaggtgcaattagtgtagccaccagtagtcatgttaatcggttgaataagatgcttagattcaaagatgggttgaaagtaggagaatgacctcctatacagctacactctcactatgtctggactcattttgagttgaatacactcctggtttaaaagaacatgatcaaaaaaaattatttttcctcctctctaggatattttaagtaatttggagagatccaacatatttataatcaaaatattcccttacatatatgtgtttgctagatgatcagtttctccctatccttgtacctttatcttctctaccttgaacaaatattgttcaattccttctgtatgctgtgtttaaagattgcttcttcatccagttcttcatgtacaaatctatcttctcgtttcttgtcctttcaagatgatagttattctgttctgcagctggaagtcaatttactagca

SEQ ID NO: 91099 - DNA, 458 bp, Eucalyptus grandis
  Intron number 1 from transcript Egrandis_v1_0.047986m (loc us Egrandis_v1_0.047986m.g) derived from phytozome v7.0 (c hr-ID scaffold_4; pos 16188498 to 16188955)
ttttctgcatcatctgattggaaccttgctgtaccgtgagtatgaacttccttatacttttagttttctcaatcattgttaagtttcttttatggaggaaccaaactcaaataagattggatcactactaggttgatcttgtaaacacctgcttgccgggacaactagtaggacatcgattcacaccatcaattgagaagttatagctacgtgatgtttgtccacaaaagattatgaagacacttgtttacatggaaagtactttatgagttcaaggaagtcctttacccatgatatttaaagtgtgaaaaacaataaagggagaaaaaggggccatatatagatgctgaatttagggaattatgaataattatcaagcatgttataactgaacttgtattatatacttcgatgcttctgcaggcaatctagtgtaattgacgaaagcagtaccactg

SEQ ID NO: 91100 - DNA, 327 bp, Eucalyptus grandis
  Intron number 2 from transcript Egrandis_v1_0.006192m (loc us Egrandis_v1_0.006192m.g) derived from phytozome v7.0 (c hr-ID scaffold_4; pos 31360286 to 31360612)
aggctcatcctcatccctacgtcctctacggagaggtacccaagactctgttcagaaaccttcttcttcctcttcaaaaatgaatctttaataattacatgcattgatatcgattatgggggtcatctttctgtctcccctttcctctctgtcgctttcagtggattcatctcgtgcattttccatagctaaagcagagagcgatttgattcgaacattagtttatgagcagatgctgatagttttctttcgatgtggtgtggggaatgcgattgtggacattgtcgtttaggtgcgggacgggaacagcgaccactactgctggca

SEQ ID NO: 91101 - DNA, 505 bp, Eucalyptus grandis
  Intron number 2 from transcript Egrandis_v1_0.025231m (loc us Egrandis_v1_0.025231m.g) derived from phytozome v7.0 (c hr-ID scaffold_2662; pos 3330 to 3834 reverse strand)
aattcccatcagaagacagcgaaagtacgacagtcgtagaatcgtaccatttgctccccaagtgaagagattctcagagccagtatgaattcagtactcctgggcatgaagtacgtgcaatccagacgcaactgaggctccatcacattgattttgagtttgtttttaaagttacatgtttacacagccgttaatgcacttcctaacgagtctgttatacatgagatagtgcgctgtagcttcggtgaccaatggcaactactttgaagcacatgcatcagttggtgtgtggaatcccgcagtagaagattcggagcaaagtgtctcccaaatttgcctctcatcacgccatggggtttatgcaaatactattaaggccggatggatggtaaaatcatgtattgataatctcttaaaaaagcatttcttggcataactagcactctgcacgtgtgtgaagatgagtaactttcttttctctcttttctttctttgttcccggtag

SEQ ID NO: 91102 - DNA, 1009 bp, Eucalyptus grandis
  Intron number 1 from transcript Egrandis_v1_0.028743m (loc us Egrandis_v1_0.025371m.g) derived from phytozome v7.0 (c hr-ID scaffold_11; pos 35861058 to 35862066)
gaggtgattctctttccctggctcctctgattcgcgatcgtacccggctgcgaatcgggtcgcccgggtcgtcgcgctcgatgttgctgacgcccccgctagttcgcgcgctagtaattcccatcgcgagagacataggaaagggtggatcgaggtgaatatggtcgagttctttgcatgtggtgaggtggataagtcttagcttcgcctttttgaaataaagggtcggttcctgatgattccgtcccggtcaagcagcatcggcagcttagtgggtttgttagtttcgactagatggtgagggatacagttcaaaaaaatttcatctttgtgggtggaaagagaaaattttgagcctttcccgaaaatgaggctgcacagagtatccgatattggagcagataatgaatctttctggcataaatagaggaaaactatcaggtggctttgaatattggatacatccactggtagaattttttggatgaaatcgggactatgcctttgatgtgctgaattttgttggacggatttcataatgtagcctcgattagttaccttagcattcaagccagtgctgaggtcatgaccatttatgttgtaaggttgggacttgtgatttgagggcatcggttgtagctttgcacatgaatatgaagatacagtataagttgtacttaaagctttctttggcttctctagtcatcatacttcactgtaggactatgcaggacaaggttctctacgtcagagaacttgctatattacatcaggttgttctcctttagattgcgcctatatttttgaagttctctttagagaattctagcatgttggagctcgtccaggataactgacggtctgtattgtagatacactttgatttctcactgtctcactctttaaattgttcgaatttgcattggcttgtgctatctgtttcttttacttgtatcggaccattataagggaggaataaattctgttttgcagcaggtttcgagtggaa

SEQ ID NO: 91103 - DNA, 721 bp, Eucalyptus grandis
  Intron number 1 from transcript Egrandis_v1_0.019602m (loc us Egrandis_v1_0.019602m.g) derived from phytozome v7.0 (c hr-ID scaffold_9; pos 31946619 to 31947339)
ttccggcaacaagccccgagtggataccgttagtaaaaaaagatgatctctttcatgatttcatctcggcttaatgttatttctccatgtgaattgaaccgtgttctttgatcagtgttccttcagtgtgaatatacaagtttatggtggcaaattggcaatgggcgacttttccttatataatatttggtattagaagcctttgcaatgcatgtttaactgttgttatgaataaaaaacaagccgttataggattagttgatctgcttgcgatcttccatcttgatatatgtgttttttattaagaatactgcttccacaacgctccaccatgttctgtcgcctgtgaaaagaaaaaaggtatatgatattttgggaggaaaaggcatatcagaattagatattatgaccatcgttacctgttaatgtttcagtagcatagtctctggacttacccaaaagcggatatagctttctgtaggcccccacaccaaagcagaggcaaagacaaagtcattagttttttggttcttttttcctttcagtggggaactgtgactgcacagtaagatttgattcgttttcaaagaacaagatactttaataaaccactctctcttaaaagagtttttaattatataaatagatagcatgggtttttgaactgtgtcggctgcttcgtttaggtcgtgaaactcgctcaccagcaggaaaaacagca

SEQ ID NO: 91104 - DNA, 722 bp, Eucalyptus grandis
  Intron number 1 from transcript Egrandis_v1_0.000819m (loc us Egrandis_v1_0.000819m.g) derived from phytozome v7.0 (c hr-ID scaffold_4; pos 13599675 to 13600396)
ttgaagggatatcgtgttgacgacgcaagcgaccggtaattctactctactttcctttgcttgtacctccttgtgaattccagtgcaaagtgaccgatgttgaattatcaagtcgttggagataaccttggcgaatagtggagcgtttgagactttaggagcacctggctactatctgtgctttgaaatggctccaggagaaagcacgattgtgattatccaaaacattggagatggcagtgggacatctataacttctttttctcgtttttttgggggagaggagatggcaagcattttgcccatataaatcctgagttcgtagtagtcatttatagaatagaaataaggcctttgaatgactactcaagtctctagagacaacaaaaaccttgtatggttactggggtccaacataataacagatgacctaaaccacgattaagaactcatgtggagcacacattatttccacaaatttatatagacttgattttgtattgtgattgattctgttgtcacggtcattcatgactttcctcaagttgcctagtactggtaagtcgctaattggctaaaactcgagtattctgcttcattcttctgcctatcttgttatttctttctttagtttctcatgatcatacgctgttttcatttactcattttgattgtttggaatggcaggcttatacctgagatcgtcttgtacgtcactcggc

SEQ ID NO: 91105 - DNA, 631 bp, Eucalyptus grandis
  Intron number 2 from transcript Egrandis_v1_0.009880m (loc us Egrandis_v1_0.009880m.g) derived from phytozome v7.0 (c hr-ID scaffold_6; pos 2181223 to 2181853 reverse strand)
ctggtgagcctccttgctttccattgccttgttttttcagctgaatatccgccgccacacttcccccatttctggggaagcccctttcatttcctgtatcttgacccggtatttcacgggatgaggcatcgtgggatcgggatccttaggctttccgcctcccccgcggaaggggtttgggttgtggcggatagtcctgtgtggaggggttttagggaaactcttcccaagaaatcgtgtgagcaatttaaggatctgctgaggtccataatattacttatcatgtgaaaatcaaatggcaaaatcgaccaattacaagctgtagaatttaatgtcgggtagttgaatatgttgctctcaactaatattttatttgagtattatctggaccagctccaccttaatcttcttaaaaccatacaataaatctaatgctaagaaaagcagagaatagtgatgctcccagccctaatcatagagtgtagcgactttatcgtatggaagctagtcacacctacatcttatttcattctttctatttcattaggagtttattaaagcttgaaatgtggatgtatggtcgtttctcttggcaggttttgttatcggcgggaaccgacacatcggccgc

SEQ ID NO: 91106 - DNA, 782 bp, Eucalyptus grandis
  Intron number 2 from transcript Egrandis_v1_0.017927m (loc us Egrandis_v1_0.017927m.g) derived from phytozome v7.0 (c hr-ID scaffold_64; pos 158959 to 159740)
agtggccaaccaatcctccatcgttcaggtaataaacaaagcttattctcatcatgtgatttatttatctttgactgaaatatttgacataattaatgttttattttaatatatctttttgattggaatggttaagtgattacggaacgaatttgtgtatccttaaaaaatccacaatgaatttgattatcactatcatcacacgtaagcaatttctatttggatcatccattcaaattatgactcgatcttatttgatccacaagatttatagctattttacaagcccgagatttttaccatatcaactggagcttccttctaaatagacaagcatgattttcgtgacattcaaacgattgaagattcctgttgatcatgaggatttcacaagctttcaccaatgaagtttggaaaattaaaagcttgatcactgtactttctaaagtctgacattagctaaacaaaaagattgaaaaataagaatctctcaacggaagaaatgtaggacccaagaaaataaggggaagagcctatttttcaccaatagacaatactgatccacgtggaatgtcagccactcaagaaaaagaaagtggtactttccagtgatttattatgactaccacgttgcggaagttagaaagagcatgcctaaaagttctcgactttttcgccaaacttcaagtgtcttggcttgccggcacactttaactgcattaccggtgaaatcttcttgactggcaggaaggaggtgggagagtattgcacaagagtaagag

SEQ ID NO: 91107 - DNA, 974 bp, Eucalyptus grandis
  Intron number 2 from transcript Egrandis_v1_0.013479m (loc us Egrandis_v1_0.013479m.g) derived from phytozome v7.0 (c hr-ID scaffold_11; pos 37718206 to 37719179 reverse strand )
ggtttctctcgtttgcgtggagtcgtctatccctaagaagcgaagatccttctcaagccgtcgccctgccagcatcggcttcaatgcccttgtaagtctcttctgagttttctgccttcagtattttcccaaaaaacaggaagaaattgttcacgtttcctaattatataaaactttggttatcccgatacatgtgcagtaggcctcattgggtccgtttaacaagacgcatctaccacggtgcttcaaacgaaagtttctaatttcgtttacttctcagtgcgccttcaccgccgcacgaaatgtgcctactctaggaagattggaaaaagaatagccgttggtcaatgaaatgacaacattttcctgatttttttatttttttgtttatagttttggagattcagtccttatattttcctcaaactgccgtgccaaacaacattagatttaggcacactgaacttggaagaagggacaaatttttaaatatgtttgcatctttcacctaatcaaacgtgcggtcgtagtgattggttgagttgcggtcacattattgcatacaaagtacctaaagttctataatttagtttacgaaggacaaagagctaggtctagtataagaaagtaatatgagacaacgacctctaatatcccaaaggagatgctttctcaatactaagttatatctttcagtttcaaactagcaagctatatcgattaatgaggaatgtcgaattttgagtactaaaccatgttttcaattgataatctagcaaaagatttcatcaataccaaattgatcctgttaacaaatatctttaagatgcttaaataagaactttagaaaacatgagcatgtgcaatggtgaagttgaccgactaggtgctcttcttgggtgcattaagttatgtctgggcttgacttttggaactgattaactggtcactggatgacattgattaggactata

SEQ ID NO: 91108 - DNA, 576 bp, Eucalyptus grandis
  Intron number 2 from transcript Egrandis_v1_0.012194m (loc us Egrandis_v1_0.012194m.g) derived from phytozome v7.0 (c hr-ID scaffold_4; pos 21884451 to 21885026)
gcaccttgcggtggctagaaagcaatacgaggcaagtgcacaattcttttgacccatttgatttcgtcgtatcaattcatcttctttgttcttcacaggtgaagcaaatagaattatcaggctccatttgtttcacagtttgaaaactatttttctgaaaatgatcgtttgtattgctaaaaataattagcccatgaaaaatatttccctaaacatttctgttgacaatgaaaaagattttgtttgtttatttttataagcaatataagtattcatttttaggaaaatgttttgaaaatcatcattttccataaaagatatggaaccttagcattagaatatttatattttaaaccacacattcgtttaacaatttaagttttataatggtagataatgctttcacaaaatctccgaaacaaaaatgtttgtaaaaagaatcaataatagttctagctaatgtgaaagtgcatgttttcgctaacctttcgatagaaattgcacgactagaatgttggataatgtataaaatatgttagttaatcgaataggtagtcaagttccttctctcgggcg

SEQ ID NO: 91109 - DNA, 643 bp, Eucalyptus grandis
  Intron number 3 from transcript Egrandis_v1_0.023141m (loc us Egrandis_v1_0.023141m.g) derived from phytozome v7.0 (c hr-ID scaffold_9; pos 31377983 to 31378625 reverse strand)
gtgattggaaacatcaccaccgtgcttaaggtacgaaactaacaagaattccatcatccaccgctcttgagagagtactttctagtttcacttaaaggaagatttttatggaccgcgtgatttcttgtaatttctggtacaaatggactcgattggatagctccatgtacagaagccaatttctatcgacaaattcgaaaatgaaacaaattcaaattacatgatctttaagcatgcccaattgtattgacatgactaaacatgagtgcttaatccgaactcacaattgagtacgagttgctgacccttaagtacattataaatgcaattctttctccttctcttttccataagccatgatttgatatccaattaagatctactatatcacttagtcagttgctctttatgtggctccatttgtagcgcaaacatgggattgtacaagtatttcgatgtctttttattcaattataagttggtttcgagtgtatcttgaccggtttatttgccgagagaccttaaaggttcactctgctatatacatacactatatagtgtgtgcttacaaggcaacatttgataattgttacagcatttcaaggggatgataacgatttctcattttcttttcagggaatat

SEQ ID NO: 91110 - DNA, 1006 bp, Eucalyptus grandis
  Intron number 1 from transcript Egrandis_v1_0.011055m (loc us Egrandis_v1_0.011055m.g) derived from phytozome v7.0 (c hr-ID scaffold_4; pos 41032893 to 41033898 reverse strand)
tttttttgggacgacatcgtcgacctcaatttcgggtacttctgtcccacttttcctcctctcttttcgtgccccctccctttctctgttctcgaacctgttcgcgcctcccccccttcccttttcactgccgtctctgtctctctaattcctctcctcccggcggcgaatctcccggcggcctgactttcctcctgtgtcttcctttctgtgtttttgggtgctgggggttctcttatcgggtgttcccagcatttatgtgagatgcatcggcagtgcggccttctcctcgtctcttcctgcccccccttttctcgttcgatcgtgattttcagataatagggtttctgtgtaaccgccgcatatttcgctttaggtcggccttccggtttccgtttctttcccaccaactctctccatttctcctcttaatctactgcgacagtccaattcttgacctttccactctccatttcgactctttctcgacataaattttctctccggggacccgagattgcttctccttcttttttgtcttttccataccatatccatatctccttcttttttttttttggggggggggggggggagggggggggggcttgggaaaccccccccacctcttttttttttaaaaattttttttttacttccccagggggcaaaaaaaaccgggaaactctgggtttttttatttttcagatacttcgggaattgtttatttatttttccccggtttttttaatgagtaaaaaggtaaaaaaatcctggaaaatccgagcttttaaacctttgggcggattttcctgtcatcctctttccggattccggatgatttgagttgattggtgttgctacatccttaagggagcatcttgaatgtttctacagtgctctgctttggaaataggttgctactccatacatgcacttatgcagtttcattgaacttggttctagatcaggtgccactcgtgtacggttctcacgcaagaaacct

SEQ ID NO: 91111 - DNA, 816 bp, Eucalyptus grandis
  Intron number 1 from transcript Egrandis_v1_0.024934m (loc us Egrandis_v1_0.024934m.g) derived from phytozome v7.0 (c hr-ID scaffold_6; pos 7150104 to 7150919 reverse strand)
ttgactggtgcttcagattctcaagaacagcttcttagttctacttctttttgtgcatctttgctacttgcatgcatctgaatcttctttttctgtcctaaccggtatgttgcttcgtcctcatctttgccattttccattttgtaagaatcaaataaagactctccaactgaacatccttattaacctggatcaaatatatgcgcactcgacaagtagatctggtggattctatgcgaaataaagggttaaatgacctgaatgtaggtgggtggacttaactgtgagatgcaataaacttctcgaagagagaccaagaaatagagtgagaagaggcgagaagggagaggggaagatcgacaacagtggattgcagcccgttgaaagggtcgagctacgttagaaatctccatttccgaacactagacaagatttttttagctctatttctcatgaatttgggatttttgttttaaaagttaatatccggatctattttggattttgctttgcggcaacgatttggtcaaaatccaaggatattttgattccccacattaccttcttgagaaggtaatccgcaattgtcgagttgtcttttgagttgatcgggtatttcttgtctcaaaaaaagcagattattcttgggtccgttgaatattaatctgcagtttggctttcccgctttagtacttgtggatgctattatttgcttaagaataatgctatgtgcattaggaaaatatacacaggattggtaggttatataatcgggcgtgctctctttgcctgcaggttgataatcaaaacgacaag

SEQ ID NO: 91112 - DNA, 684 bp, Eucalyptus grandis
  Intron number 3 from transcript Egrandis_v1_0.003834m (loc us Egrandis_v1_0.003834m.g) derived from phytozome v7.0 (c hr-ID scaffold_11; pos 18187654 to 18188337 reverse strand )
acaaggccatcaccgagtacaaggaggccaaggcggtatgcaccggtcttgctattttcttcatttatgctgtctcatgagatctgaaaagccaaagtaaaatgaaatgattggagttttttatttttttgtgtgcaaaaagtataagcaatagttgatggatcataagtcacatagtagattggttgttggctaattaactaacaaataggtggtttttgatgaaggcttatgtccaactccccttagttaattatctgaaccttcaggttctgagatatatagtgtggtagaatttcagcaaagacttactcaacaaaatatagacagaacccgtagttagcaattttgtgggaaaaagtagaagaatcacagatttcttaagtttttgttgattcttataaaggtgacatgggatgggaattaaaggtctataaaagatcgtggcattcttccttcccttaaaacaatttggagggggtggagttggatctgtctctttgaggaaatctggatttctgttggttgtagctatttctttgtttttgtatatttttatcagctcagacatttttgtcttacttgtgcttttgcataattttagcattataaaagatatctgtttttgaatctatttgctaatttccagcttggagtagacactgttccagtccttgttggccc

SEQ ID NO: 91113 - DNA, 439 bp, Eucalyptus grandis
  Intron number 1 from transcript Egrandis_v1_0.027151m (loc us Egrandis_v1_0.027151m.g) derived from phytozome v7.0 (c hr-ID scaffold_9; pos 29603754 to 29604192)
ccttcacccggccagatcagctcctctctctggaggcgagtgagttttttttttttttttttcttcttttttggggttccgaaacttgtcggcttctttcagtgttctttgagtgtttttatgggcgacccagaaaaattcacgcgctgatctgtgatgggtttggtggatttgggcttgttctttaatctgttttttcaaggacttctgcccactttcggtgtcggcgtaaattgccatgggttccatcttctgtcttgtgcgattgcggaaagaccgagctttataaacctatttgccaattttgtgcgtgatgaattatctctgtgtgatctttctttttctgctatcggcttccactggcaagtgcatgttcttcaaacttgaattgatttattttgcagaaaaagtgttgtgagagtgaggaccgaaaccttcc

SEQ ID NO: 91114 - DNA, 996 bp, Eucalyptus grandis
  Intron number 1 from transcript Egrandis_v1_0.023999m (loc us Egrandis_v1_0.023999m.g) derived from phytozome v7.0 (c hr-ID scaffold_6; pos 48033584 to 48034579)
ggtcagcttgattgagatggatggataactagtgataatggtataattatcatgtaagtgagaaatatacctgatcacaaccatctgaatttgcccatatagagtttgtttggtttagctcgatacgcatagatttattttactcctataggaaactgataattgtagaatatcgcaattttcaaccattaaaaaacttaagttgagacatcacttaggatgcgactttttaacttcctgctgcttgctaattttggcacatcatatacttggaggaaaactgtcttgcgctgttttttttcttttcttttttttttcttttttgggggggagagagagagttctttgacgggcgctagaggatgttattagagtaagaaatatgagtacatcagttatgcacaaggaaaagaaagaaggaaagaaaaggcaaaaaataaggaaaacatcaaaagactatgagaagtcaaagcaagatgtccaaagccgtataaaagagtacatgactgatgcaaccaaagattctaaacccttgagcaactctttagggtttttaggttgtgttggtgaatagggcgtgttgtttctatgctggggcacctagcaatgtacacctagcctggttggaaactacttggatgaaaatgatcggttgatgtgttgggttattcagtttgttatcctgtcaatagagttgatttgggggatttaggacttcaacgtgaaccatgctgagcatcaacagcaacctcagtcgaggtctgaagtgatgtggattttatttggatattaaaaatgttttaaatcatgacaactaatttgatgctatttgcacctttgcctttgagtgattcttgtagcttgtgttgtatgctgtgttctattttctcccaagtttgctgtgatgtcatcaaatattcacgttcctttgtttttttctagttttgaatatggttcactattgaggtacatttttaatgtaagttggcctgctgc

SEQ ID NO: 91115 - DNA, 967 bp, Eucalyptus grandis
  Intron number 1 from transcript Egrandis_v1_0.002743m (loc us Egrandis_v1_0.002743m.g) derived from phytozome v7.0 (c hr-ID scaffold_9; pos 21826009 to 21826975 reverse strand)
gggcagcgtcctctcggagactctccagctcagtaatctttcgcagttcttgcgcttaaaatgcagagacagagacttgacgttcttgcttgcttggtctcctgacggggaaagacgatagttggatgctgaaaatgtaggagtggaaaatcttggatctttggaatttttaagattgtggattgttagtttgttgctggactaaaagaattattcttggacggtttagagttgcgaagtttaaattttgatcagtgggtatttgattctcaatatccgtagttcagactaaacaacattaaattttggtagtgtagttatcctgcattaacgatcacaatttgggggacaatattgcttttggaggcgcattggcggattattgtgtcgtcacaatgcaaaattcatgggccacagctgatgtggaccacgcttgttgccatagtgcgtggtgggcgtgtattttgatcaaaaagatgatgaagttgccttcatttgtttctgaaacctctgctgcaatgtttactgcactttaagtgctttgtcattgatgtttaattataatgtgctcgactctgtttttctatcgttgatcttcaatgggcaggatatcctgcagttttaaaagtaacaggttttttttgttgggatgtgtcaagaaagataaataaacagtgccaataggaacttaagttttgagaataacatcccggcatcgatgttgctttgctcaactctgcttgaaattgaccatcaagatctctaggctttactctagttttttaaagtaacatgatgttgctgtgatgcatcgaggaagatggaaaaaaaggatgattggatcttaagttttgagcatagtattcttcaccatctccacaacatagtaaactaaattctctctacggtgtgctcatcatttctttatgcagaggacacgctctggactggagttcccggcaactat

SEQ ID NO: 91116 - DNA, 798 bp, Eucalyptus grandis
  Intron number 1 from transcript Egrandis_v1_0.031366m (loc us Egrandis_v1_0.031366m.g) derived from phytozome v7.0 (c hr-ID scaffold_9; pos 5551659 to 5552456 reverse strand)
tcgggttgctgtgcctggtgttgacaaggaatcaggtatttaccattttttttttcttttggactctctgttctttgtgtatgcttatcaggtaagtatagcatagtgttccttaggaaagaatgcacatttggtcaccactgtgagatggagagcatgattattttcaggtgattacacgagattgttgttatgtagtgagatattgtcattaattttatatttacattatctgaacaggcatgcataaatttgtgatgttttgtttatatgcattgatttatccacatcaaattcactagagcagattatgctatgcactgttttcagagagatgagctcaggttctgtttctgcaagaagcagatgaggtcaagttgatgttgagttcattgattatattagcaaggaagtcaaaaaaaaattatttgagtttcttgaacgaagattttctgagctatttaagtccaagcatcttgctttatcaacttaactaaataagcttgaggttgcctctattgtcttctaggtgggcagaaaagagtgacataatgttgcatgtggattgcttggtaacttataacattttgttgcttgtgagatcttgtcaagttctttgcttattttttgtattgccttctcctctcatccacccatgcagcaaaacctgcatggtgttgctatggtgacataattaaagcatgcttaatttatttttgttcagcttcaagaagtgattatcttctagcttgtcatattaaagaaatctttgtgcttttgttgagaagctaagctgaa

SEQ ID NO: 91117 - DNA, 658 bp, Eucalyptus grandis
  Intron number 1 from transcript Egrandis_v1_0.005039m (loc us Egrandis_v1_0.005039m.g) derived from phytozome v7.0 (c hr-ID scaffold_11; pos 24917142 to 24917799 reverse strand )
ccatactggtccttcggtatctggttttgatgagtttctttcaattgttgctgcttacattttgatgaatttgattccactattgctcattggcttccagcttattttgcaatctctgtgagattttgagcttgaccgtgtggtggtagtatttaacataatatttgaattcggtatgccggtttttatgtattgctttcaatcgttaatgctgacattttgatgaatttgattccaatgttgtgcttcggcctctctagcttattctgcagtaaatatgagattttcagcataactaatataaagacgacagaattgaagattctgagttcattccccttgaattgcattatgagtttattctctcacggagatgacactaatcagactttgcatgtcatgctcaatagggaacaaatcttaaaggcgtgttattatccattgaaaaccactgtttaccgacccccagctgaacctaccacagtgctcaatgatgttcaagaaatgtggtcgctttacttgtatatattgctaggcgtagatcagttgtaaagtttgattcacggtagttggcttcttctgcatgtgttgcttgactagtttgaaatgttagttctattgataaagtatcattgatttactttcaaggatttcatca

SEQ ID NO: 91118 - DNA, 461 bp, Eucalyptus grandis
  Intron number 1 from transcript Egrandis_v1_0.032524m (loc us Egrandis_v1_0.032524m.g) derived from phytozome v7.0 (c hr-ID scaffold_6; pos 36448260 to 36448720 reverse strand)
aacgtttttttttttttcattactattttttcttctattttttcgttttttttttttcaatttcgttactataaacaaaaaaaaaaaaggaaaaaatagtaacgaatgactaaatcggacattatcaatagttcagaaaccaaattgagccgatcgaaaatttagagatcaaatcggacatttatcaatagttcagggatcaaattaagccaattgaaagttcatggacgaaattgcacattaaataatagtatagggaccatttgtaacattttttcaaaatatttcaataaaatagaaggaatcaaataaaattgagctgattgtgaaattacgttccgagttgcagtcttcgtttaatgcaacaaaatatgaaaacttgaaagttatcatggaaagcggctgtctgaaatcattttcgtgcagggtggagcgatttcgaaagcgataatttttcgaga

SEQ ID NO: 91119 - DNA, 1033 bp, Eucalyptus grandis
  Intron number 1 from transcript Egrandis_v1_0.020590m (loc us Egrandis_v1_0.014210m.g) derived from phytozome v7.0 (c hr-ID scaffold_6; pos 44919913 to 44920945)
gtctccggtgccgccgcatcgaggtacgttccgttctctttgattagaaaggggggggggggggggggggggagtgggagctgtgctgtagaaggagaagcgtcgctgtcgcaggttgcggctttttagtttgaagaatttccctaggatttgaaagttcacgactttgcgtatacttcgtgtagggatgacctggaatttttctgtagctgggtctatatgcttctgttgcttcaatagtttcgttttgttcttgaagcaattcagttgaaacagtgaaaagattaggacttttctattttaatcttttccctcgagaagagggaacttctgcagattttgacttgcgtggactgcttatactgaattaggatcttgccctgtctgctttttctttttggaatatggtacgcttgatctagaacgcctatattgagactgagagcgttgcttgtgatttgatacgagtgatgttgatagtttacttgctatttaaaattctttccatcttgatttactcaagataatacctttttcagtttgccagtatagatagttaggtttggtgtaatggcatcttgatggtggagtggattgagattaggacagggggcactttatcgactgtctttcaccatcacagagatcagatgaaattcatttctgtttgctgagttttcccttgatgatgcgatgaggatgacatatgattgagcagtggcctcaattgtttctttgcaaccatctttcgttctccgttatcctaccacctctcccttaatcttttgagtcatagaggccattggctttccttttttttatccttccttttttattggttgttgccggtaggagcaagtgggtgggagggaggagaacgtttttattttttcctttttccccccttttttgtgcaaattgttgaaatggtttgaaaaattacagtgctgcgggaaatgagttggccttgaatcctgatgggtctgctgtgaaccctgcagctctccagcaacaacttcgacaggattctaac

SEQ ID NO: 91120 - DNA, 542 bp, Eucalyptus grandis
  Intron number 4 from transcript Egrandis_v1_0.027481m (loc us Egrandis_v1_0.027481m.g) derived from phytozome v7.0 (c hr-ID scaffold_9; pos 32071204 to 32071745 reverse strand)
actcttgggatacagcttgaaactctctatatcaggtacttctgtttcatgtgtactaatatgcagtttgattgtgggttacatgaattattcgtttcgaggtgatgacttgagctctctaccttctggtgtgattgcatggaaatattttattctagttgcttaatgtttatgctggatcatatcaggattcatgaaaattatacactaatttacgagtgtatgaaatttgatgaagaattatgattctaaatgaaggggtacatatgtttgtcaattgtcagaactgagaccaagtatttactctgcattttctctcctcgaatggaaagtggcagtcaattttctcattcgtcgtctgtgtatgcacactagtgaatcaagcaattgcgaaaaagcattgtcagatctgtaaatgcttcgtcagctcattttgttaaagcaggatataagtaccatttaaatacaatgttgtgccatacttttctaaattcttgttttgaacagtggccgaatcacgcgtcagtttgttcccgtcagca

SEQ ID NO: 91121 - DNA, 845 bp, Eucalyptus grandis
  Intron number 1 from transcript Egrandis_v1_0.027481m (loc us Egrandis_v1_0.027481m.g) derived from phytozome v7.0 (c hr-ID scaffold_9; pos 32072694 to 32073538 reverse strand)
gccttcaactcatcgtctcgccgcatctctgatctgtgagtacacccagtcgattggttttcgtggttcttggttgtactcggtttccgtagcttgcggacgcgcacgtctcgtgttcgatgaaatgccccaaccagttaagagtgtgatcctctagtaaaatttcgtctcattggggacttaagtggagtgatgaccttgtgctgaacgcgcaagaactgctccctctaggatgactaccaggggcgtctcgagcattttttttagcagattatttttgtagttgattgggcgataaggactaaatggcagctaaaagatgttctgagttgagtggcatgtggaaatgcattcggcaatctaagttctaacactgatcggtggggaaattggttaaggagaggttttcggagattatgccggttttttgtttaggttctgaggaacacctaatgtctgtgggaaatcaggtggaaaaaacctggggtcggggggattgtgctagatttttagtacccaatgtcaaacttttgtagtggaagctcgtgggatgaaaattatgtgcctgtgagaatcaccacctcttattctagagaatttggacatttcaagtttcaactcatttttatatgctgacgtatccatctaggggattgctttggtcctcattttcttcatctttgatttcatgttatttacttgggagtagatatattgctctactttgatagaagaccttacaactcggtgctcttcgttatttgatatagcagaactattaaaagcttttatcatcaaattgtagatgtctaagattacagtgtttttcactccatgcaggtaga

SEQ ID NO: 91122 - DNA, 916 bp, Eucalyptus grandis
  Intron number 1 from transcript Egrandis_v1_0.050844m (loc us Egrandis_v1_0.050844m.g) derived from phytozome v7.0 (c hr-ID scaffold_6; pos 2456398 to 2457313 reverse strand)
ccgatcttaacagcccttctcttctcataatccaggtaaaattaattagagcttgttcatcgtctttctattgtgacaatcaacggtcatgtttccatgttggttcttttaatcttaacatttttgatgtgattagattctcttatacggaatgttgcatatatctttggttactcaagtatgctatagcgtccttttgctgataatcaaccaaaagcaaggtgttactcatgtcacaaaaacatgtttcatatcttaggatatggagaaatcaattgcttaatcacgatcgaggcttcacttttaaatttagtggttatgattttttggaggcatcgtatgtgtaaaaataattcgggtccaatatatgaatgtcgcaaattagcctaggtaaggctaatcatattaagttgtatgatcatctagaattctagtttgaaatttgaattatcttaaccaccggtcatattacctgtggaagaccttttatatttaatagtaataaacagcagccactatccaaattcccaagaagctgccaaagtctaaaagggtcaatctcaggaccttggaactaagcctatgggattcacacgatcctgacaaaagctttgaattgcacttcattaacttcccattgtctcaatgaagtaggagcgatggacagaattctcaaataggagagtactacgattcaagcccttaacatatgctatcggtctcgaaattatgttaagacaattgattgctccaccatcctcctaatgattgaacttgattgatctatcgacatggcagcccttcacgagcaacacagaataacgtttttactagcttcgtcccccttgagataagtatgtgttttggtgttttgatctcaggtggcccttgcatcaggagaagggaaattcgtgga

SEQ ID NO: 91123 - DNA, 634 bp, Eucalyptus grandis
  Intron number 1 from transcript Egrandis_v1_0.017107m (loc us Egrandis_v1_0.017107m.g) derived from phytozome v7.0 (c hr-ID scaffold_4; pos 30890180 to 30890813)
tgtcaggtaccaagatcgaatttctatgtaaaaaaaaaagcttaaaaacagtgtttttactgaataatatcatcttttggtcattgaacatataggggcaaacccaattaatggatctcatcgtataaatttacatagattcaattaatgtcataaaagaattcgagtgcccactagacagaattgatcatatcaattacattcatgtcgtccaaacatgaaattttttttttttttgaaataatttttcttcaaacagattgatctttttttttttgttggtaaaggatcaaacagattgatctttagtacaagcactaatgataaaaatctgactggtagtcattagtttcctgaaagttgatgatcacatatctctatagagcttccaaaaatttgatattgaattgatcttatggctattcatgcctcgagcttccacttaagaatagccgtaatatgttgttatcaatttagcaatggcttgaggccgagctcctttgatccctggcgtgatatgtatatcgattccagtttttgctcttattatagttttgttttctcttcaagcgtggtataaatgatgcatgaaatactttcctttgtcaggtggaatcccaacagggcgtccgaa

SEQ ID NO: 91124 - DNA, 857 bp, Eucalyptus grandis
  Intron number 1 from transcript Egrandis_v1_0.054815m (loc us Egrandis_v1_0.054815m.g) derived from phytozome v7.0 (c hr-ID scaffold_6; pos 49432609 to 49433465)
aagagaactgcaagcaagatcctgggtcatactgggtaagtttttattatctatatttcttttttattatatattcttgcgctgggtaagttgcttaaagtgaaccagtattttaaaaagtttcttgcgaaccttgctggtgttgaatttttcttctttttttttctgacatggtccatcacagctgtacaaaggtgctggcgaagatgtaattcaactttttgatcttgctgttatccctaagaatcactcttctgacaatagcgatgatagctcaagctctttgccttcaccaatgcatagaggaagaagcgactctttgttctcactgggcactctgctttaccgcattgctcatagactttccttatcagtggtcagaactttgttgctccttagaaacttttctgttttgccctattagctacaatatattgatgaaaatgtatgattttgctgcagactccaaaagataaggcaaaatgtgcaagcttcattaggaagtgcttggaattactggatgagccagatcagcttgtatgagtcattaatttgtttttaattccattattggagtacaatttgtattcacttttttgtgtttttttattatattaggtcgtacgcgctcttgctcatgaacaatatgccagacttattttgaacaatgatgatgaggatgttgatttggcatctgaatctgtcccagaagaatgtgaagttacagttatggacgttgaagaagaatctcggaattttttaagaagcatttctgactcttttgtccaggacgataagccctcttttgttttagaagaaaagcctagtgaagtaccaaaggaacttcaaaatttagc

SEQ ID NO: 91125 - DNA, 754 bp, Eucalyptus grandis
  Intron number 2 from transcript Egrandis_v1_0.042688m (loc us Egrandis_v1_0.042688m.g) derived from phytozome v7.0 (c hr-ID scaffold_4; pos 4033584 to 4034337 reverse strand)
tgcggcggtcgtggggcggtagttggcggtcagcggttcgtaattaagaagaaaaaacaaataaatgcaaaaattataaatttttaccaaacgtatttctattacaagaaaagaaattttgtataatcaccaaaccatattttattcggaaatagtttttttccacttctacttcgggaacaattactgagtaaaacaaggtttggtaattataaaaaatttatattcttggaatagaaaaataatagaaatgcttggtaagaatttataaattttgcatttatttgttttctctccttatttacgaaccgccgcacaatcgttgcacgaccgccgtgcgactgtggaactctggtcaatgttttcttcaacgctggatgtgcacaaagatgtgcacaagcctctaatgaagaaggaattccaagatgaacttaaaattgtgatactaaaaaacttcaaaaatgtggtgaagctccatagcttatgtttggagactagaatacccttgtaggtttatgaatatatttggaacagtactactctcttcaaacacattcatccataattatcatgggaaaattggctcaatatagctgctgaagctgctgttgcactcaaggaaatgcattctagcaaaatcattcatggcaacatcaagtcaacgaatatacttttggatcaaaattactcggtgaaaatatctgattttggaacttcagtattcagtacttatatcaccggagcatagtcatct

SEQ ID NO: 91126 - DNA, 747 bp, Eucalyptus grandis
  Intron number 1 from transcript Egrandis_v1_0.043060m (loc us Egrandis_v1_0.043060m.g) derived from phytozome v7.0 (c hr-ID scaffold_235; pos 21931 to 22677 reverse strand)
gataccgtctttgaaatttcttgccatttctgcaggtgctttgtgctttcacgcattcacgttattcccatgaatctcattttgagtagaggatgattgggcaggaggccaatgtgcttggcacaatggagttcagacttcacctcgtcttagtagtcttcttatattgttaaatctctgaaaggctgtgctcaaatcaaatgaattgtctggaacttattcaacgttactaagaaggttcattagtttcttcacttctgcttttggagctggattatcaacagccttagcttgaagaagtagaaaccagaattggagccaaaagttgcaattcgaaatccagcactaaatgataaaaaaattatgctactcatcatgtttctgcaagatacagcaaggatcagcttttacttatcttaattgacaagtaatgctattgcaaataatttgtagcatcagctattttccatttgatagcgattgataaccaatttgtggcttcactaatccatcgcagatgcttctgaaaaaattcatgggtgttggttgtcactatttccttttctcttttggcatgatgtacacttttttttccatggttatagtgaatgtaccgtgaagttgctcttgtaaatgatgtaatgtgacgatgaagccattattctatgatcgagtgaagaaatagctgctaacaaaagctgcaaaaatgcaggcaaaaggaattgtgcagtgaagattgcaaaggat

SEQ ID NO: 91127 - DNA, 669 bp, Eucalyptus grandis
  Intron number 1 from transcript Egrandis_v1_0.008644m (loc us Egrandis_v1_0.008644m.g) derived from phytozome v7.0 (c hr-ID scaffold_6; pos 34327011 to 34327679 reverse strand)
cattacactcaggttctttgtccgtactctttcaggcaatattcgcttccaatgttcagcatattctgatatttgcagccttattttgaaggacagaaaattatgttaactttttgtatgcatcgattcatgcggctgtggctggtcttctgaaaattcgagcttctgtttttctcctccagcaattagcgttattaatcattaaatatataagcttcttgctcctacggtatttccatgtcaaatgtggtgcatggtgtcctgtgttaatatacaaatatgttggtgtattatgtatgccagtgcatgcgttctttgtggtcatgttctttcgagcggttatttgagtccaaatagttggtactctttcagtcataactggactctggataaagttttgctaagtttttccttaaatgattcccttaaatgatttcttcagaatcataaccatcttccagctcaaattctggatatttgcttgctaaccgaaaccaaaagactgctaatgtctggcaggttgatgtgcttgttaaattgtccccttcgcatgcgtgcttgtgctggtatgtattagctagggagccttgcaaagctagacttgttctgagcttgacccaacctatctctgcaggagatcttattcatttctggggagcaaaagataag

SEQ ID NO: 91128 - DNA, 643 bp, Eucalyptus grandis
  Intron number 1 from transcript Egrandis_v1_0.008934m (loc us Egrandis_v1_0.008934m.g) derived from phytozome v7.0 (c hr-ID scaffold_11; pos 20952770 to 20953412 reverse strand )
tttgcagagtcaacgttgtgcaaaaggtaagttaatatgctgcagagtcgttgttgtataaaaagtaaattgacgtgctgtatatcctatgaaattttgtgggactgcagttaattgttctaaaagtttaaactattagatgaagtgtggacatatttaatttgggaggcaaatgaggcttcgaaagatttgaactaatgaaatccatctctaataccatatgagattttataagatcacagccaactgttttaaaagcttaaactgttagatgattacgtgattttatatttaaattattctgatatatcctatcattatcatcagattctaatattgcatcttactctgtgtaatttctcatcaaattcatctccttgtcaactctcctcttggctattgtgtcgatctttgatggttgatgcataattaccctaataatttcaaaagctacctgcatgaaataatgggttgctcataacttgggagtttctatgtaattttccaatgagtgaatgctatcttattttgtgtgtttagaaagtccactccatattaacaaatagaagaaactgaattttctgtggctacttctttactccatccagctcggtataacctcttcataaattgcggtgggagc

SEQ ID NO: 91129 - DNA, 990 bp, Eucalyptus grandis
  Intron number 3 from transcript Egrandis_v1_0.013018m (loc us Egrandis_v1_0.013018m.g) derived from phytozome v7.0 (c hr-ID scaffold_9; pos 29118533 to 29119522)
ctaaagcttcggcatcagattctgaagcctctcaggtttgttgtctatattgctgctgccaacaattatttaattggtggtacttttagcttgaatgccattttagtatgaaattttattatcccacgtgcataatccacgtaagttcgtgttgttgacagttgaaactacctagttatcgggtgactgactaattatttgggaggtattgtctgcacgtgtaagtaatattggaaatttaaagccttctacaaattgaaatgcaggactcttcatgtttgtcttcactctgttagatttaaaatatttcgtttatatgagtggaagagtaagcaactcctattgtgttcttttagcatgaaaccgttttaaattaaggttgaatttttcgggatcatgatgcttgggccattttgttttgtgctgcttcaatattttttgacaatgcagagaagttgtcaaacactcgaatgtccttaacttcttatacttttaatgacctatggtagatgatatatacaaattgacacagactattggggttttatctttttagtttgcataccagagaacatgtacaaaacgttttatgggtcaaatttctttaactttgaatggcaagattatctgctgcaggcagatgtttggatatcataaggatgttgttgtatatgaaaggaccttgtattttgacatctcaattggttcgatagataagctatactgtatgattcatggcatgcatgttacgcttaccataaatttaaatttgaagatacgttaactcaatgtcaatattctctttagactatgtttttcttttgaaaagtttcatggccctgatttcaggcattttgatttatgcaattgcaaatggtggggtcttggtttatagcttgattatttcttaaatttgtgaataggtcagtttagaatgcttttttgggtgatgcagggtcctagagtcatagtcgtgggacctacagattc

SEQ ID NO: 91130 - DNA, 900 bp, Eucalyptus grandis
  Intron number 2 from transcript Egrandis_v1_0.021670m (loc us Egrandis_v1_0.019327m.g) derived from phytozome v7.0 (c hr-ID scaffold_4; pos 2622049 to 2622948)
gggaaattcaggccgtgctccagaaggaggtatataatctgtctgtttcgggggttgctggcagtcgtgttttctgttgtttcggcgatgctgtggcatgacaatgatcgagcttgtgcatgcgatgcgatgcgggctcttttcatggtttcattaactcgatgaattttggtttgtgatttctctgtctttgtctctgtctctgtctctgtctctctctggtttgcgcaattctgtaagactttaggatcctgcaattagtcctgatttctaatttgctcatttagtttctctataaatgagtcataactgaattttgaaagacattcgtattagagcctgccctgtttgttatctttgttggtcatctgacctgttctctttattcttaaattcaatgtaaggcttctgacctgagcaaagaacatgcggatgtattattcaattgggcccctttgtttgtgcttctgtatagatcctcccaaagttgtcacgtggtggttttaacagaattgtgccaaagatgtattgatgataattggatgaaatggtttctttgaccttaatcttctccctgtccaacttgaactcataattctaaatttttgtttaggattttcctttaagggattgcttatatactatataagactgctcaatgttagacaagcagtattccaccgtctttttttagcatttgccagatgtcttttatagttttcgtaatgcatagttcccaactcatagttttggtctttaggcctgcatgtgtttaaatgcggtgggcgtctatgcattatgcggttctcatcatctttttatatctgagaagaataataatagagtggcacatttgggtctaataatacaggagaactttgatatgtgcagtcagtaacg

SEQ ID NO: 91131 - DNA, 1036 bp, Eucalyptus grandis
  Intron number 1 from transcript Egrandis_v1_0.010755m (loc us Egrandis_v1_0.010755m.g) derived from phytozome v7.0 (c hr-ID scaffold_6; pos 11792773 to 11793808)
gcagcgagttcgggggaggcacgcttcacatcaaggtctgtcctatagcttcattgcgtcgctttggcttggtctctgtttggtctcgagtgccattctggaattttttttttttttttgtgggtgttttgagcttgtggtcactgatgccgagaggttttctgttggactattatgtcgggttttgtactgtggaatggaatggaatcgggaaatgatggggaaagcaatggactggaatgatgattctaaatcttggtttttgttcagtgattgtggaggacggaatggaaatccttgtgtttgagtgcgattctggatgattttgggaggtttgagcttgtggcgctttggtaatgtggagagatggtcactgtttacgatcttttgagattttctggtctactgtcgttgcttaattcaattcgctgctgttcgattttgtgataattagggcagacgtgaggttgtagcatttttgttgatggggtctaatggccatcgtttgccagcttttggcagtttctgattaattctcggtaacttaggtacttagtttgagcttgagtttgattttttctaatggattcaaagtaccgaactggattaagtttctatctacttatggtccatttcttatcaactgaagtgccttgcttcaatatgtttctattggatttcgccacttgctgcggtttcttttcttctcctttcatctgcttgtttgtacttgattaagccccacgaattggtggtaccatggttggtcatttgagttttttgtgtctaggttttaagtgttggaagaaggacttagtgatttggttgctcatacggttaggttgtttcgtttgatgtaaaatcaatttatcttatggaggcaattccagtctaggtgggtactgcctcatgttgatagttcttgtttttgcatatggttctgctaaaaatggaaactaacgactagctctaagtatccggcttgtaagcatgagtttggattgctcatccaggtcagcaaagcccatagctggat

SEQ ID NO: 91132 - DNA, 978 bp, Eucalyptus grandis
  Intron number 1 from transcript Egrandis_v1_0.042124m (loc us Egrandis_v1_0.042124m.g) derived from phytozome v7.0 (c hr-ID scaffold_4; pos 24172386 to 24173363 reverse strand)
gcttctctgtccacattacagaatctcaggtaatggaaggtcctttcattattatcatcttacagttgaggcctcacttgtagcgggcgagatcatgaggaccctcacttgcggttgcccaaagccgacaaggcctcgacgacctcacctagggctatagtggtcgaaggtgaggcggttggcaagggtttcatggccgaggagggttgtcagtgaccctcgtcggccctacagaaaaaagcaataaaataaaatcaacgtaggatgtttcgctggaaatgatacttaagtaaataattttgcttcaatgtggcatttaagtgagcaaaaaaagatttagtacttaattgagcactatacgaaagttttgacattcttattaatagaggatgcgcgttcctccccagacgcatgccaccaaccaaaccgaaaaaacaactttcgttcaacttaagttttctaagttttgatgttttactaaaaacagaaaaatattataaataataagattcaactccggcggggctacaccattgcatggcggaacccacttctttttctctttttctaaatacttacctgaaattcagctaatctataaaacttcggtcgatcatgtgttgcgttttatcatactgggatcgaagaacgcattgataaaaaccattgataagcactgatgagcgcaggttaatcaaacaccgttgataagcatcgataaacatgctaaaccgatgaactcgttatattttttgccactgtaagtgacagaatcgggttgtcgcgtcacgtagacctggtcgaacaaatgatctgtgcattagttccgattcagtgatcatttctctcctcatgtcgctacttttcggagaataaagaaaaagaaacgagaaaagaatgaaacggtactgattttcagacactgttcatgatcaatcaccaggccaagaggctgaaagaaactccaggagtaaggct

SEQ ID NO: 91133 - DNA, 1008 bp, Eucalyptus grandis
  Intron number 4 from transcript Egrandis_v1_0.007683m (loc us Egrandis_v1_0.007683m.g) derived from phytozome v7.0 (c hr-ID scaffold_9; pos 11091114 to 11092121 reverse strand)
aggcagtggttgcagaggtagtgtctcattctgggaaagagtcaaattttcaaaaccaaaaatctttcttgttgacattctttatatttaagaattattctgttttcagtattaccattttgattttcgaatgtctggtttttttgtcttataatgatcaactatggtaatagttatgtagaactttctctcaagtatgtcttcaactacgattcaaggaaacacctgtgcttggactcaaattatattgtttctactaaattacttgaccataacctctccatgtgtataagggcctttacactgcccaaacttgtgatagtagctacttatacttagaaacttgaaatctgactttatgcttgagcaaagggtgtgagcagtcaggaagccatagtagatgccctcattgcaagtttaactaaggatgaatataaattgtacagtagcataagaaactaattttcaggtgccgttgttattgcctaacatggcccaactttgaagtttaactactcagcatgcttccttttatagagcgtgagttttcctaacatatgagggttccttgcatgtcctagcttccagttttttatggggagctgtaatgtggtagagatgcccttgaagttgggaggtgctctacctatttataatgcaggatccagcttgactatttttatagatgatccatcatcttcccatttcacctaaccctaagaggaacggttgcttccctgcatatagacaaaggaatgtttctacctctcaggcctcattattctatccctgattgtgctatcccgcaacatgtgcctttttgctttccctatttcttgtgctctgcttatatgggttgtgtcttttgatcgatgagcacttaaccaattaattgtctttcgtgttgctggtatttgtgtaagcacttttcctttcaaaaggtgcgatcttattttcgtatcctttgttgaagatcctaagaaggtgtggagactcagttgaacttgt

SEQ ID NO: 91134 - DNA, 500 bp, Eucalyptus grandis
  Intron number 3 from transcript Egrandis_v1_0.007683m (loc us Egrandis_v1_0.007683m.g) derived from phytozome v7.0 (c hr-ID scaffold_9; pos 11092162 to 11092661 reverse strand)
cgaggtaatgcagtaggaaacttgatatttaatgccattctttccttctgtcaatcttcttatttaatggtattttataatgttgtttcaatgtgcttagcgatcctaagatttttttttttctccctctttgtggtttctattagattctttcactgttgctcatctccagagaattttctgtttgtcatgtaggcgtctgtaaaatttttcatctggaagtcgaaattccctctgaattatttagtggaaggtctatatgcaagattatcttttgtaaatcgtgttggatctgctttatttctagagtaaaatataatatatatctttgatataccgggttattctggtttttatggtcttgtttctttactgacatgttccttcttggacaagttcctagaattttattattattttttcctcgtaaatgccaaatcctgtcaagtttacttatattggttgtgccaggaatatcgttacttaaagtcggtggccgt

SEQ ID NO: 91135 - DNA, 655 bp, Eucalyptus grandis
  Intron number 1 from transcript Egrandis_v1_0.009614m (loc us Egrandis_v1_0.009614m.g) derived from phytozome v7.0 (c hr-ID scaffold_9; pos 37529775 to 37530429)
cctcttgctgcatcgcgccgccaagctccagaaaggtccgtccttttcttcctccatcttcttgggacgtctccttacatgtctccgttcctcgtttcttcattctttgatctcttcccgaacggaatccgcgttcaatgcttttgctcttgttgggtcggtcgctgtcgaattcagcaacttcatgcgtcgttgtcttccgttgcgtttaggagcatcgaagagattgtctcccatgtcccctgaatagttgaggattgtgggagaatgaatcttgtttttttgttgtgattgggaatctaatgatcaattgaatgaaaaaatttatgaattttggactgcggagaacggttttcgatcaatcctgattgaattttcaccaagttattggcgataattagacccagaagtgaaaacttgattcggtttcggaaatccgagctcgacggtcttgttctcatgggaacaagcaaaagcacggcttttgttagttgtatggagctgaaagttttgatgagtacatcgtatggttttgtttactttccttccggccagctggtatgcctatgtattgtcttgctttgatttcttctccggattttctggcgttctaatgtctttatctgtgaactttcggcgtattgcagatttcagc

SEQ ID NO: 91136 - DNA, 813 bp, Eucalyptus grandis
  Intron number 2 from transcript Egrandis_v1_0.013873m (loc us Egrandis_v1_0.013873m.g) derived from phytozome v7.0 (c hr-ID scaffold_9; pos 38741706 to 38742518 reverse strand)
gctctggttagttcgaatccgaatgcgttatctttttctcacattatacgtgaatccgggggtggatgtttaatcagcgttattcttaccattgctttttgtctgatttttgcttcttcctttttttttttgtcgtcttctttctgggaatgagaaggatttgaacttttggttagtgggcgtgccttggaatggccctgatctgttcagaacgtccccttcggatgtcccatggtttttgtattccggctcaacccgcgtatctctgtctccgtagatttgttgcctgaccaataatcctatgcatgtacagtacaaccatcgtgactggtctcctatctgagtaatccattagattaataatatgatactgctactatgacgcgttcatcaccagggacagatggtagggattttttcttgtcaggataaaaattagatcagtaattattagattaattaacatggtgttgttactattgaaaaaatatgcttcaaattaaagttgccttgtttcgtgtgcctatagtactatttttcatggttttagagctgttttctaagttttatcagtttgcggggacaaactgaaatggaaattttcactattgagttatctgcatatcttcttggaaatttgatgggggcaaaatttattcctcaaagccaacgtaatatgaaagttatcatccatttttgagttttggacaagggcaagagccccgtttaccttcaatataggtttgtccctcttcataactcacgccgctacttgatccccattgcaggttgtgcacgccacaagtaacaaaa

SEQ ID NO: 91137 - DNA, 598 bp, Eucalyptus grandis
  Intron number 2 from transcript Egrandis_v1_0.020700m (loc us Egrandis_v1_0.020700m.g) derived from phytozome v7.0 (c hr-ID scaffold_608; pos 17048 to 17645 reverse strand)
cgtgcaaagactggggcttctttcacgtacgaaacaacttctgcgtttggaacattaacgctttgagaaagtatcagagaaaaatgggttcattgattgaaagagattaaaatccacttaattctcaacttctgcaagggccactaaggagacttagatgtacaattcttagccacaattatgtgtggccgatgagatttcatcggaaatttccttgttttgcttcctggactcgctttttacctcctaccaaatctaggttttcgcttttcttttacacttagatgtactattctgtgccaccttgccctgtttcaccagaacactaaattggtcgttcaagatttccaacggaaaaagaaaggtgggaacttagatgaatttggagatttgagttcctcgattttctcttttatagagaatgctaataagacaaatttatcttttgcgactttcttgatatatgttggaataaaggtctcttgattactcagcaatcaggagacagagctttctctgtcttgatctcaaaggaatgcctgtttctgggagaatcaagagtgatagcggtgtgttaataattttcagctgataaatc

SEQ ID NO: 91138 - DNA, 548 bp, Eucalyptus grandis
  Intron number 1 from transcript Egrandis_v1_0.025039m (loc us Egrandis_v1_0.025039m.g) derived from phytozome v7.0 (c hr-ID scaffold_4; pos 37325638 to 37326185)
tacttgcaggtgcagttcgtttcggttcggatctgctcttagttcttccagttttaatcaattgaaagaactctgacaatcttcgttcgagcaaattgatcttttttgagttcatgttcatctagctgtggtaacagagcaggcatcttagatttattggtggggcatgtgtgagatatcagagtacatgtgatcttgcaatcatggaagatctgtgtaaactggctgtcgatgttgcatgattaagctgcatatgttcgttcttcttcaatttgcctctaatcatacgacagctagagagttttttgtaaacgattacagatttaatatcgtgggatcgaggcaatttctgttggaataggacatgagactgatggtggaatcatagtcacaacatttattcaaagaaagagtttctgattgctcaactgaatttttctcctcttagcatttcaatgttacctacacaatcatgtatagcttgagaaagttcacaacaaagagcaatttcatgcagaggctacggagctggcagcacttggaacgac

SEQ ID NO: 91139 - DNA, 534 bp, Eucalyptus grandis
  Intron number 2 from transcript Egrandis_v1_0.031959m (loc us Egrandis_v1_0.031959m.g) derived from phytozome v7.0 (c hr-ID scaffold_4; pos 19096582 to 19097115)
gtcaatttgcgtcccgtcattcccggtccctctctctctctctctctctctctctctctctctctctctctctctgcacgcaattttgactggacaatattgaaaatgcctgaaaaacgcgaatgtgtttgacataattggcgagtgtagtagattttagttggtaggaaaggaaattgtcctctcagtttcagttggcatgaaaaaaggcgaacctatgcatcggattgtagttaaagtaggaagcacgcgatgcatttagcttgaatcagaaatttttttcaacagaacccccaagccagcagtgcaagctttatatcgaatggactgtaagaaatgttgttgtgtggttaactgaacaagcattatcctccgcagttgcatttacaaagtctagaaaattatttgttgtgcaggtttaatctcttcatttgtagttctctgttctgcttctggatactatgcttcatgtgtttggttttgatttgggtttattaccttgcaggtcatatcctttgcacataattaaattcg

SEQ ID NO: 91140 - DNA, 892 bp, Eucalyptus grandis
  Intron number 3 from transcript Egrandis_v1_0.031959m (loc us Egrandis_v1_0.031959m.g) derived from phytozome v7.0 (c hr-ID scaffold_4; pos 19097143 to 19098034)
gggtaagtgtttaggacagcacgatggcgctgatgaccttctttgtgcataaattgtgagagaatgccaaaacatttgttgctccatcttagatgaaggtattgagtggttagatattttgtgcaaaaccatgaagtcaaatctgccacctggcctatcattgagaaagcatcccacctcaaaagggatttagatctccctgtactatcctttgtgtagttgttggatccattaaacatgaggatgcggtgagagtgatcaactttatatttttcatcattgcttcggccacatttaagttgggctctttaagttgagagagagagagagaaccctgtttagcttgtctaagtcccaacttgatctatattcagtggtgtacccctgtaatttcttacttctcgtatggacagcttccctagtttggacattcagtgcacaagatatagcggtagttaagaatgacaataacattagtttcacgctgttttttgagagcacctttagaccttaaactgcaatgcattagagtggcattagtttgacactgctttctgagagcaccttcagatctcatgtgttcagctgttaagagtcgtgccccattgcacaatgaactttgttataaatttcatggcaaatttctgtccccctattgaggcatgcttttatgtatatctatctctgttggtgaccaaaataaagtattgagccacatggtaattagttatctctaaatcaatcttccttggccatctagaaagactcaaactcgaatttggttttacatgagttattgcatttatgatgcgcaaatgtttcacttgacgtcatgtacatgtgctcatctgcccaaggcgtgaagtaaagcgctttgttgatcttagtgctg

SEQ ID NO: 91141 - DNA, 427 bp, Eucalyptus grandis
  Intron number 2 from transcript Egrandis_v1_0.020910m (loc us Egrandis_v1_0.020910m.g) derived from phytozome v7.0 (c hr-ID scaffold_4; pos 39048634 to 39049060)
ggcaaagatagagtcgacgctctcggtaggctattgtaagatttcgatcctctgttgccgtttcattgatcttgtctgttcccttagacttctttgttcttgtgttgattagaatttgagttgaatgggtgtcagtgattgccttgtatgatagctggggatgcattttaaatttctcatgattattattcgccttcctctccgtttcattgcaaacctggaggatgatggcgttagtgtaatttgtggtttgctgaagagacctgatctttctgcttcctatgctagtggaatgtgatgttgcttacccactcctcctttttctgtgttctctgtcattccaagcattggtcttttcttgctctgttctcgagcgaaacatatcagaattttttttgtttgtttcaggactcgcattttgcgccac

SEQ ID NO: 91142 - DNA, 969 bp, Eucalyptus grandis
  Intron number 3 from transcript Egrandis_v1_0.020910m (loc us Egrandis_v1_0.020910m.g) derived from phytozome v7.0 (c hr-ID scaffold_4; pos 39049179 to 39050147)
aaataaaggaggtgtgtccacagtcatttgtattgtttctctgcattgattttgtaggtccagtctttacaaaagttgtctttgaatgcagcgactagagtttacaatacttatttgctatattgtgccttgtccttctatgatgtttgaacgcagagaatgttttgacaatgactttaagaacctccttctcataattaagaggaataattattctgctctttaatttcttcacacaaaaagttaagttataatctaacaagtattgtagtcctcctgtagtgcttgaaccaaactccgtaaatgtgtctacaatctagatagtaacattagcgtaaggttgccccttgtttgggcgggcattgccaatcaggtcaactattgccatatttctctgatgattgcgtggaccgactcacctaattgttcaatgaaagcagcttctagtgctgccattgcattgaatttgacttaatgcaaaattgctgtattagatctagatggatatattctgaaaagattaccagcaagacaaaaggtatatgtcctcagactttaataggcatttgtggcatttgcgcaaaggttgctgtccactgaaagaagaaatctgaacattaagtactcctgtagaagagcaagttcaaaaactcgttcctgtattgcattaatgatccttagctgtagcaaatattttgaggttttcacttgtaattaactctattgaacaatcttgagcagttgcatttcatggatcttaattaactgctggaagtttctgttctttatatttagtcatcgaaaagttcagcttggattggattaatgtcctacaagtgaattggtcatgtgatttgtatcttgatttgaagttacaggaaatacttcagcaaaaaatggtgcctaaagtgatgggcctttttctatcttgcaggcagtgagaagggataataagcagcggttcagcct

SEQ ID NO: 91143 - DNA, 762 bp, Eucalyptus grandis
  Intron number 3 from transcript Egrandis_v1_0.022080m (loc us Egrandis_v1_0.022080m.g) derived from phytozome v7.0 (c hr-ID scaffold_9; pos 4852605 to 4853366 reverse strand)
gttcatagggacttgaaaccacaggtatgagattattttcctttgcaaataggcaggtcatgagctttttgcatatgtgcctcgcattaaaggtttacattattgaggcctattttatcatcaaggttgccttgagtctcaacaaatttctactgcgtaatacatcctatctaatagctgtcgagactgcttaactgaagagaattattaggcttgccaatgagatcaactcaatgatgatcccttccatgggaactttcctttggttaactttagttggacttaccttctaaacatttcgacatcccgagtgatcaatggaataattaagcaagtaatcagcatgaagctgaatgccttattgttgattgtgtttactttgattgttgcttatatgcatatagataagcttgttatatgaagactgctgctcagagggagaattcagtgatcgggtgatgcgatgaaatatgtcatgactgattctggttatttttctggttgtgtattctttttccccttttcatatagttggcattctgaccaaaaaaattagttagcatgtgaggcaatgtatctagtactctgcttctaatcaatgatttcatatacaactatgttttttctgtaaatgcaagtttttgagagtttaagttgcagacatgtctttgtttaaacttcaaatgagcttatcgctgctcttcctttttcgacactgtttgagcagaacatcttgttatctggttctgaagaggataaagt

SEQ ID NO: 91144 - DNA, 1007 bp, Eucalyptus grandis
  Intron number 1 from transcript Egrandis_v1_0.015644m (loc us Egrandis_v1_0.015644m.g) derived from phytozome v7.0 (c hr-ID scaffold_4; pos 22706260 to 22707266 reverse strand)
ctggaatctctctctcactaactggtaagtatcgcaagatacttagcccaatgatttttttttttaacgaaagttatctctcttgtgcaatgcttctcttagatgagagtgctggtgctagcaagagggttgccgtctatcctagctttcaataaataaaatagtaaattcaaaattaatttgtatattattacgtttatatttgtgaaagattgaacacaactcttgattagttatatacggggggttatgttttggaaagatttgagttgttattctcattgtattctctttattgttttatttatcgactataaaataagtttcaaccgattggtcttctcttaaaacgcggacagaaaaatagtatccattttagattgtacgttcatttagaaaaatcgttattttgataattgtttctctctcttttttccctaaattataccacttttttcagtttgcaagtgatgacagggcatctggcactatattacaaaagatcagggcatactaaatttcttaaccctcgggggccaaaaatgacgacttcaaaggaaagggatacaatgattttacttttgaaactgtagaaggtgctaatcctcattcaatatttatattctcttacataatccatataatgattggcatcaaagtaaagagtcttgttctttttttctagccttgggagtgcagatgccttgcttaaagtatgagaagcttcttctcaaacaacttcacgaatttctcacaatttcacttatcaattgataaatttaacaaatttctacattgtcctatattgaaggctgttaggttccatgcatattacacaagatcgctagaaaatcttcggaattaccatgacatagtcctttctagtacggacaaaatggggaaaacttgcagggatggagtgcaactttaatatgtatgtcaagatgctataaacggactaaatcatgacattttcctattttatatgcaaagtttgggagaaaatc

SEQ ID NO: 91145 - DNA, 988 bp, Eucalyptus grandis
  Intron number 3 from transcript Egrandis_v1_0.013608m (loc us Egrandis_v1_0.013608m.g) derived from phytozome v7.0 (c hr-ID scaffold_6; pos 36609035 to 36610022 reverse strand)
tttgacttatcacctcttcctctgccttagccaaggtaaacttcaggcttaactgtgcaacactttgtatgcatggatattttgaagtaatttgaccccattctattgtgtaccatttgttaatgtttctagtgacatgaagcctgctgaatctcctatgaatctaagaggattacttgttattattgctacatgttatcagcatggattcctatagttgtctaatttattatgcatttattgcttcctccatatgcgctggtgaaatcattgtgctgaagtttgtgataattgaatggctcactactcttcaattttggcggcttgggatgaggacattgacttaccaaattgaatttcattaagctcagtctattgttagggtttcaagcattttgcgagaactttcagatgttatcatagcagccaagcagcacttcacatttatcgtcaagtcccttgtctgtttactggcgttagtagagcagcagcaaacttctgattgataagaagctagcttgaagctgtgaacatctgctctcagatggttgcttgtaaagctatattattttacttctaaacctccaatccgccaacaaacaaaagatttataccatttgatccaataaatcactatttagaatatggttatccaaaaagttattttatgaatgcttgaattgctagaagattgtggtagtagtaccgggtgatacataactttatattacactttgatggccataaatttctgaaagaaaagtgttataaattcctgctcttatgtacttggctggtgtgaggtttgctttgtgttctccatatatcagtaaataaatttgttggacttgccttatttagatgttgaggtttcttatcaatagtttagatgtcacaatctcttgttatcctcgtcttgcctgatgctccaactctggactaataattgatttatccttctttccacgtccagctttgcttgttgaga

SEQ ID NO: 91146 - DNA, 636 bp, Eucalyptus grandis
  Intron number 1 from transcript Egrandis_v1_0.051263m (loc us Egrandis_v1_0.051263m.g) derived from phytozome v7.0 (c hr-ID scaffold_42; pos 220815 to 221450)
ggctgtgcgcgccggtcggtgatgatgatcagcggtcggcgttcgacagcggcaagcggcaatcgtgcggtggccaacggtagttggcgattcgtgaacaagaacaaaaaacaaataaatacaaaaatgtataaatcgtaccaaacgcatttctatttttatttatttcaagaatataaattttatatcattgccaaacacataattttactcgaaaattgttccttggagtggaaattaaaaaaaaaaaaaactgttccacgtaatagaatcgttgtcatgcgcacccttagcttccatatataaagaatgcaatatttatagatgaagcgtaacccactatcacggcaattatactaaccttttaatcattggtcttctactaataacgcatttgatttagtaacacattttgcaagacttggttaggggatactccaaagggttcgatgtacttggttacactcccgatgaccctatcttcttctcgttgtggagttcaacgcactttaccctgcaggacatgatcttgctcgagaatcaaatcccgctcttcattctcgacctgctgttttgccttcagcgcggccaactcgactagcacggggtcttggccaagctggcgctccaattctt

SEQ ID NO: 91147 - DNA, 682 bp, Eucalyptus grandis
  Intron number 1 from transcript Egrandis_v1_0.030032m (loc us Egrandis_v1_0.030032m.g) derived from phytozome v7.0 (c hr-ID scaffold_595; pos 19208 to 19889)
ctaaaggttagctattctgcatgtttgcagcttgttttttgcttgaccaggtcaaactagaattcatctcccagcctctttcatctccattgaaatgcatatatctgctcttcgtgaccatgtgtacttgaaggaaagtatagaatttaaaaatagacgcccatgccaacaattgcacacattcttctgaaactttgctgcatgacacagctggtgatctgattttgcttagtaaccatgttcatatttacgttcttacttcagcatagattttgtgttgcagttggatatgataatgatatttctcccgccctggaattcttggttataagttttaaagcctgtattaggctgtcaaattggtgtccaatctatctgatcaggctaactttcgttacctgcattgatgtcgttggaaccagtgttggggtaatgttcggaagtttaaccatcacaattcatattagaatgtgattccatggattgttgtctgtcaatgccttgttggattgcaaaacctttgtacctcctgttgaggctgggcttccatgagccataattttgatatagaaactacaattagcacaggaatgatgttagctaaacttgatgcaggaaggattgagaaaatcctgtcttctttattttgcaggtgttgaaatatattgtgcaccaacagctg

SEQ ID NO: 91148 - DNA, 1016 bp, Eucalyptus grandis
  Intron number 3 from transcript Egrandis_v1_0.030881m (loc us Egrandis_v1_0.030881m.g) derived from phytozome v7.0 (c hr-ID scaffold_4; pos 1940284 to 1941299 reverse strand)
aaggtaagtcattcgaaccttttgcattatttttgttgctgtttgagtatggatttgttgcagtccctggatgggatattatgctgattgatttatgccaagttctcaatataacattgtttccaaggacatgaattgatttcctttcttctgttgcttagaaaattccatatccttgtgataaccgtgtgtgtgataattgtgagtctagatgcaatgctagaggcatctgctgcaaaggtttgatttgtttgccatttaaaccagcattcttcttgccgtatatagggacaatttcctacttagaatccacatcaccattcttgacctctttggtcttcttgcctctacttacggtgttaagttcggttgcgatcatggttgtgtttatgacttgatggtcagaccttttattccatgagctctgactaggagaatcttctccgtactgttgtccaattcccatccctgaccgacaaagaaattggtggaagaggatgaagtgcacattaactcatgagtactagatcaaatcctcagtgcatatgcatctgatgcaaaagttgaaccagttaagtgctagtacatgcatgtatttccaactcttaatggaagcatctgccaaaattttcagaaagagcacggtttactggtttgctgattttgtatacactaccaataaaactgatagtacctcgattggataagaaggaaaggcgggcatgctttgttgtttagattgtcttccatgtgctttcttgggccttctcaaaagaattagtagtgttgtttgaatctccccgctacctaagaatacatattactaagttggtttctatttcttcatgtgatttgttaggataatttcgcacgcgttttagatccaatgcgagcataagttgttgatttaattggaattgtcttttgctgttgaggcctagagaaaatcttacttgtatggtggtttgatttgaaatgcagtagagaaaatttctgcggaattgtcggacaagcca

SEQ ID NO: 91149 - DNA, 956 bp, Eucalyptus grandis
  Intron number 1 from transcript Egrandis_v1_0.010143m (loc us Egrandis_v1_0.010143m.g) derived from phytozome v7.0 (c hr-ID scaffold_4; pos 33662396 to 33663351)
aagtggacattttcctcatcaagcactttctcttggtacttttccactcctttgacaatgatttattgggttatcatgatattcatcatcgcagtaatccgtgggatattagtagccgccttcactaattactttggatttgcatttcaatggttcttacttttttgtttttgttttttttgtttttttttccaatcttgatctcacgctttcttacattattcgatataagatgctgaccatatcgacttgtaaattcgcatataatttaaaatatatatatatttgaaattagatgttttttttacttaggaaaagaaagtctaaaaatttgcctttttctttgcccagaacaaccgtacacctcgggccaaaaaaggcgtgcgatccttattaagacaatgcacggatcggccttttgctagttgtcactgggtacatcgacgaaggtgaagattgagttttcctaataattctttgaatgctagaaaacgattgaacgaataatgatttgaataaaggtatgtcataaattgttcgctcacgaggatcccacatatgtcggattttgatgtgaacatcgacggggacggtgaacctaagctgtacctttcgcatttgttttctttcaaaaaattgaatagagctaaaaacttgattgaaaaagttggtttacaggataattttgcaagttgttattggtgtgtatatatgcccatctagttacactagcggtttcgagcttctcatatctctttataaaagaaatttgtgaatgggactttagatatctagcgatggtcttactttatattagcaatgtctagagatataaattgtacggtcaagaattggtgcattaaagttcatgtgtgacaatgacgacatatcgtttatatatctcttgtggtggacactcaggatttatttgttgcgggaacggacactacttcgag

SEQ ID NO: 91150 - DNA, 674 bp, Eucalyptus grandis
  Intron number 1 from transcript Egrandis_v1_0.005978m (loc us Egrandis_v1_0.005978m.g) derived from phytozome v7.0 (c hr-ID scaffold_4; pos 15565269 to 15565942 reverse strand)
agaacctcaccaacaacgtcgatcagttcaatcaggttcggaatcggaaagttcagcgtttgcatgctcacgatcggcatctctcaattgaacaaaacatttgcattgcatatcgcttgtttccatgaaagcagagtgcatcattcttcttgacgcgttgacttcgctgacttcatcgaacctttccgaagttttcgacatagtaaaccatgagaatcctcgtctccacttgacaacatgcccgacgatgcggatcggttcgatcgggttgctgtttgagtgcaattcttgccggtttagctgcactttgtaattcatcatagcccattttgaagtgctagacagtgtccggaagagcccatggttatatcatggggctgattatgattttgttttcttgttccgttttgtattgtctccgcaacttgtcctcagagaatgtgttttttcttcctttcgtcttgaattgttgaactttatgtttcagggtagtctgagctcaaaggagcattttattttaggtatcattcttggatagaacctagcaattcatattgcattaagattgagtaggattttatggtgcaggtcttgacgaagtactaattcttgtcatcttctcctgactgtagcttatggatttggttctttttttctagattttgagagatctg

SEQ ID NO: 91151 - DNA, 764 bp, Eucalyptus grandis
  Intron number 1 from transcript Egrandis_v1_0.023371m (loc us Egrandis_v1_0.023371m.g) derived from phytozome v7.0 (c hr-ID scaffold_9; pos 270259 to 271022 reverse strand)
taccaggttcctctcccctcttttttttcttgattcctctgtccggtccttcttgctctgtttcttggatcttcttggatttggttcggtccctgatgtcgtcgcgttgagcgtttgattctccagaatgtttgaaactggggatcggggctgcccatgttcatcgttgactatttgtttgagctaccacccaacccccacgtttttaatgatttggttcttgatctaccgccacctaccatttcaagaaccgtgcagcggctggccatcaccctttgccacgttcttgctttgctttgctttccattcgtacatgcagttggatgttgtggcgtcaaattgcacgttgcacccttcctggttaaatattgaaaagaaacagaacaatgacagttctgagaatttattgtccaagaaagaacagaccttttcttgttttgttttggttttgcactcgcattgcgcggatagggaaaagatagctatagaggcaactgatcacttcatgggaaaactagcctcgttatgctcgttcacttgaagaattcaattttagaatcccagtgccattgaagagaggattaccctaagcagcatctgctaaaatgtgctgcactgggaccctgattttagatttagcattgacagggtgctgctatatctcactggtgaagtaaagcaaggaagttaattggtctccgatctaactaatattgtacccattgtcagctcaagtatcctgcacctggtgctcctgaactggc

SEQ ID NO: 91152 - DNA, 752 bp, Eucalyptus grandis
  Intron number 2 from transcript Egrandis_v1_0.019709m (loc us Egrandis_v1_0.019709m.g) derived from phytozome v7.0 (c hr-ID scaffold_9; pos 33881845 to 33882596)
gttctcccgggctgttgcttacgtgagttctctgaattcctcgtcttgttcttttttgtccgttgatggggtgataaaagttgttgcttgaggctgtctctacgtggttgacgttaaagattggattttttttttcccttctcgatttcgatttgtttcgcccctgatttagagttgggagctcttcatattcatctgggtttcttgaggattttccgatcgggtaaagagattttagcagcgcaaaagcataggagcaatcctcctgcaaactcaagagttacacttcaataaggcactaattataacgcagggacctggtgaaatttgcttggcaacttcaggactcttaactaatctattccgaattgttctttgattatgaagtaatctcatacagcggcattaacagaagtagttagcagatgaatgtaaacgaccattcccggtactgaaatttcagaaagactttttctttgcctgatttggctactagtcatgtaataattcatcgaactattggtacctatttgggttcttctccagaatgcagtgtgtgggaaatgacgtgctttgactcatgaattggaagatggtagcttgttgggtttagttagagagtgaaaccttctcaagattgagttctgtggagccatcactttgtcagcgaggatcaggagtattttgcaaactgatgtttctgaatttctgttttccatgcagtcaaagactggagaatcaagctgatcttc

SEQ ID NO: 91153 - DNA, 307 bp, Eucalyptus grandis
  Intron number 1 from transcript Egrandis_v1_0.047424m (loc us Egrandis_v1_0.047424m.g) derived from phytozome v7.0 (c hr-ID scaffold_9; pos 5387008 to 5387314)
ttcttacacctgaagaaatcaaagcacaagtaacggtaagatgcaaacatgtacatactagcttctttttctttaagcaaacctttttttacttgtgtatgcgtatgtcaaacagatctctatagtataatacatcgtcaaagttgtatcgttacattaacagaaactcaatttcacttgaattatatcctatatgcattgtcttttttgtcttccgataaattttgaggctctaaacgatacattaggaaatttatggatgaagtacaataacaaaaccaatcaaaatctatatttgcaggaaata

SEQ ID NO: 91154 - DNA, 487 bp, Eucalyptus grandis
  Intron number 1 from transcript Egrandis_v1_0.037722m (loc us Egrandis_v1_0.037722m.g) derived from phytozome v7.0 (c hr-ID scaffold_4; pos 12291613 to 12292099)
ccggttcacctttgatagagaaaggtactgtgtgcttcacttccaatcaaaaatgatttttctttattaacaccgactatggccattgcaaatgtcatttttctctgggataaaatatattttggtgagtagattactaatcaaaactccacacttaactttcaaataaacacacaattttcaatcccctttcatcaggccactcaactatattctaactttcaatctagtgatttgtgcacttttcgacacataaaatctaattcggcttatagacaaaataaagtcaagtgatgattaaagaaattcaaacttaggccaatacagacatgatatttccaacaataagaaagcttatgaaagatgttgcaagtaactattggcattcgtttccttactgaaatgcaacagtcatataattcttcacgtactcttttccaatacttctcgatttttcacgttgcaggactaaagttcattcacaaaa

SEQ ID NO: 91155 - DNA, 973 bp, Eucalyptus grandis
  Intron number 1 from transcript Egrandis_v1_0.031181m (loc us Egrandis_v1_0.028086m.g) derived from phytozome v7.0 (c hr-ID scaffold_4; pos 37513082 to 37514054 reverse strand)
ctgtcatcaagcgcatcaaagctcctgttcacctggtatgctcggcatcgacccttgttgttaatcgtcagcttgcttgcctctttaggaaggtccttgtgtggaccgtcagcttctgcttcgtctctctcttttgctctgtttttatccgccttttcaatctctttgatggtttctcaaaagaattcgattaatcgaattggcttctttgagtttcgattgtcacaaggaaaagttttgtcagaggttgttctcaaaggctaagtttttttttttggtgaattgagtaagaatttatagttcatggttgtaaggatcttccttttccgagcattctgcatcgcttgtgtagaggtccccaatgatttatatacatagtcttactgctagcttagatatcagcttaagcttttcagtcagactaattcccctgttcgaattggagatttggctctgctttgatttcactcaactcgaagatgagccatcgcctttttctttatgataattaaattgatctttatttgctcaaaacctcaaatgaaagtgaaaaattaccacccactacagggtcaaatcatacaaagtcacaggtgtaaactaatcatactttaagaaactcctcctctgcattggttatctgggttcaaataattcaagatgagtaatcatgtgagtttctttgaatcagttgtattggttcttgtgcttattcagtgaaaaagataaatttctctatgttctcaatcgtttcttccttctctttcggccatttgatggttgtagatatatactatagttaaaaatgatggacaatgcaggacaagaacccatggattttgtcttgaactttgttcaagaatagttttccttacgaagtctgttcttgtgcttttcctcttcatgcttacgaaccaaatactttacccttttgacaggtgtggtctctggtgaggagattcgatcagcctca

SEQ ID NO: 91156 - DNA, 907 bp, Eucalyptus grandis
  Intron number 1 from transcript Egrandis_v1_0.050637m (loc us Egrandis_v1_0.050637m.g) derived from phytozome v7.0 (c hr-ID scaffold_4; pos 13899831 to 13900737)
acaagagactccttcccctgctcctcctcctttgagtatggcctattaagggtattttaaagtatgaggtaatttagtttttgattcttggtgtgataagttcctaagacacttctttaccaagaaaaaaaaagttcctgagacacttatgtttcctcttgaatgaggtataagcatgaaacaagtagcagttgagaaattaatgagattttgtatgcaccatgagtcttcctttctttcaatgtaagcatcaccgtctgaagtaatttcctcaggaaactgatagaataacaccaaggactgctttaaatgtgcaacccctcctaaaatctgttattggtaattgggtctaaacactgttctctgtgagtttcttgtctaacataagagctcttccattttcaggaaaggatacttactttggtcgtattgccctcattatcacaatcccggctgttggattatctcttttagttgctggaatattatgcatttgtttgaggtcaagaagattgaagaaaaatttcaaatgtaagttctcattacttttgtgtgactgattttcataaaaatactggatgaaagcaacctatgtgaaacagattagcagccaatttgttaagccttgatgtgccaaagctagtaacttttcagtaattcagaggtcggtgatttttgattgaacgaggaaagattcactgtgggctatagatatcaaagttcactgattgctctggaaaatattttatttgctagcatcaacaaggggctcaattttccttagaatgaattatctgttaaaaaagtgaattactatcaactgttaaatcaccagacaggcttgctgataatgtgcaattagacaatgagcaacttccgattttctactttgtacctgtacctatag

SEQ ID NO: 91157 - DNA, 907 bp, Eucalyptus grandis
  Intron number 1 from transcript Egrandis_v1_0.043128m (loc us Egrandis_v1_0.043128m.g) derived from phytozome v7.0 (c hr-ID scaffold_491; pos 5397 to 6303 reverse strand)
cccttgcgtctccgtacatttcgtgggtctgcgaggtgtggcagccgtgttttgttgacacgctgtatctaatgctgcgtttttatccagtttgctgcttttggtcgatgccatgcaggataaattggttaaaatggggttttctcattagaaagtttttttttttttaataattttttggtggagtggcattttccgggactcatgaattaacccccatacgctagatactgcagagcttacggtacacagctggtgaattgaaacttgattgcctgaagatgattatgcactatccacagggtccaactctgtagacgttgttcagagtgctaaattgtcacactgaacacaagatcatttgctgattttggttgatgcctgcaggataaattgacaaaaaaatggggttttcttattaaaaagttggtttttttttggtggagtggcgttttcctggactcgcgaattagccccatacgctagagactgcagagcgtaccatatacagctgatgaagtacatgaaacctgattgcctagagatgatatgcactgctgggtttaattctgtggactttgttcggattactaaattcttacactctgaacacaagatcttatgtttgctcgtatagcgatatgcagttatgttggtattgcgattgagtattgctgttacctgtggggatctactagtgtactactagaaaataattaggaaaagatttgaattggtagttttggaaggaactaattgaatttgtaagtactatcgagtatgttatgagtacatgcttcttttttttcttcttttttcattagtccatgcttaagagtcaagtgttttgactttattggtccatggaattcacaggacaacttcaaagagaagttctttagccaaa

SEQ ID NO: 91158 - DNA, 775 bp, Eucalyptus grandis
  Intron number 2 from transcript Egrandis_v1_0.013080m (loc us Egrandis_v1_0.013080m.g) derived from phytozome v7.0 (c hr-ID scaffold_6; pos 50598977 to 50599751 reverse strand)
tcgcgttccgccattttgagctggtttttctgcaggttcgctacttgaaaaatttctctttccgactcgtatgtgatgaagccctttagttgcttgctcgaattgaactgacggagacttcacgaggcgggaattcgactctttgtggtatttttaggaggagatcattaacttgttcttaaagattgactgtaagtcgaagatgtcggcctatttttttgtggccagcccataccttagagaacatgtcgaagacaataatatatatttttttgctaatgctaaatgtgaagtgtgtactcacgggagattgtcattttaatgcgtaatagtgggtgctctgttgtaaagcaccgtgttgacttggataataatgctattaggatctccatagggctctgtaatgggggattatgtctgattagctttttctttatttattgtttttgtggttttcgtgaattctttttgtggattctccacttggggtaggcatagcttggttagatttaatggcaaattgggtttccgatggggtccaaagcccttcaaaagtcaccactggcaaagcctccgtattttgagctgctttaggtctcttagggtttcttgcgaatctccttatcttgcaatgagatattcccactctatgttcctttatggcgtcgtctttcttagatactaagcgttagtcatgagtttgagtttgttgtagctgatgtgatgtgtatacattacagttcgtcatttttgtttgactcaagcggagacgagc

SEQ ID NO: 91159 - DNA, 637 bp, Eucalyptus grandis
  Intron number 1 from transcript Egrandis_v1_0.012139m (loc us Egrandis_v1_0.012139m.g) derived from phytozome v7.0 (c hr-ID scaffold_11; pos 42032040 to 42032676)
gcccttcgccctcgcctctctcggttggcctctcggtaactttctctctctctctctctctctcaggttctatgtttgcatttctctttgttttttcatgctttcccggcttttcttgtttaattgcggtgtttgacgaactaaataaattagagtgataatcatggggacgttcttcgatttgggctgcggaatctctgtgtttttctggacgctgacggctgacgaagttggcgcgaatagcacctgtttgatgtttccatagtaagcagatggcaactgtttgatctggtgctttggtggattatcaatttgatttggtcacttcccctccctttttgggtcttcaggaacggcgcagaacgagaagtgaacagtgttctgtctttgtttattatctaatatattgttgaccacttacggcttggacacgtgttaagggaaacgcgttggtcttcaaaagcatcgatcgcacgcgacgtgagaaaaacaacttcatggaatttagaaattttgcttatcttgttgcttgactctttacctcttattacttgagatgtttatttacttgagatgtttatttgggctgctgctgcattcaggtgttagtagccttgttagtgcgaccctggccaca

SEQ ID NO: 91160 - DNA, 788 bp, Eucalyptus grandis
  Intron number 2 from transcript Egrandis_v1_0.012139m (loc us Egrandis_v1_0.012139m.g) derived from phytozome v7.0 (c hr-ID scaffold_11; pos 42032730 to 42033517)
ggtcacgtaccgtcatctcgcccagagcatatttggttcgtgttaccgtctgctctaacagttttatcttcgttaaaatgttggtgtttagcgggtagtgggtagaatcctgcttattcaccattactcctcagtagtagtccttttttaaccgttctttccaggcatagcttacaggggtgtcatctttttgaaaagtagtctttaagctcatcttattggctctttcagtagatacatcgccatgtctgtttatagaaagcttattctgtattggttgcagctgacttgtctaattgactgcgataaaatagttcttttttagcttactatcgatgattctgtgaagagggatattgatgccacattatgtgattaatcatgaagcgttaccttaggatcgtattcttcttagtctgactagatttatctcaaaaatcatcagcaatcacccaaactgctgctacaagctaagaggagaaatggaatttgaacatctaactttaatgtttgaaagatcacatgaaaacctctagatgctctcaaattttggacattacctattaacttgggagttattttgctgctgaggcataatgacatgaaggttcgtcttgaaagatccaaagattcgaaagacgtaaattattatccattcatcgccacttaaacagtgcttgcaattgaagattcttgtttctttcccctttgacttgttttctcgacttattcattctcttcttatttgtataggttcctggggttactggtctattgcatttttccag

SEQ ID NO: 91161 - DNA, 682 bp, Eucalyptus grandis
  Intron number 1 from transcript Egrandis_v1_0.017827m (loc us Egrandis_v1_0.017827m.g) derived from phytozome v7.0 (c hr-ID scaffold_4; pos 6683893 to 6684574)
agaaaggagctctgcaacggcgtgcccaccaccaggtcggtctctcgcgtttcccccaacgagtttcttgctcgtaatcggaaattggacagttggattttcgttttctcggcctgatgtgcgctgcgtagcaggaaagcaaggagctttgagtcctgctcaatctgtttggagttcgccctggaaaaaagaacctcttttggctaggtgggttcttgtgaaatttgaggggagggggaaatggaggaaatttggtgctgcccatttgatccgagtgattggtttgatcggtcttagctgtttgtagcgaagtggtatgagttgggtcttctcaaaattagatggtgactagtcccatcggcttttttctgcctggtgagtttgatggtccgcgtcgatgaagttggtaaaaggtgttgtcagaaagtgaaagttttgaatacgaaatgagaagactgctaattggcgactttactgttgagagcaagaatgttcagggcatcagggaatcggttgcaagaattatggtcgagttgggaagtgtttgtattaagtaatgcttacaataaagacattaagtgcaataatgccaaaatggttttgtcgttctgttatgagatgtctaatttaggttcattcatgcttttgtggtgtttaatttttcaggcacattgaatactgc

SEQ ID NO: 91162 - DNA, 666 bp, Eucalyptus grandis
  Intron number 2 from transcript Egrandis_v1_0.012051m (loc us Egrandis_v1_0.012051m.g) derived from phytozome v7.0 (c hr-ID scaffold_11; pos 8679485 to 8680150 reverse strand)
cctaccagttatactcatcacttctgataggtaattggttcctctgtgactggtgttcacaaattcgtctgcctatgtagataatgaaatgatatgtaacttacatatttttcattttacttgtttggaatagattgtgtacaatgcaagtcaaaatgatatttgtaataagtttcctgtcgcttgacattaagattttcaatttgattttctcctggttgagcatcctcatttacatggttgactaccagtactgtaattgcttgtaaaacaattagaagtttttcacaacaagcaaccctagaagttacgaattgcataggacacatggatacatggcagatttgtccttgtgtaatccttcctgctaatgcttaggattttataaatgtaattcctgatatgcaatacagttaataaaaaagaaacagattagttttggcaatttgagtatacattcttcagattcctgtacctgccagtggatcagttaattcattgaactctacattgattaagacgggtgctgatcatccttgtcataagatcgttttgattctattccgtttgactctattttaagatttatttacttttcaatttgtttatatatctttattctgacttgaaacgtgatgcctcagctactactcctacagagctttc

SEQ ID NO: 91163 - DNA, 589 bp, Eucalyptus grandis
  Intron number 1 from transcript Egrandis_v1_0.050247m (loc us Egrandis_v1_0.050247m.g) derived from phytozome v7.0 (c hr-ID scaffold_9; pos 3802485 to 3803073 reverse strand)
cgcactttggagataatttcagctccttggatcaggtgtttattgctttgtttgtttccattaactattaaggtttaggaggagcatgaacacgctgtctcccttcatcattgccttttatgtgctaaggagatttggctgtttgtgattgggtctgccaatgtagtttcctggtaccactttggttaaatttaagtttaatgcggtttatgtacttgagttgaggtaactaacatgagttgtcgaagtaatttgcatcacttgtttacaagtttgttcttatatgcttgcagtctccctctgtctaagtacttaaatttttgggttgaaaattcttccacagaatttgatctaagtctttatttgatccttagtaatattcttttttatctctggttcttgtctattctacccgctgtttaatgattggcagttttgattgtaaagccgtgaaattagatgggaatgtaaactgtggtggtcatactttggcggttttgattgtaaagatgtaaaatgaaacagtaatgggatttttgatgctcatattttaggtcgcaactgcactgagggaagctggccttgaatc

SEQ ID NO: 91164 - DNA, 644 bp, Eucalyptus grandis
  Intron number 3 from transcript Egrandis_v1_0.013024m (loc us Egrandis_v1_0.013024m.g) derived from phytozome v7.0 (c hr-ID scaffold_4; pos 24229066 to 24229709 reverse strand)
tgctgtggtaagcttttggctaagtaataacatttcaagcatactgtggtgtttgtaattaagatccccattcctgtttatttggaaaagtttccttgctgctggtacaaaccttttgatagtggaatagacgggccctttcacatgtacttgctctgcattttttgtctgattcatatcggtgaactttcacatgaatcagtgaactttcacttattgcaattaatcggttttgtcaatgtgtgcgtgggctgcccaaatctgcatcttttggtatttgtgaaaacattatattcttttagaaaataaaagtctccttttaaaagtgtaatgtgaataacagaacataatagtgaaccaatttgcatctagtgtgttttatcccctcatttgaaatatttcttgatttcagcatctgtgagctccactgtcagaagtagattgaagtagattcagtttgtgattgaactttgcgtgtcttcaagcaattatgctagtagttttctttttgttcttttgtcttggggggatgtgttcggcagctgtttgatgaaagttccagactgcaattttgcatttgcacatgagtgagaagaatattttcttgttgctgcttccttttgcagcttgttggtggagttgac

SEQ ID NO: 91165 - DNA, 934 bp, Eucalyptus grandis
  Intron number 1 from transcript Egrandis_v1_0.047501m (loc us Egrandis_v1_0.047501m.g) derived from phytozome v7.0 (c hr-ID scaffold_9; pos 30688014 to 30688947)
accatgtacgtgttcttttggtttcatttttgtgcatttcccaaaatagtgattgccctaaaaattgtattggctcctgaacatccgctagtgtgacaaagttctttctgatagtacatgcgcatgttgctggcccgaggtagagcacgcattcggctggggtggccccattttgccttaccaaccccagggaaactctaaatacaggcctagatcgtttatatagatatctttttatataattagcattcacatggcaagtgtgaaacttttcaccgtcttttccttctggaattaattagtaaagaaagagtttgtatatatgtctttgcacttagtgttatatatgtcaggtccttctagtttgtaccctgtaaactttggtggaaaacagttgtttcgatacctcttcagttttctttaccaggtactgtcattggataagcatgcatcggctggatataattctatgtcgactgtgaagctcggtagaatacatttgcaaccagttggcactaggatgctgcattacacctggccttctatctttcaatacttgttgaagtacaactgatcatattttccatctctcttaaactacttgtttgttactcgacggtattactagtcaaatgtcacttgcaaatctaaattttgtatatttgagtgacagaacaagctgaacctttcgatagaagtttctaaaacgagctatttgttgcttatctcgggaacaagccatattgccctttttctgatggaagttttgaactagcttaagctgcttaagctgcatcttgaaagtgtcatattctactttctggactcttattttgctaacactgtgctccttgttttgagttgaaagtgatcacaatttagtgaaaccgtgtttgcagtcttcaaggaaaaagacttcaacttgtcccctgtg

SEQ ID NO: 91166 - DNA, 919 bp, Eucalyptus grandis
  Intron number 1 from transcript Egrandis_v1_0.044107m (loc us Egrandis_v1_0.044107m.g) derived from phytozome v7.0 (c hr-ID scaffold_6; pos 12815537 to 12816455)
tcccgtaactgcattacagcctaccagcggccctcacatcgaggcaacactcgtcaatttgcaagttctggagaatggagcaaatatggctggtccatcactatcacaaggtacttcttgatttacctaaatagagactgtcactccaaattaatcataggtattccagctcgagtgagcattgatgctttcattgcagaagtagccttccttgtattattaactctctctagtataactcaaattcatctatttccatacctgatcttgtctcaattactgtggtatcgttgcatattatgcatgtccgatgtcacttactttactgcacggtttctttcatcaagatatttaagccgtgcatgttgattttcattgtggatgttttttgtgaccaagttgtgtgttgttttacctgtatgcatggacactccaatattttagtgcaaccagctttggtgccccctcaacatcaaagcgtttcacatcaattcattagtcctagacaaggaatgcgcagcagaatccaacagggctatcatcgtcacagaaaaatcatatagtcccatgtcacccacaagctccaatgaacatggatccctgtatcctctcatcatcacaagctccaaataatgctcctccacgtcctcagattcaacgtcgtggaataggcctgatgggcccatcatcattaccgggtatatagttatttacctatattaatccttatgtatcaccatgttacgttattagggaagcaagaatgctataatgagaccgaaggatttaattgcagaattagatatgaacaagggcgtgccattgacgagtcatacaaacatagacaacaactttgaaaagagtagccatttgaaaagaaaaataaagcgactctacagtagagaagctgacataaagg

SEQ ID NO: 91167 - DNA, 725 bp, Eucalyptus grandis
  Intron number 1 from transcript Egrandis_v1_0.040720m (loc us Egrandis_v1_0.040720m.g) derived from phytozome v7.0 (c hr-ID scaffold_4; pos 37804173 to 37804897 reverse strand)
cacaacaattacaaaggtgtgtgatcttgtctctgttgattgcgtttctgaataagagaaatagatcatcgcagccatgttagcaaggttaagtagtttgtagctcagtggtgtcaagcctggactcatcgttttggctgcttagaatatcgggagtaaatgtttcatgagaaatcgatacaactgaaatcgtatgcatcaaaatctgcactcgtgagttttaaaagcctatttgggtagccagcgtactgacacttttaacaactatatgcaggcgtttttcttctctgcagtcaaagctgagacatactgatgttatcttttgttaaaatcaagacatttcatgtggagaatctaatttccccttcaaatggtgttcgtaaaattatcgaaatatgtaggatggaatttattcactggtcaaattactctagttgtctctatgtgtgcgtgcgcctttttttaataaacacacgtaacaaaagaacacaatctaactcaacatgaattgtaattagctgggcctaggatggatctttcacttgctgcttctgtctgatccgggatggcatgcatgttttgattagtaaatgtgcttcctgcttgcttgcctacttatgttttgcttgtcccgattttcttctgtcctgtgtccccaagcattttgaaatatcaaattgttggtttcagttcagctgcaaattcgaaagtacatttgcaaacca

SEQ ID NO: 91168 - DNA, 780 bp, Eucalyptus grandis
  Intron number 1 from transcript Egrandis_v1_0.011688m (loc us Egrandis_v1_0.011688m.g) derived from phytozome v7.0 (c hr-ID scaffold_9; pos 33876347 to 33877126)
agggaagtagtgagttttttgatgggttataccatccttgatcttctctagagcagcaacctgggctttcctcttgttctgttccaacctctgagcacaagcaaatagacattgacatcaaattaagggtaaaaatcaggacaatgacacttctgtccttgaatgtacaggaaaaatgatcagaagtcagggaaaagaaaaacaaaggtgacagaagaaggaggtggtgatgattgccaacctttgcagaccattccaaggaattttggaagaaggcaccgagcgcgaccatgacactgatcacaactgcgaccgcataggtcggcgtttcggcgagtgacggacctccccattcctccatgctgataatcaagctctattcaaacacacagattaccctcaaggactgaaagttcaagaacacagactgataaatacaaagttgaaactgaatctctgcgcaaagacggatcgtgattgcatcatggcagatcaagaatggtggcattgctttggttggttatgtctgaatatcacaaaacgagatctcgaacatgagatgatcagaccagttttgtattcatggggatataacttagcaagagaataggagagttcgttgcacaacccgcgttagacggtcagtacaatgcactgggccgggctaggcccggcccggcccggcccatttacgaatacaaaagcttcaatccctctcttcgatggcggcgtcgtccgctcgtagctggtcgcgccgccgccgccgccgccgcgattccc

SEQ ID NO: 91169 - DNA, 484 bp, Eucalyptus grandis
  Intron number 2 from transcript Egrandis_v1_0.000854m (loc us Egrandis_v1_0.000854m.g) derived from phytozome v7.0 (c hr-ID scaffold_9; pos 25607602 to 25608085 reverse strand)
tgctttcaagtttggtttcttccgaggttttggaggtgagattggttaagcgataagtgatttgatcccccattgcctcactttcgtgggcactgtgaataacttacttccaatagtgcttttctagcggacgcctgttttttctctagattggagcggtaagggtagtgtacttttaaaattggattagcattgttgcttagtagtgtatggatgttggagattttgtcatgaagcagtaacattggttgacaaaacgagtgtttatcaagcgtgtaagcagggggattacatcttttgctaaatgttcacacctctctaatttgctaggacaattttcttgtcggattttgttctgttttgttttctacgcgtgccaatttgtcaacttaatgccatttatgatggaaaaggagttcattttgattttgttgtttgtttttttgcaggtacagggatctttatttgccggagggtgcttttg

SEQ ID NO: 91170 - DNA, 1014 bp, Eucalyptus grandis
  Intron number 2 from transcript Egrandis_v1_0.039488m (loc us Egrandis_v1_0.039488m.g) derived from phytozome v7.0 (c hr-ID scaffold_110; pos 2189 to 3202)
ggcggcatcggtaagacaactctggctacgatcatctataaaaagttttttgacaagtttcagtaccgcagctctctcaaggatattagagaaacaattaagatggagtgtatgaaacatgtccaatctctactcatctcagatataacaaaaagccctccccatagcgtgcgtaattctgatatagggattgcaatgattcgatcaagttgtgaaaataagaaggtacttattcttcttgatgatgtggatcatcaagaccagcttgataaattgattggaggttgtaagttcggcttaggaagtcgaatcattattacatgtcgagataaggccctcttaaagtctgaatatgaaatgtatgaactcaaagaaatgaaccacagagaatctttgcttctgtttagtagatatgcatttgaaggggaacaacctcccaaagatcttgcgactctttctagtgatattgttgccaccacaggagggcttcccttagctctcatggttgtaggttcacttctcaaaggagaaaaagatcaaatgatatgggaagagacgctggagaaattgaggaaggtacctcatgaggacgtacgagaaaagttgaagataagttatgatacattaagtcatgcagagaaagagatgtttctagacattgcatgtttttttaatagaactaacaaaagaattgccacctacttttgggcggatctcgaattcttcccaagaaccggattgcaaaaattgtttagttgttcattaataaaaattgatggtggaaattggttgagaatgcatgatcaactaagagatttaggtaggattatcgcttgtccagcagaggagaagccttggaaatggagcagactatgggacgaggaagccatgaaagttctacgacgcaaggtgacaatgatgtctacttttggcctctcccattttctctaatggtagtcccttaaattattatcattatcgttcttttgctctagaccattgactattctcaac

SEQ ID NO: 91171 - DNA, 536 bp, Eucalyptus grandis
  Intron number 1 from transcript Egrandis_v1_0.015712m (loc us Egrandis_v1_0.015712m.g) derived from phytozome v7.0 (c hr-ID scaffold_4; pos 25514382 to 25514917 reverse strand)
agctcaagttgacgctcgagcagaagaacagagaagtgagttggtctttgtttgctcgttttcttcgtttcctccatgattgttcgcttcttgatttttcatggggatttttctagatgctgttgatgctagattgaaggtctgagatttttttcaatatacattctaataatctctgatctaattcggtggaaagatatcatttttcttttgtttgtgatttgaagttacttaattggctgaaggacccccagtaattaggagatcgaatgtttgaccagactttggactttgaattgaatctgatgtttcagatccttagtgtttccccagatttcatcatcttttcgaatgtttatatgtaagattcacatcatcttcgacgtgttttggaagatttgaaaatggtgtcatggttctttgatccttaatgccaatttctggttttatacccagtactgaattcgagcatgtggatcctctgtgctctcaaatttgcaggttgagaagttgaaagatctgtgcttgagccagag

SEQ ID NO: 91172 - DNA, 769 bp, Eucalyptus grandis
  Intron number 3 from transcript Egrandis_v1_0.012232m (loc us Egrandis_v1_0.012232m.g) derived from phytozome v7.0 (c hr-ID scaffold_11; pos 22394701 to 22395469 reverse strand )
ggcgattcctacattgtattacaggtgaaaatatttcttactcctccgtatgacagtgaaccggcaagacgagtacttctattgatttatgtaattaaaatattgcagactatcttcgatttttctttattttgcaataactaagtatctgctagtgacaaatcatccctttagaattttggttctaatttaaggcctctttggtgttacttcaactgcattttctagcatgatgagcatgactgatcatgctgtttgtacttttggttcatttcacaatttttgagttattgctggacttaatttagatgtctgcattgtccttttcttgaatggaacactactggcaggatctactattaccaacctcataagaccaaatgctgttatatcaacttgttattggttgtcatcttataggaataagtaggacattcagtgttgatacatttgtaatatactattgtgaaagtctgtctgacccttaaattattacagtcgaatttatagtcaaattaaaatcaatggagtttatgattatttactgagagtttaatgctaaataaactatataaaacatatatagtgattgtgtcaaagagcaatgtatacagataaaaaacagaacctttttttttaatcaatataaagcatatgaagtacaaggctatctgtcctctatgagtttttgttataatgtttatctccactgattaatattcaactaaactcctgtagacaacgcctggcaagggaggtgcttatttgt

SEQ ID NO: 91173 - DNA, 375 bp, Eucalyptus grandis
  Intron number 1 from transcript Egrandis_v1_0.035065m (loc us Egrandis_v1_0.035065m.g) derived from phytozome v7.0 (c hr-ID scaffold_9; pos 23867432 to 23867806 reverse strand)
ctggtctcggagaacctatcgccaagcagcagcaggttctctctccctctcgaaagcacgtcaagacaggaaaattacttctttgtgcacctactttttgttacaacaatttcaggttctaagaatttctaaaacacatgctgttctgatttctttagtttcgcataatcggaatttatataaactcatagatgcagggtccttttttgaaactctcgtttacgtaggcccttagaatctgccaaggacctgatctttttatgtgtgtttgttgttagaatcaaactggaaatctcacctcttttaccttattcttaggtgtgttaattgacctaagttcaggacgatttctaattcttttcctttaaccgacag

SEQ ID NO: 91174 - DNA, 677 bp, Eucalyptus grandis
  Intron number 1 from transcript Egrandis_v1_0.050322m (loc us Egrandis_v1_0.050322m.g) derived from phytozome v7.0 (c hr-ID scaffold_4; pos 2270617 to 2271293)
gagaatttttgtgctctttggacaggtatgtaagaagcattacttaaaaagataaactgaacagcggctggacttaaatcgtgtttccttttctataagtaggtaattcataaatgagctattgctttaatctgatgaaatttccccaatcaaaactcaattttgcacccttctgcatatgagatcatggaggttaattaagttgttctaaatttgttcagagaccatttgaataactcatgcacaaagtgccataaacttgacaatccatgttctcttcgagatcaaatagcttggagaagaccaattaattatgaactctggtcaacttttctcaagaagcttccacgacattaggcagaaatgccaatcattttgcagagtaatgtttttatctggtcatattcgatatctaatcaggaaatctctttgtacatgactaaatagtgaaattgccaagggtccaaacacactttgctgattcaagcaatacctcttaaaaagaactgccactagagcagtagcttccagattggttctgttatgctttgacataaaatacatcataaagtaatcttatacgtcaagtttcctgagctatgtgctggctgcaccaattactattaagactcgtcttttattgtcttccaggagaagttgtcagaatttcaagtttg

SEQ ID NO: 91175 - DNA, 990 bp, Eucalyptus grandis
  Intron number 3 from transcript Egrandis_v1_0.027054m (loc us Egrandis_v1_0.027054m.g) derived from phytozome v7.0 (c hr-ID scaffold_6; pos 27252110 to 27253099)
caggttagtggtattttcctctgcgtagaagattcatgtggagattttaagtccattaagacgtaatatttgtctttccctctccatttttgctggcctccttgtcagtcatcaactagtcgtcattggactattcgtgtatgagagaaggtttccggtgtgtttgttcaactcgagtttattctctcaaaggtttcatttgtttgtgataaaagaattcgaattccttgtgtggtcactacgttaagattcagagacagaattatttttaggttgattggacaatcattgaggtggtagttctgactctttcgagaatggaatcaattcatagtgcattatatttgtacggcagacttaatcatatgtgtggttgggattcttcagagcttgtctccaaacggcctatgtttctgactgcagctcttttgacacttcctcttttattcaaagccaacagcaaaatataacaccttcatttcccgagtttctggcttccagtatttcactgcttttttcctattactccctgctactctcttcatgcttcatataaaactgcatagtccattggatgtttgaaattgttggagatggtaatctccttttgtttttgtgcagaagcatcagtagttttcattttgtcaatctatatggatttgtttgtggctttctgtattagtttgttcttcagcagtgtcaatgttgaagtcatccaacagaaaagtattgttctgatctctcatacggaatagattgttcgactggtgtccaatgcaaatcttttcatctctttatctttttggtcattgtctgtttgtcccatttcttgcggatataatgatgctttgtgtacattgaaaattaattggtcagtgtgggtttaacgtcgacacaaactattctgtttctttaacttagcatattaaaatcaaattttctcctgtcatatcagctttacacacgggattcatctaagaactggaagtt

SEQ ID NO: 91176 - DNA, 738 bp, Eucalyptus grandis
  Intron number 1 from transcript Egrandis_v1_0.030619m (loc us Egrandis_v1_0.030619m.g) derived from phytozome v7.0 (c hr-ID scaffold_6; pos 36705239 to 36705976)
gttgacccttccccaatttcggtcttcttgacctggtcaatgtctatcttcaacattgatgaagaagacaaagaacaaggataactatgggcggatcgagaagaagataaacaggagaaaaggaaaaccaaaagagaatgtttttttgacgaaaatctccttgaccaagtcattgaaatacgcattagagatgcatcagttcgcccacttcgggtccttatttgagactaagtaattattttttatttttatttaaaacatactccacttcaaatcattttttaagaaaatgaggtcactttgggtttttatttgaaattttcccattaaaaaatgctggaatttagtcatagataactccaaaattgcctcatctaaaaaacaaatttggcaaatcgaaaaagtgagaaaattattgaaaagtatattggcaattgcaattctcatttctctatttatttagttaaaagaaaagaaaatcggcgcaactagcaaaatattcaaatttccgattttattaaagtatgaattaggtggggaaaaaaattatttggtgctacgaatcacgaaattcaaaaagctcctctttcttttcttcgggtttgttcgtttaaaccgaccctataaatcgaagcgaaacttctttgtattttccaaagctgaaatttttttttgtacggtcccggtcgtagccgctctcaagttgcagaggacagagaggcgcgaagaaggaaggga

SEQ ID NO: 91177 - DNA, 593 bp, Eucalyptus grandis
  Intron number 2 from transcript Egrandis_v1_0.022923m (loc us Egrandis_v1_0.022923m.g) derived from phytozome v7.0 (c hr-ID scaffold_681; pos 14214 to 14806 reverse strand)
tttcggatagtgaaatattggacccggtactcgacttctcttcttttgcttcccctaattgagcatctctaacatggttacaagtgcaggtaaaattgacatcatcatcatttctctgcacatgtttctcattcagcttcttgaagtttctggctttctgagttcattcttttctagttccttcctctgtcccatgattatttaagcttgatttgccttaatttccagttgaacttcgaacactagtatccatgagtcagaacctttaccgcagtatcctgtagaatttcatgaggaagatcgagaaatcaaacttacagagaatcattttaagagagattcgtgactggtgttttagttgtagtgactagtgaaggttatactgccaaaactgattctgcagctacaaaagggggcaatttgttcatgaaaaaagaattacttcaattttgataagtgacgcgtgatttttcttgtgcaaaaagcactttcgtacaacaatcgagttttggttatgcaaccctgaagctcatccctgggatcattctgtctttgcagacggcgttggttctctgtcacataataaacaggaa

SEQ ID NO: 91178 - DNA, 685 bp, Eucalyptus grandis
  Intron number 3 from transcript Egrandis_v1_0.023532m (loc us Egrandis_v1_0.023532m.g) derived from phytozome v7.0 (c hr-ID scaffold_9; pos 31269058 to 31269742 reverse strand)
gtgattgggaacatcacctctgtgctcaaggttagaagcaacaagaattccattatctacccactcccgacaaagtactttctagtttcacttaaagataaatttttatacaccttatgttttcttgcaatctctggcacagatggacacgattctgtagctctatgtaaataagcccaatttatatcaacaaactcgatagtgaaacgaattcaaattacatgatctttaagcatgctcaatagagatatattgcattgacatggctaaacacgagtgcttaatccgagctgacaggtgagtacaagatgccgacccttaagtacattctaaatgcaattctttctccttttttccatatgccatgatttgatatccaattaagatctcttatattacttagttgttcttatatggctccatgtgtagcacaagcatagaattgtgcaagtatattggcgtctttttattcgacgttaagttggcatttgaacgtgtctcaacctgttcatctttccgagaaatcttaaaggtttactccactatatacatgcactatttagtgtgtgtttgcaaggaaccttgttgttctggcctcgtgataattagacttgctaaacatctggtaattgttatggcatttcagggggataatatggctttcggattcttttccagggaatat

SEQ ID NO: 91179 - DNA, 827 bp, Eucalyptus grandis
  Intron number 3 from transcript Egrandis_v1_0.006364m (loc us Egrandis_v1_0.006364m.g) derived from phytozome v7.0 (c hr-ID scaffold_4; pos 21242782 to 21243608 reverse strand)
ccttcatctgcccaagaggagattttctgatttcggtactgactggtttccttctgattccatttgatcaatgtgctcggtcgtgttttcatttcgtgggtaatgaatggaattcggccctcagttcagcatatgttgtcctgcattaatggatgaagtgtccctaatttgtaacgtgtgaagagtaactatccaattatcgaggacgaagtttctctaactgatattgaagctactaattaggacttggtctttttttttttttttttgggtgcactctggcaattattgaaattgctaggtgctggttccgtttacagtcctccaatgtgtgtaacatagctcgggattttttttggttttattagttaaaaattggcatcactttctattccagtcatctttcctgagtggcacctttcaggacaatagtgtgggacagtgaccccccttaaaattggtctccagcactgattgcttttttgcctagtccttaagtgaaaatagttgagctatgccacttctgttttctaacagttgtctgcatggattgatttgtaacttgtcttatgtctgcatgaaatttaaaatgatttaggcgagacgttcagatcataataatgtctatttcttgtgctcaattcagaataaactcataaggatggacctttttctcagtgcacattactattttcagtgtcatcatccagtttctgcccatccattgataaaatcacgattgtggtccctgtttgttgctctattttcttatcctgacaccataattgcccttgtgatttcagccctcgtccggaaggaaattcagg

SEQ ID NO: 91180 - DNA, 923 bp, Eucalyptus grandis
  Intron number 1 from transcript Egrandis_v1_0.009401m (loc us Egrandis_v1_0.009401m.g) derived from phytozome v7.0 (c hr-ID scaffold_11; pos 9066595 to 9067517)
ttcttcctcgcctgctgacttgcgtcgatcctcaggtttgttcccgaatcctcctcgcttcgtccgctcggtgttcgcgttcgatcgtcttgggattacggcctcgatccgacgctcgggcgagcatcgaccgatcgaccgatcgtccgatcgtctcgcgtcgtgtgttttgacttcgaatttcgtagttcgcgacgacgaatagggcctccgcgacgcgatttcggtaggtcggggggaagaagtagagcgtccgattcgcgattcggcggctcggaggtcaacggattgctgctccgttcgattcctcgcgaaaaaaaaaaaaaaaaaaaaagctgtgttcctcgtaggactgcggacgatgtcgtttatggtgtctgcttcttttgatgttcggtttttgttaaatgtggttggtttcgagtgcgattgatgccgaaacctcggggtgagagtgtttgaccgctgtttgccgagtcaaattttcgttttttttttttttgcacggttagcttcgtctgtttctgcggctttagttagatcatgtgcttttcttttagggcgagaatcgtgtttccattgatttttctttagtggaagaagatgctagaagctcggattatcgaggttttttggtccttcttaaattttgtcatgtcaatttaaattgcgtacctgaaaagaattgggaaagtttgcatctcctaagtcctctttcactgtggaagggaagttaacagcaatagcattgattgctttatagagtgattcagatttcggagtattcatgtttccctctgttgtatttcattctgtaggggaattgtgccattttttccatttgtgtgtcaatgtaggaagaccttattaatgcctgtttttaaattattctgatggtgagttagcctttatacagtggcaaa

SEQ ID NO: 91181 - DNA, 673 bp, Eucalyptus grandis
  Intron number 2 from transcript Egrandis_v1_0.030762m (loc us Egrandis_v1_0.030762m.g) derived from phytozome v7.0 (c hr-ID scaffold_4; pos 1782884 to 1783556 reverse strand)
ccgagatttatccgaataaatttccagccaatgtaagtgtatcgccaacaacgtccatctagtatttgatctctgtttttgtgatcatcgatccctggatccctgtttctgtatggaataagtttgcagttgtcttgcttcacttacgttcgatgtatatgcattgacaatgtgatctgtatagcatgcttttctttgctcaatccacgtcatcttacgtgcttaatatgtgtcacatgtatcgtcagacatttgcatgtatttccatctcttgatggaaatatctatcaaacttcttagaaagagcacgatttactggtttgctgattgtgtatacattgttgataaaattgatagtacctcaattcgataattcggaaaggtggatgtgctttgttgtatatatcattttccatgtggtttcttgattcttcttaaaagtacgactgttgcactttaaatctcacctctacctaagaatacatattacagagtttgtttcctattctctgtgcaagaagaatattcttttaggcgttttggatttggggggaccataagttgtgatttactatggaattatttttgttgtcgaggcctagataaaagcttacttataagtttgatttgaaatgcagaagaaaaaaatttctgaagaatctccgaacaagcc

SEQ ID NO: 91182 - DNA, 374 bp, Eucalyptus grandis
  Intron number 1 from transcript Egrandis_v1_0.046876m (loc us Egrandis_v1_0.046876m.g) derived from phytozome v7.0 (c hr-ID scaffold_4; pos 20070339 to 20070712 reverse strand)
tctgcccctgcctctgcccccaagcctgaagctcggtatgcaattttacattttgatggaccgcgtgattcattcttgtttggtttgaatttcttcaaatgatttctgggactgcattatgaggattggtgaaagctgcgcatgtggggaattattctttctttcatttgaatgttggaaagtaaaatcttttcaaatgcctagcactttcctttgttcatacagctcctggtgtgctaaatgcctagcactttcttttgttcatggatgtttagaagttcttaatgttagcaagtggctgagtttttggcttttacatgattgagttctggattgaagggaggaggcgccacgcattgaagagagcaagagcg

SEQ ID NO: 91183 - DNA, 854 bp, Eucalyptus grandis
  Intron number 1 from transcript Egrandis_v1_0.013048m (loc us Egrandis_v1_0.013043m.g) derived from phytozome v7.0 (c hr-ID scaffold_9; pos 25565884 to 25566737)
tcctcccccgctccgatcgctctcctgtcttgcaggtatccgtcgcgcgattctccatcgttgcatctccgtttcgcttatctgaatccgtcgattctcgcattcgcacgccatttcttccgtgtgttttttttcggtgtttttttttttttggggggggcttatccggaacagtggcctttgactggatttgttggttctccgagctcggttttgctcggatcttgattgaatgtttctttcgccgaatcggccgcgacggcgcttgccgacgtcgccgttttcttgtacagtgttgtcatctcgtcgacgtcttatagcggtcttctgcgtttgggtattcagtaggaagtttgagttgacttcggagtcaatcgcttactctacgggggacttccgagtccgtgcttggttattacgtgattcgatccggttttggaggctaggattgtgtacagatctctggcgcctctctgttgctgtactgggtaaatcccagcttgaaatggttctgcaaatttgatggactgctgacctctgatggataattcgtaattaagttgatccgatttttttattaagctaaaaaatttatttgctgaaacctgctcaattacatgaggaatgtacaagaacataagaggagtctaatctagacaaagtacactggaacagactggtacatgtagatcctaattgattaaatgtgaccagaactgattggagagaatattcagatccttcaaaaggttgtttgtttcgttccttcgaaatgctaaaatgaattgctccttgacatgcattacttctcttctgcaggttttttggggacctggctgcgaattaggttcttg

SEQ ID NO: 91184 - DNA, 954 bp, Eucalyptus grandis
  Intron number 2 from transcript Egrandis_v1_0.013048m (loc us Egrandis_v1_0.013043m.g) derived from phytozome v7.0 (c hr-ID scaffold_9; pos 25566696 to 25567649)
tctgcaggttttttggggacctggctgcgaattaggttcttgatattatattttgtgatagtgggcatattagatggaatactattggccatcttcaatttatgcaatcttatgcacagactaggcgttaactctgcttcattattgttggtgtctttcgttgaggagatctatagttcatgcggttgcggggttttccaactgctgcttatgcatgagaagtgttgtgacttaatgggtgaagaaataactacacatattagcctgccacttatttccatgatacatcactatagacgtggctttttagtgatggttcaaaataaaaatagtatttgcatgcccctttgtcttcaaactttttttctggggtggcggatttgactttacatccatatcacttgccatcatacaatttgaactagtggcctatcttctgggaaggcccttcctcaatgtctaacatggtaacttttgcatctgcttagtaaaccttgactgccagttttcacttgaccccgtgagagggcatacaattgataacttgctgctattttatttcaactattttacctgtcattaaatttcaattgttctaccattctcaatccatttcaggatttaactgcagaaattaaataggtatccttcttatgataattgcaatgttacagaaagtttttggtgtttccacagtgccaaaacaagttatctcttcatattttatgacacacaaattgttcttttggatagatacatgttactctttgtgttctatataacttattcagaatactgttaatttagggctttgatcatgatttgtccccttttcatgggatttctaaatgtttttcgctttctatgatcaacaagtttcctgaatttgacacgtttgttgctctctactaatctcgtgcagttgctgtcgcattgtatctatcttgaccagca

SEQ ID NO: 91185 - DNA, 683 bp, Eucalyptus grandis
  Intron number 2 from transcript Egrandis_v1_0.000120m (loc us Egrandis_v1_0.000120m.g) derived from phytozome v7.0 (c hr-ID scaffold_9; pos 37569303 to 37569985)
aggtgatttctttcgatatagattgcatttatgctttcatgtccgatgctggtgtagttgagctcagtaagattaccgggtggagcttttaatttattagaggtggccaggagcttttcttttgactaatcctgaaatagtttgggcgactgtgggatgctttagctggaatactttaatgttcaagtattctatgtgatattacttgcatcctttgtaaattaatatccaaacccgctcaagtgcattctggacaaatgacggctttagatatccaaacttcctggctgcggactttagtagattttgatggatagtttgttaccggctaagttctaggtgcattaccagatggagagctaaacatttggtcttgtggcatctatgccagcattacaaatctttcttttaagcatgttttctgtgcataattggggtaaacgtaatttagttagtcataaacctgttgtttcatggttatcgtgcacttcatgcttgtcacatatggggcaataagtaacataagataatgattttgctcaaatgctgcaagtagagtgctgcaaaataggcttgctaagaaataaattgtgagagataacagcctctcttttgtatggtacatatataaatgctcctggacgctgtatgttctgcttatcatatttgttttatgtggcagg

SEQ ID NO: 91186 - DNA, 379 bp, Eucalyptus grandis
  Intron number 2 from transcript Egrandis_v1_0.021559m (loc us Egrandis_v1_0.021559m.g) derived from phytozome v7.0 (c hr-ID scaffold_11; pos 33167727 to 33168105)
gctcgtgaatcatttgaaaagtatgttttttgatcttgttcctattcttctcgtcatgcttcttttcaatggaaaactatataattttcaaattgaattgtagtcctgctcagaaatgtcccatttgaatccaggatacagaagatgcaattgcaatttgcctaagtaaaaaattgccaacatggtcaacgtctttaagtttggctttggggttctagatgtctttgaacaggctaattatctgcatgtagtggtcatatctagcatttgaatttgtggaatatggatttgcttgtccttcaaattatctgctatgccccaataactatctacaattgtcatagggagggcccactgttggtgattgcatctgggcggg

SEQ ID NO: 91187 - DNA, 971 bp, Eucalyptus grandis
  Intron number 4 from transcript Egrandis_v1_0.031968m (loc us Egrandis_v1_0.031968m.g) derived from phytozome v7.0 (c hr-ID scaffold_9; pos 27504527 to 27505497)
catcaagattctgacctatacaggctaaaggtatgttcactgctgccataagcttttctgatcttccactttgagccatgagtgaggaggcggataatggaagatgtttaaatgtgccaattgatgtctgtctgaaatattcattgaaagctctcttgtatttgcttatagatattatcctgggatcttcatctgcatattatttctcaatgaatctgagaacaatttcatgactgtcctgcagccacacatgtattattgatccttcatttgttgatcatgatttgcacagtaatctgaatatcattacacttgttatggaagtgaaatttatgggttgatgtttcagcaaaaaccgtcattttggctctcttccagatgtgctctgagtaaagttaaaaagtactcatctcatatatgtctccaatctacgaatttttttatgaggaaatgttgtgaagtattcttgtgtgtccagtgcagtagctatttcttttttctccctttttctaacaactcagttcgtagaggcaaaaggtggttctttttttaaacccccgattgcatattcaagacttgagaaaatttagaaaaacaagcattcgtaaatcaaggaaaagatcatctttttatgggctaaaacagttcatctgtagattgatgtttgttttcatatagaggcatcctgcaattttttgcccctcttttctttctccagtgatgatcatgactgacagctttgcaggcatacacatgcatttgtcttaactacattcatgtttagattatctaggagttacatggagcatgttctctaccaatgatgggaagaaccattgtatttttttaacttttgacttttttttttggtcagttcttaactttaacttatatgtctgctgatcacctactttgttgtcattatgtgccaagaaggttgaagtccaggactataagttcttctgccttgc

SEQ ID NO: 91188 - DNA, 792 bp, Eucalyptus grandis
  Intron number 2 from transcript Egrandis_v1_0.008762m (loc us Egrandis_v1_0.008762m.g) derived from phytozome v7.0 (c hr-ID scaffold_4; pos 33256481 to 33257272 reverse strand)
tccgaccaagagactcacagcagcagaggttataggtatgatggctacatatctgttctttaacagtaaggcctgctgcgatatatgtttgttttttgcattcttataaagcgtaaatatagacattttggaaatactcagcataagtttcgaccgatagagttgggacttgttacgacatcccttgaatatgacatcagccgttacttgaaagaaaaaatatgtttgtcctttctacgatagtaaagtagaaaagttgaaattagatggcatcttatgaagaaaacgcaatttggttcagaaacttattattggaatggggcaggcgaagttttaaagatctttgcatgatactgtgagaataaatatcaggagtaatgctaagacttacagaaatttttgccttgtaaaagaggaagtttgctttccaattttgatcttttccatgcaaactttctatcgccaacagatgagtgcttctattttcgtgcttttcaaatttttgtataaattgagaagtctttgaacttaatatatcaaatgcttgtttcctcaaaggaattcttgaactgaatagagaaaattttaaaattaataggaaaatatttgggcgtactaaatgcttctttcctttgattctccaatattgtcatgcattgactgaactccaaatatccattcatttttatcaatttattagagtctattagtttaatgactgttacattcttcggacactcagagtagaggtaattcttttctcgactgtggtattttacagatcatccctgg

SEQ ID NO: 91189 - DNA, 934 bp, Eucalyptus grandis
  Intron number 1 from transcript Egrandis_v1_0.000759m (loc us Egrandis_v1_0.000759m.g) derived from phytozome v7.0 (c hr-ID scaffold_9; pos 38428547 to 38429480 reverse strand)
ctgatcttcggcgacaggttttaatttcgctgtttctctcggtctctctctttctttttttcgtctgttctttcgctggattgcgttctccctcgatattcagtcttacttcgacagagattatggactcgtatggactcgtctccatcgtgctttttcagaccgagaaaataagctgattggttgagggtttcggactttgttagatttttgactcgtttctctgcttcgtaatattttccggacgtatcatatcgagacctgaataattgatattgaatcgtcgtcgtcggtggctgcagatggataaagtcggtttttttttttggtgttctgttctctgttcttgtcacgtatggggctagcataaataataccttctaattcgtcagcttttgtctcgtgagaaaagatcaaagtctgtctccagaggagtccttgctgtttttcttccgtgtatgcaaatttttaactctagcattcatcggtaatcaatcaagtctaacgctggtgtgtctcgttggttgttttttttttttttttgcctaaagcagctgttaattcctggggattttccccttgcaacgtttgtttttcctggttacggtaatagaatcattatttaaccggttttacatgtaacattgcagaattctaccaaatttagtcttcccttttctggactgagttttctgcattctgtagatgaatagtcgagtatatgaaaagccttcattatatttgctggtctgtttgagcattcctcatcctctccgttgctctatgtaccgacatgtattatttacacgtgggatttccataattaagctggttgttctgcaagttttgtggatcttagttactttgatcatgtgtggatgcgaccttggctcaacctaccgttcgcctttctgttttctttttcagcaattct

SEQ ID NO: 91190 - DNA, 829 bp, Eucalyptus grandis
  Intron number 2 from transcript Egrandis_v1_0.048963m (loc us Egrandis_v1_0.048963m.g) derived from phytozome v7.0 (c hr-ID scaffold_11; pos 41403789 to 41404617 reverse strand )
cttgggaacaggttttctctccctctttcctttctttccctctttccctcgatcctttctttcccctttttcctttattttctccctttttcttggcaatttgtattcaaatagcaaagatcgactggcctttcagatttacgtgtgttgagctctgtgagttcttacttcatctgctttttgtctagaaacagtagagccaatttcgatgaaaaaacatgtagcatcgccgtacccaccgattaaatcttcgggtctgctacctagaaaccattgaggcagattatgaaataactgcaaaagatcaaatgccgacatagacgactgagaccatgcaagcaggcacaattcttgtctaactcagtttacggtagagatataaatagtaaatctattaatttgcacattaactacgtacaccgtgagcgagattgtactatgtttgacaaaaaatataccctttttctcaaatttcgatgatcatagcttgaaaacctctcctggaatttttagtggaggaccccaataagcataataaaggttgattgtttttcattaaggttatattctttttcatgttaagcccgcttttttagattggcaaagattccccgcttgaaacatgtttgttttcacgtgtcttattcataaaatagacccctcgtgtttgtggttgtccttgtccttgtgcaataccctaagacaagatcaaagacaaagccttatgcatccaagctttgatttgttcccacccatcgtgaatcgaatgcatataaacagtaacgatacacctgacgtgaccctaatgtcactggtcctttttcttcag

SEQ ID NO: 91191 - DNA, 972 bp, Eucalyptus grandis
  Intron number 1 from transcript Egrandis_v1_0.044249m (loc us Egrandis_v1_0.044249m.g) derived from phytozome v7.0 (c hr-ID scaffold_9; pos 18456638 to 18457609 reverse strand)
ggcaataactcggtgttgatgatcgttaggaacagtcgttaccatctttatggatgactttgtttgatgcatgttgccaaataatcatgtcaatatttgaaactcaaactggcttttgcaaaccaaaattagaaaggagtaattagatttttcacttgggaccaatctatccttttgacacaaaaataagaaacaatatgtttttctagatttttaatatgaaggggtatccgatacgttaagcgtttccattttttgaagttatcagaattaatagatttacatgggaaatcacaagttcaaccatttagaagaaatgataatgctcgagcaaatcttatctggctgcttcaaaaaatcaacaggtcaaatttatatgacatgtacaatcatcccattgttactgcggccaagtcatggttgattagtgttacctattgcaaaagtcattttcaatcaaacaagtgacaaacattgtaccagtggataaatctaccccaagataaaagtctattcttagggtcatcgtataaaccatgaatgtgaaaaagaaaattacacaagtcaatcctttagatgtgggggtcattccaaagtatgtgtcacgatatgacttggtcaagtttattggtacaaaatgaagcaattaatgtgaatttgacttaatatttttcgaatccaccgcccataattcacatgtcctttccattctaagtttgtcactaaattcatgatggctccatgccatgtggaaaggaagaaaagtacaggatggtggttgatgagtccattttaggaatgctcttagtctgaacaccgagagagagccatcggtagctaaagtaaggcctccttctataagtaccacttagatgggtactcttcatcatcaacaagaactcgaggttctgcaaaacttataatcctttgaaaccctcattgtttggtttattctgttttatcaggaaaaga

SEQ ID NO: 91192 - DNA, 756 bp, Eucalyptus grandis
  Intron number 2 from transcript Egrandis_v1_0.033624m (loc us Egrandis_v1_0.033624m.g) derived from phytozome v7.0 (c hr-ID scaffold_6; pos 8612893 to 8613648 reverse strand)
gaggtttttcgtaaagatccatatcgatcacctgtgtaattgcctcctctgtgggcatttgccatttcattccgtcagtgatatttatgtatgcatgatgaagtggctatatcttccaattggcttgattttgatcatctggaaactgaagttccctcaattgggggaactcttgttttcatagctagcctgactgaatatggtggcccgttaagaaacgtgcttttcgaagaggaaatttttgtatttctacaaagactccttgtatttgttattgacttccttgttaagtctctgctacttgtaacttgagattttcgagaaaagataaatatgaagctgagatgtgcacagggttcaaatctttgttatgcttggatcctgctatgtgagtcaattatgatagcaatggctaaaagcaaagcaattagtcagaaacttctctagtctagttgtggggaaacatctagggctttatggatgataaaacaaataaaagttgagtttaatagatgaaaagcaggaatgcattacagaatcaactcttaatatgtgcccagaattgactgatatgatgaagtgcatatgcaccatctgggttctagggatttagtgatgtcattcgatctttaatgtgcatgtagatgcattgatatatctgagcaattttcttttttagtggaagcgatgactttggtgtattcaatgtccttgtgatggctcacctgctgcaaattgcttgtttgtgatagcaac

SEQ ID NO: 91193 - DNA, 826 bp, Eucalyptus grandis
  Intron number 1 from transcript Egrandis_v1_0.012549m (loc us Egrandis_v1_0.012549m.g) derived from phytozome v7.0 (c hr-ID scaffold_11; pos 16489509 to 16490334 reverse strand )
ttcggcgcttccggcttttctcgtctcgtaccaaggtgggtcggtttcggtggttgcccattctctgccacgcacccccatttcggaatttctcctctctctctctctctcgctctctgccgaccgccctgaggtattcgcagctactctctctttctctctctctctacagtgtacgaggtggggggttgccattacttcttgtcgcttccgttactccatttccgtgctgcatctaaatttgtttctgcatctgtggtcttgactttccttctctttctgtcggcgctctctcttgtttttgccatttttccaatcaattacgcgactcctgaatttttcgcctttcctgtgaatctctgacaccgttggacttcgcgtgtgtatgaatttctggggtgcaaatctctgccctccctctctttgaacccgagcaattcctatgatttgtgagtgttctttttatttgttgagaatttgctttgggtatgcatccgccaattcaaagatccaaactttctccaataaaactggacaagatcggctctgggatcctgcacatcacttctacttcggaagaccactgaataacttccatatcgagaggcataaaaagggttggaaaagatattgttgtccaccaattcaaagataaagactttctccaatcttgcttgtcagttctacttcaaaaaaccactgaatcacctccaaattgaggggctcaaaaagggctggaaaaggaaacgctgtcctgtgatctagccctgaattatgattgcctgactgtcagtgttataatttgcagtgatttagttcgcatcag

SEQ ID NO: 91194 - DNA, 681 bp, Eucalyptus grandis
  Intron number 2 from transcript Egrandis_v1_0.002660m (loc us Egrandis_v1_0.002660m.g) derived from phytozome v7.0 (c hr-ID scaffold_4; pos 23587541 to 23588221)
cccttcaatctagtatcaaatcaagcagtcaggttaatggtaagggttgagctgctacttattcgataaaatctggatttttttatgactaacgctatccattgtaggttgacttttctctctttctggttcacaattagattttttgtcatctgatgtgatgcatggagaaggtaatcttcttgcacatctagtgattgtaggattcaaagtatcttatcagcaggtatgctcacttcattcgtagtgccttttcaatttgctttgcatgtgtttcctcatgcttgagactttggggtcctaatgtgggtttggagtatgaaccattctactttaaatttgcatttgcatgaattgatgttcaggtatcgcaacactagtgttgcataacaggcaataagttactaaattataatatttgattcatgacctgtcatttattgtactacagtgccccctgattgagtatgacttcagattaactgatgtgttggaggatctccatgatggggtgcgactctgtagggctatccagcttttgaagcaagactcatcaattctattggtatgtttaatgaaataagtttgagtggcagctgactatagagcctctcttctacagttttaatgatattttagtgattatgctatgtgcagaaattggtagttcctgcggacact

SEQ ID NO: 91195 - DNA, 804 bp, Eucalyptus grandis
  Intron number 1 from transcript Egrandis_v1_0.025547m (loc us Egrandis_v1_0.025547m.g) derived from phytozome v7.0 (c hr-ID scaffold_9; pos 36722386 to 36723189 reverse strand)
gtcttttggctggctctctcagtgccgttgttcaggtaatctttactaatgtgatcgatgcctatctattttggtagtttgcgttgctcaaggtttgtctccgtttgagaatcactgcctctctctaccctttctagatctttccctctaggcctaggtaattccagaataatttagtctttcttcgtccaagcaagttgtactgtaataataaattgccagttatacatgtattggaattgtctggagaaatatgaaagtcggttagttgacccactttaccccctataaataggagctattgcttcctttgtggatagtgttgtgtcgtagtgggtggcgtgaggagagagtctagtgctggaaaatagtggtccccattgtgtaggcataggagtctacaaaagagattttgggtagaaaagcaggagcgggtcacaaatgtgcgagtgcgagacaagtgtgtgcccttgtaataaatatcttatagtaaaggtattttgctagttttctaaatagcaagagtcggattttctcaacaaaagtaatataagagctttggctatgaggctcaacgatttcttgatagaatgcttgttaaattgggttaagatgttatagtttcttcattgttggataaaatttgagtaggttggtgaactgttgagtaatgctctcatcatcatatctatgatagtgtgggagtttcacatcgattatctcatttgattgtagtattttcttgataaatattattccatgggcttggtttcaaatagattgcaatatcggcatccaacactg

SEQ ID NO: 91196 - DNA, 936 bp, Eucalyptus grandis
  Intron number 1 from transcript Egrandis_v1_0.004876m (loc us Egrandis_v1_0.004876m.g) derived from phytozome v7.0 (c hr-ID scaffold_9; pos 26419327 to 26420262)
gccttggtaaaaaggtgttctagtccgtggaatttgcgataatcagagaaaatgaccacgtccctctcttgtgtaaatcgttcggtttcgcgacctacaaatgtaaaatattacggacccaaaaccaggccacgagacccgcattttttttcacagcatagtccttttctaatttaatttttgaatttcttaataaaatgaccttttcttccttccattttcaagaaaaatgagttttgattttgtctcttttccctccttaccacaataaaaaagcactacagcaatgatgctatacttgcactcttgacaataagttctttaaaaatcaactatttgtccagaagtgttctagaaatgtttgtgatcgagtaaatagctctataaattaatggatcggatcgaattgcaaaatggagatggcactaacaaaatctctttagtgtccgaattgatatagcaaaattcgtactccctggtccgcaccatataccaatgtcttgagaagaagcaaaagagacaagggcatagttatactcacactttgaatcttgggatagatggatcttgcctctgccattggaaattatgccccagggtaagaattttatcttaacaaggagctgggtcacagcaaggtggaattttccactttctttatcatccccaagaatcttgtcagccccctaaaaaacaacttttcttcaacaccactttgtgtagagatccaaaaatattcaacctctgtaactgagcaagctctttatttaattcggtgccatctcgtttcctaattataagtactttggtcatggacaaggaagctctgctgatcactgaacaccagttgagacttctggtcttgtctatctgctttctgccctcctttcttcttggggaggacttgcttagctgcgaaacttcacttccagaggc

SEQ ID NO: 91197 - DNA, 756 bp, Eucalyptus grandis
  Intron number 1 from transcript Egrandis_v1_0.012140m (loc us Egrandis_v1_0.012140m.g) derived from phytozome v7.0 (c hr-ID scaffold_9; pos 37542903 to 37543658 reverse strand)
agtcttctcccaaaatcccgcatttctccaagaaagtaagcttaaagttcctttctttttttcccggggtcaactttttgacaaaaaagaaaggaactttaagtttgtgctacgaatctcgtgtttaatttgttggccttctggtcaaaaaatggcgattacgacttacttagtgcttgttgcttgttgtgtttttcaagaaaggttgaaacttggctgctgaagcttggtttcgcagtccaaaatttggtcaccggtcttggggtcagggctgtttatgattttattagcatcggtagaactgattattacttggaaagttagaatttggccgaacatggatggatttaggactggagacaatagatatctggaaggaattacacggaagtcgtgctaacatgaatacagcgattccgatgcaaagtgcaagttgagttctgttggcacgacttaaagctaaacataagttattgacatgatttaccaacctgaacttttgacatgatttggttttttgaacactggtttttaatgttgttctgctactatatgtacttgacgcgttaaggaatatcagatgtcaatgggccttggacttctattaccagtctagggatagtttaagcttttgtcatatttccaatttcttagaattaatttcaaatttcttctctaaggaaagtaattctgtgtttggcattgtccaaaacaattgtaggggagattgctgacgggagccactataggcctggt

SEQ ID NO: 91198 - DNA, 762 bp, Eucalyptus grandis
  Intron number 1 from transcript Egrandis_v1_0.023649m (loc us Egrandis_v1_0.023649m.g) derived from phytozome v7.0 (c hr-ID scaffold_11; pos 3567708 to 3568469)
cgaaagcgaagagatcggctcctcccaaacgcttcgtaagtttctctttttcgccgtttttttccagtgattttgtgaatgtgttcgcgctgtactaggtctttgggaaatcgagcgaatgttaacgcttaatctgtcgctagatactgattcgagtgctcttaatttactgtagtagtatctggtttcgttggaatagttgcaagaggcgagaggaagtccgaatgcagcgacggaacgtcctctctttctttttattttgttcatatcttcgagataccgagaagaaatggattttgattttgaagttaggaattcttcgattgggacgaagagaactttcttgggtttttgaaaagattttgactttgctactgtaggcgattcgaggacttcatctgtgctttccgatgatgtatttgtcatctcttcaagttagatttgctgtttttcgtaatttatacggttgcagttatcgcttcgtctttgtggtgttcaagaaattcagacgcattctcaaaaggctcaatctttaaccttcaaagcgaaatggatggacctctcccagccatttccttgatacgaactcatagtcggtctcgtggaagcactttgtcttgaagaattggtcaatgcatttcttttatgagcgggctaggagagattgtttgttgcacttgtatactgtctatcaatttttctttctataattttgattcattttgcaatgtaaagatctgaaatttgtcaacaaggatcaca

SEQ ID NO: 91199 - DNA, 495 bp, Eucalyptus grandis
  Intron number 2 from transcript Egrandis_v1_0.008453m (loc us Egrandis_v1_0.008453m.g) derived from phytozome v7.0 (c hr-ID scaffold_4; pos 4243696 to 4244190 reverse strand)
gttggcctccgacggtgccgaattcgacgaggaaggtccgcggccctcgccctgtccgcttcttgtttttgatagtttgagctgggatggtcttgaaagagcagagttttccgggcaattctcaggggaaactgctcttgaaaaccaccttattttctgaacaaacttatgaagtgctttgagttggtttttcttagttcttcttgaaatgctgagattgtctgaacgagtgctgtcgattttgtgagtacctggtttagattgagatgggattatcggagaaacagttcttcattctgttgtaaaatgcttttccttggaccttcttcagaattggtttcaaatttgttggaacaagtagaaccggttcgaaaataatttatatttttttcttgtggaaaagaatcgtgcttttgttcttaaaaatcagcacttgcactgatttgaagctaaacttcagttgcagctaccagggtagaaaccacattaatcaaa

SEQ ID NO: 91200 - DNA, 1018 bp, Eucalyptus grandis
  Intron number 3 from transcript Egrandis_v1_0.014578m (loc us Egrandis_v1_0.014578m.g) derived from phytozome v7.0 (c hr-ID scaffold_9; pos 25362581 to 25363598 reverse strand)
gagacttcaaggcatcgaacatcctgctggacggagtaagtgagatacaaccacagttcatatttttcgcaagggcatattgtttatgtacttctttgcccctgtcatgaattcttcgctgggccattgtcctgataaaattatcagataaaacaagaagaaaagtcagtacttttgtatagagatgggcatggtttcaaagtagaacttggattctgagaactagaccagtgttaacttgtcaggttctaagtttcaaggtatacatgtccaaattccaaaaattggaaaacctgtatcgataagtaggttctaagttttaagttggtggaaccgaaatctagaatctagaattagcttttgtgtttttcttgatcaatgccttctcacgtacctgtagtattctatagcgtttgatgataaatatataatcagaaaccattagttcgaactttcattttatgatttatattttttactttgttaatgtttcatttttttcatgtatctaaatataaattataattagtaaataccatcgaccgcggtggctccgctgaataaggccttgctgatcctcagcccagaggtgaagggttcaaaacccaggggaggcgctaggtgtattaagtgtgactcaggggtggtgggttctcctgcttaagtgtcacctgggggtttacgacgcggttgtcggctgcaagccggttcctctagcacccaaaagaaatattataattagtaaattgtaacagcaaattgtaattactaaatgtgataatttaccagaatcgtttaattaattataaggcaaaatcaaaccgactttggaacttgtgatatgatagattttaggtatgcaaggtaaaattcgggttctagaaaatgagaaacctatttcaacgagtaagttttagttttcgtatagatttatgattttttggaatcactcgcccttacttttgtatagacggtcaaatggaacaattctaacttatgctgcttcctcagttttaca

SEQ ID NO: 91201 - DNA, 576 bp, Eucalyptus grandis
  Intron number 1 from transcript Egrandis_v1_0.039891m (loc us Egrandis_v1_0.039891m.g) derived from phytozome v7.0 (c hr-ID scaffold_11; pos 27855826 to 27856401 reverse strand )
cgccgcactcgcctcgtgctcaaggaggcggtccgtactgaaactcaatttgctcttcgaatttttagtatttgtgggaaatgtgtctatagctccttgtcttcgcgctgtgtgaaatgtcgatgggactgaggctttggatatagtgttcagcttgaatggcggttatatgttacttgcgacgttgggttttatgcaaatgatgtttagctttgtaggttacgtggtctctagctcttcaaataattactttcttttaaccatttattaagggtgttttgttgagtgttgattcagtttttctgcttatagtattgatgtacagaattgtttgcctgtattctgtattatgtcacagcatttgactgagattagaggtgaactctcaggaggttgagtattggtgtatatgtctggactgtgtgaacagtctgtgatagagagttgaaagaccccacattactttgtttgaatctcaactatatgctctgagtcaactgtagtgttgaaaattcgttgtttggattttttttactcgttgcattttcttttgacttgtggtaatgattcaggagc

SEQ ID NO: 91202 - DNA, 678 bp, Eucalyptus grandis
  Intron number 1 from transcript Egrandis_v1_0.038159m (loc us Egrandis_v1_0.038159m.g) derived from phytozome v7.0 (c hr-ID scaffold_4; pos 2234319 to 2234996 reverse strand)
tatagtatatttgataggtaaagtggaaggaaattgcaccaagcacttgtaactaactcccactaaggattatcataagagctcctcccaacatataatatgatgttccgtttaaactactactaatttgagcaggcccatcactgtcggctcaccacgctatagtgaaagtacaattaggataattttatgtcatgacacattcaaatatactaacaaacatattaagatttctcaaggccaacaagcaattaggaagttttgagcttgtgaccaaggtggctcgagatgtccaaaacaactagaaagtaagctttactcaaaatggtgataataaaaccttgatatgtctttcatatatatatatatatattgcatttcttcatatatgcaattggatccttcaaattgtgtcacttctgccctctatcactgtacttaatttcacctatttgtttttttttttcacctatttgttcatatgagaatataatgaaattttgctagcataacagttcttgaatactgtgagaataacagtctattataaaccataaattcttaaagaagtgggtctcataataatttataattatttatgagttgattttttatcgtccaaaatataccgttattctcacagtattaaagactatcacgcaatcatttcccaatata

SEQ ID NO: 91203 - DNA, 996 bp, Eucalyptus grandis
  Intron number 2 from transcript Egrandis_v1_0.050144m (loc us Egrandis_v1_0.050144m.g) derived from phytozome v7.0 (c hr-ID scaffold_9; pos 23093127 to 23094122 reverse strand)
tagttttccagttggtcagagcttccgtcttcaaggtaaccccttttgtttttgtttgatgaatacgacagaatagaaattatctagactggtgctagttttggatatgtgataaagcaaagcaagattcttttgatttattttggtgataatggattctttgatctgtaataaatatttaaaaaaaacaaagggtttgaaatgccattctacctgagaaagaaatggatggtagttcactgtaagatgtgatagctaagagagtgctgctgaattggggttatttctaatttacttatttgaaatttcatacaataagtcatacgtcatcactttcatgcaaactttcaagatggagtacttctcttgctagggaaactaaaggaggcagttgatggtcctgaatgcttttctaaatgctttgagatcagcacaaccaccctatgagatctgtagcagttagcaaacagagcctagtattgcaaatttaaatcagtgtgttactagcactgcctagctgtgattgtggaaggcaggaagaggaaagagtaattttagtgaggaatagcccggtgataggattggatattagtattcaggatcattgcccacttatttggagcagcaggattgagatttgtggcctgtctggtaaatttcattaaggtctgggactgtttctgcatgatatagtatcgcataatttccacaatatgctggtagcatgtgtataagcttgagtcaaaatcaagaagatgatattggggatgtaaacaattaccaccgtgaccctaataatgtgacaaatcaaaagaaactgagagaagagataacaggcttgtctttttcttatttttccagatttctgttaacatttcttagccagatcatgctttgatgaccaagattaaagtttagtttcatagttgatcatatccgcttgtcattgatcttactgtaggtacacattgtgagagggaataattcccaaggggt

SEQ ID NO: 91204 - DNA, 925 bp, Eucalyptus grandis
  Intron number 1 from transcript Egrandis_v1_0.047548m (loc us Egrandis_v1_0.047548m.g) derived from phytozome v7.0 (c hr-ID scaffold_4; pos 38677334 to 38678258 reverse strand)
ctcaagatcaacttcgagaattacgggacggtacgttggggttcagggttgataatggattttatgaagtggtgactattgtcaaagtgcgtacgtcaatgaacacgtatgtcttgaactcaagactttccgctctaatattatatgaggttttcattagatgaccgtcaaatgttctaaaaatttaaatgattagattcaaggcatgattttatatttaaatattctatcacatctcttcgaaaatacggagaggcgtgcattgcaaatatttgataatggctggaacatgtttaccactaaaacgacatcaattcatcgattcttcccattcagtgttgatgggccagtgaccggttgtccattcgcgatgctggtggtcctatgttttgcatggcagcgtgggcgatttagttcttttaatgggctgggctggcaggtcccctttagagcccgtggccacggtgaaatgtcggcaccaccgatgtttgtggcatgttggacaggtagctagttgtggttgctgtttgttagctaataccactgacgttagccaagcagaaactagacagtcaattagtgttcaatttactagtttaaaagaatatgagattacactggttaatggggttctaagattttgttgatttcattcacgcaagaaatctacttaatagttatacttttaaatctggaattgtatgacaaaaaaaaaacagaatctggaattgtcataacaaggtgaagtattcctggatatcatttctggatattaaaatgagctgtgagagagacggatgataaatagctggttagtcatggagatttcagtgcagaagcccaagtttgaggattgcatgatgtgacttaaaagttaaaactgtgcgcagggacagtacaacaacagccttctaaaagatctatt

SEQ ID NO: 91205 - DNA, 693 bp, Eucalyptus grandis
  Intron number 2 from transcript Egrandis_v1_0.020763m (loc us Egrandis_v1_0.020763m.g) derived from phytozome v7.0 (c hr-ID scaffold_9; pos 27319829 to 27320521 reverse strand)
ttcacttgactgggccatctggttcatctgctgaggttagtccgttagttcctggatactcttcttttttcgttctctctttttggatttttttttttttaatgagattgattggaggggttaaaatgatatgtagacatcgttctggggaaagttttgtattatatccccatttattttcgttgtttgaggtcttaaatcttaggaaagatagggggcggaattgctgtatgaataaataacttgttttttatgatttgagttttgcttggttcgctgtaattaatgccaaagtagatgtgtgaaacggtatgcaaatacatgattagttccgtatgatgttcccaagaacatctgtatgagtcgtgtatgtgttgtctatggaagcaatctgtcggatctggaaggtcgtctaagtttttagtgatggatctgaagatggttatgtcatgtttgaactttgaccgaagcatctggctctcagataaatgagtttctcatgttggatcagttgtctccacttcaggaagactgggaccttttgactagaagaatgagctttgctaatattgcaaactacgacttttccccatagagtcttcagaaagctgttgttagttgtggcctgtcacctgctgattgaaattaatgatttcaggtgcttctctacggggggcaggttgtttcttggaa

SEQ ID NO: 91206 - DNA, 863 bp, Eucalyptus grandis
  Intron number 1 from transcript Egrandis_v1_0.039378m (loc us Egrandis_v1_0.039378m.g) derived from phytozome v7.0 (c hr-ID scaffold_39; pos 27573 to 28435)
ggctccaatcaaggaggtaagatttaaagaaggcacatctcttatgaataatcacgtgttatccaagggtcaattccacaaattctcctttctttcttttggaaaagttaatatccttcctcggattcaggattttcctttaaatataagaggaatttataggcacctaaataccagaaacttctgcccctaaaatcttaaactaatagtatcttaacaaccaatcatgcttaacattggatatactttttcaactaatctgttaagaatatagttacaatatatatccatatcctgattttttttagtctaaaaggtttatggcttctaagataatttctccccttgtaaaaatatgtctctatggcaattcttgttatatttcttcatttggtcacgttcacacaaacacaactgctttgcacaaaatagtatttgaattatcatcgataggctagttattttagaaacaaaagttgaccccactacttcaaaatacatgcattgctttattgtatagttctatgagggcgaactaagtgttatttttgtgagtggcaaccggttgatatatatttcagtcaaattggaaggtacggcctaatgcaataagaaaatatagttagcaattgtgcattactaacaatctttgtacaatgggtatgttaaaaaaacactactatttaagaaacatttaaataaaacaaacgtgaattagcggagcatcatactaatgatagcatgcaaaccgagctatgaaacatttatatattatttttataatttttttaaaaggatggtgaaaaattaagtgccacataatcttagaggtatcctctctttctttctttcagacggcaaag

SEQ ID NO: 91207 - DNA, 976 bp, Eucalyptus grandis
  Intron number 1 from transcript Egrandis_v1_0.043446m (loc us Egrandis_v1_0.043446m.g) derived from phytozome v7.0 (c hr-ID scaffold_6; pos 13262795 to 13263770)
gataaaggcttggtatggaattatctctcttgattgctagccatttgtagttgcaatgtctgtcagtttcataatctcgatccttagtctcgaagaaaatgatcatatgcttatgggtttggcaagttgcttctgttatggtagctaaggttctattatcagtagcacgtttttttcattgtttatggtggttgtatggttatagggttatgacttaagccgagtctcaaagtccaaactaagtgggttggtttcactgtcaaataactgccttaagcattcaacgtgcacttggttttgcatctttaagagtttagatggcgctatttagcttacttgagacttaactagtactctgcctcttagatttcatactaatggtgtgctgctataaggggacaggcagctccaaacctttttctttttttggagctgcctgtttcctacctctttcagactgctgcatctttattttatgctagacagagcgtaataattgtccattgggtgtttgttggtcaaaactggttaccatagaatttcacacaaatgtgcctggtatgctacatatataatagactttttaagtgatgggcataatttattctcttttacgagggatagtaccagatttttatcctttggcaaaatatccttctgagttatgagaatgtgttgaagcccacggggaaaaaattatgctgcatgatttgtcagactttagtgtgcactatccaagattgatatttctagtccgtagtgtaaaggctttctttgaggttgaaaaagtgaatcctataaaacaggcggcacttgttggcagaaaataggcttgttgtaggtaggcctatatcaacagctttcagttagatcttgatttccattatcttatgctctaccttacagatgggcactcaagttttttgacattgatgtggcaggtggagcaattattgatcaattgtaggactgactt

SEQ ID NO: 91208 - DNA, 899 bp, Eucalyptus grandis
  Intron number 1 from transcript Egrandis_v1_0.036171m (loc us Egrandis_v1_0.036171m.g) derived from phytozome v7.0 (c hr-ID scaffold_4; pos 41602367 to 41603265 reverse strand)
aaggtgatccgagtgcaaatctagattctgttctagtttatgtggtagtgattgtacttgatgttacgattatattatggttgtttatgtgcactaatatttttttcattggcatctaacttagtttggtcataagggatattaccatcatccttaaaaagaaatggatggttaagttggagcaattttgaggcagttttcttagaaatgactttaaactttacattgtgaaagaactttcctgccgataatttttaatgcttgagttgactttcgagagtcgccaatagctgaacaacatgatgcctcatacttggaagtctgaattatcttgtttatgcttcagatttctactcaacctgtaagtatcatcctatctttcagtaaaaagtctccaaaaatctgtgtagttcagatgttgaatgttgtgaggcaaattcgttgcaaaattgtaaacactgtcgcatgattcacacgtcatttttgttctcgactgcttaaggcctgcttaattttagaaaatgcctttagtttccattttcatagaaacttttttcaatgttttgctaacaaaatatttgttcagtggaaataatatcattagggataaaaattgttagaatatgcttgggttacatcactttcaaaaaatatgcttattatttttttccaaatctccatgtttgcttttggaatgagaatactaaaaagtcatcttcagtttgtaattttgattctgagaatagttttccttttattcatcgactgctttcggagtgttaccaaactcattttctggtctgttttaattctcaaattgaaatcagaacggtcttttgagaatctttatcagccgaatgcctccttagattatcaatctctttccgtctgcagaaaaa

SEQ ID NO: 91209 - DNA, 706 bp, Eucalyptus grandis
  Intron number 3 from transcript Egrandis_v1_0.017178m (loc us Egrandis_v1_0.017178m.g) derived from phytozome v7.0 (c hr-ID scaffold_6; pos 21267341 to 21268046)
ggtggctactccaacgtcatcgtcgccgattaccggtaacctctcgccttctctctttccaatttttgttcgtttcttttttgtttttgttcgattgaaagacagagacggtacaatgcacgtgtaatcggaatctctatgaactattgttgtcggatttccatggaagagaatccaatgcacgcaattcatgtgagtttttgcgcttcgtactttatatgtcttcaccatctcgctgaactcagggagagtaaattgcacaaaaaaaaaaaaaaagacggacgcgaatggcattgaactcaaaaacaggggagcctatctttgaccatgttgattatgaactgccacttctgttctattcgtcacatgattaggtagacctaaatataagttgttttatcattttgattaaactaacttacgaaaaaaataataacagacctatgtacgggaactgtgaaaacgttggacagaaaagtcagttcaatctggtgacccgtttcgacccatgttcagcccttttaggctccgatttcatggaatggacgagattgagtaacaaagccatgctcgtcaatccagaggacaacataacacgatagaccgtttgatacgatctatctggttgaatagatctaaaacttagcccgctcgatgattgcactaacttgaaatcctttggtccgggtcgcttgcttgtgcagat

SEQ ID NO: 91210 - DNA, 911 bp, Eucalyptus grandis
  Intron number 4 from transcript Egrandis_v1_0.010279m (loc us Egrandis_v1_0.010279m.g) derived from phytozome v7.0 (c hr-ID scaffold_2721; pos 2322 to 3232 reverse strand)
agacaaaacatcgagttctgatcttctcccaggtatgttttagggccggtttggatagtttttggaagctgtagactattgtgccatgcttctggaaattgcatggtgccacaaacctattcatggtttaggttgtgtatttcattgcttttatctggtggtgaagatgagttggcctacaatgacgtaatgttttctttgttgtcaaggttgtagtgcgagtagtgctcagctttgttcttatctactgggagtggttcaaggcaaacgtcttgaagatatatgcatgtcaatatgagagggcatagagacttcatgcacaatcaaattaagttggtgctgtgtgcagtttttcctcctcccttttaaagcatattaaaaaattttataagcattgagagatggaaaaagtgcatagttcacctgtaaaaagaaagcatatgaatggcaacagattaggaaatcacattccctttttctttttcaatgaaatggtatttattaaaaatgtaccaaggagtaggcctaatttaatggcaggcggagtccaggagttgagaagaataataggcatagtggtcagtgtaacagtgggccagacctagcgtcgagcttatatgcaatcacatgtgcatgcttgtgcagattaagtaatttgcgaagatggagaatagactgcattaactgcttcaaatttgtcaagttccggctagaatactcgtttcttttctccctgcattgctgcagaatccttgtactgcttatcacgccaattgatgtggttgagggttccggaaattgacttgtagttgcattaagaaatcactgttagaattaattgaacacccattcagatatttacttataacataccgagagttttcttttctattaattgatgatctctgcag

SEQ ID NO: 91211 - DNA, 884 bp, Eucalyptus grandis
  Intron number 1 from transcript Egrandis_v1_0.045484m (loc us Egrandis_v1_0.045484m.g) derived from phytozome v7.0 (c hr-ID scaffold_792; pos 3213 to 4096)
tggttaagaataacgtatgtcttagtaaagaagttaattgcttatgaaaaactgagcatgcagttatgtgtatttagacttcattttcgaccaaaatgttcgctcatttttttacacaggacattgatgattttgcatgatttgagagaaatgaatggcattccaaaagaattaatttttacattacaactcccatgtaagtgggagagataatgattcatggaatttgccccttttgtataagataatatttatgtgccccatttttttgttggtacactcatgtttattattagttgaatttagatatatattccctattttgatatttagtacttactctgaatagttcaatcatgttgctaacttgttgctctggaaatatcaaggaacaaaaaatgttgtagcactcaaactcacaagacttggcgacaagcataacttcacgagtggtgaattttcaaggctacctagtctaaggttcctcgaattgaatgggggaaactttgtaggagacttcaaaaatcttctctctactttaacatggctctcttggcatcattgcccttcaaacctagatgccactggtttatgtctaagaaacttggccgttctcaagcttttagagagtgatattattgaagactggaatggctggggagcatgcatggtaaagtttcatataatgcattcgtttttttcctttatgtgtggatgcatttgttacattgagttttttttttttttggtaaagacatttgttacattgagttgacctttgctgatgccattattttcctcaataattggttttttttttaaaggtaaatgataacctgaaagttatagatctggcaagctgcaattattaaagagaacgcttg

SEQ ID NO: 91212 - DNA, 1012 bp, Eucalyptus grandis
  Intron number 1 from transcript Egrandis_v1_0.028217m (loc us Egrandis_v1_0.027454m.g) derived from phytozome v7.0 (c hr-ID scaffold_4; pos 40229393 to 40230404)
tggtttccacggttgatcgcgcgatcggcgatcgggtagagagtggttgggatttgagagattcttgcatgtttgagtcggtcaccccgttttagcgatgggatttgtgaaaaaggacgcgtcttttgggctcgctttgcggatcttgaagattaggtccgtggttggagagagagagagagagagagagagagagagagagagagatctgatctgatctgccctgtatgaggggcattccgcattccttgagtttatttaggtgcatgacaaagggatgttgggtagcgtaatggagttgacctggtgtggtggcgaatgcttgttatgtgatttcgggttttcttttcgactggttggagtttcgcatatcattgcggttatcgactgagtccagttttaatggacttgtgatattgttcttacgaattggggagtgagaggacgggtgttttacatgagaatgtctgggacgttgttttatgaaaaggggccggtgattgaggtagattttccgatccgtgaaagagaggctagctgtgtgaagttctctcttttttgagtatcgatcgtgctgggataggttagcctttgtcgacgagctgttctgagtttttgggtcagcatattatttggttgatttacttcatatgattctagcttaatttttcgatgaagttgtgtctggctgatcacatgatgatatgcactgaccatattgtggatgttgtcgtgggtcattgatcattgattttagtagcattacatcagtactcagcttttgtggatggcccagctatttaattgtttcatattatatctcgtctgctttatcttttaatctgtattagtgctaaagtaatctattgggggatttcgattgttaaactgccaatagtttgccaatgttctgcttgggtgatattttttgtgtttgtaattcctactttctcttaagagattatgttttttctctcctggcagtgaagcaaaccttgttttttcttaaaca

SEQ ID NO: 91213 - DNA, 633 bp, Eucalyptus grandis
  Intron number 1 from transcript Egrandis_v1_0.029667m (loc us Egrandis_v1_0.029667m.g) derived from phytozome v7.0 (c hr-ID scaffold_6; pos 21166623 to 21167255)
aggtcgaccaggccacgcttttcgatctgatcctggtcagtgcccgtttcgtgggagattttgggcggtgatgctggtttgccttgtctcggcgttgctcgggcgagggcgagggttttgatatcgattttgctgattaatatgtgtttgtgcgtgtagtatcgagtaggttcttcaacagagtttagggtttgaggagatgttgtagtagtaacgaatgattgagatctgctgcgtcgattttgttagaagttgaagtgttcgtgttgcggtgattcttaggtgtaagatattattttttcttgttttataaattttgaagggcgaaaaactaaatagcggatcgcgtagttgatgctcccgagtcctgaacttgtttggatgattggcaattctttgtttcgcgtggcttttgaagaatgaagtgcggtctggtgctcatccctgttgcgttttttattcgatgacgacttatcactcgtgggttttgcaccatcatagataattcatgagcttgtgaagttgatttgagtcttgtctcgttgaggattgcagtacttatcattttctgtgtggcattttacttgatgtgtgataggcagcaaattatctgaacatcaagggcttgctgga

SEQ ID NO: 91214 - DNA, 642 bp, Eucalyptus grandis
  Intron number 2 from transcript Egrandis_v1_0.050783m (loc us Egrandis_v1_0.050783m.g) derived from phytozome v7.0 (c hr-ID scaffold_9; pos 11789065 to 11789706)
gactggggattttccgcctatcctcttgttcctgggtaatcatctttgctctttcctaatcacccttctccattgcccctttttcttttcctggtgatttcaaggtttcgcgaaatagaaagactcaatcataatgagctgatgacaaaaaatttggacactttcgcgactgcccaatcgagctccaacaatggcgccatcaggtcacattagtccacccagcgatgcttatggaacaagtgttaggggccaactatccaatgaaaaccccctatcgcctttcatttagatttttgttcgattgatcgacttatttcaagttacgattagaataagcaaaaccacgagggaggaactagttcctcttgctgagacggagttgatggtgtttcttcattaccctattcaacagcgagatcactaatgagtccagcttctgtagttcgtcttcaactgttaatgaagttgatgcccttagacgtgcaacgggctttacttagacataatgcgtatcgatcacaactgtcgtacagatatcgaacgcatcaattttaagcttttgattttgtttgtactttatatgtatcacaacctgtttcatatgcaggcacgagattgtgggcgaagtcgtggaggtcggaa

SEQ ID NO: 91215 - DNA, 540 bp, Eucalyptus grandis
  Intron number 1 from transcript Egrandis_v1_0.002472m (loc us Egrandis_v1_0.002472m.g) derived from phytozome v7.0 (c hr-ID scaffold_9; pos 11667701 to 11668240)
ctggtgattatccatttgtttatcaatcagcacgatttggaaattttagttaccgcatcaataattttcatcctggagactatttcattgaccttcatttcgtggaaatcatatttaccaatggacccaagggcatgagggttttcaatgtattcatgcaggaagataaggtaagaacttttgcgcccaccatctgttttaaccttatttttttcttcctgagaaatgcatttgaagtatatgcttttccttaattgcaggtgctttctgattttgacatcttcagtattgttggagccaataaggcattgcaactagttgattttagggtgtctgtaaaggaggacggcataattgcaataaaatttgaagggttaatggaagcccattggtaagtgggatttgcattagaaagtgccggagtgttaggtatattttctttgatctatctggacagtattgattttatttttgactatatcaacctcatagggttattcacggttataatttgcatccaggtactcagaggacttgtga

SEQ ID NO: 91216 - DNA, 825 bp, Eucalyptus grandis
  Intron number 3 from transcript Egrandis_v1_0.002849m (loc us Egrandis_v1_0.002849m.g) derived from phytozome v7.0 (c hr-ID scaffold_11; pos 32245900 to 32246724)
gtaaaacttacagaagcagaagaacgcaacttcaggtaactattctcttttacacattctttgattcataaatatattttttacttttctttcaacctttttgacgaaacttatcctttgacccttcaaatcattgatattgctttgtgaagggctggtcctgcatttctgccagagtactatgataaaattagtgggttcaacttatggaagtgtttatttgctgtgttgatgcctcttttagtttctgtcagtttcagtcttgaagcctagattacctagcaatgcttagtcgttgcttcttgatgttgagattgaactagaaacaagcttgttttcaatcacactgttggactgtaattgtaatctagtctagtctttagaagctcactggtctttttagctgtggatttgttggtggaattaacttcttcctcagaaaaaatattgtgaaaattttcttttcacttttttttatcctccaagcaaagcacaagttgctaagatgctgtgctgtcaagtttgggttccttttgaaatagacatctgctttgtcagaacctgatgatcatggtttctttcctcgcgggtgcttatgctagcgttttctcatatcagaggaaaattaatttttatttgtgatagtttactctgttggctgtgaatttttgtcttttcacttcgactatgaactttattcagttaacactaatgcaagatgtaagttcttgcttttgcttcactgttcagaaggtaaatttattgccgacagttgagggtatctaatgtcatcttttgtgcttggcagatacaagaagaaaatct

SEQ ID NO: 91217 - DNA, 937 bp, Eucalyptus grandis
  Intron number 1 from transcript Egrandis_v1_0.012765m (loc us Egrandis_v1_0.012765m.g) derived from phytozome v7.0 (c hr-ID scaffold_6; pos 44057370 to 44058306)
cccttcgcttctccacagtacgttgctcccggcgaatgattcgttggattcctgttgatcgctgccacctgtatttctcaattctatatctggaatgctagagatttggaggttttagaatgtgagaagtgtgtggattgcagttgacttttgattgagccccggctgcagatgctaattcgaaggttccaattgtttacgacaaacgcgtcgttcgcagtccgcatgtgttctccaatgcgcattcaatcagaatgcttttttattttcttattcctgtgatgtcatgctaccaaaactggcgaaagttatgttcttctcatctgccaagttatttcacgttccatagacatgagaaccttctgaagcggacctttcctttccatctactgtttctaatttaatcttaaattaaggaatgaagttgctggccattcgaaaattgagaatatctgtgtagcagtaggaggttgagcattaaagctttgaaaaacagttgaaagctttgaaattttggtttcctttgtgaaaagggagaatggtaaattatggcatgtgaaaaaggttatccaatcgttattgaatcgctcatagatgattgatccaatttccctactcttctttcaaattgttggaatgtgagaatctgcacatttatcctaaaggagcttattacattgtcaaactgattattgttgtacaagaacaaggtgggtatattgtgaaatagtttttgttcccctcacatcatttgagagacgcaaattatggccttgagtcattcctccttgggctcttcaatgcaaatgaagtgctcattatacttatcttttgcactccatagagcaatgatttactagcagtctaatatctcactgatatcaaactgcttcattctgcaggtctcatttcctctccaagcaagagaagttttatc

SEQ ID NO: 91218 - DNA, 847 bp, Eucalyptus grandis
  Intron number 2 from transcript Egrandis_v1_0.026074m (loc us Egrandis_v1_0.026074m.g) derived from phytozome v7.0 (c hr-ID scaffold_4; pos 18713604 to 18714450 reverse strand)
gcagttgccacgcgaggtatttctgctttttctctgtagtttctcgtgcaccaggtgttgcacatgggaatatagtaggtcgatacaagatacgtcgtatatgctagaagtactagtgtaattggtccactgctgtttattatggaaaattgcaagaaaaaagggggggtctttgctgttccggccaagactgaaccaacttgatttgatctgggcccattcatggcttttccggtcaagcctgaacttttttttagaaacttggcctatgaatattcaacctacaagtgaatacaggaatggacaaattgagacttgaaatccaaaacttgtaattggctgaaagcaggtctttactattgaaagtgcttacgaacttcactaaggctgtaaaaattatttcttctttttcgtgtggtgaaataatggtattgtgagttatctggaaaaaaaaaaggaaaataaaaggaacggacaactatttagttgtgattggtgcatggacttgcctttgaggcctattagataccagttgatttctcacagattaagttttattacgggcaatagttgatgtacaggcatcttttgctccccatattcttctaaattgataaaatagagcaagcatgttcttgtgaaacctcagttgtctcagtcacaaggagttttgcaggtagacagagtaagaatattagatcaatacatttgatagttccacttttgcctggaaattttgcacaataactgcacccctcttctcactcatgttcttcagtacatatcgttaaccatctctttttatttatcaggtattgaacgagagatagcatctcttcaattggag

SEQ ID NO: 91219 - DNA, 439 bp, Eucalyptus grandis
  Intron number 1 from transcript Egrandis_v1_0.026074m (loc us Egrandis_v1_0.026074m.g) derived from phytozome v7.0 (c hr-ID scaffold_4; pos 18714454 to 18714892 reverse strand)
cgtcaacatcttcaaaaagaaaacgtcccccaaaggtagcattttgaattttcccccttttctttccctctgctttgggctaggattattcttctattagggttaagggttttggccgatcgctcagttcctcaaaatggcacattcggaactgtccctgatttcttgttcgagaaattattcttcaaatgtctgttttttgtcaacttttttcaagtgcatttgttgatttttcatctgggctacgtgtaattagtaatttctctgctaggaactttgagtattttagactcccgggttatctcccttagcttgaagcttgtgtgtttttttggcctctctgctctcatttttcgtctgaatgttcaatgctatggtgacttccgcttctttgtctttgcgttctttaacagaggccctcaggaccagcaagagagaa

SEQ ID NO: 91220 - DNA, 847 bp, Eucalyptus grandis
  Intron number 1 from transcript Egrandis_v1_0.050867m (loc us Egrandis_v1_0.050867m.g) derived from phytozome v7.0 (c hr-ID scaffold_6; pos 23398515 to 23399361 reverse strand)
gtcctctatttgctttggtcttattgacactctttccccgttttatccctttgcaaaagaaggaatagtgttagacatattatcaaaaaggattgagattgagaagagtactcccttttcatccaaacgtgagcatgctcttcttttgacaaacatgatttgccattggacaatgttgctataccacaatgccaactttcactccaggtttttttcgccaaatcacactagtcacgagatttctattaattgttaaaagcgcaaggtaaaaacttgatatctttgcatggggagatcgccaagaataaatccaaaactgagccaacatatttagttgaacccacttttatttaaaagtttaaattaatgagttatgagtgagttatgggctaactaggatatattaattactccacactatacctatactccaatgttcgactttttagtttaatcacaacttacacgtacatctcaacaaaactagctagctcctagcaatatccatttctataacactcgaatccaaagtaatagtccaaccaaatcacacattttttggtttcgccatatgggcagcaaagaaacgttaactttgccatatgcttcgactgcagccaaaacatcttcgtccaaggaaaccacctcattactttccatgaacacacaacgaacaatgacttcctttacttattattatattttccatcattttcataacctaaccatcactaatacaaaacaaaagcaatagattgatgcattcgaaggttgtttcttgaagacggggtaattagttacgagcgaccaagccgctgagagttctctctagactcgacacgaccaa

SEQ ID NO: 91221 - DNA, 972 bp, Eucalyptus grandis
  Intron number 3 from transcript Egrandis_v1_0.022399m (loc us Egrandis_v1_0.022399m.g) derived from phytozome v7.0 (c hr-ID scaffold_9; pos 23174090 to 23175061)
ctactcttgtccaacagaggtctccagttgttaaggtattggaaatcgcgcgtggtttacgatttgtcttgtcttctgctttttctatcttctactttgtctatgtttagtttgttccattgatcgtctgaagtgaagatctatgggtagctctttttgccaatctaagatgcatgagctgtggccagttaagattggcattttctatattgctctgtgatactatgatacaggtgtagtttttattaatttgtaatatgctctgaatttgtaatatgcataaggcgtggccagttcagcctttccaacgtgaatatcctttcttttgttaacttttttgagattttggacaactgtagacatgatttgttttcctcaaagaagatagacagatgatcctttaattgatagagctcttaataatatggtttgactctatattttgactgaatagaatagttggttacaaatatgacgacttggtatagtggagagatcttcatggaggtaaatgcattgatagacgttgtgtattctgctggccttgatctctctcatgcaaatggctagcaccttcatgtactcagcttgcatgtacacgcacataaagggagaggatggttctcattgggaattgcgtaatgagtaaatttctttgtgtattaagatggtattcaacgagttctttgtttgtaatggacaagcttacaaacacctggttctcttctgcttcatgttttggatttcacctgaactttggacagggctggagtcattgtggcatcagccacaaaggagagaaaagaaaactcatgagctattatccatttccattttttgtttgtcataatcgaagcaattataggtgattcataggtgaccttggtttcacttcccccttttccttgattaacctgtcttgaatctcccatgtccatctgaatgttttggatgtggtcattcaaacaggga

SEQ ID NO: 91222 - DNA, 946 bp, Eucalyptus grandis
  Intron number 3 from transcript Egrandis_v1_0.019897m (loc us Egrandis_v1_0.019616m.g) derived from phytozome v7.0 (c hr-ID scaffold_4; pos 35322165 to 35323110)
gatttggagttggtatgtcgtagtctgtgatcctagagggaaaattaactcccatgtgttctacgaatacatttgttgaaatttgagttcactttggttgcattatgagatccatttgccttgaaaaaaggacaagttttatgtcatctatgtgacagtttctattgcatttggtaatgcctcgagttgttgcaaaatggtagatgtaacatgtgacataattattgcaacttgaggtcaatggtatgcagatgtttgtgtcagtgccatatcattgcaaacatctcggaggaggaatgattgtgaaaggctattgtagagggattctgcaatcttcaagtgcctcttttggcatacagaaagaaagcccttcctttaaatttgtacagatgattaaaagctaaaaagccgactgtctataggcattaggtaaaagtagtccttcacagagtatgttgcagtatctgagttgacatgagagaaatatcatgatgggattatatatcgtggattttgctgatcagctgactgtttcagaaagcatcactcaggtgctcttatactaagtcagaatattgttggcagtaattgcctctaatggagatcatggatgctttatctttacttgtaactgcatgaaattttatcatattcaataaatgcggatgagttggggcttttcttaaatagatggcttttgcaatagattggtagtcttttgatactctagcgatggatgttttgttttgtcctataatccaaatacctctatttcttctataggtttatctagaaactgaccatcaatattgtttcctctctctctctctctcactctctatgtaagctcacagtttacattgccctgccctccgtatttgaatactgaacaacgcatgctttcttcgcaggacttgcactgaagcctggagtgataaatcagata

SEQ ID NO: 91223 - DNA, 644 bp, Eucalyptus grandis
  Intron number 1 from transcript Egrandis_v1_0.000092m (loc us Egrandis_v1_0.000092m.g) derived from phytozome v7.0 (c hr-ID scaffold_6; pos 47002092 to 47002735 reverse strand)
cctcccgagcacgtcaggaagattattcggtgagctctcttccgggatttttttcgctcgataatttctttgttgaaattctgttgttataagccatgtattctattgacgatttgctcttgaaagttactattttggctggttttgcggtcacttattagttctctggcattgatggtgggtatgcgattttcgggggtttctgtggatgatgttttctgagttgtaggggttgaatttattgtacttttgcataagggttagcggaagggctcgtctccctgtccttctctgccgctttcatctcgttatttgcaataaggataattatgcttcctgatgcttacttgtgatatatgtcatttctaagacggccttcaactggagataattttgagtttcgctagaagaccatacgatggaaaagcttaatagtactattataaccttaggttttgacccgctggttttatattatagtgataactgttccggttagagtcatgttccgtttaagaatatctctggggagcttttctcatgttgaatcaagatattggcctaaaattgggctccggcttttgtttccagtaatcttattgaaaagcatattgctaagaagctttttgcatttggcagggacc

SEQ ID NO: 91224 - DNA, 586 bp, Eucalyptus grandis
  Intron number 3 from transcript Egrandis_v1_0.019950m (loc us Egrandis_v1_0.019950m.g) derived from phytozome v7.0 (c hr-ID scaffold_4; pos 41784937 to 41785522)
ttttgagcttgctctctttgtgaagcaaagttaaggttagtgaccttgtaaatctaagtggccttctatattgagtaagttaaagaccactttcagcactttattcggtttcatccatgagaatctgaggcactcatcaacaaattatagttaaacgattaacacattcccattgcgaccattactttccagtttataaccatcaagatcttaattacttgcacaatacatatcgatgacggctttatttcttctctggtcctttctcaatcgactttgcatctttactttgagggccttgccttgaatgtactctaaattacatcttttgagctctgagctttacgtggtagagaaatgggcagatataggcataaagaaaattgcggttctttcaatattgttcttctttctctgtgctgcactcacgtacttaatctgaatacaagttcatccattggaatgcaactttaattgtcaaaaaaagtagttgcttgaagccagaatgtttacctgtcaataatggagataaatacttccattagtacagcttaagcaatataccaggtgtgtttttcccaggaac

SEQ ID NO: 91225 - DNA, 846 bp, Eucalyptus grandis
  Intron number 1 from transcript Egrandis_v1_0.001987m (loc us Egrandis_v1_0.001987m.g) derived from phytozome v7.0 (c hr-ID scaffold_6; pos 28078114 to 28078959 reverse strand)
cttcactaccaccgcctaagtcccagagtgatcaggttggttaacacacaaatattcatttcccgttcagcctcccaagtatttaaagtgccaattattattcagtattctgcattgcaccgcaggcactgctcacttcttgtcttgaatatagtgcatttatctcatgtgtttgaaacaaaagcagctttccaattgttccagtagtcactgaaggaaccacactgctaaatgggaacttaaacagccactctaaagttaaatattcatgtcattgttcaaacttcagagttatatggctgctggttcagctggataatttctgttaatttttttggtactgaacatgaatataagacattcttggtccttgaatggaaacgtggataaatctatcagtcatttggctgacttgaattcctactgtttaccagcattttgaatgatattgggtctttctactagggttgtgattcaattcaagggcttatgttctcagatgttatctctccaacaaaagtacattgtcaaaacaatcaaaaagccattaaattttatgccgtctcatcattatagaataccctatactggaaaatgggtatagaagctcattgacaaacatctactccactcatcatgtgtttaatatccttcatccttctctttgcctttctgatcccttattttgaatttcacgtgctccaccttcagttatgattgactgggtgaagctacctcgctctctgctgtgtagtttaacaaaccattttcttgttttttggtgctttcatctaaacattattctgttttgtttttgacaacaggagacctacaaaaaaccaaatt

SEQ ID NO: 91226 - DNA, 657 bp, Eucalyptus grandis
  Intron number 1 from transcript Egrandis_v1_0.005089m (loc us Egrandis_v1_0.005089m.g) derived from phytozome v7.0 (c hr-ID scaffold_4; pos 15455387 to 15456043 reverse strand)
tcgatcagttcaatcaggttcggaatcggaaagttcagcttttgcatgctcacgatcggcgtctctcatttgaacaaaacatttgcattgcatttcgcttgtttccatgaaagcaaagtgcatcatgcttcttgacgcgttgactttcgctgacttcatcgaacctttccgaagttttcgacatagtaaaccatgagaatcctcgtctccactcgacgacatgcccgtcgatgcggatcggttcgatcagattgctgtttgagtgcaattcttgctggtttagctgcactttgtaattcatcatagcccattttgaagtgctagacagtgtccggaagagcccatggttatatcatggggctgattatgattttgttttcttgttcctttttgtattgtctctgcaacttgttctcagagaatgtgttttttacttcctttcgtcttgaattgtggaactttatgtttgagggtagtctgagctcaaaggagcgttttatttcaggtatcattcttggataacagctagcaattcatattgcattaagattgagtaggattttatggtgcgggtcttgacaaagtactaattcttgtcatcttctcctgaccgtagcttatggatttggttcttttttctaggttttgagaaatctg

SEQ ID NO: 91227 - DNA, 843 bp, Eucalyptus grandis
  Intron number 2 from transcript Egrandis_v1_0.001859m (loc us Egrandis_v1_0.001859m.g) derived from phytozome v7.0 (c hr-ID scaffold_9; pos 27457393 to 27458235)
tacaggtatctcctcttatcaaggcctgcatcgcagtctggtaaagcatttagatataattgaaccgttggtaaattaaatctgaaatgtggtccatctttggttgctgtccacaaagtcacttctagaatgtgctagatttatggtgaataattttattttaaatattgtggcttttccctctatgctagtctggcattatatcaaggtcatgggtcatccatacacacttgttgatcattcttatttttggcctaaataatgtgcatgcttttgttgtgtttaagcctcaagatgtaaacatttataacatttccactggaatgaaaaagaatagagttgaagaggtgctcaaacaagttttattcttgtagtttcccaaaaaaactgagaagaaaagaaggtgactggtctattcagtttattctgttgatcttttagagtttgtgcattgcctcttgaatctgatttcaaggggcattcatgatgattaacctgctttctcatctttcaatgattcagctaacgaatgatgatcatatttgatgtttgcctgtaggccaactgaaaagaactttttgcatgtagatgtttctctttctgatcatgctgttggtttaaggtcgagtcactagtcatctaggttgcacaccacacgatggattgtccttagctatttcatgtcatcaacaggaagtggagatgcttttgctttcgcttaaaggtgctagagttaggtttgatgctttgcaggtatcattttcatcttatatggatgttgctgaagtattttcttttcattttacagagtctctcccagtttaacctccctgtttcacttcc

SEQ ID NO: 91228 - DNA, 929 bp, Eucalyptus grandis
  Intron number 1 from transcript Egrandis_v1_0.004374m (loc us Egrandis_v1_0.004374m.g) derived from phytozome v7.0 (c hr-ID scaffold_4; pos 36929005 to 36929933)
caagtactgcatcctgcacgtccggcagcccggcggtgagtgtccccgtgagcttggaaaaagatgcttcttttcggaatttttcttctttttttttttttttttcattttttagcttcgtctccgtttctgctgttgggtctcttctgggtcgatcgaaatcgcgggatacggagttcgggtgtgatggacgaagtaaatttacgacgcgggcagtagctgttgaccttgacccccgagcctgacgaaaccgtctagcgaatttcattttccgaatgttgtattgcttgacgaagtgctcgctacgcataacggcatttggagatgtgcaggagttggagactgctgtaaaatggtctctcttgtagcgtacttgggctgcatttgatcattttggcgaataaaactttcttgcttacttggcaataaaaaagaaagtgaaagtaatgggatagtagatatatacgtggcagtttgtaggttgatctctctgcagtttcttgtggcagatgtctgctggtagtggggatgatcttgaattggcgaaaaactctgttcgattttcttgcatgtgaaagtgatcgctggttttttattatgtgcgcaaactattaggcctcctttaaagatgggtggtcatacaattttgaatgcgatgataataaatggcatcatgttaatcttcatctcaaatgcggttcttttggcgggcttccaaactgattcatgatataaatatgctttgctgtatgtccagactgaccacctatcgctctctttaagaaaatgagaacaccattttcatttgtaatttgcattgctagtagtctttctggttagtatttttttccttctgcagaaatttttcaacagaactttttctttatttgcaattggtgaaatctcctctagaagctgcaaggcagaat

SEQ ID NO: 91229 - DNA, 925 bp, Eucalyptus grandis; identical to SEQ ID NO: 90752
  Intron number 1 from transcript Egrandis_v1_0.018931m (loc us Egrandis_v1_0.018931m.g) derived from phytozome v7.0 (c hr-ID scaffold_4; pos 32657073 to 32657997)

SEQ ID NO: 91230 - DNA, 791 bp, Eucalyptus grandis
  Intron number 1 from transcript Egrandis_v1_0.032658m (loc us Egrandis_v1_0.032658m.g) derived from phytozome v7.0 (c hr-ID scaffold_9; pos 23579 to 24369)
tagtaagttttcgaggtaactatatccaatttagcaataataaatgtccgagatttgtttatactatcatgcataacgagtattcatcttcatatcctagaaagtaaatatttgatgcaccagccctttttcttaccgacttaagcattagtttcgtcaatccaatttgaagttatcaaaagtggtcttctcgttgagaataatgtgaattttgtattagtctggttgtttgtacgggattgctcaatggccatgttggcaattttgacggggtagagaaaaactctcaataaaaaatcaaccaaaacaaatcgtagaaaagatactaaaaagaaggagaagagttgcgagaatcaagggaaataccaaaataaagagatgcatgatatataattactcgtgcatcaataattctcctaacgtcgagtcaaagcaaattaatggttgtcgaaggtgattgcccagctctcgatgcacccaaatttcatgcaatttttcatgcatcaataccaaaaatagcaaatatatggaaattacctaagctgtagttaccacgaaattttcacaaaaaaccataaaacgatccaaatcatcaacctaaatattcctaaacaaatcgcaaatcaatgttgaagagacataaactttcctctctactcctcgactttacgctcctttcccttcgatgctgctgctcccacagtcgattttcgcttcacgggtaagccaaaatattcctccattgttttcgcgaagaagggaaaattaggttcatcatcctgatcgcaaaa

SEQ ID NO: 91231 - DNA, 732 bp, Eucalyptus grandis
  Intron number 1 from transcript Egrandis_v1_0.050908m (loc us Egrandis_v1_0.050908m.g) derived from phytozome v7.0 (c hr-ID scaffold_6; pos 34962588 to 34963319 reverse strand)
gggcttgaaggacaaagggtaagagtctgagtttgaaatcagcgttcctttttttttttcgagcaattaaaaacataaaaaaaaattattagagaagtaaaatttaaatggagatgatgatgatttcctctgtgtaatattatactgcttactgcaccaaaaaaaagaatgccatactgccttcttttttttttccataatattgtattagaaaatttcgttactcttttaaaccatggaagattgaaaaaattcaaagagaaggaatgataattgaaagagacaagttagttatttttctgatgtaaagaagggcaaggaggagaagagaattttttctttctaatcccttcggatcctttcatagttatttttttttctcagatctccaacaaaagtgaattgattataaggagtagaattttctcccattttttctcttttgattactcctaccaagcactgtatattagtcaatccattttctttcttctttttttatttatttataatttctctcccttttgcgaaccactaatccaaacatagtatagatctagctgtttcgcatgtcaagatttacttttacttttacttaaaaaagtaatattcttttaagttaaatcttgtctattcagaaattcgattgtcttcgtgtctacaatattcctcaacttgagagttcatttttcatctggttcatgctaagattcttgtgtcaatatggcagcc

SEQ ID NO: 91232 - DNA, 787 bp, Eucalyptus grandis
  Intron number 1 from transcript Egrandis_v1_0.020460m (loc us Egrandis_v1_0.020430m.g) derived from phytozome v7.0 (c hr-ID scaffold_6; pos 4550016 to 4550802 reverse strand)
ggagtgaatctgtcgagttcgttggcgtcaccgaggtagtagattggtttgtgcatgttcttgttttgttttgtccttttcttggatgtcttctatttatttttgctcatggaattccatagacgttggtgggtttgtgttgaaaagggtagatttttggctggattttagctgaaggttttggttggttttctaatggatatgagcgacagggaatggagaaattaattattttctttaaactatatgatcgatgttcagagccagggcatgattaggctaaaaagtacagccagaaccaatctcgacttgtagagcatgagagattgactttagattcggagttatgttatgcaggctttcttcaggtcctcttttggggtttgaatctgaatttctagggttggtttgcagaataggaaattgcctccatcttttcttagaaagataattatttttgcttttcccatttttttaggtaatgctggaacaatgtttattttaacacttcattcttcaagcgcagcaggactagaattgctgttaaaatacttctttgctatctatgcatagactttcgggcttatgaagagtcatttcaaagtttgtttctttgatatgagtgttgcttcatgtaagcgtgtatgagactgagcctgataaaactgtatttagggaagaatatttggcagtggaaacaaagtgaaactcgagggtttttgcttttcctgatgaaatgcatccattaaattttgatgagacttttaaatgtattctatgaagggtg

SEQ ID NO: 91233 - DNA, 1061 bp, Eucalyptus grandis
  Intron number 2 from transcript Egrandis_v1_0.010365m (loc us Egrandis_v1_0.010365m.g) derived from phytozome v7.0 (c hr-ID scaffold_6; pos 23080735 to 23081795)
actcatcgctgactgttggaactagaggtagtatcgccattacggatctctgagttgttttctttatcgaaaataatgataattcgatgctcatcgtgcatgcgtagatagtgcttgcactcgaaccggaatatttttacgttgcctttctgttttgcttcatgcgtgtgattaatacgtggtttgtggttttttattcttgatataatcatttgagcacgttcttataaaaaaaaacgtgcacgaggctctcgactgcatcaatgggttctttttatttttgtgttttggtgagttcgaggtgtgtacacgccttcaacgaatctaaacttttaggttttgtaacagtttaagggaaaaagccaccaagaagggaaaactatgcccactaagacatatttattcacaaaatattttcttgtgacaccaaaaatccaaaatgtaaacatgtatgacatatttacttacacggactgttaaaactctgactacatagacttcaaaaagcaaacggagtcacctaacttaagtgaaattaactaaaacatcatatgatagaactttgatggaaagtaaatgtatcatatatacacaagttcgatatttttatgtcacaagaaaaagattagataaatatatatagtttgagatttttcatatcacaaaaaaaaactcgggcttaatatgttgcaatggacataaaggtttttatagttttttttctcgatattaaagtataactctacaatttttcactttttgtgttcttcagcaacttgtgacaggaaggaaaaatatcgtagttctctttttttgataatctagaggcaggcacgattgtggaaactcgacccctaggcctttttgggccgtgaggggaccctgacccacagcagaagaaccttgtagtgatattagctggtcgcaggagtatcctttttggctctacttgtgctctacgcggacatcgtagtgaagacacggagcttaaccgtcatctaaaaggagatttctttcattttacaggtccgattctcctggaggactaccatctgattgag

SEQ ID NO: 91234 - DNA, 706 bp, Eucalyptus grandis
  Intron number 1 from transcript Egrandis_v1_0.013688m (loc us Egrandis_v1_0.013688m.g) derived from phytozome v7.0 (c hr-ID scaffold_6; pos 53605973 to 53606678)
cccacctctctcccctctcttcagatccctccaaggtctctctctctctctctctctctctctctctctctctctctcctgcacaagcacgcgagacggatcatcgtcattgtcatgcgctttgattcgagctctgttttgttgatgctttctagttcgtcttcgtttgattctcgagaaaccggtcttcccaggtcttgtcacctttgatgatatcggtcttcttcttcttgtttttttttttttttttttggttgagcgagtttttcattgggctccccgtggtatgctcgagcttagtttttgttcgtcgagctgaatctttagcttcctccctactcgtgttccccgttggcagcagcagcagcaacgccgcagctgctctccgaacacgccgcgccgcgaattgtgaattttgcgattcctgttccctcgtttccgcttcttcttcttcttctttttgtttcctttaattattaattttttttttctttcactttttgatgatcctgtcttttccgctgcatttgctattggatttatggcggacaccgtcttcgcgacccactcccggcttccccttcttcttttcctaaatcttgggaggtggctcgtcccattcagctcaccaacttcaacctctttttttttttttttttggttttttgcaggtctcgtccagcagcgtcaacctttcacgccttcc

SEQ ID NO: 91235 - DNA, 445 bp, Eucalyptus grandis
  Intron number 1 from transcript Egrandis_v1_0.049250m (loc us Egrandis_v1_0.049250m.g) derived from phytozome v7.0 (c hr-ID scaffold_148; pos 49887 to 50331)
attgcaggtttttctttttcttttttataatttgtttctgcatttccttcatcctgttttgccaaaatcttggaccttgtggatcattatgtatgttctttattaaacttaattctttgattgccatattggaatataaagttgaacgaacatgagtcagtggctggttctttcaggcatatctaggacttcgtttgatttaattgttacacataattcttcctgtttcacacttctttttttcttttttaaagaaaacaatggaattgaactgaagacttcatacttgagaaaattaatatcctgagttttttcttcttcctgtcctatgtattcatttctttgaaagcaaatgctattggtttcttgtgggcatgttgcatactataacctttgactaattattgcaggccagaagatcttcgaaggccaattgggcaagttt

SEQ ID NO: 91236 - DNA, 922 bp, Eucalyptus grandis
  Intron number 2 from transcript Egrandis_v1_0.049250m (loc us Egrandis_v1_0.049250m.g) derived from phytozome v7.0 (c hr-ID scaffold_148; pos 50293 to 51214)
gcaggccagaagatcttcgaaggccaattgggcaagtttggtgctcttaaggacatttatttgcccagggactactacactgggtgagcaacagcagccaattacgttaatgctatcatgtagtagactttggtttcggaatcctttggaagcttctatctgatacaatttttctacttatctccattttgagttcacaagtttcatgtttgacgctgatttaataaaacttaacgagtcttttatccatgcatctgaaaatttctgtgtcataataattcaaatcaatgttctccttggattttatttgcaaggaatttgaatacatgattcttattcacagtaaatttgtagaaatattcaagagcttgtggatccaaatgttttttcctagtaattgttttactcagtttgtcttctttcactgtttacattttggtaaaatcatcttcgggagattgactcagcatgctaaagggttcatttttgcaaactttaatttggatcaaagggcagctttttgtgttctcctttgttcaccggttgggtgttttattgaagttgttgagatatttacccagtgaaaataaagttttaaagagatcaatcaagtaattagagttcatttgaagatgatgttaatggaagtgaagattagaaggaagttgggtttgaatacattgagaagatgttccaagtcttgaagaatatcaagtcatcttaaaactcacacttgcgaggttagcagccagagtgcttgcttttacttgcttatcctgactttatgtcttgttggggatattctggcaagttacatgctgtggttttccctgtttatgttgtttgtttttttggcttttcaaatgaaccctgttatgactttttcctgtatctctctctctctctctatatgcagagagcc

SEQ ID NO: 91237 - DNA, 991 bp, Eucalyptus grandis
  Intron number 1 from transcript Egrandis_v1_0.019801m (loc us Egrandis_v1_0.019801m.g) derived from phytozome v7.0 (c hr-ID scaffold_740; pos 4788 to 5778)
gtgagtttcgctccaccggcatccgcatcatcgaagtatgcgtacctctctctctcatgtgataggagctcattcggatgcacacccgattgctaacaaaggctatgttttcctctatttatatttttgagtgttgtgttttgggttgcgaacatcatcacttgccatttatttacaatttcatcaatcagaagattagttggaggaacagggacaaagcaaaattggctattaaggtcatgtttagtaatacttctagaaataactaatcctattctttttttccctgaacaaaaaaataatagaaatccatttagtaaattttttgttttcaaaaataaaaatctatttttcttattcccgaaaatagatttgcaataaaatcaagaagtagaaaaaaataatttcttatccttgggaacaaaaaaaaaaaattcctttttttctccttctctcttcttcttccactggccattgctagccaccgtcattgccaatggtcactgatgattggctaggcgaggtctggcaagcttgctagagcctcgccaggccaaggcgaggtctagctagctcattggaggctcacctagccaccacgagcctcaacctcatagatttgggggaggtcaagcctcatcgatggcctagtaaggctcatctagccaccggcgaggctgaggctcgtagtggccaggcgagctcacagacctcgctcgaccgatcgccgaccacggcgatggcgggcgaatgaccacaaaaaaagaggaagaagaagagaaaaggaaaaaaaaaattaagaattctaccaaacacatttttatcttaggaatataaattttagacaattactaaacgtcttcaaaaactgattaattattctcaggaatagaataaaaaaaatcatttttgaccaaaaattgttctcaagaacaaaatgattaccaaacacaccataacgtgattgtggcaatgaaatagggagagctag

SEQ ID NO: 91238 - DNA, 687 bp, Eucalyptus grandis
  Intron number 1 from transcript Egrandis_v1_0.031727m (loc us Egrandis_v1_0.031727m.g) derived from phytozome v7.0 (c hr-ID scaffold_11; pos 44361407 to 44362093 reverse strand )
gaccggggcttcaacggcgacgagtacgatcagaggtgacgactctgcctcttctcccctcttctcatgattcgtatgcatagtaattctacagattttgattaatcagcgcctttcccgggttcctggcgacccatttggatgattatagatgttgcgtctctgtttctttttgttctgggagcaaattgcagaataccgccattcttgtatcagatgtaaaatgaaatagatgaagcatagcgtagaatcgcggccatgctgtcgccatcactcgaacaggggttagcaggtgaagctttggttatggtggttgcgatgaatttgatatcgctgatgtcgacgcgcgaactaatttggtcgttcgaaggatattagagatgggttcaggcatgattatcttttaaacgtaaatcaaaatccaaggattaagactttcatagcttaatatacaaatcagtggaagatgaacacgccggtttgggggtactaatcacactttgcccataagtttttttccccctttcttggacgataacgttgctctttcagaatcaattccagactccttttgtttctatctcaagaagatgatgaacgcacagacgaacttgattgaatcaatcgattaaagaccgggttgatgtttcaggagggcttcgtttcaggcggtcattccggctttct

SEQ ID NO: 91239 - DNA, 522 bp, Eucalyptus grandis
  Intron number 3 from transcript Egrandis_v1_0.012528m (loc us Egrandis_v1_0.012528m.g) derived from phytozome v7.0 (c hr-ID scaffold_11; pos 36174305 to 36174826 reverse strand )
aggtgagcgagtctctgcttacgcagcgttttgttgtctgtgtcaaactgtcaatgatgaactcagatatgataaacaagaaagattgcaaaattctctgtttttcctactgtcagaaacattgcttaacaaaaagaagtttctggcattgctactgctggaaacatttcttcataatcagcaaaggagaaaacacagtgtttgccttcttttttgactttttatccttcatacagctgaatatacctatttaggcgtttgttgcttactactaatcctagttttacacgaatggaagctgttgtttggcaccaatcatcagattattgaactgtctatattgagtggtttgaaaaattaaaatcccataattgaaaagaggcccatgcattaattgatgtgagttacggcctaacaacctttgatccaaaacaatcaataacttcaatagtcgttctttggataagtagcattttgtaaagcaggaatctgaaaaaacatcgctttccttattactacagc

SEQ ID NO: 91240 - DNA, 1010 bp, Eucalyptus grandis
  Intron number 1 from transcript Egrandis_v1_0.031170m (loc us Egrandis_v1_0.031170m.g) derived from phytozome v7.0 (c hr-ID scaffold_4; pos 33884111 to 33885120 reverse strand)
tcatcatagctctgctcatcgtcatcgtcttccaggtcaaagccttaaaccctactttccctgcttcctttttgggccttctccgtgctaaagtttcgatttttgatcgaaagtgtctgggaactttgcaccagctgtaatgaagagcgaagaacatgtttgggggctattgaattttctcctaattacaccttaacacgctgtacagtatctggaatatgtgtttcctcctccggggggatcaaaaagactgagaaatgtaaggatatgataaggaattaagatgggtttagctccttgaagctgtgttagtgaatggagagatgaattaggagcttttaaggaagtaatgctgaaattcgatggaaaagcagaaagtttttgctagagaaagcacgagaaagtgcccttttttattcccagagagaattgcattggacattggtaccgttagtatattcttgctgcattggtagaatagatttgtaagctttacagagttgtgggtttgattgttccgaggtttctgtgcatcgttgagttaggactgtatactgaaatctgattagtgtgaatttgagcatcctgggttgggtgctggcttttacagtcattacattgcagtagtccttcaaattgcataaggtggagaaggtgaccttaagtccattgcttcatgaagcactcttggctttggaaatttggggttgttatgcttatgtggcaggaggattaggtcaagatagcagctcttagctattcgatacaccttaattcctcgagactagttatacactttgcttgcttaccctgcgtgacagtccagtacaagattgtggagtcgaggttacaaaacagttactctgcatacaaagttactgtccatatatttagtcttgctcatatcttcttcatgccatctggatgctacatgtgcagctactcggtgcgtgcttggctgtgttttcatgttctaaaattcatatcttttattggattgcctgcagctc

SEQ ID NO: 91241 - DNA, 1009 bp, Eucalyptus grandis; identical to SEQ ID NO: 91102
  Intron number 1 from transcript Egrandis_v1_0.025438m (loc us Egrandis_v1_0.025371m.g) derived from phytozome v7.0 (c hr-ID scaffold_11; pos 35861058 to 35862066)

SEQ ID NO: 91242 - DNA, 769 bp, Eucalyptus grandis
  Intron number 1 from transcript Egrandis_v1_0.045109m (loc us Egrandis_v1_0.045109m.g) derived from phytozome v7.0 (c hr-ID scaffold_11; pos 5609480 to 5610248)
cagtgcatcaactataccaactacataattagggtggcctcaaaaaaattacatatacaacaattataatttttacacttgactttttataattgaaaagggagttcgaaaatatgaaaagtagagaaaggcctcgcacattctacgcatcgttttgcgcgcgagatttcacgaatatcctttgcgcatttagcatttttgccttttccctttgtgcttgtgcctgaagtctccctctgtgctcgtctcgtatgttgaccggcttttgactttctcaaccaatcccaatattttccttctctcacatgtcccatttagtggtcgctacatcccaagtcactcacttccacacaaattagtttcgtagtcggagatttttccttctctccctctttatgtcaagaatctaaagtgattcctctccatcttcatctatctcttttgcatctccccactaaacattagattttcctgcttgattcgtgttctctcctattgcctaataaacgcccaaagatcaactcattattcttctctttcttcttctatatcagtcttttagcatcgacttctaaaataattagtgcaccaattcttgtggcgagatcacgaacataaggtacccattttggctgaggagcaatccggaagccggtgttgaccctaactatgagctagcctgcttaaataatcgaaccattttgaatttgtattcgagtaagtactatgtacaacattgactatactaactacacgattagggttgccg

SEQ ID NO: 91243 - DNA, 892 bp, Eucalyptus grandis
  Intron number 2 from transcript Egrandis_v1_0.021262m (loc us Egrandis_v1_0.021262m.g) derived from phytozome v7.0 (c hr-ID scaffold_6; pos 29834271 to 29835162)
agcttcttgcagcctaagcttgagggtttagctaggtaatttgactctcttttttgaactccacgacgacccgttggtcttaattcctcgccgtgatgtctgtgtatctgtcctgccttacgggttcggctagtttgtctccggaagatttgattggaaattaaatggggaatattgatgctttcggaagtaaaattcaccagttcttcgtttcgggtcgcgaatggagtgttgttcatggcgttcgtagtttttttttttggtgaaccgtgaaagttgaagctgttaaagtgggaaaatagctgggcttgtgggtggtaccagttttgggcagattgctttttgacagtctgatttcttttgatattttggaattggaatctggtttcgtaaatgctcttgatggaattctttgttagcggggggtccttccctttttccaccacacatgtcactttcgttgggctggcaagaatcagtggtactatggaaacttcccaagggggatgctttttggtttttccagtactagtatctggaaagggttctcttttgtttgattgtgcaatttggctgtccttttatttgaaggtccactctagattcaagctggcactgcagtaactagctaacttgtaatatgcttgcgtaccttgcgccttattgaagcatttgggatgagctgttaggtttctcttcagtagtttggttaattataggtaatatatggctcttcgaccttgtgtggtcatatatagaagatttgttgcttttacattttctgtggaaaattgttgtagttccatttcaaatttgccgacatgttgctgatccagtttaattgttttccgattcaggaacaaaggaatattatttgtcgcaatagatcaga

SEQ ID NO: 91244 - DNA, 896 bp, Eucalyptus grandis
  Intron number 1 from transcript Egrandis_v1_0.005055m (loc us Egrandis_v1_0.005055m.g) derived from phytozome v7.0 (c hr-ID scaffold_4; pos 38910032 to 38910927 reverse strand)
tcctcccgagattggcaacttgtcaaaccttcaaggtccgctcttgttttccttccttttcttttttttttttcctctttttaaagtcttttttggtatgaggaaggcgaaagctgtttatttgatgtgactgttaatctccatttatgattttaactttctcttttgggggggccagaggactcggcctttgcttgacaaatcatccttttcttctttgagtttgtggggtctcattaaagaaaatttgtctttttcccctggcagccggagaagacttaagattgcttgagcaccctttagattttttgttctttttatctaagagtttgaacctttttgtgtgtgcgtgtgtgcgctagtgttcccccgtttacaagtcggaagctttctattactgtatgtcaatgtgcttgtggtccttcgaatctggcctaaaaaaatgctttgatcttggtcatttgtgtgggctggctcagagagttctcaatttagtagcataatcaatcttaattactgatccagttacttattggaatttttcggttgaaccttgaagatgaaaactacccagggtttgttttttgtatatagcatatgcagagtttatctgaagcattggttagatagtggaaagataggttcccttttacctagaaaaaggaaaagaaggaatgctgatcatgccagatacagcagaatgtatgcaagttgcttcagatcgagtcatttgttttttcttatgttttggttacaagttattggcttattttgtttcgcaagaagtgatgagtagagacagaaggaattatttgtagaaggataacctgattgagagaacatctgtttttttctgttcagttctgcagctgtgttacaacaaattggaggggagt

SEQ ID NO: 91245 - DNA, 994 bp, Eucalyptus grandis
  Intron number 1 from transcript Egrandis_v1_0.014464m (loc us Egrandis_v1_0.014464m.g) derived from phytozome v7.0 (c hr-ID scaffold_6; pos 15637132 to 15638125 reverse strand)
tacccggttcgtcctgcggcttcggctgtcttttttattttattttatttgaattcttggagctagcttttatgcttttgctttcgggtgattttccgtcttgatgggtaggcttttgctctctatcagcccgtcacggcagattatcatgcgcttacactgtgtttcatttggtatcgataagaaacttttgttgtcatctcgggatgatacgtgcagttccatgggagttcgcttcagttatccgatagtccctggagctcacttttcgttttcctgttttttgagatgagaatgtagggttgcaatttgtcgcaagctgctaagctggccttttgattatatctcccttgcctaaagatgaaagaattccctctgtggtggcggccttcaaatgcatcagtgaatagtgaagggcaaaaagtagtggtaggatgtatgtcaaaatggctattgacataagattattgcgggtatgagggcacatcaaagtgtttagtatgtgatatgagaaatgtgcaaaatggttttagctatggaatgttgctttatattgtggttgctggttaatggaggacaaaccaacggcggtttttttgtgtttatttgagtttttgctgagattgattgctgatcttgtaaatgggttgctattctttggtacatcccagactaatgtgtgttaaatatgtagagaaacgtggagtgagggaagacataggtgggaactttaggtattaaacttgattagttggatgttactgacaacagcatactaaacaaaccacaatggaagagagggtcattgcagccaatccttcttagtgtggaaaaagaactttgtcatagtcgatgatgatttgttttgttatcacgtacttgtgttacctaatatccaccttatcccactctatatcctttggcttgtgattgaaatttccaattttaatgtgttgcagcattttgcgttaatcctacacgaagggcaagcata

SEQ ID NO: 91246 - DNA, 932 bp, Eucalyptus grandis
  Intron number 1 from transcript Egrandis_v1_0.017089m (loc us Egrandis_v1_0.014341m.g) derived from phytozome v7.0 (c hr-ID scaffold_12; pos 170287 to 171218 reverse strand)
tcactcaggtacctgaaagtcgagagcagcgccgtcacctgcggatttttcctttttttgtttgggaatgagattgtcgagtcgtgttgcttcgattgccggatgcttagcttgttagtttatcgcgcgttgtttggagattcgctttgcgattcctcagtttctcgtgctcggcggaaatggattgagagcgagtttgcgtcttgagtatcaattatcatgcgatattggattatcagagagtctccgtttcacagtagtgatagtggttctggtttaaggatgatgtgaaatggagaaaattgctgaggcttcatgttcttcgtaagtaatccggcagattgcagtgttgggcgttagacctgcttaggatcatgttgtcgtgtatctctgtgtctgttaaattaggagagttgaaagtaattggaaatgaatgttgtgacattgagtcattgatcattgttctgggaagattcagcccagcgctttcctctctgcaaagacgtgtgtctcctttaagaagtgtattacagttaaatttgtgcttgaccaatcagcagcaggctggagattattaacccttttctttcttggttgctacactaaaattgggaggatagtgaaaatcctccgttttttgttgggattggcatggtgcctgaattggtttctgggtgttttttaaggaagtggaccttggaggaggtttttgtacttctctgtactgtatatctttgctgtctgcttcagtgataaatttttcatctcttacttaattgcaagcttttgatctctctatttgtttaagactttggaagtgtctactcttactcaatctctatctctcttgtttgtaagatcattaaattcgtcttttgaaatgactttgctcaactggttggcttgtggcacagctcattgggagaacacca

SEQ ID NO: 91247 - DNA, 572 bp, Eucalyptus grandis
  Intron number 1 from transcript Egrandis_v1_0.047713m (loc us Egrandis_v1_0.047713m.g) derived from phytozome v7.0 (c hr-ID scaffold_6; pos 13200052 to 13200623)
tttgtaagtctaagtggcaatataccaagaggaaggtaattattagctcatctgactaaattatcttttgcacatgggattctgagtcgggttatgcggtgaaatagcgagaaaattaaaggattttgtaacataaatttaatgagggacaaaaatagttctcagagaaatcaacagaataataaagagcactcaagatttatataaattggtccaaatatgagtagctactccattaaaaaggtcagccgcaaaaaaaaaaaaaaaacttattaaaaatttgatatcgttcagttcggtttttgatcacgtatgttgttatttatttgataacgtacctaatttttatagtaattttttgtaaaaatttgatctggaaattggtttgttcttttctctataatattgtcaacatttttttcaccataacccattgttgtcgtcatatgttttagtgcttactggtacttcttagtaaattgagtaaataaatctatcggagcgcatatatcgggcattgtttattaatctttttttaaacgttagagatattaaaactgatttacagaact

SEQ ID NO: 91248 - DNA, 970 bp, Eucalyptus grandis
  Intron number 1 from transcript Egrandis_v1_0.002481m (loc us Egrandis_v1_0.002481m.g) derived from phytozome v7.0 (c hr-ID scaffold_6; pos 7088166 to 7089135 reverse strand)
tggaactgaaaccagttcgtttcccctgcgaaattcgaggggcatatgtcccgtaactgcattatggcctactaggtgccctcacatcgaggcaacactagtcaatttgcaagttatggagaatggagcaagtatggctggcccatcaccatcacaagggacgtcttgatttacctaaatagatattgtcattccaaattaatcataggtattccaactcgagtgagcattgatgcattcattgcagaagtgatccttctttgtattattaactctctttagtataactcaaattcatctatttcatatctaatattttctcaattaccatggtatcattgcatattatgcatgtctgatatcacttactttattgcatggtttctttcattaaaatatttaacttatgtgcatgttgattttcattgtggatgtttttttgaccaagttctatgttgttttacctgtatgcattgacactccaatattttggtgcaaccagctttggtgccccctcaacatcaaagtgtttcacatcaattcatcagtcctcagacaaggaatgcgcagcagaatccaaccgggttatcatcgtcacagaaaaattatatagtcccatgtcgcccacaagctccaatgaacatggatccctgtatcctctcatcatcacaagctccaaataatgctcctccacctcctcagattcaacgttgtggaacaggcctgataggcccatcgtcattaccaggtatatagttatttacctaaattaatccttatgtatcatcatgttatgttattaggggaagcaagaatgctataatgggacagatggatttaattgcagaattagatatgaacaagggtgtgccgccgacaggtcatacaaacacagacaacaactttgaaaagagtggagctttgaaaagaaaaataaaacgactctacggaagagaagctgacataaggg

SEQ ID NO: 91249 - DNA, 787 bp, Eucalyptus grandis
  Intron number 3 from transcript Egrandis_v1_0.024283m (loc us Egrandis_v1_0.024283m.g) derived from phytozome v7.0 (c hr-ID scaffold_6; pos 44603075 to 44603861)
ggctgcaaggtgatcgatgaactctgttttttttcccctcttcttcgacctcgtcggaataattcaggctccgatgactgcctttttgacttgtcctctggttctgttgtttgtatgtggaggtggagggcgtgaagtctagtgccacttagatttcgtgtctctttttgatgcagatatttttattcaattcctgtcttctttgacttttctggggccttgctcaccttaggttattttatgcctaaccaatgaaaagaatctgatttcccatttctcaatcgaatttgactttcctaacctaatccgcatttgattggcgcagagcttgcatttgcattcactaccgatgtagaatttttcggaaaatattaaataaaagttttaaatgagatcactttttcaaaagataatccaagatggatcttatcttaaataagatcatgaattcatcggtcaactaatctctacaattcgtgcacggaaagttgcccctgagatgcttgtgagatgcacagggatctcgtggacttattagggtctaaaattgtcacttcaaaatctcaaaatgatgcaaagaataataaaatattctgtctacacctttgccttacaaactccgacatccttgacttcattcactcctttttgttggactctgctgagcaatttcatttaattcatttgctttttactatttagtttagtgtttgtgttgttttgttttggtcaaacgatgggttaaccaaattttcattgccgttgcttatttatttattccagctca

SEQ ID NO: 91250 - DNA, 428 bp, Eucalyptus grandis
  Intron number 1 from transcript Egrandis_v1_0.001077m (loc us Egrandis_v1_0.001077m.g) derived from phytozome v7.0 (c hr-ID scaffold_4; pos 32740082 to 32740509 reverse strand)
cgacccaggtacttgaaagagttcagttttttttttctgtctttgtatgaaaggagtttgaagaaccagcttagctttcttcttcggcattgtgatcgttggtctcgttttctccgttattatagtatgagctgagttgggtcggtcgtaaatctgtaattccccattaagtgcgataactgcggaagtttttattattttcgaatcttgaaggagtcaattcttgggattttgagaaagcaggaactgtctggcctactgaaaccacagcaattcaacaattagaagtctctcttattttatcatttttttggtgttttcttgaatctgtcggcagacggattgcaatttgtgaataggaaggtgatggatgctgtttgagatcaatgtgtttgaatttcgaatttcatttcaggtggcacaactaa

SEQ ID NO: 91251 - DNA, 942 bp, Eucalyptus grandis
  Intron number 1 from transcript Egrandis_v1_0.032743m (loc us Egrandis_v1_0.030046m.g) derived from phytozome v7.0 (c hr-ID scaffold_9; pos 37871122 to 37872063 reverse strand)
cttccctcaccgccgagcaagcccgcaccatcaaggttttcgccctcgcccttcggtcgatcgtgtcatttgatgctcttgttgttccctctcaatcaatccgatgtcaataccaatgaattgtttcgtgggtttgactttctgggcgatcagttctaatctgagctctttgtcctgcggcagtcctctgggatgactaatctgatgcgtttatttgggtgaagcatgcatttttcgtcgatcaaaacaaccaattcagttgcttatttgagcataccgtcctcaattgagatcgacccgattattgtttatgattgcttgttggatcgtttataggttctagtttgccgggggacggtcttggcagtatatgttgcataggaatcgaatgcttgatttctatgaagtttctgctcttagtgcaaggtaactaacagttgaagctttcctgattgttcgataagttgaaggcaatgaggaagagcttttttcttcattttacctctgcgggatctgtcttcgcgtgcatttttccagcttgagatctcgaattactcctagcattgatcattgagagtccctgttcgatttggcatgcttatgctacttatttcttttatgtcggtcggatctagtgtgtgaaaacataaagacgcacttcaagttgagaaacttcaaccctgtcccccctgtaggcgatgaaatggcttctgtaactcatttgattgcttactctgtcggaatttgtcgagcgagatacaatgtttacttcagtgggcaaactgtgattgcatgatgttgaagagattgtggtcgctgctttcttttacttattgcgctattgctgtcgagttaaataccaccaaaccgctatcatattaagtgttccttctctctctaatgctagattcttcaacaaagggtagagaccctggaaagaga

SEQ ID NO: 91252 - DNA, 1023 bp, Eucalyptus grandis
  Intron number 1 from transcript Egrandis_v1_0.010164m (loc us Egrandis_v1_0.010164m.g) derived from phytozome v7.0 (c hr-ID scaffold_11; pos 18507630 to 18508652)
gcggttcccgggctctctcggactccgaagtgacggtacaatttttctcttttgccccagctctaggaaagctcgtgtcagtgcctgtggattgtttcgcgttcttggattgtttggagctttagttgaacgtctatggtgaccgacaacgtgctgttttgcctcttcttgcctttaaaatggaatgaagatgtacaaggaaatattgaatcgcttgctcaagagttcaacgttgttgggttctccgttctttagtctctttcttgtaaattagccttttcattgtgtgattatgctgaattggaagattgttctggttgtgtattgctgtcaaatgacaattaatcagtactctgctgcatctattttgtgggccttgtactaacacagcaccaacatgcaataacaattggctcggtctctgttctttggttttctgcacaatagaatatgatattttctttcttttttatacgtggtgccatttgctaactgtgctcacccattaaaaccaattcttccaagcgccgagattattcatacttggctaaagagcatagttgcctagagcatcgacagtcttttaagtgaacattttagtaaatatatgtagatgattagtcctggttccaccaaaagagcattgatttaccagacatctgaaacatgggattttgagtgacccatgaacttaattgaaaattgttctgctcagtctttgaatttttgtgctatcaacaaacttgttttcctgttattcattctgccatagtggaatttcctgcttcaattgaattcaagatttgattataatttgttctaagatgtcagaaaatattactgtgcattaagaagaaagatcatgacagacgaagaattggatgctaatattgttattgaattgttaggtttgctgttatcttgttaaaatattttctttcatttctggttatttctctctttgatgtacttagtttggacgagatcaatactttatgttgttctaatttagtaattttcagc

SEQ ID NO: 91253 - DNA, 764 bp, Eucalyptus grandis; identical to SEQ ID NO: 90668
  Intron number 1 from transcript Egrandis_v1_0.020333m (loc us Egrandis_v1_0.015509m.g) derived from phytozome v7.0 (c hr-ID scaffold_305; pos 4254 to 5017 reverse strand)

SEQ ID NO: 91254 - DNA, 983 bp, Eucalyptus grandis
  Intron number 2 from transcript Egrandis_v1_0.043162m (loc us Egrandis_v1_0.043162m.g) derived from phytozome v7.0 (c hr-ID scaffold_4; pos 23106316 to 23107298 reverse strand)
ccggaatctctctctcattgaccagtaagtattacaagataataagcccagtgatagcaaatccaaaacatatttatttattattatgtttagtttggggagaggtcgaacacgctatttgattagtaatatacgagggttatgttttggaaagatttgagttgtaattctcattgcattttctttattgttttacttatcgactataaaataagtccaaccgattcatcttctcttgaaacacggaccaaaaaaaaaaaaaaatagtatccattttagattatccatcaattcggaaaaattgctatttacaatgttcgtaatagcatttcgcacacgctaatttctttctacacgtttttctagatcttgttctcttactttttatttcctaaactataccaatattttcagcttgcaagtgatgatgaggcacgtggcaatatatatacaaaggatcagggtatatatgctaaatttcttaatccttgagggtaaattatgatgacttgaaaggaaagggatgcaatgattttacttttgaaaatgtagaaggtgctagtcctctttcattatctaaatcctcttataaagttgagttggacaggatattttccataaaatgattggcattggagtaaattttagtcttttattctagccttgacagtgcaaatgccttgccaaaaatatgagaaacttcttctcaaactgcttaacgaatttctaacaatttcacttttcaattgataaactttatgaatttctgcattatgctagattgaaagcattcaggttctacaagtgttacacaagatcgccagaaaaaacttcaaattaccatgacatagtccttcctagtacacacaaaatgggaaaaacttaacacgatgaagcgcagttttagtatctatgtctagatgctataaacagactaaatcataacattttcctattttatatgcaaagtttgggagaaaatc

SEQ ID NO: 91255 - DNA, 829 bp, Eucalyptus grandis
  Intron number 1 from transcript Egrandis_v1_0.013264m (loc us Egrandis_v1_0.013264m.g) derived from phytozome v7.0 (c hr-ID scaffold_11; pos 24009125 to 24009953 reverse strand )
ctcattcttgtgagtggttccctgcgttttgtttttctcatttccggtccttcctctgtcaaagttgattttttttttttccgggcttttgtctttctgttatctgggtattgaatttatggtctattcttggttggggtaaatacgacgtcttgttaaagctctgtcatttcgaaaatggcgataggagttgctttcgtatttgagtgtttgacctgacaatagtgctgataactcataggcggaggtataactattcttcttttgagggtcctctttatacgttatatatcattcgaatctcttcgtttcatccagtgttttattcctgaataattcagttaaaggtggcaactttgggtgggtgttcggagatcgagtgtgcctgaactgctagatgcgtggctcccactgggttcgatccctcattcaaatctagtctgtagagcttgctttgtagttgggttcatattggacccaccaaaatttactctagctcctggtctggtggaggtaggccacgacgttggactgggattctgcgcagaatgaattccttgtaattgggcccgataggttgcatcgagtatgagttgaacttgagacttcatgtcccttgagctgtaccgattgtattaaccctcagtggtgttgccttgcaagtctacagcaccgtaatcagttttgtcttggtaatattgtttagtgtattctagtatggtttgatcatataattgccgggcttactttgttggtttctgtaatttttagttttgatcaagaagataatttttgaaatgttagctgaggcttaatatatacaggttca

SEQ ID NO: 91256 - DNA, 451 bp, Eucalyptus grandis
  Intron number 1 from transcript Egrandis_v1_0.045965m (loc us Egrandis_v1_0.045965m.g) derived from phytozome v7.0 (c hr-ID scaffold_42; pos 44540 to 44990)
gggctgtgggcgccggtcggtgacgacagtcggcggtcagcgttcagcggcggcaaacggcaatcgtgcggcggccgacgacagttggcgattctcgaacaagaacaaaaaacgaataaatacaaaaatttataaatcataccaaacacatttctatttttttttctatttcaagaatataaattttatatcattgccaaacacattattttactcggaaattgttccttggagtggaaattaaaaaaaaaaaaactgttccatgtagtagaatcgttgtcatgcgcacccttagcttccatatataaataatgcaatatttatagatgaagcgtaacccactatcacggcaattatactaaccttttaatcactggtcttctgctaataaggcatttgatttactaacacattctgcaagacttggttaggggatactccaaagggttcg

SEQ ID NO: 91257 - DNA, 984 bp, Eucalyptus grandis
  Intron number 1 from transcript Egrandis_v1_0.038009m (loc us Egrandis_v1_0.038009m.g) derived from phytozome v7.0 (c hr-ID scaffold_9; pos 2834838 to 2835821)
aatctctctccctgtgtacgtgctcgtttgggcaggtgggttcggcgactgctctgaggctgttcacgtatgatgtctttctttctgttattcttgaagaatgtttagctgggagggtttagggtttatgctttgtgagttttgtcgtttcgaatttgttgatcacccatcttttgtgttcgtgaattgcaatgctttttgagaaatgggtatttgccgacgtctcttcttgtgtacaaatataaggaatggatactgtctctttagagaattacatgctttcgtcgtgagccaccggctaattagttctacttaccccatgatatgatctgtattgctgaattcgatcccttttctagttgacttttctgctgaatttagtggttggctaatcttccaaggtttcatatgttgttccctgatttggacgggtagaagtctagcatcttaattcgcagaatcgcccaaatgaagtaggtctgtgaggatcttgattttcgcgagtgactgtttaaactgaatggttgctcgggtgtgtgagcactgtgcattcctcttttattttatgaaagtctggttttgaatctctccggctgtttgctcttttgattcgttctggtttgttacctgttcacaatccaatatcaaggaaggcgaaaaaattgatttctttgccattattgccatgtcttgttttgtcttgaacccattttgcttcggcttgtttatgtttaataggttattccatgggagtattatgtgaagcttgtaattcttgttcgtgacagagataataggaaaacaaatgagatggaaacttcttgcttcagtcttttctgttgttaatactagctgcggaattaatctttgggtaatgatagtttgtctgcagacgtctgtagaatacgaccctagaattaccagtgcttgcatatcatttgacaaattttcatttttgacagtgaaatctggcaggggaaaaaa

SEQ ID NO: 91258 - DNA, 652 bp, Eucalyptus grandis
  Intron number 1 from transcript Egrandis_v1_0.030581m (loc us Egrandis_v1_0.030581m.g) derived from phytozome v7.0 (c hr-ID scaffold_9; pos 21540353 to 21541004)
gagggctggtgagttatcccacgaccccattctctctctctctctctctccctcgcgcatgcgcacgagacttcttcgttggatctgcttcgcttagtgtctataaagcttcgagcggttgacaatggcgatcggcaatcgaaatcgtgccatgtaaatcggtgacgctgatgagagaagtttaagcggagatgggtcgcgatgaacagtgatggattcttggtttcgttctccgtccgcataaatttgatcgaaaatcgagggcgataatgattgggtgggtgggggcgttgcgaggcgggtctttcccgagacgattcggaacgcacggattgcagcgtggttccccgggaggcgtcgctgtcgtcgaggtcttcgttgagaaaatgggcgtttctgccaatttttttttgtccttttccttcttggaacagggtggaaaacgctttctaatactgacaccaatacgacaaattaagtgtcatgttctaaattaaagaatcatatttggctcgacgtaagcgtcgatgagggtccaagaagtcgaaaatgagcaatttccgtccatcaatttgcttctatttagctgtttgattgaggattccgacactgactgactgactgactgaaatattcgcagtttggctgctct

SEQ ID NO: 91259 - DNA, 764 bp, Eucalyptus grandis
  Intron number 1 from transcript Egrandis_v1_0.013154m (loc us Egrandis_v1_0.012910m.g) derived from phytozome v7.0 (c hr-ID scaffold_11; pos 28407978 to 28408741)
tcttcgacctcggttctctctccttcaaatcagtgagttcatcgatcccccggtctttggctccagccgttcccaagataatctttttttgatcgtgcaattccgccctctccatctcccgtttcgtttccttggctttgacgaggttgcgttgttcgatcgttcgatcgcgttggaatgcgcgtggagtcttctgtcgtgcgggctgctcttttttttttcttttttcggttgttaggatgaagtagagagaaaaattctcgagttgtcggagtgagtcatgaaagggagttcatttattggagttcggcgaatgtttcgtcgtgatttccaattccgaaacgggtttgcctcccgaggactaatcttgtgttttcctcgggcgcccccttctcctcttttgcgtggtttggtaaaatgcgtccggaatccgtgtttctattgcagaaatgggattgttatttcctttttggttttcattaataggtgacggtccttttgtcgttccaaagattatctgatttgctgtttatcttagtgtgtcgagtgtgtaattagagatttcaaattttctctctgttttcttaacatagcatatctattttgaaagtatccgaaaaggggaaatactgaatcttggtatttagccaggagagtgaaggactcgtgctcagctccggcgtatatgtgcctcccttgctttgttgaactattaataaattatttagatcgattctgtcctgcagcctgcttcgccgtcttaa

SEQ ID NO: 91260 - DNA, 985 bp, Eucalyptus grandis
  Intron number 1 from transcript Egrandis_v1_0.024201m (loc us Egrandis_v1_0.024201m.g) derived from phytozome v7.0 (c hr-ID scaffold_11; pos 1673686 to 1674670 reverse strand)
ctttcactctggatttcagcaggaactggccgagggtaagcacttgctgtagttaatcgcggtcgtgtgggagacgagcctatgagctgggcgtcttctttttattgttttctactcgttttgattggatgacgaaatgatgcaaatgaaaatgacgttcactgccgttaggtgctttatgtgcagcggaattgcttgtgaattgattctctgcttgtgtatggatgacgtttttaagcttagtcggttcattttatagtggaagaggttgagatgttatcctgcccttgtattcggtaccacttctgagctccattgtaattctgagaattgtgaaattgaattggccggtgttagcttagtagcaagaagtaatgcttgttcaaaagcaaaagaggaccttgttggagatgctctgcttttgcttggtttggatgattggaagagtgatgaatgacatgcaccctgttagagtttatgttgaataggattttaatgaaattgttgctttttgtttccatctactctacttgtgctacgattccaaggctttagggcgagtttctgtattcacacctccagacgatataatccagatttagtttttaaatattttgtcaatagagagaaattgacgttaccatttcagcattaaaatggggaaggattcagttcaagtaataccaagagagtacctttccatttacatcagacatttatgagaaaaagatctcatttactcaacgaaatcacttactttaggactcgacctagaaataattgtgaaagatgtcgctctcccttcattggaatttgttttagttctcttcttctcctagttagccagaagtccactgatgtttgcaaggtttgcgcaaattgcatggctccccccccccccttccttctttttctctgttcttgatgtttgtatttatactcacaagctcttttttctttcacttgcagtacagaagggagatca

SEQ ID NO: 91261 - DNA, 706 bp, Eucalyptus grandis
  Intron number 1 from transcript Egrandis_v1_0.012136m (loc us Egrandis_v1_0.012136m.g) derived from phytozome v7.0 (c hr-ID scaffold_6; pos 47786795 to 47787500)
ctcagtctccaggtgaagttgttagcctctacagtttgtgggtgttatcttaatttctcgtgcatcagtggattagtttgagttctatctgttcactgtgcaattgagtcaactgggtcacttgaaattttgcattttgaactggaaagtttcgaccaaatgcatttaggtatgtcaagttggaacttttgcaacttggtgctatatcttcctcggtttttctgtttcgcgaatttcaaaattttcgttctgtgtggctgcttagttgacgttggaaaaagataatgaaatggaatttggatatttaagttcgtaatttgaattttgtgactgtattttggtgggaatagttaatctttaaacagcaacggaagatttataaatttattctttccgctaatctttgtccgtcagtgataaataatatggtctattcgattcttttcctgagcttcaaagtgaaataagccgactagtcatccaaaaacctctgccaaattttttggagtggtgatttttggaataaagcatcatgagaatccaccgtcgcaactattccacaatctttttctccttattggctggttgccttctttttcgtttctctgataaagatggtgtctgggttttgagtactttttttatatgttcattccgatggttggagttctgatacattgttaaagaagctttattttaagcagga

SEQ ID NO: 91262 - DNA, 805 bp, Eucalyptus grandis
  Intron number 2 from transcript Egrandis_v1_0.043728m (loc us Egrandis_v1_0.043728m.g) derived from phytozome v7.0 (c hr-ID scaffold_9; pos 3785466 to 3786270)
catttaacttgcattggttgcaaagctttgataaggtatttattgcatttgagttctcatgctgcaatttcttgggtgcttgtatttttcatttcagatctcattgaaatctaggtttctttgcccttaggctttgttcttaactcttaagttgtttttccttgtttaaacagtcctccggttcatctgcaaaatagcatgtcaaagattgtatcacatctggggctattctgtgaatgctggactagagttatacattagaaaatggaatgactggaacagttaaaatcagcttatctcctgctagactaccagtaacatctgtgagatcttgaatttagtccgattaattaaatgcttgattaattaaaagcttgatttcgttcaaaacttactttatatatttggactagtattcctcgataatcttggggaaagcagaatgatctggctgctccttcaagctttaacatcaccatgtgatactgagacagctgtaaccacttgagattgacatatagtttgatgttatgcacagagtaatctgtctcatctttcttgaattgcccgttgaatgaggaagtttggtaatgttcctccaattttgcagcataatgtgcaagttatagtattcgttcacttcatatggcatactttatctttcatgcccaaccaattagttgcattggaaagaaattttttgagcttcttgttatattttggcacctgaaactggcagacttctttctgtcgggcttttatacgaatagaaagtcaatttgcactgtcttcaaactagtgtgcc

SEQ ID NO: 91263 - DNA, 1059 bp, Eucalyptus grandis
  Intron number 1 from transcript Egrandis_v1_0.005439m (loc us Egrandis_v1_0.005439m.g) derived from phytozome v7.0 (c hr-ID scaffold_9; pos 12537339 to 12538397)
ccatcatcgcccctacgccaaggagtctgagatgatggtcgcctgccaactgtttgatcgaattcccgcaccggacctcgtttcctacaacaccatgctttctaggggtgatcgggtccagggtgggtagggtctagacttagaccttgtacccgaccctgttataattagttccccttttttggactctgtacccgaccctgtttgtattggaccatgtacccgatccactctgtttttccggttcggttccaaggtcaaccatgttttcattagaacatattttgcaatacctcgatatcctatacaacttcgaattttatattaatacgtgagaaaataacataatcctcctaatttgtatcgaaatattaaacgcttataataaataaatgtataaacttttttattaaacgaaaaattaaggatccacaggctaattataataaataaaattataaggcaaagaattagcaacaaatataggtttaatattagtcttattcctacaactactatatgaagctattcatttatgcaagtataactccttctacaaaagagaaattaagcgagtcaatccacatggtacacaagaatttggcggcaacgtatatcgtctatccgttggacgatgtgagaggaagctgtgagggaaggaagcaagtaaggaagaggaacgacgaaggaggaatgccgtacaagtttgagagacccaagaggaaaaatgtcatgtgattgcgggagtaagaataaaaataagcgaaaaaagaagaagagattttggacctatagttacaaaaccggttccaaaactggtctggaaactggtttttgggtgggtaatcaattggacccggttcccggaccgatttaaaccggttccaaattttgggaaccggttcccagaccggtttcaatgggaaccagttcccgaccctattttccgggtgaaccggtccggttcctaggtatgcccggtccggttgcacacccttattgctttttgcttttgccgaccgaggcgagacgggactggcattctccttgtttgcgggg

SEQ ID NO: 91264 - DNA, 971 bp, Eucalyptus grandis
  Intron number 1 from transcript Egrandis_v1_0.052720m (loc us Egrandis_v1_0.052720m.g) derived from phytozome v7.0 (c hr-ID scaffold_9; pos 9883091 to 9884061)
gaaaaagcttcattgaccagttcaccccaggtgaagtctttttcctattaatactataattttacctagcagtgccatgatgcaggggaaaaactgccgactttgctagtacctcagtttctttgactactgtattcagttcatgtctagagctattggtctcgttatcctcttccttgactttttttgagagccgcaatgtttcttgggtcgtgtagcatctgtagacaactgtgaggtcccacctagggctcgagtggatccacagttgttcagactttggattggagtagcacaattgtgcctaatctgcacagcctcagttatcagtctatcatttccagtgcaagtttgtaggtttgcttatagtcattgttctgcaaagatattggtgaacctttactcaactcttctgctatcagcagcatttcattgtggtgagatgagttctatgttagtaactcggttgtgacttgtttgtaagttgtagagttctcatgggtgctgaattttacatggtccaatttatatgagttgggggagtataatttgggtcataaagggaaatgtaatttgggtcatccttaggttagagctgcactgacaatgaatttggcaaataatacgtttagggaaattaaaattcgtttagattaaacctttgaacttgcagtaaatttcatttgaggtcatccatgcttactaagaatcaactctgcctctttttactcgtgggctaaagtgaaaggcatttgacttgtctgcttcctctattgttttcatgggctgtattggcttttcatatttggaggcttctactccattgactaagtttttttatatttttgggtgattatgcaaggtgctcttcagtttacttctttcttctggtaagattactttctcagatttctgacatgcttgttattctttttagataatcaagtccattatcaaaaggaactgcaaac

SEQ ID NO: 91265 - DNA, 746 bp, Eucalyptus grandis
  Intron number 3 from transcript Egrandis_v1_0.052720m (loc us Egrandis_v1_0.052720m.g) derived from phytozome v7.0 (c hr-ID scaffold_9; pos 9884370 to 9885115)
ttggtatgctcacttaatgatattcgcatgcatttgaaaaataatgaggggtgtccattaagtagaaaagaaaaaaaaatatctgatgaatgtttcatcactggtttgtcattcaacatgtataaagttttatctttttgtgggtagtagtttcatgatcgaatcgctatcaatcggtgtgctttgtctttggtaaagaacaatagtgattgacgatagtttgttactttgtcttgtaatttttatctcaaaattgttcatttgcacttctcattgggtgtgtttcattcattttgtgaaagaccaaaaagcagcttttggttttctcttctgagcagtttgtttttgtaattttgaaatgattctacatgacttctaatgaatctacatgctaattttgtctttaaacatttgacatgttcaatgtcaaagaaaactcaacgttcatgtgctagaaacagaagcacgagaaaagagctaaaaagaagtaattgcaagtacagtatgtttcatgaatatacaatttctggtctccacataattgggcctgaatgataattttttttcctattttagaaagaattacagcatgctggtgaatggatgtttcaaaaatagaaaaatactgcggtcgtttatggcatgttattcgtctaatttagtttttactccatataatttcgttatttctgttgataatggtgaacttcttaaaatatatcatagtgcaggttttggccgctgtc

SEQ ID NO: 91266 - DNA, 629 bp, Eucalyptus grandis
  Intron number 2 from transcript Egrandis_v1_0.017998m (loc us Egrandis_v1_0.017998m.g) derived from phytozome v7.0 (c hr-ID scaffold_2446; pos 2616 to 3244 reverse strand)
cccagtttgctggagcacagatcccttctaatcaggtgtcattcatttctggctagactgacatatctttttcacacataaatgttaactcgccttcttgaagagtattttagttgttcttatcttatagccagagaagttgtggttcacgaaagttattgtttcttggccacagtgatatgttgcatacattttctagtcaccttttagtaattatgatggagtttctaatgattccttgttgattgtcagggtttgtcagaagaaatattgttttaatattcagttgataatattggtcaaatcttatgaagatagtgggatcaagcttgcatctcttctccatgcgtacatgcatatgtgcaagtgctgtgtttccctttttcccctcttttcatccttgggtttggggagcgtttttgaagcctgaagtgttgtgctagtataatgatattgcagaacaaatgttgcactgtctaagatcagaatatgcctttgttaaatgcaccaatgaatgcttcacctgtctattaaaatgtgtttctggctatgtaatgtctcatttggcttcatttattttgattggttgatcagggaggaccagttgctgctcttgttaaggccgaagt

SEQ ID NO: 91267 - DNA, 834 bp, Eucalyptus grandis
  Intron number 1 from transcript Egrandis_v1_0.003924m (loc us Egrandis_v1_0.003924m.g) derived from phytozome v7.0 (c hr-ID scaffold_9; pos 37175567 to 37176400)
gcttctcatcatcacgacgcaggtcagtttattcatttttcttttattctctttcgaaattcaatagataaaacctatcatcagctgcttgactcgtaaatgttcaatcctcgggtttctccttctcgccttttgcaagggagtagctgagaaaagagagacgtatgacgagttagcttatgaacatcataaattttgccacttgatgcgtactttcataggcagtattaatttcttgcggttcaatgaatgccgcccgcaattataaattacatagatcggtcgaattatcttttccgtccatgagcaaggttgttctatcgactacttcctcaacaacaataaatgcacctgtaagactaagaaaaaagaagaaaaaacaaaagatagctagacaagatcactcctacagaaccatcggagtcaacacaagtttccatttcgtgcagggaatcgaacaagtcaaatataaattgcatcatgaaaataaagattgatttgtttactgtacttcgtaggtgtaattacggtgcttcactcgttctaattttcgtttagatattacttttttcatgatgctccgaatcgtccttgcccattttgaagtgaagattgataatatctgaacatatcatgagaaatgcacagtatctattggaaactgtcgtgatccttgtgctggaatcgttaaacggcacggcaatctcgaacactagggtaaattgtgaaacttagatgtagagaaacaagacggtaactcgtgaagtggagctggagatgggtggtgaaccctgttaatggtggaattggatatatgcaggtgttgggatacgg

SEQ ID NO: 91268 - DNA, 929 bp, Eucalyptus grandis
  Intron number 1 from transcript Egrandis_v1_0.016362m (loc us Egrandis_v1_0.016362m.g) derived from phytozome v7.0 (c hr-ID scaffold_6; pos 7289784 to 7290712)
gtccttgagcgtatttttcatgtttttagccgatgccttcccttttgtctggagagctttcatttttaggttttgggtcgacattatagatacctcttgatttaacaaaccgaggttatgtaaatttaagcgagttggtgaatgtttcccatatgcagttggtaagccccgaggcgtggttgtgcgacttgaccttagaacggtgtgatgtctgggagaagaagatatccaagagggtgcttcatttgcttcactcatctgcttcacttatctcttttggatatggcattcctagtgctatctaattactgtactattttgtgataattaggggagacgtgaggttgtagcgttttgttgatggggtctaatggccattgtttgccagcttttgccagtttctgattaattcttggtaacttcgatactttgtttgagctttctatcttggttaatttgaggttgattttttctaatggattcaaagtactgaactggattaagtttctatctacttatagtccatttcttatcaactgaagtgccttgcttcaatatgtttctagtggatttcgtcacttgctacggtttcttttcttctgctttcatctgcttgtttgtacttaatcaagctccacgaattggtggtaccatggttagtcgtttgagttttttgtgtcaggttttaagtggtggaagaagggcttagtaatttggttgctcatacaagttaggttgtttcattggatataaaatcaatttatcttatggagacaattccagtctaagtgggtaccgcctcatgttgatagttcttgtttttgcatctggttctgctaaacaaggaaactaacgactagttgtaggtatccggcttgtaaccatgagtttggattgctcatctaggtcatcaaagcccatagctggac

SEQ ID NO: 91269 - DNA, 902 bp, Eucalyptus grandis
  Intron number 1 from transcript Egrandis_v1_0.009512m (loc us Egrandis_v1_0.009512m.g) derived from phytozome v7.0 (c hr-ID scaffold_6; pos 36239181 to 36240082)
acaatcaatctgccaggtaattagggaagtttctatatttgacagaagtgcacctgctgctacaaggacacatgtttatcaagtcatgctagagatgtggagattgattgaactttgtaatataaattatgatagtctgcattggactgcttcaatagaattactttattatcaatcaggcacgtcctatcgctattgtaaactatatggttaactaattttttgtataatgagcattggtcttatttctctcgtgcaaaaaaaaaaaaaattgagaaggatgaagaatgttttaatcttctttgcataaatccattgctgtccctctttgagggttcagacaacaaataagaggaccaaaattcctaaattggacaagtgtcaacccaacaagagacgttgggaagaaaagcgcgataatactgttccaaagttgaacgcagaaaaactcacttgaaatccaccttgatttttgcggaccctggttgactctctctccctacaaccttataaaaaccctaaaattgaaaaattgcaaaaacctcccaagtaataagcacatgcgcccgcacgtagatataacttcagtttcacgtaaatctgccgttccttcatttttataacaggattttccacaaccaagtccctcctaacacacgtaactcacctataaataccgtgtctcaatctctttcactagcaaaccctaaaaacacacacgcacccccagtaaacgcgatggatttgcatcaatcttttgatacaaactggcttctctttgcatttcctgctattttgaaaacccaatatgcgtttgatcctatccttgtcattgccattttggtggcattttcaacctctgctgtgattctgagttgggccttcactcccggaggcctggc

SEQ ID NO: 91270 - DNA, 534 bp, Eucalyptus grandis
  Intron number 4 from transcript Egrandis_v1_0.028978m (loc us Egrandis_v1_0.028978m.g) derived from phytozome v7.0 (c hr-ID scaffold_4; pos 5231768 to 5232301 reverse strand)
catcaaaaacttgtgtggtacttgtgaccagccttcttgatgttgtttgttttgagttctctgctttggattggattctggattcattggaactagttagtgatttttgctcagttctgaatattatgtgctggttgatgatgcttcttgatgaattttgttttttgtgaaccgttatttcttttgttgttttaatgggaggttgcgaggtactatggaacaagttgacattattcgcagttgctcttctatttcacttccttttggacaaatgtgtcaagttttcctttattatgttgattttttggtagatgctgttaaaattgatgtcttcagtgtccttgtcagagttatgaagattatgtccggttcattttattattattattattatttgactatgcttcctgtaatatctcaaaaagttgactgttactacttcactttgcctggatttttgcctgtgtattttgttataagaagtgaaatgtcatctgaagtccccatgtctatgtaggttcctcggggaaacat

SEQ ID NO: 91271 - DNA, 904 bp, Eucalyptus grandis
  Intron number 2 from transcript Egrandis_v1_0.008698m (loc us Egrandis_v1_0.008698m.g) derived from phytozome v7.0 (c hr-ID scaffold_4; pos 35348157 to 35349060)
gcttctctgaggggaatcaagacggtcgtaataaggtaccgttggcaactgttcttcatgctgtatactgttaaatttgagcatcgtgttatctagctatataatgtttttgataattaagttgtagatcttactttcattggttgatgaagttctggtgttcacttatgccgttctcatgtacaattctgttggcccatatactctgcatgatattaggggcaatatagatgtgcagcagttgtttaggttgattttcttgcaacaagcagagaaaaagttggttctcgaagtttttggactgataagtagcttacttggatcttaatagaggtttgaaactgtatagaggaaaggcataagactgcgcatttggttgattaaatgtgttgtgaaacgaagcttggttgttgatgttcttgatctatagatatgcttgcttaaggtataatgcacacaagtcagtgcaccagaagaaagttgaattagcaaaataaaggccacatgatatgcctccgtgtcgctattctctaaaaacaaagtgcaagttttggaatcttatggacctgcttaaacagtgatgcttggtgaaagtatatagagcgcaaacccacacgctctgctaaaatgatgtgtgctagtaagccatgaatgttttggcaattcccatttctctgattgatgatagacatgaatcagtgctatttttattggattcacttcatatcttaggtaggagctagacatcacatctcataattaaagccagtgcactgttgatgtcttagggtgtgatgtattcacgccatcaacttcatattctcatttgtctttgatccattgcttcagccaccgccttggtgtacaaacctaatgagaatatattatcaatgcaggttcattt

SEQ ID NO: 91272 - DNA, 634 bp, Eucalyptus grandis
  Intron number 3 from transcript Egrandis_v1_0.023763m (loc us Egrandis_v1_0.023763m.g) derived from phytozome v7.0 (c hr-ID scaffold_9; pos 23232143 to 23232776 reverse strand)
caaaaacgggtacagtccaagggatataaaggtatatacgctttcatctttgcagaaatgattacactccacaccttacacttcactttcgtattaatcatttgaggctttttgactagttgtgaatctggatactgaggactgtattcttttttatggaacctttgagtttatttctcttcctgccttgaccgtgccaatccaaagcctacctggagattatgcgtctgtgtcactccgtgctttctttgcatagtgcaaaatcaagtgggaaaaatagctcccagcatgaaattgggaggctgaacttctatgatgctgcatgagcttatgcattttttgttgcagggagggaacatgtagtggattttgccaaggcttgaaacttgtattcacttgactttttaagagttccagtgaagggtcaattatgctgtctctgactctagtcagccttccttgttgaacttcattggattgaccatgtttaaaacagaaaaacacaactttgttcaacagaatggcatctttcctaccatggcatgaacatctgtttcgatgaaagagtctaaggcctaagatatatacttcttacatttcctggttatcagaaattaaagtgctagaagctgac

SEQ ID NO: 91273 - DNA, 831 bp, Eucalyptus grandis
  Intron number 2 from transcript Egrandis_v1_0.048702m (loc us Egrandis_v1_0.048702m.g) derived from phytozome v7.0 (c hr-ID scaffold_9; pos 3686475 to 3687305)
gaactagtgttggaaaatatggcttcgaaatgggttgaacaatgaaatcggatcgagtaaaacaactcggactttgaggcgtgatatcactatctttaaagatttatttgccccacaacgttactaatggtcaccggcaaaaatcctctaggatacaacaaagtctcggatgagaatactagatagcaattctagtatttctccagggtctctctaggaaaacaattgaaaaaggcttcagtttttcaaaaagaagactcgaaaaattaccactattttctttccgaaaaatgacaagtatatatatgaaacagtcttgtaactcttcgtgaaaattgccaaagaatgaaaaaacacgtcctttagaaaattgttcggataaacaaatgcgactcttcgtaagaagtcgaaaaccgaacaattgcaacctttcggaaaaaattgcaaaaccaaataagtaattttttcaaaggttgtcttgaaaagacacaaataaaattcggaataatagtttttttttaaatagaatttcgaattttcattttatatttcatttccgaaaattctcaaattaaaaggtaacctttgaattaaaaaaataaaaaataaaaaataaataaatagcaagggattaatgctaattaaacacacctacacgtgggtatggtggggtctagccccacccaatcattcctttaactacaaaaaagaaatcccacatttttaaattgacccacttgctcccaccttttctatgtgggacaaagtgaaaagcactcattttgttttaacaaacaaaattccaacaactagattggcccaaaagagtga

SEQ ID NO: 91274 - DNA, 517 bp, Eucalyptus grandis
  Intron number 1 from transcript Egrandis_v1_0.007793m (loc us Egrandis_v1_0.007793m.g) derived from phytozome v7.0 (c hr-ID scaffold_11; pos 36916855 to 36917371)
aaggtgattgattgagtgtgaatttaacttggtggattggtcattgttattttaaatttaatttcttttcacttatttgaattaaaaattttaaccttgactgatgtttaatgatatacaagaattggggtttttgatgtttgttttggatgtgatcccatatattgcatcatgtcatcagctgaaactgtagcttttgtttcgaatccttactagtaaaactggtttttgatcttgatgcaagtgcagcagaaacttgaaagactatattgcaatttgtggatggacagttttattgagcgcttaagaggcactttaaatagttcaaacctgtggaaattggacaaatcattgagaacaagattgtctatatttttaaaaaatgttctatctacctctgccattgtgttttttgctttgcttcaccacattttatagttaataagtttagttggatagttgttgattcctttcctttgtagggatttatcggtttaagtggagctatactgatcca

SEQ ID NO: 91275 - DNA, 167 bp, Eucalyptus grandis
  Intron number 2 from transcript Egrandis_v1_0.042516m (loc us Egrandis_v1_0.042516m.g) derived from phytozome v7.0 (c hr-ID scaffold_4; pos 19529839 to 19530005 reverse strand)
ggtaagcctaagcaagtcttttgtgttttattgtgcttcttggaaaagaaaactaccttcataatcggtgtttattaatgaaatgattttagtattaatagaagattcattttgagtttcatgaatgcgaaaaatagtaacaaataagaccaatgacaggtagaaag

SEQ ID NO: 91276 - DNA, 486 bp, Eucalyptus grandis
  Intron number 1 from transcript Egrandis_v1_0.018583m (loc us Egrandis_v1_0.018583m.g) derived from phytozome v7.0 (c hr-ID scaffold_9; pos 29909508 to 29909993)
gaacaggagcttagcactgcaatctccgagttcatgtaagtcatcttatttattgctccatcatcgattaattctagatctggatttcgtttatcagcaaagtgaatctctttgcttaatgcaacaagatgaatataacttggtttgcaattgcatcacccgctgatgtttatacttttttgttgatgtccgttgaactacagttcagtttcatagacctgtgagaagcagagtttggtgatgtaatctcataatccaaacgaattcgaaaaactttctccagaatatctataatttctctactcccctttatctccatgcaaacaataaccccaagaaaaaaagctttcgatgtttatactgatctctctttgaattctatctcaaggatggagaagatggctaaaaactcaaattgacataaactgattttgtcttctttgcttcacagatttcaaaaacagacagtcacaggaaagctcaaga

SEQ ID NO: 91277 - DNA, 527 bp, Eucalyptus grandis
  Intron number 1 from transcript Egrandis_v1_0.040273m (loc us Egrandis_v1_0.040273m.g) derived from phytozome v7.0 (c hr-ID scaffold_11; pos 17560252 to 17560778 reverse strand )
cgaccctaaaaagacagccaaattcgtttttactggtaagtagatcttttaaattagaaatttgagccgcttcatgctgtagagtattgatagaaatagaacagcatagcctaaattatgttcagaaaaggtacataagtaagttttaccttaccattcattccaacgtgactatccattcactttttttttaaaattttttttacgtattgctctactcttctacatgtcatgatttgatcgaagttttgaattcaattttcaagctatgcataatctaagtttgtcacatatatagttggtagcttcctatgatgggaagaaatttctacttggccaatggaaagaatatccataatttaatatgagatctattgttctcctgcttccaaattactctgttccttcgtggataatttagcacaatagtaaacattcttaagagcaggtgctttttatgactctgtcctctgccaaatttccgaactgcaggccttggagcgggcgttggacgattagcgcaagtg

SEQ ID NO: 91278 - DNA, 860 bp, Eucalyptus grandis
  Intron number 2 from transcript Egrandis_v1_0.025558m (loc us Egrandis_v1_0.025558m.g) derived from phytozome v7.0 (c hr-ID scaffold_11; pos 16495251 to 16496110 reverse strand )
tttcaaagagactatctcaccttgattctatcccggtatgttcttgcctccttcatgttacggtacctaatatatctaccagattcctttctttcctaagaaaattcatgtctaccactctccttgaggcaattaaggaggttctttttgcttctttttgtttgattatggtattgtttacgccaaccttcgtcaattacactgacgcaatagcttgactggctatttatgcaattgctagaaatttatactcagtctcaagtagtgcatgtttttggattgtaattcctactgatttacttcattgatggtcattgcttcttattcagtgtaggcttcatgacatcttcaaatgttaagttgttttttttcttcagacttgaccatttatataacactaactgatgcctaagttaaaaaattctccgaatgctggagttaatccatatattaggccaatctatttctaatgtttcagctccaaaatatgagaagacacactagcacagagtagttattggtttccctgaagactagatgtaggcactgtgcacaacatttaaccttttttggggcttacatcctaaaacttgtgcttgttgacagatggcttcaaagaattcagagaagcagcagcaatttttttgttttactattgcttggtaatgttgagttcattagtgttgaaccctgtaccctgcgtctccactctcattgtcactgccattaagcgaaattcctagtagcttggtatgacattgctggtttgagctgtggatagtaattacaacgggcaggtgatttacaagtttactatgttgacagcacactcctcgggtaattgaaaagattcctgacgt

SEQ ID NO: 91279 - DNA, 598 bp, Eucalyptus grandis
  Intron number 3 from transcript Egrandis_v1_0.025731m (loc us Egrandis_v1_0.025731m.g) derived from phytozome v7.0 (c hr-ID scaffold_11; pos 11844595 to 11845192 reverse strand )
aggaagcttgctctgaaaactaggttcaaacccctccctgcattcggctgctctatcgtaggatgtgtttttatgataaactaaatctcttaatcttctgtgtggctatttgatggcacttctcaatttaatttgtaatatggtgattatagttgtgtgtcatctagagtttgccattgctcttgacttttaactctacatgctgttggctccgatgtgaacaaaaagaactattgttcaagtgaatttttcgtgtcagatttggcgatatgatgaatctctttgtcaaacaatattatctttagcatcaaacatttctaggtttctctacaattctcttactaagttttctctacagctctgttatttcgatttggttttctccgaaatttatctgtagtacatatcttatgtgtcgccttatacttatatgatgattgtaaaatcacaatttacaaggtcattgcatttgcgtttgtgattcaagaacatgcagtggacatggctattactgctgtttggactggtcctctggggcatctcctctgtttcagctttatacttcaacatgcctttctttcctaatagggaaaagatt

SEQ ID NO: 91280 - DNA, 793 bp, Eucalyptus grandis
  Intron number 1 from transcript Egrandis_v1_0.052158m (loc us Egrandis_v1_0.052158m.g) derived from phytozome v7.0 (c hr-ID scaffold_4; pos 26977807 to 26978599)
gaagtggagtcaacgagctcagtcgaacagcgtaaggagcctgaggttatagaagtgtcacgtggacaaacttaacagcgagtaaataaacatgctgttttgcacatggaaaatcaacacagcagaatagacatttaaccaaagatattatcatcttttgagattaaatcttgacttgttcctgaaagaaattattcttctccattttattattttatactctttattctagttttatcatctttatgggaataaatcttgaattattcctaactgcacagaaattaacaagaaattaacactatattctgcattctacccataccttctctatagtaataaatcttgaactattctagagcaaaaagaaatatattcccgcgttacgaaaaatatttaaaaagttctaaactttttgtatttgtgtcaatttagtcttaaatattttgttggtaccaattttgttctaaacattttcactttatgccaattcaatctttgctagctaattttggccaaattttgctgactgggcatcggctagctgacgtggcatgatcagcgctgatatgaataacttttaaaaatattttaatatttttgaattgtttatattctttttctttttctttttcctttttgtcttctcctcctccttcctccagccagtcgctggacctcaacgactagtcaaaggtgatgtaatcaatgtttatgaagtcacaattccaattacataatcacagtttagaattaacaacagagttatctcaatctgcgaaaatctgtgtag

SEQ ID NO: 91281 - DNA, 783 bp, Eucalyptus grandis
  Intron number 1 from transcript Egrandis_v1_0.049312m (loc us Egrandis_v1_0.049312m.g) derived from phytozome v7.0 (c hr-ID scaffold_11; pos 7180842 to 7181624)
cctgtgttgcaatctcgatccatatacttctacacgtttgttggaaatgcaaccactaggccttgttgttattgatcaaaacagtaaactagaaacagaaaatcagaagctatagtttttgaatgaggaagagaagcacagagaaacagaacacaaacttgcatatgtctgttctaaagaaactgtcaagtacagccactaaacacaaaacaaaaactgctcacgtacgtgaaacacataactgcatacaaacatgctattaacttcctagaaaataacaaaaaacactaaatgcataactaaatgaacttggctgttttttaattaaaaaacagagtaaaaaaaaaaatagaaaacagcaactgagacattattaatccaacaggcctgagaagcctcgctcaaaatctgaccagcctggaagtactgtcccttggtgtcgtcgctatgtcggccaaagtgcccaacactttggccaatctgtcttccctaagagcgctgcaaatggatgtgtgcgacctgcacggtgtattcccgtccgccattttcaatttaccaaagttgatatatctcgaggtggctgacaatatagctctcataggacaattgccttacttcaactcaagtagtcctcttaaactactgcgagtgcctggcacgagcttttctgaaaagctacccgcttcaatcggtaatctccgttccttggaattcttggatcttaagtccgaaacatgcaatttgacagggtcgttacccgcgtcaattggaaaacttccttcc

SEQ ID NO: 91282 - DNA, 1029 bp, Eucalyptus grandis
  Intron number 1 from transcript Egrandis_v1_0.014221m (loc us Egrandis_v1_0.014221m.g) derived from phytozome v7.0 (c hr-ID scaffold_6; pos 40864133 to 40865161 reverse strand)
ccacttcacctgggcccttccctcctcaccaccaggttaatgcctttcctcgttttttaccctttttccctttccccctctcaaatatgtaaaaaactggggcggctttttatcccaggggagaaaacaggagatattgtctctcttttgcacccgagtctaagcccgggggacctgtttttcctgacccccccccctttcgcggtcttttctctgtagtcgtaacgatagttcttcggaaggagattgatagcgtcgttcgctggtagttttcgtattgtccgtgtgaaaatttcatgcgtatccgagtcgatgttgctttttagttagcacttttgttgtcgtggcttgatgtcagtttttcgcattcgaaagtttgtttttttttttttttttatttaagtcgttattcagaagtttttcttggacggcgaatggtagttttcatgtgtggtactttcactgacgtggggttgaaagtttttctagtagtttctgtgtggtatgtgcacttctggctacgctcgtttattgaagcattaatgttggttggagaatattttgatgaaacgatgttcgccgtgtcaagctctttgctttgcaaagacccgcttcctctggcctacggtttgcgtttgtttttccttcctccctgatgttcacacaagagtctttataaggtgtacttttaattttattctttcttagttaagacttcggttgttttctgtaactctggagaagcgggcactgtggtttctggtgctcagggagtctttccttatatatcagatggccagctgccctttattagttcttcttcggaaattgaaacagaatttaatgcttgtagccctgtcctagtggtctgcaagtttggcttttctgtaacatttttctgcattcgaaacaacacctctctctctttctcacgtgagcatgcacgcgtgcacaacacatactcacatactcccatgcagacacgctattgatatcttgatactgagcatactgccctttccatccagt

SEQ ID NO: 91283 - DNA, 700 bp, Eucalyptus grandis
  Intron number 2 from transcript Egrandis_v1_0.033008m (loc us Egrandis_v1_0.031834m.g) derived from phytozome v7.0 (c hr-ID scaffold_104; pos 88552 to 89251 reverse strand)
tctttcttgcttctactgttgctacgctttcgaaggtaacgcatttggcccgactgttttcgatgttttttgtctactgtgaaaattgcctgcgattctaagttgccctgcttcttttgaatgattgtcgttgctcttcggattatttcctgtacctgctttgagatgtgttcgatcgcaattatggagagaaacgggtctttatccttttgtcttactattttcgatgtttttgtttgtgaaattgcgcctgggatttgaagtcgttgctcttcggactgtatttcgtgtacctgctttgagatgtgttcgagctccattatggagagaactggtcaaatcctttggagaatcttgattggcatcgatggttgaaagcgcataggttcaggttgaaaattggctgtcgaaattctgatgctcagccggttcttgattgtgattctgtgcttcaattaatcactgtctccaacccggcctacttaaatggaggaccgggatgacaaattgctgtagagcactgggtgttaggatgttcattttctactgaagtacttagaagtgtatatatgggctagagtgaattacaccgaaaaattaaataattttccttgaaaataacttcttttgaaaatattttctaataaaatttaagttttcgtaaggtaaacggagtccatatttcgagttgatttaccaa

SEQ ID NO: 91284 - DNA, 897 bp, Eucalyptus grandis
  Intron number 1 from transcript Egrandis_v1_0.053006m (loc us Egrandis_v1_0.053006m.g) derived from phytozome v7.0 (c hr-ID scaffold_9; pos 15521038 to 15521934 reverse strand)
ttgtcctctcgccccatctctgagttcctcaccaggcaagaaaaatttttgttgacgttcggaatttctaagtggtcattttgtcagaatttaggttctgttggttgataaatccattggaagattaatgcttgggtatgcaatgggacatgagacatgttattccaataaaaataactacttgccttagaatgagatcttttttctttttctttttctttttttttctttttctttttaaaatttgggcagttggctcaccaaaaggaaaatattgccaatggtgcaatctatgttttacatgtgaatttgtgtctcataatgatcagctcgctatattgctaatcgccgttacaggtttcgacaacccgtgcaacacccccatgcagaatcaaagtatctttattaactccatcattattagggagcagttttctttttattcatgccatgtcaatgcgcgctactgaaggttattagagttcatagacacacatgcagattttcgtgcttccagtcaagttcaagaaccgcgatcttgcaaaatcattgatctttatctgtctttttgactggattaatttactaatttaaatcctaactcttcgtctggattttactaacctctaacattattcgacttgatccagccaccagaacaagattaaaggaatgaagtattggaccatggaaatcctgattattgctaggattcaactcaaagcatgctttcgacccaaaaaaaaaaaaaaaaaactcaaaccatgccggtttcccaacattgataatgagaaatattaaagaacaatcgctggtgtttgaatattaattaatgaactaacgtgattcgtgcatttccttttcagctctggaacttcggccggagagagaaagctc

SEQ ID NO: 91285 - DNA, 480 bp, Eucalyptus grandis
  Intron number 1 from transcript Egrandis_v1_0.053007m (loc us Egrandis_v1_0.053007m.g) derived from phytozome v7.0 (c hr-ID scaffold_11; pos 3742102 to 3742581 reverse strand)
tttgctgacttgaaggagaaggttagggtgctattacttcgcaatgttggattatgaaaacccacacagcacaatagaaacattaaaaattcgtctcaagtgaatttattttcttcccctgattttggcccattgaggtaatttttctgtctcatatcgtttaattggtatatattgacgattcctgacaaagggaaaaaatggcttgtaatttctccaaagggataagaattatttcttgctaacatttcatgaggtaagctaactgcagcactccatgatcatgatgtctagtgattgaagttaagtagggtcaacttgaccaagtcaactctttaatattgagcaaatgacagcatccacatattttcaattaaaatggtgattttgggccttaaaatattgcatttgtcgaccaggcacttacctctgtttgattgaaaaaaaaaagttgacattagatgataacttggcagtggg

SEQ ID NO: 91286 - DNA, 1035 bp, Eucalyptus grandis
  Intron number 1 from transcript Egrandis_v1_0.046546m (loc us Egrandis_v1_0.046546m.g) derived from phytozome v7.0 (c hr-ID scaffold_4; pos 39355627 to 39356661 reverse strand)
aaagtataccgagccaaggctagctgaatttccaggtacatcacaaccgtctttgttccctcccccccccttttttttttctattttatttttaagtgaattcagctattataatttctttatttgcaaaaagacaatgtagatgatacaatcacacaacgcacgcagccgacaataaaatgtgtctagctgtctatatctcgtaccacgttatctgtcgtgtttcaattctttaagaaggcacgcagccgacaataaaatatgtctagctgtttatatctcgcaccatgttatctgtcgtgtttcaattctttacgaaggggaaaataatatatgtcgcctttgaatgtaaattaacacaatatgttgcctttgaatgtaaaattaacacattttgaaagtagattttgttaaccaatatttttcgaggcactcgttacaaatagacaactaaatataatagggaaaattactaaaaaagtcttaaacctattataattatgccaatttagtcctaaatttatttttttgaccaattgagtcctaaacattttacaattatttccgatcagtccatccggccaaaaatagccggtgacatttttttaataatattttttttgaaatattttattagttttttaatcttttattttccttctccctctccctccttcctcctccctcttttggctccgacgaccgggaataattgtaaaaggtttaggactcaattagttaaaaaaaaaaagtttaggactgaattggcacaattgcaataggtttaggacttttttggtaatttttccatataaaatatatttgcactttttagtggactgcttttgtcatattgcaatatatattttgaaatttaaagtatttccttgttagatattcttgaaaaaattcaagtgctatgaaaaagactcttcatactattaggattagagttgtcctaatttgagttaagacgtgcctaccttgcaacttactgtaggtagaagtacttggcgaggagaacaaatacatagc

SEQ ID NO: 91287 - DNA, 291 bp, Eucalyptus grandis
  Intron number 2 from transcript Egrandis_v1_0.053564m (loc us Egrandis_v1_0.053564m.g) derived from phytozome v7.0 (c hr-ID scaffold_11; pos 36289769 to 36290059 reverse strand )
agttcgtctctctctctctctccctctctcaagtttctgcttgttttgagcgaaaccctagtcgatttcactcaatttctttcagttttcttgctttcggacatggacgtttgacttggtggcgccagtttggctttgttttggtctttttcccttctttttgatcttcttcttcttgttttattttctggagggtaaaacataataatcttcatttaattttgtcatgggcaactcaaaactgaatgtcatcactcattcgtcttaattacgtagggaacttactacagc

SEQ ID NO: 91288 - DNA, 869 bp, Eucalyptus grandis
  Intron number 1 from transcript Egrandis_v1_0.002907m (loc us Egrandis_v1_0.002907m.g) derived from phytozome v7.0 (c hr-ID scaffold_11; pos 29529337 to 29530205 reverse strand )
tccctcttgttgtcgccgtctgggcgacgtttcaggtgaatgcttcctgcttgattcatgttcttgactcttgtttgaccggttcttttcttgtcgggaatgaaatgaaatgaaatttctggttatattctcgtctttcattctttttcggtgaaaatgttctcgtcttaatttgctttgcaccgtgatgtttctttttgtatgattcaatcttgcttttgtggcttttgttgtgatctgatgtttgtaccgttacggatgactactagtttcacttttttcaatgattggcattccatcgtttcgaaaaaaaaaactgttatgatcttattttccagttctcccacgatatctggaatttaattatataatttttctcgaccaaccttttcctttcttcgggtttgggttgactgctttatgacttatggtagttaggattggcccaattgtgatcctctggaagacggtcattccaattagtttatccaagattatgacacttaatctttgcggttgaggtacatttcaaaagtgacggatgatctcggcaataagtttagtcaagggcttgagaggtctcaattgcaggttgtcaaatgaggttgctgtttcttggaatctgtccctcatatattgcattaggtaaagtttagaagcagagatagctcaagctcaaatgacattcaagtcaatgaataatcagaatccatcaagtgaataatagagaactaaaagttttaggccatgctttgaagttttcttttcttcttccctcaaatatgtcaaatcctgttccaaacaacttttccaagggaagtttcccttacttatcttcagtctagaattcattttatggtgcctgcagt

SEQ ID NO: 91289 - DNA, 676 bp, Eucalyptus grandis
  Intron number 2 from transcript Egrandis_v1_0.039237m (loc us Egrandis_v1_0.039237m.g) derived from phytozome v7.0 (c hr-ID scaffold_4; pos 16097877 to 16098552)
ttgtttcacaaggtaaattctaaatatggatgtgtgcgatttccttcgttttggatgttactatcgaatcacagcacatatcagataaagcaataaataatgccaaagaaactaaagattactgtacaaaaattgattccttccataccattcttaacatccctagaattactttttatcaataatcaattaatggagagtttgcatacatttaagtggacttgatatcactagatcaaaagctcaatagccttctgaggatatcgattgctccaaattttgtacccacaaacttaacgtgaatttccaattcaagaaattttcttgattttgatatcactcgttgagtttccgaatggagaagtcccgcaatcggcacaccgattgggacttagctcttctgaaaagccttcttgtttttagagagaggatcatgaaaggaaagtgtaattgtagactagatggcgaaggtttcgtccacagtgaggcactatcgaattgaatgcatacaatctactcaaagttaatgtcaatattccttgttttgcaatagcatcttcttagcggtcagttgtcgtatttctaatatttagtaacatcaagtataattaatagtatcaacaataattctcggttctttgaggtcgtaaaactttgcctttcaatttgcaattag

SEQ ID NO: 91290 - DNA, 662 bp, Eucalyptus grandis
  Intron number 2 from transcript Egrandis_v1_0.053046m (loc us Egrandis_v1_0.053046m.g) derived from phytozome v7.0 (c hr-ID scaffold_4; pos 19795734 to 19796395 reverse strand)
tgtagagtaagtgcgccattttcaaggactcaaatttaggtgggactaccaaagtctatgcacgcttattacaaggagcctctcgatctctatgataaaattgggaatgaactggccacaaaagaaagattgtatcaccttgcctatgcaaaagaagtcataagcattgtcgccacattttacatgcatccaacacaatttttttcccctaaaaaacccaacgttcttgtttatgtttaatttctcagaagaagaagcaagcgagagggtactttcatgaagccaaatggttccataccagctactcaccaacaatagaggaatacaagccccttgctttattaacgacatgctatggagagttatcgatcacagcacttgtaggaaagggtgatgtggtcacaagagatgcttttgaatggttgctcggtgacattgcttctcactaggtataataaaaacataattatcctccaatactctaataaattagatcgaccaccactcagtcgaaaacaatgttaacctaattacgccaaggttgttgacatacaatatgagccaaagagggggcacataacatctacggtagatttgttaatgaaagaaaatggtgtctcgaaataggaaaccgaggaggaactccagaaacgagttgttga

SEQ ID NO: 91291 - DNA, 865 bp, Eucalyptus grandis
  Intron number 3 from transcript Egrandis_v1_0.023666m (loc us Egrandis_v1_0.023454m.g) derived from phytozome v7.0 (c hr-ID scaffold_9; pos 38848857 to 38849721 reverse strand)
cgtatgtgcttactcgtgtctgcggcaaaatttattatggatttgacttgtcatctgtttgtcataagaactttctgtgagttcattaaagcattcatgctgatcatatggaatagggttatagcaaacgcagaaatgactttcctcaggctcatttgtttctcttttcatgcacatttactgctgccttatggaagctccatcgagcaattgttgtaatattcataccatagagtcaactcttccgatgaaattggattgccttttttgagtataggacgctggttatcttcttattgtgtatctgtacaatgagatgacatcactattgcttttttgcaacaatagttttcattcatggattatgtaaagtgttggttaagaatcttctcatatcgctctagcctctgggtcctcctcatctaaggatcaacatggctatcaaaggttcttcaaccttttatttttttggccaaaggttcttcaatttcacttgactgagagtggtagggggagttgctttcagaaagttcaagatcattaatctgtcctatttaagtctctcttgagaactgataatttattcgcttaatatgttaagttaatttgattgtgttgggacaagttgtaaccagaggaagcaagcgaacgtagtggaaggtagcaaaacttatgattccatgtccatgctgcctgcttagtttgttgcttttctctagttaatcatgagcaagcagatcaaagtgcttgaaaggttggcatatgggcgtttgttcacacttttggcatctctttatctgctttacttatcgaggcaataaggcattgggtgtttatgaattttagggctgtgaaggctgctgct

SEQ ID NO: 91292 - DNA, 866 bp, Eucalyptus grandis
  Intron number 1 from transcript Egrandis_v1_0.009104m (loc us Egrandis_v1_0.009104m.g) derived from phytozome v7.0 (c hr-ID scaffold_9; pos 15470015 to 15470880 reverse strand)
ctctgggccggcgtcgtcatcactgccgctgattggtgagcttctcattccgattgaagtgaaatcgtgatttcggttcttgtttttttgttatggtttttgtttttgtggcgacttcgtagttggtttttctgatttttcttgacaagatggttttttttttttttttgcgtgttagtttttgcctttgctttatgaattacaggggtcttggtgttggtgaggaattccggtcttgtggtgttttcttgaaaaaaaattatactgttttgtttcgtccagctttctgtttgtcgtggggtctgagacttgttcttggctttaatctgagctatgtgccggaggctttttggattttattttccttttatctgcaggagaggagttatccgagggttgattctttcttctttttcatgttgaggattgtatcttagctgagttaattgccgcttttttctgatgacctgtcaaagtttctgaaggaattgaattgagtattttcctgggccctttaggagttgtcggattttgtggtgactttttgattagtcaggtcaatttacagagtaaatagagttgatgaataatgacaatagtagattgagtttaagttcctgagttgctgtctgaatgcaaatgcagcccatcaagaaatagcctggagaaatgggagaaaaaggtctaacatgaaaagcggacctaatctttgcacattgtttctctttactagatcctgctaaattttctgaaaatggcaatcttctgatagaggggtgatttatgcaatctatacgtagaatgcttcctgaattgaaatctccattaatgttgctgcagctttatctttctgttacttgagaact

SEQ ID NO: 91293 - DNA, 965 bp, Eucalyptus grandis
  Intron number 1 from transcript Egrandis_v1_0.000871m (loc us Egrandis_v1_0.000871m.g) derived from phytozome v7.0 (c hr-ID scaffold_4; pos 37219362 to 37220326)
cttcgtttccgcttttcggacttcttcttaaagctgtaagtcgggtttgcttctacttcctctccgctccctctgcttctcatttttgctgtgctcgttgcacgccgccgccgtgtattgcgaagtccatttggattcttgatggtgattctttgaaggaatttcgtcctgtgagtccggtctttctttcgtgattagaacggagcagaaagtaggatgtccgttattgttgttactgcatcgccatgtgatatggtacgcgggcattcgaataatttccgaatcacgctcattcatcggtgatgttatcttctgaatatgagtatgttgttcgttactagaattggtaaagatttgagtattttgtggcacctttttggagggtactcggtgggatttcgtgattgtctccgctcttggtagagacgtgagtaaatgttgagggcacgaagacttctctttgttgtcctagcatttctgcggaccttatcgtgggataaccagaattatgcggaaaagatttccttttaactgatttctaattttcgataaaaaaatttaatcgtctgaagtttaaggttgcgacaaagtattattcgcatgtacttctcttacttctcttatttctgttctgcatctgatgatttctgcagctctttaaatttaagttgcttgaaaaaactgttcattagtaattgtggagatggtcattgttattagatagccaccatctcatgtttgtgtgcagagatggtcatttttactggttcgagtgattctgctggaaatttacttagcacagttgttagtactacgagctctatcttgctttgttctacttgtccatgatcgatttttgaaatcttctttccctttttcttcagtaatatatgttctttttctgatggagttttgttcttcgctgcacagaataaagatttgatattggtgacatccgagtgaca

SEQ ID NO: 91294 - DNA, 670 bp, Eucalyptus grandis
  Intron number 2 from transcript Egrandis_v1_0.009774m (loc us Egrandis_v1_0.005409m.g) derived from phytozome v7.0 (c hr-ID scaffold_6; pos 30790424 to 30791093 reverse strand)
cgtgttccaattgtcagcgttgtggtaaacatcaggtctggtttctcagctgctttttcagcctttttttttgtctttccttttctttttgtttctttggattatattcagcaatcatggctgaacggggcagttctagttagtttcggtttgaaattttttttagcagtttttagcggaatacccgtgactatggtgattctgttgatagcttagatggtctagagctctcaaccacagttctagtaagactgctacatagcaagtcgaacttcttctctcaaaggcctgattggttactgaagtaattaaaatgatggtgtctgctctggtggttgattttttatgctgctgatatatgtcaaaaaggcttggaaagttacgaacagggtattaatgatctgtcgtgtttgttacagctgcaataatagatggtaacgttccttttcccctctaccgagaaatttcgttttttgttctgttgtgctgttcaatgttcagttatggacagttttcatatcttttctggatttggaacgatcagataagttataagatgctgttgactggtgtggaggaccaggatatctttttttcttttggtttgtttgtaactgtctcttgcaataatccaggatccaagatttcaacctcaattatcttccaccta

SEQ ID NO: 91295 - DNA, 1008 bp, Eucalyptus grandis
  Intron number 1 from transcript Egrandis_v1_0.004485m (loc us Egrandis_v1_0.004485m.g) derived from phytozome v7.0 (c hr-ID scaffold_4; pos 15125322 to 15126329)
cattgaagaaagacaaattgatcaccattgaaaaggtatatctacaacggctgattatttttatttttctgagctttgatttagtaaggattttctcctcatgcaaaaaatttacaaaatataaaataaaatctgcaaaatcatcttggttagctgtgaaaagcataacggcgctttatatatataaagatttttcttagcttcaatttagtaaggattaaaaagaaacaaaataaaatcatctcaagtggttatgaaaaagtacaacagaaatgatgacactacgttttattggagacatgattccacagggtagattaaaataagtcattcatcctctatgaggatcctttatcttgcaaagtatctcaccgaatctcaattattaatgcactgagggatatatttcaagagtaacctctttcacataaatctatggttaggattaccgaggcactaaaggagaacgtaaacgagggtacagtatgtgcttgtgtcaactctctatcactttgtgactcatattacttctaagttctttatctcagcatgcttcatttattacactaggtgattaaattccatttggcctgttgttagtctgacacaaaagtttaaattagatagaggaagagtaaattcatgtaaggcatgttgtaattaagtacttaagaggtgtgggattacaattactactcccccttccatgtaagccaaccccttaaacgtgtatgactcagcttgttatttgtgaaatggacacatctactattttggttagccagttgttgtaaattttatcaagagtaataagtttaagaaggaagtgccaggacttgaactattgacctatgttttgatacgatgttagtattggttaaaccgtaaggtggagaaagactgcatataataaaacaaattataaccacgttatggccataaacttatatgtgaagttcaattccccactcaggtgtggaagtgtgaagaggggctcttaagctcaca

SEQ ID NO: 91296 - DNA, 838 bp, Eucalyptus grandis
  Intron number 2 from transcript Egrandis_v1_0.050770m (loc us Egrandis_v1_0.050770m.g) derived from phytozome v7.0 (c hr-ID scaffold_9; pos 17886568 to 17887405 reverse strand)
caggctcaggagcttcgtcatgaatgcagttaaccgatctgatgctcttcacggaatagctgctttcatatagccgcatttggtcgctggccgtgagttatgggcccaaaaaggtagaatcgtcgcttcccatgaaactaagaagttatagcctatcacataggcttaccataagataacttcaccgttcacatgattattttttgccagttgaatcgtcctcaagatttcattaatggtttttaaatttttgtatcttctttgcttacagttgacctttgagattattgggaaactgtttatgagcttgagccagggccacaattggatgaggtctactggttgcttcatgaaatggttacagggataaaagctcagccgctcaactccacggaactgcatatcaccgagctatgcaggttcaattgaattggaatctttgatctgattagttaggcgaatgtactaaaattcaaaatggcaattggagtctcattaacttgtgcaacgactcctgctctgtatacaagttaaatacgacactacaacgcaaagtgattgtaacaccaaggaagcaatattggattgaatcgtcctatttttatgcgaagctggccatttaaaaccccaaatgatctaaattattctccaatcctagtgcagtgccggaagaaagtcgaggcaatttttgaagtcaagccagagaaaaggaaaagccaaagcgaagaaactgtgaccgctcttatggacggaattcgacaaatcaaagatgaagaaggcaaaaaactatctaactaagaagttctagataacatcattattcttgtgaaagccagtt

SEQ ID NO: 91297 - DNA, 833 bp, Eucalyptus grandis
  Intron number 1 from transcript Egrandis_v1_0.041759m (loc us Egrandis_v1_0.041759m.g) derived from phytozome v7.0 (c hr-ID scaffold_6; pos 49737804 to 49738636)
aaactgggtacccaattgtggagcctgctcacgtaaaaatttcttttctgacattagttattgagtttaagtagtaaattctgctacatgttgacaactttttgttctttgcgatggaactgaagagttattagaatatcgatttgcggtaagtggatttagaagcaattatgttgctccgtctcttcacgagctggatagttctttctgtggataaagataaaacattcttacattcgtgggtggtcagttctttattcgtaactttggttctctaataaattgtatccgtgtactgggaaaagatctatccaggttgacgacatgatgaacccggcattcatctcttttgatttataatttgtagatgatggacttgtatctgcctgagttttgcttattcgcctgtgtttgctttgttttttcatctgttgcagttttctgttcatgaaaacatgatcctataacatgatgttcactatttactgcttgaaattttgcaactcgtggttcatttcttcacgtgccttgtccgtactaagaaagatggtcctctgatatgcattaggcaaagagtcttggctttaaatcttttagatgaatgaatgtagtctttaacaatttcaggcttcaaaattactcagtttggttactttgtcttcaatttgtctgatccattgggaaaggcatgtaagattttggttgtagtgcttgtattaccaaagcttccattggtgtccttacgtttctgaggtgaacccaggcatgagaaattgcgcgcattagctcattccattctattaatcaggagctggcagagccatcaagaaagg

SEQ ID NO: 91298 - DNA, 921 bp, Eucalyptus grandis
  Intron number 1 from transcript Egrandis_v1_0.020838m (loc us Egrandis_v1_0.020838m.g) derived from phytozome v7.0 (c hr-ID scaffold_11; pos 11191539 to 11192459)
cgattgaaacagtcggcgggatattcaccttgttgagcagccacctttgccatttacagcacatgtagatgttggtactataaaacaagaacgacaaaaagaagaaaggagaagagagtaattgtacttgagctgttgcaggaagatttttcatctgagaatccacttcagcaagggctaacttaaacagttcaatatccagctggagagtttgtgtttggcagtcagcatgcttgagtggatcaaaaaagttcctcatgtttttcttcttcaagtatagctgcacttgtggataccgttcgcagatgtccgcaacaacttcttttgcatcttgtatactcagcttacctgtcttagacttagcttgttaacttggataatgaagaataacagaaggcaggactgtttgatgtgttctctccctttttccatcctatcattacagtgaaaggtctgtccagtattgtggtgatctcagctcaaattgtgttttctccttaaatatgcttttcatatggtacaaaaatttagttaagatgcttgttaggagccatatgcagattgaaatttattaatgggaacataaattttgagagctacggaatatggactcctgccacttcagaggtatggagaattgtgtcaggatgatatatcaaaaaagtttaattttttaatttggagtatatgcgccataagtttggaaggtgatactttgtggtggacagtcagagtaccaatgtttgaagaggccgaaattttttgccttttatacatgtggtaattggggttgcatctataagtaatttgtaagaaaggcaattttaatttatgaaagttgaaatgtttgtttttttttttttcaaattctcaggtatgattaaagaatcagttcatttgctgagcagaagttccaaaggg

SEQ ID NO: 91299 - DNA, 1026 bp, Eucalyptus grandis
  Intron number 1 from transcript Egrandis_v1_0.054807m (loc us Egrandis_v1_0.054807m.g) derived from phytozome v7.0 (c hr-ID scaffold_9; pos 26544469 to 26545494)
gccgagcttgggtgagttattttctatcaaacacttgactaaattccactatcttcccattctacctctttttttggaactgaatcatgttttttaggagaagtataaaaaaaaatcataaatttattgtattgatactaatttactcttaaatctttcaattggaccaatttagtcctatatattttcacatcggtaccaattgagtacatccagccaatttagatcaaaaattgctaatacaaaagctggtagtcctatatggcactatcaacactaacgttaacaaattttataattgttaaatattttttaagaatttttgtatttatttttatttttttctttttccttaccctttggccaatgccgatgaggttgccggccataggctggtctgggtgcaccctcactggccaatggctagggttgccccccatcggccacaagcgagggcgtcaggcccctacccaaatccaagcgagggccttcgccccctcacccatggttggcaagggccatgacacccttgatggaagtaatttgaaggtgaaatattcacaacttacacaatatcttaccttatctcattatatgtcatcatattgcaccatatcttcaaaaataatcactacacttagaaatacaaacagactcgttaaagattatgcaacaattattactcttcttcaatgcgggtaccaaacagtctttggtatcaattctggaatcttggtgtcgaagtattggcatcgatgaattttgtttaatttctaacaactcttgcctagtctgagcggcactcgcccgctaataggcaaggattttggccctcacttggacccaatgccctcacctatggtcggcgagggctcggcggccctcacccaaaccaacttgtggctagtgatggttggctggcgacctctttttttttttttttaattgaatcatgtttaccttatgaattacgtcttgctttccgtttcaggggtcccggtgcggcggtgctggtcttgtcctgga

SEQ ID NO: 91300 - DNA, 940 bp, Eucalyptus grandis
  Intron number 3 from transcript Egrandis_v1_0.030745m (loc us Egrandis_v1_0.030745m.g) derived from phytozome v7.0 (c hr-ID scaffold_11; pos 2952262 to 2953201 reverse strand)
attgttcaagaccaggccaaaggccctcatttcccgtaagccctcatatgctgcttctttgagtgatgacattgattgcaaggctctttctttggactgaagtgcctgttgaattggggatgagatttcttgtgactttgctttgtgggatatatgatagtcttggatttctcttttaactttgtacaacctaagagagattccttttaagctcttagcattatgtgcttcttagttggttcttcttctttgactctggagctggctgtgtttctgtggttgaaaacaatcagctcttatggatggaaggctgtttggcatgataagctcttcccatccttgagttctggaacactacctgcatgtttactgacagaattttgtgcggtgccatttgtttttccagattgcttttggctattctctgaatctgtaaccttagtttaagcttgacgtgactttgacttagtgggtactcatacaaaaaacactcattctcgtgtgacttcccgagataattttgcaaaactaatgatttgtctggacggaagtactacaactcatataggcagttgacaaattccaggtctccttgcatttggtgttttgaccaccagtgtctactcgttggttatgtggtcaaacaatatacgatataggcagttctcctgatatatgaactgttgaagaacccgcattcatctatcccgttatcttaggtctctgcctctaccttgcagtttctttttacctcctcttttcctctttccttctttaaattttagttatttgggtgaacactgtttgtttcatcctttcctggtgggtcagttgtaggttgcacagttatgctagtttttcgtactgattgtttgtctgatggtgttctcctgactctcatattcctcaggaccagagccggttgtcaaggcaacagcac

SEQ ID NO: 91301 - DNA, 260 bp, Eucalyptus grandis
  Intron number 1 from transcript Egrandis_v1_0.040763m (loc us Egrandis_v1_0.040763m.g) derived from phytozome v7.0 (c hr-ID scaffold_9; pos 27603945 to 27604204 reverse strand)
gtcgtcaaaggccagtggactcctaccgaagacaggttaagaattgaaaaaacgccctttttctgattgcttcttcttcttcatcttcttttttttcccccgattttgaatgtttttcttttgacttctgtgttttcagtttattttccacattagcgtttctgggcattttttccttcaaaattttggggtgacatgtgataaagaaaattattcattgtctgtattgtttttttttgttttttttgtgcaggcgctta

SEQ ID NO: 91302 - DNA, 881 bp, Eucalyptus grandis
  Intron number 1 from transcript Egrandis_v1_0.015390m (loc us Egrandis_v1_0.015388m.g) derived from phytozome v7.0 (c hr-ID scaffold_4; pos 37294692 to 37295572 reverse strand)
gaaggctcatcgttgacttcttgggtaatgttggatgagactcacccagatgttctagtagttctcttggatagttttgacttgaaattcctatagctacatggttatgctttatagtctatcgatcagtatgtcagtctcttctttatttgcctgagagatgcaaatgccatgcagttgttgagtagatgcggaagtcattgaaaaagggaatcacaatttaaacgctatcctttggcatatcttccagaatccactagtatactgtttcttcatacagtaaataacccggaaacagttaaaagaagatgcataggaaaaattgagggttgtgtagaaaatgtaagtactcagcatatgtccacgttctgtcaacaagtcctgcacagctcctcacagtgccttaattactttccaaaatgagaaaagggccaacactgcaattgttggttttctcatggccatcattgatgatgaataccgcagaagaaatttttttgttttggccaagtttccttatttccttcttttttccttgtcttttggttgcatgagattgtcaaggattctctgcattgcccctggaaatagagctctatagataaatttcacctaacatagatacatttaattattcaaatcaatcacagttcatgaaatggtgacatgggatgggatccgtattaataccatcgaccatgagctctgtgtgtttttggctctatgatgtttcgcttacagccttaatgcggaaactaatctctagaatgttttttcccagttaaatcacaggaaagtgaaattcataaactaaagttaggtaatatcttttcttcgatgtggcagcacaagctctaggactgccatttctgagtccatat

SEQ ID NO: 91303 - DNA, 930 bp, Eucalyptus grandis
  Intron number 1 from transcript Egrandis_v1_0.011439m (loc us Egrandis_v1_0.011439m.g) derived from phytozome v7.0 (c hr-ID scaffold_4; pos 37582627 to 37583556)
cgaaaaagttgaagatttggtaagtactggaggttcaagctgatctttttttgtggttatgatgatttctagtgcttaaattggttatctatgtagaagcatattgagctcgtttatcgtatgattgctcggcttgctggtggagggaattagataatttagcagaacaatatctatccatgtggaaaaatattgcggaatcagccttttcacagcctcttatgcatgcttatttgtactattttcttttgctggtgctttaattgtgtccatttgctctgagctttagtttcttttgattactgaggccttcatacgttagttctgttctacaattatccaaattattttatgcttggaaataatgaattgaacttgaattatgtagttacagatgtaatctatatcgtgatcatgcatgggtttttacaaataaataagtcgaactatgcaggctagattctgtagaggcaccagtttccagtttgctctaccttctttttgatcatatgaagagcacaagaaagagcaaaaagctagcaaattgcagttgtcttttctttgttcacttattttcttaagtggaatgataatctttagtatgttttagataatctcccttgatgcaacctgtgtcctattttgggttccctgcaactttttttttgctgaatttattgattgtaaacatgaggttggggagaagagggtatatcatatgtaataaagaaattgcagagaatttaactagatcgtcggtacttgtggatccgcgaaggtggtttcttgccaacctgggcccatactgtgcattttcatatataagcacttgtgtacattatctctttgaaaactaagatctgtagtagattatgtaatttaaaataatttattcaattcttgccaatcattttttctgatgttgttagg

SEQ ID NO: 91304 - DNA, 726 bp, Eucalyptus grandis; identical to SEQ ID NO: 90655
  Intron number 2 from transcript Egrandis_v1_0.008878m (loc us Egrandis_v1_0.008878m.g) derived from phytozome v7.0 (c hr-ID scaffold_4; pos 32507296 to 32508021 reverse strand)

SEQ ID NO: 91305 - DNA, 671 bp, Eucalyptus grandis
  Intron number 1 from transcript Egrandis_v1_0.054940m (loc us Egrandis_v1_0.054940m.g) derived from phytozome v7.0 (c hr-ID scaffold_4; pos 40767677 to 40768347 reverse strand)
acactgtgagtctttgcacactctcttgcaacttctttctgaagagagagctcatgggaacacagaccaatttacttggtagaaaaagataattctaaccaactttcactcacaatagtttttcaagttcatggcatttccaaatcatccataacagctaaaaactaaaaacctaatgccatatgatttcttaacaagtggaacatatatattttggacagcttattgatggaaacatagtgtgcgtgcacttatgggtcggtgtcatatgttccagttgtgtcgtacaagatcgaatggtatagactccatatcatggttaactctatgttacaaagctcaacctattaggaaagcaagttcgctgcatgcatcagacgtactcttttacacttttatgctgagcttaggcctatgaagaaactcaagatcaaaatggaacaatgatggataaggaactaggagcaccggagaaataatgatgacccaaatagaataccaggttacatgaagttggaaatacttgtctcctgctccattatcatatgcttccacaggcgaggaattaatgaatacctgaccttatatcaacacattgtacatacataacttataattgtatgatctcgagaacaggtatcgaagcataacttaccagtcaattaacgtcg

SEQ ID NO: 91306 - DNA, 714 bp, Eucalyptus grandis; identical to SEQ ID NO: 91042
  Intron number 2 from transcript Egrandis_v1_0.026010m (loc us Egrandis_v1_0.026010m.g) derived from phytozome v7.0 (c hr-ID scaffold_9; pos 10893969 to 10894682)

SEQ ID NO: 91307 - DNA, 429 bp, Eucalyptus grandis
  Intron number 2 from transcript Egrandis_v1_0.047081m (loc us Egrandis_v1_0.047081m.g) derived from phytozome v7.0 (c hr-ID scaffold_9; pos 26688841 to 26689269 reverse strand)
ttattttcaactacctctgcctccaactgtttcaggtgatgcatagccattctcacttctccatgtcacaacattataagcctcacatagagaatcaaattcaagagcccgtcgatcttttgaatagctggaagcggtagaatgctttttgtttattgttttgtattttcgttgcttgaagcatagaatcccgggcaaacggacaacaagccatctgtttttcaccaaattatcatcgcaaacagtttctgtgtggattctgttgaaatatagattactccgtcagtctttatcctctaggacttggcctttagaataatgatctggttcaacggacgtcacttgtattgcactcatttttttcttccattattctgaaacggttgtatttatgtgctgagattagtgtagagggagagagcgggaaag

SEQ ID NO: 91308 - DNA, 781 bp, Eucalyptus grandis
  Intron number 2 from transcript Egrandis_v1_0.042736m (loc us Egrandis_v1_0.042736m.g) derived from phytozome v7.0 (c hr-ID scaffold_6; pos 27275200 to 27275980)
aggttagtccccgttgatttttccatcttcatctgcttgatccgatcggtatttggaacttttatgttctctgtttcctgcattgacttaaagagcactgcaatccttttcagatgagttggtagacaagttttcttttataactcttttctttaatttctcttcttcttttttcttggaagagattcctaaatttgtgacgctagttcgaggattctctttttccatatcagttgaatggatgttttcttctgggtgaagtctgattcagtaatttgaaaagttatgatcttgaatgagaaggatcggggatttatatggttcgttaaaataccctataggcatgtttgatatgtaaatggttgttcgttctgagatctttacaagccaaaagaactttcgagtattgaggtgcggaacggtcatgatccaaggtgatctgtgaggttccactctctgtttattccagatgattaaagtaggtcgcaagaatgctcttgatgctagattgaagagaactgcattccttctatttaggtgatgatggcagttttgttttagccaataagaggacgtacgataaattgctcttaaatgtgaatgtagacaactacataacagcagaagaccttgcaaaagggccaaatgtaatatcgctttttaggtcatgttctctttcttgaagcatgttgatttgatttagtagcctttccgaaagtatgtttacttgatatttgaaacttgttccctgacatacagaatatccaccaagggtatccta

SEQ ID NO: 91309 - DNA, 646 bp, Eucalyptus grandis
  Intron number 1 from transcript Egrandis_v1_0.017757m (loc us Egrandis_v1_0.017749m.g) derived from phytozome v7.0 (c hr-ID scaffold_9; pos 32063250 to 32063895 reverse strand)
ttctagctctccgcactcatctggtaaaacaggtgttttttctctcttttcttttttttgtctttttcttttcacgtgtttgtggattagatttgcaaagtcctcttgaatccagcttctgggtattttatctagcattgaatttgatcgaattgctcgtttttgatgcggtgtattcgttttgtttcagcaatttgtgagcttgatatggttggagcttgttatataatttattttgctgcatatttgatttggaactgtgctggcgtgtttgatgacgatcttaatgacgagaggaacggacgatgatgttggatggaaattgaggtgttgggttttttgtcttctttggtcctttaaaatctttgaacaaagaaatgaaagaagagagcattgatattaaggaaatgcaaccctgatcaatgcttctgtcgatctgtatctgttctccgttaaaaatgttgggcaatgtccagatatgaaaaatcagattttaggttctctttctacatgaagagatgatgggcttagacatggtgtcttgtttttgctgtttgtccagagtgagcgtggatggatttgcatgttgtgctgattgaagaattgttctcgtcgatgcgctgaagcttctgattgtaaggcgttg

SEQ ID NO: 91310 - DNA, 492 bp, Eucalyptus grandis
  Intron number 1 from transcript Egrandis_v1_0.043881m (loc us Egrandis_v1_0.043881m.g) derived from phytozome v7.0 (c hr-ID scaffold_482; pos 5084 to 5575 reverse strand)
aagcgtccggcaagagttgccccggtggagccacggtacatacaaatacatctaatgtctaatttcattataatcacacaataataatgcgagtctctcccaggagatgtcgatctccatcatgctcatgtggctagagtattttgtgtaagtaactatacttttctaacacagtccaacttgcacaagaacactaatagaaacaaaaacggacacatccgtaatcttcaataaaatttaatattttatgaacttcttgaccaatcatcgagtgcaagataaatagaaaaattatttagcctaactatcacaattagggtttttcttgcttgtcaatcaacatgtgccctctttagtgacacttacgttttgacttatagttacttaaaagacaaatgttatttttatatattactaattttttgttgttgggtgcatgtatccgaatgctctatagacaattgtcttcagcgactcaaggaatattgcggt

SEQ ID NO: 91311 - DNA, 822 bp, Eucalyptus grandis
  Intron number 2 from transcript Egrandis_v1_0.017962m (loc us Egrandis_v1_0.017962m.g) derived from phytozome v7.0 (c hr-ID scaffold_2; pos 43829130 to 43829951)
ctcaccgaaggcgatctcctcgcggtttttgcccagtaagtttgcatctattgcatcttgttcgtggagtcaacgatccttgatgaccttcagaacaagaaaaatgtagtaatttcacaaacggtgaccagtaagtggcttgaaacgaccaaattcaagtaaatggctcaagtgtaccacttcgcgaggtgtcatttcaattcactgatttgggaactccttcgaactcaaagcttgaatggaaaggaccggacttttggacttgtgtaaccacgttttgcccattcatctccatgttttttctgagcatctacacatatcacatacatattatagctcttacctgcattcttagctgatttcgaggctttgagatgtggaattctgacccgtgggtagggaaatcaccagctgctatgatgtttcaattctttgtattagttggcatagtcagtccaggctgcagagactgtggagtagagaaagttattagcattgggtgcatatctagaagcctaaggtctcgaatactttgatttcccaaatattgcagcatgtatagttttttaagatttattcatatgtttgtggaattgatgtcttgctctttgtgaaatcaagcttttagtaaactgtgattgatatttgctcttcttcagttcctttatcaaggggtacagataaagctgtttcaatggggtctcctgcttcatcgtctttttaatggatacatctgttaatttgaatcttcattgcggcttttgaaattgattttgacattttttttttcattaattagtattctaatgggtttctgaaggt

SEQ ID NO: 91312 - DNA, 944 bp, Eucalyptus grandis
  Intron number 1 from transcript Egrandis_v1_0.049703m (loc us Egrandis_v1_0.049703m.g) derived from phytozome v7.0 (c hr-ID scaffold_11; pos 27889469 to 27890412 reverse strand )
agtctcacagccccagaaacctcctcttggctctggtagtttttctttccttattattcgatcttatatgttgtatgatagaccgacccgaccgtttgagaaattttctgtcccatcactctttttctgtttggtcttcgtcttttgcctagcgtttctgggtatctgctttgtcttcgtggttttgccatttggggtgattaattgttggcccaagagtaaaaaaaaaaaaactttttgggctatgatcaagttatctgataaatccgtatgcatatatttactgttttttcataagcgtatgaatcagttctgtagacttggagtccaaactcaacagcatttccgtggtgtcttttgatcaatggatctcgtactcacagacccatcacttggtgtttggcatacttgattattacatatcataatcgatgggattgactggatttttgcatccgtcgccgttcgcatgtcacaagacaatgcaagggaatacccacttggttttggctcaatgatatttactatttatcttgctatctgttgtccttacttatttctcagtgcttcattggactgtccatatcgtttttgagtgtgggtgtctgataatgaagataagctcggccttctgttcccacttatctttcgcactctctttcggactcttatatgatacacacagtgtaacttttgtcctttcataagtcaatcaatcattcctcgatcatctttcacttgctcgcggtttcagttgtgaaaggaggcattgcatttttgttaaagtacggggcaaacacctcccaactgttcatagcacgagaagaatacatcacaatcaaatcagcaaaacagtaccaaattggttcttaatttagtgtttcctttggtctttgattcttcacacaggtgggtgaggtcggggagttgtcggagatattcca

SEQ ID NO: 91313 - DNA, 755 bp, Eucalyptus grandis
  Intron number 1 from transcript Egrandis_v1_0.051754m (loc us Egrandis_v1_0.051754m.g) derived from phytozome v7.0 (c hr-ID scaffold_7; pos 48247061 to 48247815)
cacgtgggaccccacccaaggagtttgtgtagagagtaagttttttaaagtgttttttgggcacttctattcttccatatattttatttttggtgcaagagtaaccataaatcttatgtacatttatattttatgttgcttcttggaaaccctaattggtaatcaattattattcgattgctccaaaaaatgagtaagaagtggattttctcgtttttttggtgcagaagtgatatgtcaagatccaggtggttgtggaacggataggattgctcttatagcaggtacctgcttcctattctaattgtgacatcttgatattttttttcctgatgtgttctgcaattataatttcattttaatgacgagcataatttttcagtttggaaaacttggttttactttacaaatcataagttgatttcaaaatttaaaagcatggctctgattccactgaatttaggctaaggaaatcatggtcgatgaaaccaagatagctcaatttaacaagattattcaggaatagaatgtttggacacttcatgttgaatttgttgatcgtcaaaatttgcatctagctgaattcccttcacagtaggtcttagattgtgtgaagatgacaattacagtttgagctacgtgaaagcatcttgctttgttgtcttatgagatcaaatgcagtcgtcaattcactgtttgacaactttgaactcgttgcaggtttaacgtctgggataggtgtggcccttcttgga

SEQ ID NO: 91314 - DNA, 689 bp, Eucalyptus grandis
  Intron number 2 from transcript Egrandis_v1_0.031277m (loc us Egrandis_v1_0.031246m.g) derived from phytozome v7.0 (c hr-ID scaffold_7; pos 43105404 to 43106092)
agctctcgagaggtaccctcccgccaagttgcaaggtgagtcgagttgcgatcgtttgcgctttgcggcgcccgttcatggtagtggcgaaacgattgcggtcccgtgttaatgtacaattgcgaaatgcccgggcgttgggttctaagaatggaaggaaagaagacgatgaggcattctgggtttgagtcctttatgattaacatgcggagtgccacgagcatgaaccggccatagtagattgtttcagtttttctgcataaaaatttgattttgacagtacccgcggtgcctttcctcatcggtcggacaagaaatgaaggaaaagtcagcttgaaagcattcgtcgatgatttcgcgagcatcagtcctatttcatttttccctcatgactgatttgttgctttacactttccttaccgactgcaatcagctgtttttcttcaacggcagttaatccgaactgctttgtctgtttcctggcaatttgggttttcttcggaatgctgcatctgtagttcttctaaataatagttagattttcttttagcgtgtgtgaaatgcaggcgcagacattaaggttcatttcctttcttaaaactctgtgtttatcgaattggtttccactgtccaaggctaagcagctatcacttgcaggtatacatcgtcacttcgtcctttacgggcta

SEQ ID NO: 91315 - DNA, 493 bp, Eucalyptus grandis
  Intron number 1 from transcript Egrandis_v1_0.009540m (loc us Egrandis_v1_0.007888m.g) derived from phytozome v7.0 (c hr-ID scaffold_2; pos 5547372 to 5547864 reverse strand)
cggagttggctcagttccttccaccatctctcgaggcaatctttttccttgaccccacctcgtttcccgcgagaaagcttcgtccctttctttttttatatatttgttttcagttcttgggtgggtcgtatgtttgactgtcggttgatgccattcgtggggttgaattcgttgaccttctttgacgatttcttgaagttattgatagtgggtctctctcgcttaaggagtcttctctgttttcttgaaattttatctccatgaccatcatcagccatcatcacccggaaatgccaagatctcaggaaggccacgtgattgtcaatgttatatctgatccacgagttataatcactggaacgtcacatcccccagaaatgccacgagtttacttttgattctggattaaagctggtttcctgagtttctcacgtgtggatgttgttgcttttccacagcagatctctccattctttaccttttgcgacagtaa

SEQ ID NO: 91316 - DNA, 603 bp, Eucalyptus grandis
  Intron number 1 from transcript Egrandis_v1_0.027548m (loc us Egrandis_v1_0.026864m.g) derived from phytozome v7.0 (c hr-ID scaffold_11; pos 29900984 to 29901586)
cgagagcacccaacgatctattcggaggtgggtgaatttagtcagtgctccgcttattctggagttgctgggttacgctccgtgaagctatgacgggtgcagtttcgtttgtatgggttcctgtcagccgttcgcttgccgttgcgaattctcgttgcgtgacgttcagcttctttggagctagaggttctggagacgtgatttctatggcggagtgtgttcgtggctggctagatgagaggattttcagttggaagatattctttactttgcgtctagtggttttcggtcatttcccgggctgttctcgttgcttatccctctgtgttgtagttagcgaggaaccttctgagtacatgtaaactctgggtctgtctccatgactcactctttaggccagagtaagagaccgagcgtctgtaagcactcggccgatcttgtgtgctcgagtaggattccgccattaagcccacttacacctttgtcctctcttgtattcactttacttgtttaaaagaaaaaaaaaatcaaaagagcagaagagagtgagggtctgattatgcttcttcttcgacaggaagggcttctgtaagaagcttttac

SEQ ID NO: 91317 - DNA, 592 bp, Eucalyptus grandis
  Intron number 3 from transcript Egrandis_v1_0.024691m (loc us Egrandis_v1_0.024691m.g) derived from phytozome v7.0 (c hr-ID scaffold_2; pos 11820338 to 11820929)
gttggctttctggtgtggacatcaacactcagcaggtcatctcttttaccctatatttgattcttataggaagcatgtaaattgtagttacaaactaatgaaatgagctagagtttagctctcgtctgcggttggaagagagatctgtgattagacttggtttgggcatcacgtacgtggtctggtttttgaatcccgatccggtttagttcggtttccgcctgggaaccgagaaccgaacaacatagtacaggttcaaaaaaactgggactgggaaccggactgaattccaccagaacctagactagtcttgttcttcaattcctgatttttaccctggaatcatgctcgcccccagttgaaggttgtgactttggaaattcactcagagagttgtacctcaagatattttaaatattttcactcttggttgataatcatatgattggtttcttttgtccctttttggctagactataattgcttatagggtttccagtttgatccaattgttaacaagactgctttttacttgtgccgtgttcttataaaatcagagttttgaggctttaaatcagcgtgcggttgcagt

SEQ ID NO: 91318 - DNA, 849 bp, Eucalyptus grandis
  Intron number 2 from transcript Egrandis_v1_0.007348m (loc us Egrandis_v1_0.007348m.g) derived from phytozome v7.0 (c hr-ID scaffold_7; pos 11394440 to 11395288 reverse strand)
gctactcgaacggttcttggcgtgcaagccaacaggttggtccaccatcaaatgcaaccctcattgaatacttatagacaaaaaaaaaaccaaaaaaaaatcttggcgattaaaaaagaattggaatacagatgtttttatgtataaaaaaactccaattttaactccaatcctaagactaccctgaaccttctttttgtctagaaaatatgatcgattttaactcaagtgttaaatttgccttcattattcctcaaaaatcattggtagtaatccatactttccttaatttttcgcataaatgaatggttttgtttcatcgcctcactaaggaggatttgttatcaatatggaaatgggagtcaacgcggggagattcaaagttaaactaaaaaattcgggacaaatttggagttagagttaaaattaatgatttttatagacaaaaaaagaagtgtacaacagatttgggattgaatctaaagttccgatcttttttaaggggaaaaagaagtttgggacataattgaaactaaacctaaatttgagggcttttaaggaattagacctagtatcactagaccatcaaagagttatacaccttacatcatttagaaactttctccatgttgaaaaattatggggtatgcaagtagagagcttgaactagtaagaggatgtgacttccttgatagaaattgcagtacattcacgaagaatatggagcagttttgaatttgctataatgaattaccccgtttaatcaatgccaatgtcgatatcggtcaattgcaatcttttttgaatggaacaggtcgagcgaagaacgacagagtgatttttgtggct

SEQ ID NO: 91319 - DNA, 518 bp, Eucalyptus grandis
  Intron number 4 from transcript Egrandis_v1_0.017561m (loc us Egrandis_v1_0.017561m.g) derived from phytozome v7.0 (c hr-ID scaffold_7; pos 44805302 to 44805819)
ttgctgttgatccgaatagcaactcaaagaagcaggtatcaagatattcaattttgatggactcataaaagaaatcgtgttaaaaatgttggacttgcagaataatgttttgcttcgattaaacttttagaatatcacaaacttggtgttaaatatgtttgttttcataccatatatagggcttgtcagctttagagtatcattatattttactgttggattttcttatcttttcttttctttttccttgctttttcagttaaatttctgttataacctgcttttcccagtttcacatatttatagaggaacttttggacagttattgctttgaactgtgtatgcagaagatatgtaagacctgacatcactgctcgtatcaatgcaaacttttaataatacaaaacctaatggaggaatcaatcttttgcagcttttcacaccgtaacttttaataagcttatatgctaaattctcatgcaggcactggaagtcatacgtgaacttcaaaagcatta

SEQ ID NO: 91320 - DNA, 760 bp, Eucalyptus grandis
  Intron number 3 from transcript Egrandis_v1_0.018444m (loc us Egrandis_v1_0.018444m.g) derived from phytozome v7.0 (c hr-ID scaffold_2; pos 14474854 to 14475613)
cttgcccatcaacaagccccctaacagtcttcgtatgaattgttaatgatcagtaattgcggtgtggatgttgctcgagctggcgagatcatactaaatgacgccctcgtgcgaattggttatcgttgtgattgtgtcagccttctggttgtgtttgactattgatctgcttgcgtgaatgccttctatattgtccctttggcataggtggtgccgggaatcgaattgtgtgagagagttgttggatcatgaattaatcacattttgacccttgctgcacagcctgcctctgtggaagcttgaggatttgtagcacttcagtttgaattttatgcttggctgatcgagtatggaggatatttaaagtccttttcccctgaactgaaaattacactggggaaagtgttcttatattatggtttgatcacctcagctatctttgtattgtaactcatgtgaactgcttctgagaaaagaaaaggaccaagttttgcttttttccaaccatcagaagcagagcgcacacacaagcacattaagcagaagaaacattttgaggaaaataagtactgctcaataatcatgagatccatgaagaattttgccttttccagtcagtgttggtgacaagaggttcactttgttagaactaaaagtatgtatatgtggagcaacctaattcttcaaaacgtcaatctgataatggccttctgaattttctgtgttacttaggtgggcacaagggttttgataaggtgat

SEQ ID NO: 91321 - DNA, 816 bp, Eucalyptus grandis
  Intron number 2 from transcript Egrandis_v1_0.005552m (loc us Egrandis_v1_0.005552m.g) derived from phytozome v7.0 (c hr-ID scaffold_7; pos 49396737 to 49397552 reverse strand)
gaaaagttgtggctttgtaagtcatcttctctctactgaagatcttgcggttggctatgtagttttgctgggctcgaatatttcttgactcgggacatttggaattgctttgatgatcggtgttagttgattgctcgttgactcttgatcaccacgggattagagagagttcgctgcttggttcttttcggtttatccggtgttctggtccgatctatatccgataaagatcctcaagttcatgggtggagtatctatgccggaatatactgcaaatgatggatgtcagtctagttcttggaattgcttatggagtctacgtctataccatcattcataatgaactgcccaataagcagcacaatagatatagattatggccatggcaagcgagtagtttaaggcatccgtgttggttagctagatcaacctaagtgtgacattaagttgcaagaattgttgtgacacgagtcagtgttgaagaaagaggatttcactcggttgactttgctttaagcatgaaggcgtatgtatattgatttagtctctgtcttggaaaatcaaactattcttgttcagagaggctttatgtgtttccgccgcctatttcattgatgagaaaactcaactagtcccctatgattatctttgatcatatgaattacttgattctcttttgctttttggagaaattctctcattaattatgtgacactttggaaggtttggaactggtatacatgcctgtcatttctgatgatcaatgcaataaaacttgtaggaacttaagagatctttgtctcggaggaactctgg

SEQ ID NO: 91322 - DNA, 583 bp, Eucalyptus grandis
  Intron number 2 from transcript Egrandis_v1_0.034933m (loc us Egrandis_v1_0.034933m.g) derived from phytozome v7.0 (c hr-ID scaffold_2; pos 39482223 to 39482805 reverse strand)
gcaactaggagcaacaacctctgagtcaaaatcaggttattttacatattctttttccgttttctgttgatattattgccttagaaagtaaattgctggaaagatcacacgatttagaaaggaaattgccggaaagatcacatgatttagcagaactcaaatggttggaatagcatattatattgtgtggaatgcatctggaagaatgatgtcagtatgcagaacttcatggaggcttccatttatatcttaattatccgaacattcgagagtctagggtcagtagacatgatactcatttgcttaagcgatttcttgagatctttagcgcaacaaaaattctcgtggtgtctatttaaaacaatgtttattcttatactttttttaaaaaaaatttccctgttttgaaacaccatttggtatttcaactccaagaaggggaaagaaacataaagtatattaaggagaaaacatggcgcagaaaagaaaaggagaaaagttaaccatttatgtttcccgaagtatgataagagcagtagttctttgatctaaatgtagcaatcgcaatgttcacagctggaat

SEQ ID NO: 91323 - DNA, 1068 bp, Eucalyptus grandis
  Intron number 1 from transcript Egrandis_v1_0.021779m (loc us Egrandis_v1_0.021790m.g) derived from phytozome v7.0 (c hr-ID scaffold_2; pos 18388735 to 18389802)
tcccccaagcggtcgagttcccgattctccgcctggtgagtggcgatcctttcccgttcctcgcttcttgtgggaatcgccgattgttgttgggttctgaatttcggcgtggatggtatgcgtatcgcgtcgttcttggtgattctgaacttcgggatcggaaatgggcctccttttctgggtttgtgtttccattgggtcgatgaggttcgtgggtaggaatcggacttacgcttcgcttgtgcatgaccatcgttttctttctttctttctttctttctttcccttttgcccttttcttgtttccttcgttgcgggggagatgcgtcgggggaaatgttttcgggttcttgaatggttctgcttttggcatttcgacttttcttgatctgggttttggtttcttgacgccattttgtgataatgctcgagtttctggtgggttgaaagttttgcggtttctgtaatgctgatctgaggatcgagctggtggtaactgtggctcgctcgagcacgtgaagttgtgggttgcaacgtccactcaatgcgcacaacctgtttgatggatggtctggtagaataaaaagcagtttttcttatctaaacttcgtgctcttagtgctgcttcgatttcactctccatgtccaggctataaaacatttgatagatctagagacgagattattttggagtgctgctttcattttgttatgcttacctaggcttaaattgtttaatggtgtactgtcaaaagattagatagtaaaccttatattaattttttgaggatacatatacccattggtacattattggttatttggttctaattgatgtatactggttctgtgatgctatcagcattccattcctactgtaactaatatgggccatgcaagatcattgatctgcagtagataattgataattccttggttgtgcatctattgtcactgtgcaccattgctaaacatcctattagcaccatagtggcgtcttcttgatttttgtattggattctggagtctgcaggtgagacactggagcatctgccccggagtataagt

SEQ ID NO: 91324 - DNA, 728 bp, Eucalyptus grandis
  Intron number 2 from transcript Egrandis_v1_0.023218m (loc us Egrandis_v1_0.023218m.g) derived from phytozome v7.0 (c hr-ID scaffold_11; pos 20568800 to 20569527)
gctgtaatttgcctccctttcctcatcttcaatttcttttgttttttcaatttagattgtctagtgtgcaaagctttctgggtaacttcattgctagagtctcagctgaagtaattgccttaatatcaatcaaaaagtttgttggtttgacatctcgagctctgtggaaagaatgtggagtggataatattgtcttcatgtcgtttcatgattgcctatatgagtctaccataagtatgcttaagattaagaatacactttcaaaataataattacggagaatagaatagagtgattgcagcttttacagtctgtgggaactgctattttctgattgtgatgcttccttgttaatagtgtttcttctaatggtttgccttccataagtttggctatagcatgtgcttctgtttgtcttgagttctgatggatcaaaattttcatttttcttaggctactaatgaaaaccttcctccaaatgttataaagcaacttgcaaaggaactgcagatgcttaataatacactttcaaaataataattacggagaatagaatagagtaattgcagcttttacagtctgtgggagctgctattttctgattgtgatgctcccttgttaaaagtgtttcttctaatggtttgccttccgtaagtttggctatagcaggtgcttctatttgtcttgagttctgatggatcaaaattttaatttttcttaggctacaa

SEQ ID NO: 91325 - DNA, 544 bp, Eucalyptus grandis
  Intron number 2 from transcript Egrandis_v1_0.013051m (loc us Egrandis_v1_0.011446m.g) derived from phytozome v7.0 (c hr-ID scaffold_7; pos 20067305 to 20067848)
ttgctctgctctctccggactgatttacgagattggtgagtcctcctttgaatctttgcctttgccaaaacacgggtcaagagaaaccgagtcgagcttgtcagatgtggtggtcaaccgccgagagtgaaatctaacattcccaattttcatgatcactgtcttattgtcttaatcaactaatacccttttctttgcaaatcgaacttcatactcatgagaggttgattttgaggcttcatgccgaacaagattgtagctaacaaccaagcgttataaatcaattattactttcctaggtgaatagttactatattacatctcttatgtcaatgactcaaaggggatattaaataaatggaattaagagacaatgacatttcttcttggttcaaaaagtaagttcatgtggcgcttgaattttgcatgccgtcacatgcaataagctaattacggcatgataaatggacatgtcattttgaaattttatgtattctaatgtggatgttcattacatgtattgcaggtccatttacgttcaatt

SEQ ID NO: 91326 - DNA, 361 bp, Eucalyptus grandis
  Intron number 1 from transcript Egrandis_v1_0.004667m (loc us Egrandis_v1_0.001898m.g) derived from phytozome v7.0 (c hr-ID scaffold_2; pos 61494623 to 61494983)
tgtttgctctgtctgaagtgggtcaactgtgccaggtagagttccctcttgctttgaactcgtttcggatgctaaagagacgacgtcgacatcgcacatcgcgaagaagaaaaaggctctttatccgctcctagttcagctattgatttttctattagaccatggcaatccagtaatctcctcacgtttaatctcatgttactaaatttctcttagtttctccggagttttactgagacttgctcgtagatgaattaacttttcgcatgtcggtctcttcttccctgcaaaaataatgacagagtatcccaaaattctgagttggaatcagctaacttatgcacgcgtttgattttttcag

SEQ ID NO: 91327 - DNA, 782 bp, Eucalyptus grandis
  Intron number 1 from transcript Egrandis_v1_0.017911m (loc us Egrandis_v1_0.015010m.g) derived from phytozome v7.0 (c hr-ID scaffold_7; pos 31812169 to 31812950 reverse strand)
agcttgtcaagaccgcggtatggttcttgctgttctcttttacttgaatacaagttagatgataggtgatgtgtgtccttcatctaccaatataatcttgcaacaagtaaagtaggcgatggcacgtgtttctccagtttgttcaccaacttgaataaacatcgtccgaaagtctaataagaagtttaaaaatcagtgtcggcacatacagtgagtttgacaattaagagtgaggcatgagttcttggcttgtgttatgtccactgtaaaacaggtttgatgctgaaagttcttgaataagaaatttgattaggattgtccatccagtagctcactagatatcagtatctgactattgatttgttaagctttaattggttacgtaagctaattattgctcacgactttgttctactcccacgttccgagttctgacatcctgcccaattgcgttaagaaatattaggagacagacacagctagaacatgtctcgaggcacaactttgttttaaaaaggtgctaccaatgttcatgcacattcgccaatctccatgcactgggcgctcatgtatcaccagctttagttaggcaagatccaccggtgtggccgccagatttccaccctaagcatgctccaaacgttacggtgcaaaaaacgcatctgcatctaacctcagcttcacatgatcgtggttttcaagcatacaactgcttgtatcataattcatgtcactttctgtaaacagaaaaccatcgcatcgccaggacgtggaattttggc

SEQ ID NO: 91328 - DNA, 588 bp, Eucalyptus grandis
  Intron number 1 from transcript Egrandis_v1_0.011328m (loc us Egrandis_v1_0.011328m.g) derived from phytozome v7.0 (c hr-ID scaffold_2; pos 4532758 to 4533345 reverse strand)
aaatcaccaccttcaccacctcaataagttgccaggtagagggttccttctgcttcagccgcttgatttctccgagacgcagtggtggaatttgagtcaaagacgttgtctttcttgtctttgttcttgtaattggagttgcgggaagtctttgcttttgctcgtttaggaactcattgagctggagaagtgtatagaagcgtcaagagtcgttcttttctgtttctgttgcctttttaccctgcccaaggtataaaaaggttcgcttgtcttgaaagagtcgtggtagttttggttgctaatgcgattgttcacttccatgttctcaaattttatccttttccattttgcggaagctgtctttaatgtataagcattcgagtcgatgtagaaaacagaagcattacatggttaaattcatggttttatttggagtttgtgcaagtgaaagcagtcgattgctatgactgacagattagtaacttcatggaacagtttcattggagcttgcgcaatggacaatccttctaattctctgctgtctgatgttcaggtgtatatacgttgaagaggaaggattgtggaacg

SEQ ID NO: 91329 - DNA, 806 bp, Eucalyptus grandis
  Intron number 1 from transcript Egrandis_v1_0.013090m (loc us Egrandis_v1_0.013090m.g) derived from phytozome v7.0 (c hr-ID scaffold_11; pos 23999942 to 24000747 reverse strand )
ctcattcttgtgagtggttccccgcgttttgtttttctcatttccggtccttcctctgtcaaagttgattctttttgtttttttttttccgggtttttgtttttctattatctgggtattgaatttatggtctattcttggttgggggaaatgggacgtcttgttaaagctctgtcatttcgaaaatggcgacaggagttgctttcgtctttgagtgtatgacctgacaatagtgctgataactcataggcggaggtataattattcttcttctgagggtcctctttatacgttatatatgattcgaatctcttcgtttcatccagtgttttattcctgaataattcagttaaaggtggcaactttgggtgggtgttcggagatcgagtgtgcctgaactgctagatgcgtggctcccagcctcccactgggttcgatccctcattcaaatctagtctgtagagcttgctttgtagttgggttcatattggacccaccaaaatttactctagctcctggtctggtggaggtaggccacgacgttggactgggaatctgcgcagaatgaattccttgtaatttggcccagtaggttgcatcgagtatgagttgaacttgagacttcatgccccttgagctgtaccgattatattaatcagttttgtcttggtaatattgtttagtgtattctagtatggtttgatcatataattgccgggcttactttgttgttttctgtaatttttagttttgatcaagaagataatttttgaaatgttagctgaggcttaatttatacaggttca

SEQ ID NO: 91330 - DNA, 290 bp, Eucalyptus grandis
  Intron number 1 from transcript Egrandis_v1_0.027583m (loc us Egrandis_v1_0.027583m.g) derived from phytozome v7.0 (c hr-ID scaffold_2; pos 10597737 to 10598026)
tgagggtaactggaattccctgccaaaagctgcaggtaaacttctgtccccaatagaatagaagaagccgaaaacaagaaacataagcaaaaaaaaacgcgcatgtttgtacgattctgtgagcgtattgagatatagagcatgagaagtccttgaagttgctttctttctcactagccctaatcatacttaccctaattatgccacccagaaaaattgtcagttatgttaacgctcttgttttgattggaataggattgcttcgctgtggaaaaagttgtaggctaaga

SEQ ID NO: 91331 - DNA, 728 bp, Eucalyptus grandis
  Intron number 1 from transcript Egrandis_v1_0.006596m (loc us Egrandis_v1_0.006596m.g) derived from phytozome v7.0 (c hr-ID scaffold_7; pos 47021090 to 47021817)
gagagccggggcgtcgtactggggatactgaaagggtaggtttacacgaaatttggtggttcacgcttgtttcgttcagtcacggttagctcaatgattggacgagtgagtccaagacaagtttaaaaaaaagaagaaaaaactggtttttatgtgtgaagatgacatgtgaacgacatttccttccgagctgctggtcaaaagagaagaccagtccccgattttgcaggataatcaaattaacttacaaactgtaatactagttcactcgacttgcgttgctctttatatacgctgcaaagttttgctctttattactatattctttgttaattttctcgttttaattgcatccatcgtctaactttttgtgcatactctaatagtatggtaaatatggtcatggaatttgcattctttccttatacaaaaagtagagacgagtataaactcgtactcttgtcatgaaagaaatttgagaacttctgtcccttgatgaactactcctaattgcctaaagaatttcttgcattgaccggctttgtgtttaggccatcattgtcatggtccttcttctttaacttaagtccgactacatatttgttggaacaaaatatgtttcctgatctcttgaatctcttgattcaaagaaagatataagaattaggtttgataagttatggactctcgaataatcattcaatttctctgaacttttctgggcagct

SEQ ID NO: 91332 - DNA, 488 bp, Eucalyptus grandis
  Intron number 2 from transcript Egrandis_v1_0.007214m (loc us Egrandis_v1_0.007214m.g) derived from phytozome v7.0 (c hr-ID scaffold_2; pos 47082601 to 47083088 reverse strand)
acaaagttgttttgggctatcttaaccatttgaaggtacgtggtactgaagaattaacatttgcatttcctacattttttctggtatctaattgtaatgggatgaagcgactacttttggagcaaaatgcaatcaaaattgacgggcttctgccattaactgaagtatgttggaattatatgcattatttcacactgcatgccatttatgtggtgctcgagttcgagataattgttctcagtaggaatgaatgagaattgctttgacttgtctccttttaagtatggagcgactgttctctgttcttatacccccagtttaaagattaaaaaaaaatgcccgtttcctagccattcatttggtttgtgcacactttccaataccaaaagataaatggagaaggaagaaaggtattcgaggtaagttaattttgcattttgtaattgatggtagggccccgagagtgaggagcttgctgctgcttcaag

SEQ ID NO: 91333 - DNA, 768 bp, Eucalyptus grandis
  Intron number 3 from transcript Egrandis_v1_0.015400m (loc us Egrandis_v1_0.015400m.g) derived from phytozome v7.0 (c hr-ID scaffold_2; pos 62253609 to 62254376 reverse strand)
caacttcagagggtacgttttctcaagctgatgttactgttccactcaccatttgcatttattcatgtcgatcgaatgtggcatcttgaagagattttgtctttctttgaggctaaaagcctttgctttaggcaagattatggggcaaaagtgcgattctatggcagaagtgcatttcaaatttggggcctttaggcttgtaagcgaggtttttgagggatatcataatggaacgagatggtgatggtatttttcttaatgcttagatatgattttcatacagttcttttatgcggcacctccttctcaaaatactcgcagtgattctctaggggttactaacaccacaatgcaatatccactgagaataaaccagttgcagctataagtttgtatgattttagatgatggtatatatagattgatgatctgtctcacaagcttaagaagtgagcatgagcaataatatttgaggaacttctatacttacatgaagtctaaatttttgtcctgttgatcaataatggaattaaagggaaggaagaacgtgtagaaaggaactttcgcttatctctggttatttaggtggtgattgcaatttcatgatttgtgacaatcacgaatgatgttttccctgtaagattgttacttctttgcctagataaaagccaatgtcagctgttgtatgttttttctaagttatatccgtatggttttaaaatgcttatttgttgtgcttcgtttacaaaaatggcagactgggaagct

SEQ ID NO: 91334 - DNA, 786 bp, Eucalyptus grandis
  Intron number 3 from transcript Egrandis_v1_0.039632m (loc us Egrandis_v1_0.039632m.g) derived from phytozome v7.0 (c hr-ID scaffold_7; pos 1653365 to 1654150 reverse strand)
gcaacgagggagcttgaaagatcacctctttgaaagtatgcgcacttgtcctttaacatgtgcttggtgcccttaatgacatgtcctacattatgttcgtactatataagtactcacggtaaaacgtgtctcccaagaaaactatttgattgctactagaatctggataataattttaaggaggaaaaaatgtcacttgtccttattatggacgtctttccagaagattgtagggttcggaaccataatttcctaaataatttacaatgctcatactctgtgattttagtaacgttttatcatctttgtctctcagtagtacatcttagggaatcatgaggcttaattctctctaacttggtcatttaggtgcaggaacactagagttgtatcatattgaggatggaacttagtacaaggcttgcaagtatgctagtaatgatatttaatggaagggacatgcctgccaattgaacaactctcgaaagatactaaatgtttttaatagtagggcatattcctttgcataagcattattttcattttcatgagaaaagaaagggaatcctgctgtagtttctaccatattcttgtcctgcctactaattctcagcagttattttccaaaagttggtatcagttttaaccaaggtatctttgactatggtggcttcagaaaggcaatattgatttatctgtgatgacaaatattttattagttaattcttgtgttcttttgtgggctgtgtagcggaattgcctctcacttggcgtaacaagacgaaa

SEQ ID NO: 91335 - DNA, 828 bp, Eucalyptus grandis
  Intron number 1 from transcript Egrandis_v1_0.024458m (loc us Egrandis_v1_0.018023m.g) derived from phytozome v7.0 (c hr-ID scaffold_2; pos 47217818 to 47218645 reverse strand)
cctagccttttgccttctcggttttggtttccttggtaagaactaagcaagcgatttctttgacatctgagtttggttgttctagtacagattcagtcatccaccttcctacttatcgatatcttaagtctgattctctcaggtttcgcacaacgtcctccagaaatactttagtttctccaatgtatttttctgtactgttcatttctttttgctgtttcatgtccaatgaattttctgataaaacgagcaatatatgactttcgtgtcctttttgtgtcggctactggaataatatcaaattgttcttcagtttatcgggaatttgatttttttcagctatgagctcattgtcgattggtaaatccataggaaccaatgcattgtggctggtaagattagttggaatgacatgacattttcgacattacagccaaccacctattcaagaaaatcgtgagagtagttcaaaccttagcctagtaaaaatctatgagatcgaatggccacctagaaaacaataaaattatcctgctatgctaatcaatggttgttagcagagttttagcccaacgaatgaaccccgagtgcaacattatttaatgatattttgactagttgaccttttcatctttatttgtcttcagccaatagaaaacttcctactttcaagaaaccacaaaattgtcttttcttaattccaactcccaggagacataaaaaaagactcaccagctatgcattatgtgatttgtcctctgagacaagtttcactttaaaagaaattttcgtgttaatcttggtttgtctgtcagaaaatattgcagc

SEQ ID NO: 91336 - DNA, 852 bp, Eucalyptus grandis
  Intron number 2 from transcript Egrandis_v1_0.007017m (loc us Egrandis_v1_0.007006m.g) derived from phytozome v7.0 (c hr-ID scaffold_2; pos 42724481 to 42725332 reverse strand)
gatttcccaggggaattcaagctcaaacaccatcagtgagtcttgaattgtatattttttcgttatttgcttttttgttcacacgcgttgatgattaatcgtcatcaattatatgtgatacaactttgattatctaacttttgagataaactacagaggatgaagtcgtgaaaatttcttgtgttacgggaaatttctgcaacattgtagtttatttcttactttaagggaaagagtacagaagcaaagattttggtgcatatatggcagttaaagatagccttctttgcagaactcatatatctgaaaattccatttttccatggaaatttttgacatagaggaaagattaaggtggagaacagatgaaaagtcataattgggaatgatggaatggtgtagatgaagcaacttgaaccttttagctttgcttgttcaagtcattttgttgattcacctttgactttgacctgactggagatgcaaaataacttggtatataaataatttagttcatgattcttctgagagatttctgcagatattggatattgttctctcaacattatgcagaccttccacgttaaaatgtataatgcgatgaagcagggtaagtgtgaagagaaatgaagtgaaagtgatcattgactaaattatagcttccgtgatggtgtgctcaagttgctggcttaggatttccctgataaattgcagtaaatctgcttatttactcgcttgtgcaacggcgacaccaattccattgatccaattcttttttgggagctcaattaattcttttgactattatacatggcagatatcttcacgagatcagatcaagattttgatctc

SEQ ID NO: 91337 - DNA, 635 bp, Eucalyptus grandis
  Intron number 3 from transcript Egrandis_v1_0.001298m (loc us Egrandis_v1_0.001298m.g) derived from phytozome v7.0 (c hr-ID scaffold_2; pos 64078737 to 64079371 reverse strand)
aggtcggtcagcgtcgcctcttagtttaacatctgttggagcgcatagaaaacttgacttccccgtttcctttcatagattaagttttggcttctgaagtcggtcctgaaatatatttactagtgctatttgcatggttttactcgcattgagtgcttggaatctgtactgtgacaaaaatgggatctgtactgtgacgagaatggaatctatagtgtggcaagaaagcaggaaagcatgaacagctatcggttgaagttatgttttctgtttttgggtgagtaggtcggcaagttattgaatcatgaagaatctcatgttgtatctactatttttgatccattagagtgcggggatattacgtcttgggactcacacgtgtatgtattttctttcagatcagtaatgaaaactacataggatctttacttagatatttggggtcgagatgaaacttgatctcctcacttcatgatggcagacatcttgaatttacttactcgtgcacacgcttctgcttgattcaagaactttttaatttgtatgtccaagagatatatgatgagtcagagaagggttgtttcgcctatgtgttgactctcttctttgctagtacgatagttatttgtccaagc

SEQ ID NO: 91338 - DNA, 737 bp, Eucalyptus grandis
  Intron number 3 from transcript Egrandis_v1_0.021656m (loc us Egrandis_v1_0.021656m.g) derived from phytozome v7.0 (c hr-ID scaffold_11; pos 1813456 to 1814192)
aaggtaaccctatctttactttgctagccggataaaacgtgtagttcatggacctgttgataaatattgaagtttgagattcaattttcagaatgaggattcttcattccactattcaagcaatccaatgtcatgaatggtggagttaatagctatataatgttgggaccatgacttaataactaaagcttggcagaagccttgttattaagtgaaagaacttttaaaaagaagatgtggagatagcaatgtagttctaataactggtcctgcttctgaagaaaccaagaaaaaaaatgacacagctatctcttacgaatcttttgccgacctttcatttcaataacaaactattgaggaatcaaatgtccattcaagctcttgaaaagttacaccttttaagttgcagctgatgctgtgactatggaactttcttttcttttgaagctacagtcgcctaatttattaagtagagtctagaccagagctgtcaattgttaatggcttgatagaatcataggaatgacagactttagtacgaaggcattctgaatgcatgtggcatccaaaggcagataatttgcttgagcaaaacatcgtgaaggtatgttactggttgagtaagactttattaacgactcacttttttataccgaacaattaatgcatcaagtggtttgagggtgactgctgtccatgcagtgtttaatttggagaagacttttaagactacgttc

SEQ ID NO: 91339 - DNA, 1012 bp, Eucalyptus grandis
  Intron number 1 from transcript Egrandis_v1_0.012984m (loc us Egrandis_v1_0.012984m.g) derived from phytozome v7.0 (c hr-ID scaffold_2; pos 17563751 to 17564762 reverse strand)
gcaacccaggaattgcaatttgcccaggttcttgaaaattcaatttatttattttttttcactctttgtttgagaaatttttgtttgggtctgttctgtagggaacaattttctgtggaatcaataaatggtgtgttttggattatgtcatggattatgtcaggttatgaccatcagggacttgcttgtctgcctggtttttcttttgggtagtaatttctccgtgggccctttttccaaaggggccttaataaggtgtggttgaaattgaattgaattgaattgaattgaattgaatcctcttgcatgaaagcgacgattttttaagtatgtagatcaaaacatgcaaaggaatttagtgcttgttgtcaggatttttttgtgccagcatcggccggaaaagttgctgaattttttgtggatatagcaaatgtactgttcgagtagcgtcacggtatttacgctgtgcatttgtttgattccttcacgctgatcttgtttggagggtagttccacattactaagcccctcccgtgacttttttttaaactgacatgaagctttcgagtggtgacgacgagtcctctctctctctctctctctctctctctctctaaccatcaattggtccaccgttttcaccgtgttagttagtttacaggttgactgatcggattttatcttgaaatatctggctgcttggttgatttcccgagcaattcatatgttcagtttcttttcttttctttatttgttcttgttttatgctaatgaaacatggacgtgatgaaaattaaagaagttgagttactccgaaccttaacatacttgatcagtccatggcattagagaacttagatattgaatgtgatgtagaagcatgagatgtttggtgtaatgttagttggcaatgcagttcatgaatcatatgcatgacacgctattggtttataattgttgttgcaaaactttggcctacaaacattgataatgtcttctaacaccagatttg

SEQ ID NO: 91340 - DNA, 955 bp, Eucalyptus grandis
  Intron number 2 from transcript Egrandis_v1_0.023212m (loc us Egrandis_v1_0.023212m.g) derived from phytozome v7.0 (c hr-ID scaffold_7; pos 42936444 to 42937398 reverse strand)
gaattttgttcaaggtacgtctctttttacaagttagtttgcttccagcatgtcaaagattaaggtttgttactataatgttgtttaaaggtttagccatctaagcttcaagtatgagtgggcagcgcaacggcatgtgatgtctccatgtgggagagagaacttagaggattctaggtttttcctacaagttctattatgaccatcctgttcatagtcatcacatggttcaaacttgaactggttctttagatgagagttggttagtgattcggccaggaacatgcaaaaagaagagcctccagaggtaatagatggtgtttagcgttctcaaaccttgagtgcgtgttgggtgatgattttactgtaggttctctgaaatggttgcttgagtttgggttcaacttccagaagtatgaaccttctggaatggcgtttgattcttgttttcttcaattcctatgcttgcgaattatggaacttgctagtgctattgagatttggatgaaggctgttgaggatatcctggaaactgaataagttgtggaaaacgcatcaatcgttcacatttggttagttttagctcactttaaaactgggatcaaatagaacaaataggaccatacaatcaaatctgcatattgcctttccttttgagctagaacaaggttgaaactttgatttcacgtttctgtaaaatatagacgcaaatagtttctggattataattcgaacccccttttcacagtaataacttaaatattcgttcaaacatacataagacattccaggaaccagatttgactttacgtctatagagaaaaacagaattaaaccatctaatctagtccttactatgctactaatcctacttggcactctcagtattcatgcaaatttcatagttatccgaactgttcggcaggtgccagttattcccagccacgtgcattca

SEQ ID NO: 91341 - DNA, 466 bp, Eucalyptus grandis
  Intron number 3 from transcript Egrandis_v1_0.011125m (loc us Egrandis_v1_0.006008m.g) derived from phytozome v7.0 (c hr-ID scaffold_2; pos 57113844 to 57114309 reverse strand)
ctgtccatccccatctccagaaaagaataagaaaggtaaggaaaaaggatactgatcactttgtgtttttcagcaatcgagtgctaattttgtatgaggtgggtggtacatataatatctcaatctgtattctatcttcttcaattgttactgcttttgatgcattgttgaccattcgtatttgatttccaaagggagcctttgacttgaagctggctcaagtccttttctaatttatttggcagcaatttttagaccatctgctgtgcctctgaaattctaatattttgaatacatgtgtagcagttatcctggaccttgaggacccgtcatgttcatgaatatataggaacacagtgttaattgcagtcatgtgaaatttggctttcgcatgtgcttttgagatgattaatactgttgatattcctcatggtggctaactgtggcatattttctacttcagtcg

SEQ ID NO: 91342 - DNA, 829 bp, Eucalyptus grandis
  Intron number 1 from transcript Egrandis_v1_0.007678m (loc us Egrandis_v1_0.005012m.g) derived from phytozome v7.0 (c hr-ID scaffold_7; pos 848425 to 849253)
acctgctcgttgggtaatctctcttttgcttctgggtaagattttctctctcttcttctgctgctgctgttgctgtcgagctctctctctctctcctgtgctccccgatttgggggctgagctgagctgggaagacgagacccggcagcggtagccgtcggtctcgcgtcttccgcactcaattcttgctcgatcagattctgggtctgtttactgttgctcgaggaaatgtgggtctgcgtcaagtcttgattttgctcgctccttccttagatccgggtccggggctgttggttttagctcgatgggggttttgggttcgcatttgcttttcgggacggggtctctccggctcgcgtcgcgatgggtttagctgcaagtgtctttgtgtgttgcgatgagctgggtggagtcgatgttgcggcgcttatggattggtggaggagttgcttgcgagcgaacccagtttgtgctttagtggggaagttgtttatttgggtctgagatattagtggttgtgatctgactgatgaagggattcgtagaaattttttgggtgagggttgttaaggagagactacagctggaggcggcaatgtggaaaatcaatccgttttgacatcagtgagatcaactatagaatcattgaattctgaggatgtgttggagagatgaaagaagaagaggatattccttcatttaatacttgaatgcatttaacaggagataaatttcctaaataggcgattatggaatttttgagagataatccctattgcttattttttatgcagagagggaagtgaagtgatctcggatcagctgactt

SEQ ID NO: 91343 - DNA, 756 bp, Eucalyptus grandis
  Intron number 3 from transcript Egrandis_v1_0.017696m (loc us Egrandis_v1_0.017696m.g) derived from phytozome v7.0 (c hr-ID scaffold_2; pos 64064270 to 64065025 reverse strand)
caaggccctcatcagcaccctcggtttcacgttcggtgagtatggatctcgaatctgatgtcgcctccatagcttcctccttttcctagaattaggtctatccagagaatcgtcatgcacataaactcacggtagtattggatcctccggtgcagttgtcgcgttcgagctacgttttcattcttttcgaaaaacaaattggtgaaaccggctgtaaatattgccttttgatggtgtacttggagggttttgaagttttggctactggattcttctatcttttgtttgattctaccgagtagaattcacttggagaccaccatgacgtgggatgtgagcacttggctttctgatttttatctattgaaactaattaggatattgtatatccatcgtttcttcatttactgcacataaattactaatatttgtcaattgcagcatgctgttcgtttatctttgtgctgaaggatgctactgtctcatttttaaatttcggttcttccaacttcagacacggtcttgattctcggatatgtaactgcttgtttggcaacatttgctctacttccctgaccatttttagagttatattagcgatttaaatccatagcccccttttgcttgaatttacttcctatatcgtgggtgtaagaagaatgtagctttttgaggttttccagagcttcttgattcactatgctaatcgtgccttatgcagccacaactttgacaagctggcatctgttggtcaca

SEQ ID NO: 91344 - DNA, 1013 bp, Eucalyptus grandis
  Intron number 1 from transcript Egrandis_v1_0.017681m (loc us Egrandis_v1_0.017681m.g) derived from phytozome v7.0 (c hr-ID scaffold_2; pos 61554659 to 61555671)
gctggtcctcgtcgccggaggctccggtggcgtcggtacgtcgtttctcgttcgtttttttcgcttcctctttcgggtgatctctgtcctcgcttgaagttttgtaggtggaaaagcttgtctaggtttgatatttgaactggacgagcactagattctgaaatgacgatgctccgacagggcgatttggtttgtggatctttctttggctgcttttatttactggctgctgaattggcgggtattgtgagtctggtgttgctgctcagtttgcgttgtttgcatatatttgattgaagcctgctcattattggaattaagcttgttttgcctgaatcgggcgacaaactaagactgtttctttctccctagtcactgagaccgacttcgacattgaaatttgctaggttcatgggtaggacatctaattttttccgatgaggcaatggctcttctaattgctgtggatccttgcatatgcttttactagtgggcaatgggatttgggaacttgatcatttcttgctgtctgactcatctaatcctcatcgtggcgaacaacaaataatttcacagcaccaacatccatctgttaagctcactgaaccattaggttggcagtgccgtacttctttttatccttattttacaatatcaacttgactgcgggtagaaacttgccagagattctaagatctgcatgagctgagttaggggtggtggtagctttttttggtatcaccaaagagtgttgagatgttatgtttcagtcgcctacacagctacacctaccgtggagtgtggatgctgtttttctttttcaaagtatcgcggggctttgatttctctcacatgtggatttgatgaaagtagtcccattgaaataggagaacatttccagtcttttagtatcacagtagaaaacaatgcgctcctacctaagaaaccttcatagtttatttcatctctctttttcaggacagttagttgtggcatcattgcttgaaaggaat

SEQ ID NO: 91345 - DNA, 932 bp, Eucalyptus grandis
  Intron number 7 from transcript Egrandis_v1_0.007657m (loc us Egrandis_v1_0.007657m.g) derived from phytozome v7.0 (c hr-ID scaffold_7; pos 49416245 to 49417176 reverse strand)
ggtttccaacacacggcgtactttgctgtaatttgcgcaatttgatgttctttgatcttgttgtgatatgttgagaatgccttttgtatgtagtgactgccgttgatagtacgatttggtggttcatttttttctttttgtggccatctcatctgatgatgatctcagaaaaccgtttggcatttccacttctgtactgtcctcatgacatcgctctctccgtgattcgtttgtggttgtactatggatatcatctacaagaggatttggagcgtaccggattgaaatgaaaaacattattatgatagttaaatttggttttcggttaaaacatcagcagaactagaatagggaaggcaataatttggtcgatatcgagggtaggcgttcttgcaatagcagatatagataaaaatagcgagacatgtgtgacttattggtatttgagtacgataatgagcctgagtgatcaccttacaaatggactcttcaacagtcgtcagttttggaaatgctagctagttaaggcgatgattctagagaaaggtaaattcttcactagcacaatcatcacatgctttattgaagaattagcaggaagatgagtacattgaacaatgggaatgccatttattgaatacttcattctatgttcaagacttgtccaatgtttggatgatgatctttgtgaaaagtagctttaactgtcatgtgcttgagtttgacagtgtttgagtttcatatttataaattaagcaaggattcaaagctagagaaacacctaagctaatgacaaattcttgaagttacctggcaaccttaggtatcgttcacaagaaaagtgcacaacttatatgtggaatgttgaatatgcccaatttctcatggccatggctcttctgcttaattttcggtattgcagcgactagata

SEQ ID NO: 91346 - DNA, 513 bp, Eucalyptus grandis
  Intron number 2 from transcript Egrandis_v1_0.047955m (loc us Egrandis_v1_0.047955m.g) derived from phytozome v7.0 (c hr-ID scaffold_7; pos 14276499 to 14277011 reverse strand)
gaaacttaaatcttctctttgcacaacccagcaaggtaaataatataaaccctatttttgtgggctccggttgaggactaacatgtatagcaattactcctttctgtgatcgattatatacactgaagatatttactgaggtgatttggtagatatcatgtctttgtagctcataaatctttcgtaggatgaccactacaggtttggtgcaatagattgggatgtttagacttgcaacttagaaaccgaggcacaattgcttaggcctagtctattaatttatggggattgaagggcatttcataggtctctagatagacgggtttctatttttgtgctcttgcaatatcaaaggaaaataaaagaagtctttcgttgagtgacttcaatattggaatatatcattattaggatttttaaatcgattactagagtcatttgatgatttgatttttattttcgttcttttcttttgtagattgcgatacatatttcaagaagtctttatttcta

SEQ ID NO: 91347 - DNA, 847 bp, Eucalyptus grandis
  Intron number 2 from transcript Egrandis_v1_0.019321m (loc us Egrandis_v1_0.019321m.g) derived from phytozome v7.0 (c hr-ID scaffold_2; pos 24025238 to 24026084 reverse strand)
ttgatcttgtttgctagctgggatctctcctccgcgtttgcagtcaatgaaatctcagtttgctattcatagatcttgagaacaaaatttcacgcatagatcaagctgagagagataataaaatttgaaggctgaagagttcgcctgaccactcttgagaaccatcgagagagaattcaaacaattattttccaagagctcccttgcaccttaggtaacagttaaagaactatccaagacgaagttaaatggaacataatcttagatttcgaagttctagagagaatcaattcatagtccttgaaagaaaaaagaaataaaattattaataaattaaaataaattttaagttataaaaaaatttaggatcgcaccaaatgtatttttgttccgaaaatataaattgtaaaattaccaaatgccttaaaaagctcaaaaattgttcaaataatagaaatagaaagaaatgttttttaacgaaccttgtttgtgggaacaaaaacgttaccaaacactcattttcacttcattgtacacgaacactcttaggaaaaaaaaagtaacaagtttcagtagaccgaagttgataaaattttcagttccaccttaaaattggagcagatggaaaactaattatccctaatttcacgctcttatttgaaaaaattggaatctccgccggagtgaccccactctatacgttaatttcgaaatcttccccctattcaacatagacgctatcgatgctgctacgaactctgcacaaactaaacgacaagggtggtcggtcgaggttctattctaaccgcgagtgcgcgagagagagagttgcagcgcaagaccgaag

SEQ ID NO: 91348 - DNA, 715 bp, Eucalyptus grandis
  Intron number 3 from transcript Egrandis_v1_0.002748m (loc us Egrandis_v1_0.002759m.g) derived from phytozome v7.0 (c hr-ID scaffold_7; pos 50349463 to 50350177)
ctcagtctcctggaaaagtaagttcgctcgttctttaactatttagaagtagagctttgtctacgaagaagcctccgaacttttttttttttcctttctaatcggtagtctgacctagctacctgtgtctacgcacgagagggaagaatttcgctgtgtcatcgaccgattatgttgctcaggcatggaatttcactgagtttgtgtgcaagtctgtaatcatgccacaccgcgacacttgttgtccatgagtttctggttcacagattgttcgggctgacaaacaagaacttattctgtatacgattagtctacttttcagtttaagaggagtatgggtttagacagtcacacagatggagggttcttgattgtatgtacgggttgttgacagatagacatagagagcaaaggtttctgctgcgctactcatgcagaggtctccaatttgcattaatcaatttcgccaattatgctggtttctaaaagaacttcccattctaagaaagtttggttcctgttggatcaaatgcttgatctcatggtttttggagctaccaaattatctaattttctaataatcgcgatcattttgattccattagtaattcagaaagtttagagcacaaattgggggcatagttcattctaaaggataaagaatgttctttaccttgcaggttcttcattttcacctacgattctcgtacaacag

SEQ ID NO: 91349 - DNA, 969 bp, Eucalyptus grandis
  Intron number 2 from transcript Egrandis_v1_0.002557m (loc us Egrandis_v1_0.001307m.g) derived from phytozome v7.0 (c hr-ID scaffold_7; pos 19927261 to 19928229)
atactcaattttcaggttttcaggtactattatgggacatagttttattcctcatgcaatattaatgtcctctcaaaatgactgaatctgtttagagtctcgagtggacatatagctctagtaataacaatgtactttttaaaacccggactatgcctaagagatatcatcttttccatatctaaattggtgcatgaataccccagggagaggtgagggggttgtttgtgttgtggggagctaaacatggacacttgtattgcgaagcgaagcatctgggtgaaacaaataacgtgacgctgcaaagattattataccttaaatctgcaggaaatctgccatacattatgaaaagacgttgattgaagtggtttgatgctgtgtctaggaagactcagtggaaaagcaacccatatagataggatgtaaattacaaccaaaagaaagtgtggaagatttaaccattggactatgagaaaacaagaatagagacagaatgatcaacattcaacaattctgttttaaggataagatggctagaaactgtaagaacttgacaatttgtaaattggactcaagaattgaataccatttgatggaaaaatggagttgtgaaaaagtaacggggcttaagttcacttgcaatcaattgagcaagtctacagtagacaaaagaatgccaacatatcttctgcttatctgctgagcagaactaataaccatcttcatggcttaccggggaattgattcccgctttccatgggtgaatggagaccaaggaaacctatgaggtctttttaaaaaaaaaatagatgttaggcatggagtgtacatattcatttgcctcaggaatagtttcatgactcattttcattttctaatgttggttgtcctataattcagtgcctggttctttctgactgttttactacagcctctacagcctcctgtagttggttctgcagatcc

SEQ ID NO: 91350 - DNA, 950 bp, Eucalyptus grandis
  Intron number 1 from transcript Egrandis_v1_0.031078m (loc us Egrandis_v1_0.031083m.g) derived from phytozome v7.0 (c hr-ID scaffold_7; pos 35610759 to 35611708)
gagctctctcgaagccgtcactgaagagcaacgaggtgagtttctccatgtcccttcccttttgttccttcgggtttctgctcggaggtgtgaatcaggggcactgtgtgtatctcggccgcatccggtgcagctgggaacgggacgggggagacattgcgtttgtctcgttctcatgtcgtgccgaccatgtcagaggcttttaattcgttgttctggtgacgggatttgcacctggataggtttgatcggagtttctgttgagaacccacttgcgtgctctgtcttgtgttttcttttcttgttaataggtaacgtccacagaattagtactatcacaaaagggaaacgagagattacatgctctggctggggaaatgtaccagtagttgtcatgtcctttctgtttctatgagcattggttttgttcgctttgaaattgggactgtacttgatgttgtcatggtgtggcataaccagaaaactagattatcgaggccaagaataaaaggaaattcgtgcaaggtcggggaagccagacgttgaaattttacatgaaattcttattgtatgtgctaattgaaaattacactgagcaaccccagaactgcccgccattggctggggacatggctgtgctgcttgactagtttttcagtgacagtgagttatatttatgctctggcctcaaggtttagagtagggtcgcatatattctgtataatgatccaaactagtgttgtatatgtgtggtgtgattaacacataagggcgcgtgtttctcaaaatggctcaggaaaatttgctttgggttggaattcgccttcaaaatatggaatgctgtaaggatatcttgagatctcacttgtagctattgttcaatttgatcatagatgtcaactaatttttttgcagacctcaagcttgaaggtcgtctctctggggtggag

SEQ ID NO: 91351 - DNA, 985 bp, Eucalyptus grandis
  Intron number 3 from transcript Egrandis_v1_0.026364m (loc us Egrandis_v1_0.026364m.g) derived from phytozome v7.0 (c hr-ID scaffold_7; pos 34536620 to 34537604 reverse strand)
ccaaatccaaaaaaattgattctattgggaaatatgtaagtgcttcgccttgtgatgtgcatttactttcttttgtgctgttttctatgtgctgaaggaacttatttaagtctgaagttgataaacaatcagataagttcaacaatacattttatggaattcatgagatctcgatctcaaatttctgactcgattgctaatggagtagttgattaccatcatccttagcaccataccaaagagagcaaaatgggaaatactatgatgagaaaagtttagtgcttcaaatttgattaacgcagaccattagttatgtacactggaaaatgatagcagtcattttcaacatatttcatagaattgcttaccgactgcatggatagggagaaaaatggtgaaagttgtggtttaggttggagaattctgcatgtagcatatcaaaacaaaatttagtggctttgcctagacattcgttaataatgcatgtccaattcatagcctgctgattgcatttccaggagtcaggatggctggtgatgtgatgcttccattaggatattaatttgcagtctagatgagttgaaagaaacttttgcatagtgaatacacttaagtgtgatacccacataatcttttcttaaatcaactaggaaattataaacatacatcatacgcaattgattcatgtttgtgatattgttaaactttgacaagatctcacttttagaaaaaattgaccacgttgagttcatatcagtcaggcatgaaataaaatgttactggtttacatagttgacttcatggttttggcatccctttcagctatgaaaacaaaatgacattaggagaaaggaaattcagctcacatgggcataatttaagagtggcattaagcagttcctagattctgaaagcttcatcttgaagatctgctaccgacaaagagtgggctctttgcaggtaacttacgtatctcccattgaag

SEQ ID NO: 91352 - DNA, 893 bp, Eucalyptus grandis
  Intron number 1 from transcript Egrandis_v1_0.008222m (loc us Egrandis_v1_0.008222m.g) derived from phytozome v7.0 (c hr-ID scaffold_2; pos 58384205 to 58385097 reverse strand)
ctcgtcttcttctgctcgtgctctgctttctcgaggtattgccgatcggtgcaccgccctctttctgtctttctttgttctttcttggggtggtcggattcattcttttcgggtgttgggttgctctgttcgagtactctcttcccctgtctcttttccggcataagctccttgaaaaacaggggaagatgaaaactttctggaacgatcgctatcgcagtgctgattcttttacgtttttcttttctttctgtgtttttttacgagttttcgtctgtttggcttcgcgtttctgcttgtacgatgaaatggggctcctggacgtaatgggttgctcgtcaaagaggcgaatacctctgtttccctggctggcttagaaatcttagcaactgcgaaagttaatctcttttatatctcttaaaggttcgaataccctcgttcctagttttcatcgattttctcggttgacttccgatgaggagtgaaatgtctgccttttggaggtggatcaagaacggcatgtgcatcttgaatcaactcgctctctttggttaaaaagaaaaaaaaaaaaaaaggtttttattttagtatttcagcacgcctcagtcctgcttcctcggccatttctacatgaaaacctttttcggctttgagattgcaacgagtagatttgatttggacacgttaaattctccaatgagcccggcctgcttttgggtccatgcttatgggctgagttgtgcactcaattcattccaggatccatggtagctggggtaacgcacccttccgcttttcttgaattattctcctcttcaatcttttcctgatgcgttttgcatttgtcgcatcttacagcgagaaaaccgctactgggaagagaaatcaagagc

SEQ ID NO: 91353 - DNA, 688 bp, Eucalyptus grandis
  Intron number 2 from transcript Egrandis_v1_0.029054m (loc us Egrandis_v1_0.029094m.g) derived from phytozome v7.0 (c hr-ID scaffold_7; pos 41425982 to 41426669)
tggacaaagccaaggagatttgtgctaaccgaggggtattgctatttctacacttcctctgtttcttcagtaacaagggattatagctatctagtgcgaaaggacatgattgagtgattaaaaagtggactatcttaattaacttaatagctgaagtctacagtactgtagtgttgaagcagtagcgaagggtgtctaaagaattgatttctgctatagtttcctgctactacttatcgaacagattctctcgggtcgctttgcttctctgggtatgctattgcctcctatgctcgttttagataatgcgaacatttaataacttatcacgtttctttcttatatggctgattgactcgtcttcaactatgagaaattgtccaggctaaatagggaatgtccttagagcactgatactatgagggtatctaatagcagtatgcttaattccttcaatttttgtcagtcaaagaaagggaaagggactttgctctagaaataagaaaagtttcttttgatcctcaagatagtagtgaagtgttggttttgttctctaccacccctctagatttgatttttcttgttgtagagaattgctttcgtagctttgaaattccagcactgtaggagcactttgtcttatgccaatagtctctctaaatacaggtaagggctgaaacaattgcag

SEQ ID NO: 91354 - DNA, 711 bp, Eucalyptus grandis
  Intron number 2 from transcript Egrandis_v1_0.025387m (loc us Egrandis_v1_0.025405m.g) derived from phytozome v7.0 (c hr-ID scaffold_11; pos 43688384 to 43689094)
ccgacattgttgctcgtgtatgttatccttgatattgcttaagttatgattattggtttctttgcctagttttgattcactttatattccccaagaatgctcctttattctggtctgttacgatgatctttgaaaaggattagagttttcctgaagttgatgactgtaaatcaatcacaatatgtacatcaaattctgcctacagggtttattttatattcattgagtgtgtttcccattgatctctttcctttttcaatagaaatatgaaaaatggggggacattcttgaagttggaatcccctacaaggagaaatgttgtgcaatttttgagagtgctattagatctcactttctcgtttgactgggtaaatgatgcttttgttattggctaatcagtttccgtgttaaggagctttgcattttgtttttcagtgtccctccaactttaagcttctgtgaatatctatatactcctgatttccctttatgagatgataagtatggttcccttaaactgttccatgtaaaaacaggcagatatttttactctagagcactcataaaatactgcaggcagtcattcttgttctagcaagttttaacacttttgtggatccatgtagtgaagatggcatcttgccacttgacaggacttgaaggctatattttccttcttggaattcttaaattctttgttgtgcttgcagg

SEQ ID NO: 91355 - DNA, 480 bp, Eucalyptus grandis
  Intron number 3 from transcript Egrandis_v1_0.025387m (loc us Egrandis_v1_0.025405m.g) derived from phytozome v7.0 (c hr-ID scaffold_11; pos 43689205 to 43689684)
ttttctgatcctgcaaagcgtcaattgttgaataggtaaaagtaaatccgaactaaacttgcagtactagttctagtgtcaaaatggggattaaagcatgctggacacaacatcaaaatgcataagattctgcttgagttggaaaattttctcgctctgatgaaacaggggacaaattctaatttttgagttttttgttttaacctgtcatgcacatagttgctgtgtgtaatttgtgatatcagtctgaaatttttgcaccttcattcccttggtcataactgagttattcattctgaagccagtatccatttgcttttaatgatgcaccttggattttttcatgtttgtttgaatgatgccttaacagttgcattgaacttcaagataaaaaaccttttagtcttctaatttcctgaagctttctgtgtttacttatgtttaggttgctggctccttacatatcatcaggcatcttcc

SEQ ID NO: 91356 - DNA, 712 bp, Eucalyptus grandis
  Intron number 1 from transcript Egrandis_v1_0.008261m (loc us Egrandis_v1_0.004343m.g) derived from phytozome v7.0 (c hr-ID scaffold_2; pos 43192332 to 43193043 reverse strand)
gaggaagagcggcggcggcggcggttctagtggaggtgatgcttcgctgcgaatcgagtctttggtcatgtggatgatgggtagttttttgttttaaaataataaaggggatttgtgtcttactttcgctatctttttggggcgatgatttgatgttactagcgtactctcatttgggttgctgagctaaaagttaggttagattatatctcagtgattgagctataccttgcgtagtttgcattcaactgtagacgtgtttgatgtgaatgagcaaattgaataactaatgcggtccgttctgatgacgaattcccttttattttttgttttttttgttttttttttgataattggtacctgagccgttggaacaactcaagcaatttgttatatgcatttcgtgctgtgcaaatgccaaagctgaaccattgtgttcagatgcataacaagtccaacactagttcttcttttggagcttatttgactcgtgcagtcttgggcaaaagattttagttttcttagtttggctcgaaaacgaatatatgcaaacaagttagaaatttctctcccatttcaatccgtgttagattttctcacagcgtacttaatccctctgtgtaacgtgtaaagtcggagcttggagatgaatttgtttttacatcgataaaatgaattctgacagtcatttcttcttttgcaggcgatcatc

SEQ ID NO: 91357 - DNA, 942 bp, Eucalyptus grandis
  Intron number 2 from transcript Egrandis_v1_0.034011m (loc us Egrandis_v1_0.034007m.g) derived from phytozome v7.0 (c hr-ID scaffold_11; pos 13235588 to 13236529 reverse strand )
gcttcccggtaaattctcagctccattctttttttcctttccaaagattgcaactcttgcggaaatttgaatcgcgcttgagcgttctttggtggcttatttgtctttgatttgcttgattggtacttaggctatgttaattcagagcggcattgaagcttatgttagtattctaggcttttctgtgttgtaccttgtgactctatgtttgcaattagtaggtcaaatgcagaccgaacgtgtattgccatgtgctacgctggtgtgtaaatttgtgtttagattaactagcgtgaacctttgtgaagatatagtgtggttgtctaggtggtctcactgatgggtttcccttctacttgattttttaggtatctaaccatcactcgtaggccgccttgatagccttttcttgctttatatcttctggtgagttgctgcgatatatttgttttaattgattttgatctctttcccttgatataatgaggacctgaggttatgtttgtgcagttactttcaaagttaagagttcaaaatttttagggattatacgaggaaatatagattatagtgtacctatagagaagttggtggattcgtattcagggaaaataaaagtgctttagaaatgagtactattttcgtaattgtagctagttttcttctaatcgtggagaagagtgcacttttaaaaaaaaaaaaaaatcaatttctaaagtgcacaagcattcctcagtcatgttcatagtatcttggtagtatcgtagagaaccgtgagggcaccttgttgactggatgtctgtgtttgtgatcaatatcaccaagaaatgatgcacctcttgtcttggacatagatggttttacgtttctccacctttatatatcaataaagaagtgcacactcctcttttttgtcaattttgtaggccaaaccaagactag

SEQ ID NO: 91358 - DNA, 389 bp, Eucalyptus grandis
  Intron number 3 from transcript Egrandis_v1_0.049924m (loc us Egrandis_v1_0.049924m.g) derived from phytozome v7.0 (c hr-ID scaffold_11; pos 29310610 to 29310998 reverse strand )
ggagctcaagaaccaagggttcaatccctctattggtaagttcgtcaccccatatgttcttcgtccaagtaattcatcgttcctgacttcctatcaatactcaaaaagaacaaaaaagaacatcgaaactagattgaaactcaactaagcgactataagccaccaaagaactcggcatcagaaacataataaccctaataaaatgtggtccgtttggttctgcatgtttctgtgctaacaagggacacaactacttttctctccatttgattggtattgcttggaagtaatatgggatttataattcacaatatgaagagttcttttgtgtttcttgttgtgaagacagataatctaacttaacttaatggctagagtattgctttcat

SEQ ID NO: 91359 - DNA, 982 bp, Eucalyptus grandis
  Intron number 1 from transcript Egrandis_v1_0.026369m (loc us Egrandis_v1_0.023292m.g) derived from phytozome v7.0 (c hr-ID scaffold_7; pos 44258558 to 44259539)
ttcagaacctgaacagtctcaagctttctgctctggtacagttcttagttcttactttgttttttatttttattttttttctttggtgttggtcctagggttttgttcttttcttccatcatagtggaatcgagcatatagaacattgtcaagactggttggtttagcgttgttgtgcgccctggattctagagagaaattagagagactcataaaaagaagttctaaagttgagataatacaattgagggagtggactttatttatacaagaacccctttgatcacaatcgtacattcctcttgatctatggatggagattccatcttaccatctaccaagaacactccggaacagtttacatttcctatattgtcctcaagaatattctagagtactcaagaaaaatcctaggcttcagggctcaagggtaagagattttgagattgggtttagggcaattcaagcgataacaggcatatctctaggtgcatatgcagtatttgaagagagtctctgttagttctaggttgcgaaactgacatttcttgtgcttttggagtttctggatctaatattatttgcttcgctttacttgtgagctgtgctttgagcataaatatgaaaaatctgttcaagtttgattaaatttttatcaccgataagcttcttctgatcacctgtgacaatactttagaagtgcgatacatgggagacatgttatgccaaagtgacaagaaaggtccgtttacgtcttgtgatgcacgaataggatagacatcatcattcaaatgattcagttcaggagaagatgtttatttatccatttttcaccaattccgttgtcagttgtgttactgttctacattaatttctaccagtgttctccatatgctttctcatttaatggctcacatctcagtcaaattgttgttttaaagcagcagagaagacccaattttcactcacgcaaagcttcaaa

SEQ ID NO: 91360 - DNA, 963 bp, Eucalyptus grandis
  Intron number 2 from transcript Egrandis_v1_0.032569m (loc us Egrandis_v1_0.032597m.g) derived from phytozome v7.0 (c hr-ID scaffold_2; pos 7691675 to 7692637)
gtcaaaacagcggcaacttcatcacggtatgatgtggttgaaaaatgtttttttaatctcttctcaacctatttctaccccatgcgagtgtcgaaaataccagtatcatttaaaaagggggggggggtgttagtagcatctatcttgcgtgagttgcacttcaagatttaaaccacgacaaatttacataaagtttaattgaggctggatcagttctatctcagaggatcagagagcaatcgtgacttgtgagcatgtctcagaactttttgtgaatgtttttgtgaaaactgaaaatatggagatcgcgtgtcaaccttcatgggtcaactttacaattttggccggatgaagtctttacaggtttctacctggaagaagttgtggattatagaatgcatgcctagcgagctttgcttagaaactcaccaaggattttccccttttccatgtttagaactaactgaacttttctttgttgaaatttttttgaattgatgcatcgttaacggttaaatcaatggtctcatcaatagctgcaaattgttggagcctaggtgctgcatataggtgattgcttcattcattgaaatagcagtcaatcaagagtggtggcaacttttcagtatatgaataactagaaaattcatatgttgaaatgccttgactagagggtgattgcttgtaacttgagtatttagtctactttggttgtcctgattgtctttgtgattttagcctggtttgtcgtggtgctctgccctcattagcacaaatagcagcgaaagctatcttcaccctcaaggcattgtttcccaattgtttacagcttctaatcttctctcattgcactgtttgcatatcttccatagcttctgaatcttttatcaagttttcttacttgcacaatactgctgaaaccgtagaacaactttgtgcaggaccggccttctactaaggtcc

SEQ ID NO: 91361 - DNA, 863 bp, Eucalyptus grandis
  Intron number 2 from transcript Egrandis_v1_0.042233m (loc us Egrandis_v1_0.042233m.g) derived from phytozome v7.0 (c hr-ID scaffold_7; pos 16676400 to 16677262 reverse strand)
gagtttcactgccctaccaaaccagaaggcttgaggtaccccttgttttttgtctgaagaaaaggtctaatatgcatggaaataatttctatcatgtatgtgcaagttccctaccccacgactgcgaagaatcttatgtttaagaaatccacttagatattagcttgcatattatttcatccatgacaattagttgggatttttactagatcggggtttacctgagatgaacttccttgctcgttataggggcaaggttttactgcaatcgaccagcagtgacgttacctatatcaactgaaaaaggtcacctttcaaacacctaaatctaacctaattctggccaaacaaaactaaatgaatctctctctctccctcctcctcctccagcaccaattccccccgaaaaaaagaaaaaaagaaaaaaaaaaaaaagtggagtcaccctcatcgacagaaccacatcttgctcagtcttagacggagacggagccaaccggggagggaggaagggagagagagagagggagaccacaagtcaatgataagactctaggagagggctggggcggggcggggcaagagggaaaaaggattgtggtagtgtttacacagatgtagacgacaccgttcggcccaaagctagagtttcaatgaggatacacctgaggtagcaggtgctggcgtgggaatggccacattacaatataagtagtgaggtagatcctatagaaccagcgattgctgtaactgttgagtttaataaggtgcatgtttgatttgtgaacatgtatgaatgctatattggttttgctttatttgtaacagaggagaccataagtttaacacagctggtgaatctt

SEQ ID NO: 91362 - DNA, 937 bp, Eucalyptus grandis
  Intron number 1 from transcript Egrandis_v1_0.017057m (loc us Egrandis_v1_0.011899m.g) derived from phytozome v7.0 (c hr-ID scaffold_2; pos 47987794 to 47988730)
gcagcccctcgcagcgaccagttaaccgtcaacaggttcgtcccgagaaattcccctcgccgttctcattgctttccctctcttgctcgcttactgcagtccccatttcgtcgtctctctctctctctctgctgttatgttcttgagggaacttcatccctcagccacgcgcggcgaacccaatccgtcgatttcggcggaaaaatgaggttgcttttgtagcggagagcggaggaagagggtgtacttctggggaacttcgctttttggtgctgttttttttattttgctgtggggggtgtgtgccagtgcttgtgctttggaacccgcagagactagccaatcgtatgttcttgatcttcttgaatttcgtaacctcgccacgttccagaataaagaaagatgttctgcttttaaatttgaagagctcgcatgcccggcaaaatcgcggtggatagcttttttgtttttgggtcggaaggttgctgaattgtcgtttccctttaagtgtaaagttagatagagagagatagaggtgactggttttgcgcactggagaaagcaagaagagtttttgaggacaagaattcaaaatgtctcgataagcctgagttgggtcacactctgcttggcctggtgctgcagtggttgtcttgttggatgatgtagctgtctgatataattgaacaatgctagtacctggagcagttgtgaacataaacagcgctagtatgaaaatgagaggtgttaccaagtgagtttgagcgggtgagtgtttcaatgaatataattgatgaggactcctgcagacttgatgaacaatattttcctcgtcagatcagacaatgcatcatctgatttaaaaattcaagtcattctgactttcttctatgtaattctaggtctttattttgctgcgctcgagttaatctgtttg

SEQ ID NO: 91363 - DNA, 796 bp, Eucalyptus grandis
  Intron number 1 from transcript Egrandis_v1_0.019377m (loc us Egrandis_v1_0.019405m.g) derived from phytozome v7.0 (c hr-ID scaffold_11; pos 4528891 to 4529686)
tcgttttccaagtaaaacgccaaggttggtttttggtaagcggaagcttcagatacgcagcttcttttttgcggggtggtgtagaaatgcactcggcttttcttcgtttcgctagagaaattctccgttgaatgaccggtttttgcttaagtcgtgcgtttcctcaaatgggtcgtattcatctctcagttcggcggcttcttgcttgtgaagcttcgttttttgctttggtccgtttctgtcccgcatttgcgtggagaagttcgacgatttccatgcttttccatgatttccgaggattgggtttggttcggaggttggtgaatttgatgtacgtggtgtgcggttgaagattcgcgatgagctcgtcttaatgtctgtatgcgtgggattttgcttcttcttttttcaattcgatttcattgctttatagtttaattgatattttggtttcgggtagttctgctcctgtggaactgtggctagtatcaactgccctatcttaattttctattatttttacctgcaccaagcttattcaacggttgattaggaatagattcttcttttatcgacgcattgtctcttcctctttctttttcaactgtgcattcaaaggtctcctggttcttaatgatggtggaattacgatgtcatccgctcgatttcgtgctgggcatggttctgggtgttttgtttttggtgcttatattttcaaatgcaaactggaaaagactttgaactattacggtaacttgctgcagcctgaggcattgaaaccccgtgctccattccc

SEQ ID NO: 91364 - DNA, 766 bp, Eucalyptus grandis
  Intron number 1 from transcript Egrandis_v1_0.007158m (loc us Egrandis_v1_0.007118m.g) derived from phytozome v7.0 (c hr-ID scaffold_2; pos 7701009 to 7701774 reverse strand)
ctgccagaccaaccaagttcacgtcttcgacgctggtgggtcgtcgagtttacgtaatgggggttctggttttcgttcaaagtttgcatttttctctgagaatgttgtcgattcagattggtgtggtctacttggtgccgagagaaagattggttcttttctttttatttctgatttggagattctggggtttttgtttgtgcagctctgctcgttggtttttcatttttttgggttataactcgcggttgccttttgtttgttgttggtttttcctttaatcagtggccgttgtatatgggtgagatgaaagagaatttttcttgaggttctgcgtccagtaaccgttgtatatggcacatctatgaccaatttattttttcctgtacttttttcattgtgaacaattactggagctgtttttgacttcatccttatttgcattttgctgaggttcatatttactgctggaatttcatgaggatggctcttggtgtacttttaatttctgttgccttctagtgtttgagtcgtgatctcgtgttccattggagcttagttagtgtggcatgaggaagttgttgaactatgcaaggcgatctcttttaccatagtcttgattaatgaccctcaggggagaagccgggggggggggggggggggggggggtaagggggagagatgaatgtgctcctgcttgtctttgtatgttgtaattttctttttcggttgatgattagttttatctgactacagtgaagcaaac

SEQ ID NO: 91365 - DNA, 947 bp, Eucalyptus grandis
  Intron number 1 from transcript Egrandis_v1_0.011276m (loc us Egrandis_v1_0.011276m.g) derived from phytozome v7.0 (c hr-ID scaffold_7; pos 38575883 to 38576829)
gaaaaggagaagatcgataggcaggtttgttgaatgtttgtttgattgaccttgttagctcttgctgagaagcttttccagcgatgactttatctgttgttcaaactctctatggcattatatttactaatgttgctgcatctgtcatagtttccatgccggtttgttaagcatatttcatattgaaactggaaagtgagggaaagagttattggctgcacatctaggtttgggaatggatatacctacgttgcttacttttcttatttatgttacgataggttttgcagcgtgaaattagcttcatctgagtatccgactagaactggaaaatattgggaaaatttgcttattgcttagcgatgtcagtacattaagctcaatatctgtgtgctttgatatctccgtggtgcatattggattgtgatggtaatgtttgactctaaaagttactatgagataagggaagtgaagcttaaatttgaataatgcttctgatgatttgagagtacttgataagtatgtgccgatccttggcttttaatgtctgatatcggcgctcgtaccagtttaggatgcagaatcactacgtacaatccactacgtttagttgtttcagtttatctttttctgatattattttgcacgacttctgttagcagaatgctattaaattacctaataagtgcttgccggcctgcgctacatcatttcatatcttacatcagagtgaatgtagacttcacatggtcttgtgtcagtgttatgtccctatgtgattgtacaatttgtcaatagacagtaatacgggtgccgtaattgggtgtattaaatattagggccattatttcagcttttgtagtgcccttccttggttattactctgactttgctttcttctatgcgatctagattcgggtgttcttttccgtgccggaaaatatagc

SEQ ID NO: 91366 - DNA, 913 bp, Eucalyptus grandis
  Intron number 1 from transcript Egrandis_v1_0.012175m (loc us Egrandis_v1_0.012175m.g) derived from phytozome v7.0 (c hr-ID scaffold_7; pos 533207 to 534119)
ggctgccgaccccatcagccgatcgccggaggccggtgatcgaccgaaaaaagaaaaaagaaaaaataaaggaaaaaatgaaaaataaaataaaaatgtttaaaaaattaaaagaaacaaaaaaagaataaaatttaccaaacatgtttctattcattttttattctcggaacaaacgttacctaatgcgttcttttgttcaaaaattgttcctcggaacagaaacattttttttttttttatttctgttccctggaacaaaaaaagaacagaaatgttaccattcgcactctaaaaaacccaaaaaaggggtacggaagtttggaaaccagcactagtaagagtccgcagagctggactttagtggcccaatccaccgttctattttggatcctagaatagtgagtcaaccttatttatatatatatcgaagaactatttttgaatgcaaaaaaaaaaaaaaaaaagtcaacagtagcaaatccaactcatcagattggccttgcagagggctagaatgggtaaagcctgcacatgagcatgccaagtttctcacttttgctttgattttcattcaatttttattgctcgcgatatttttttctcacgatcgaatacaattccatttcattctcacaattcacaaaaccgaagtatcgaaacaatcgtatttatctcgttccaattcatcccgcagtatcacatttgattgatatgatattgattcgactcaactttgagaattttatgattatttttttcccatattaaacgaaacgattagctcccaaataaattgaatataattcgacccgcattccgagccttacaacgttgtcctcttttcttcgccgccggtaactcttgccggcgtgaagagagagagagagagagcgaacaactccgaccactc

SEQ ID NO: 91367 - DNA, 736 bp, Eucalyptus grandis
  Intron number 1 from transcript Egrandis_v1_0.002601m (loc us Egrandis_v1_0.001785m.g) derived from phytozome v7.0 (c hr-ID scaffold_2; pos 56789907 to 56790642 reverse strand)
aaggttgagtaactccttttcttcttcttcttttttatgctgtgtagttgatgctgcatttgttgcaatgaaaactatcaacatgtagcctttagtcagtgattacgtgtgcacacactgcttaggattttgttttagtttagttattctctgctgatttcctcgtgtacttctgggtcttcattgaattgagtagaattttgatggtttagattccaatttgcactcaaagagttgcttaaatgtgctgacacattctgtttaactgaagttgcctatttactaagatctataaatcgaagtttcttgttaggtccggtgcataggcaatgtgattcaccacacggttcatcatgaaaaacaaatagacatcagcagtgcgaaaaatgacaacttcaacttgaccatccatcactgcaagaaaggctctctcttttgatgactaagaagaaaaaggtcttttcttgttggttagatgggtcgaccccttttcctctagagggaactttagatatattatgaacactttgtcaattttgttgcctttggtttcacttcttttaggacgagtgactcaaatcttacttgactggctgcgttttaggttgtcctttggctttgtttgccaagaaaagtccttttcatacgtgtgctggcaattttgtccaatgtagttctaaaacttgtctttcgctttgtagttccaggcacactggatacttctgttccagattca

SEQ ID NO: 91368 - DNA, 889 bp, Eucalyptus grandis
  Intron number 2 from transcript Egrandis_v1_0.029060m (loc us Egrandis_v1_0.029060m.g) derived from phytozome v7.0 (c hr-ID scaffold_7; pos 22677196 to 22678084 reverse strand)
agctacagtagtcggtcctttctttttgtcttgtggtaatgcttctgaagtggttacacctggccttttattagctgaacagttgctgttgccagttgctgttgccacttaacaacctgggcttactctaattacaaatgtaaaaaaaattgcaaaaaaataatcccaaaaaaaattgagatttttgttaattaatcaaataagcaaaaaactccaaaaatcttcaagtgaaattaaaagtaaatcgaattgatgcgatggtgggcggtggttgtgatggcgcctgtcgagtgcgggtaaagcggtggtggtggtggggttgggggtgtgatgaggagggagaaggcaaaaaaattgtgtagtgtgggtggtacatgaatcagatcataacctgatcgtgagcttccttattaactcaacgagccagttcatgggttttctttaaaagtgacaatacgaagagtaaaaatgctaaaaatgaatctcaagatgagtttgatatgagtctagttggttgggcatgagtcgagaaatttgcattgtaaataaatgggtcaaaacagattaagtggatcaatatgggtcaaaccatttatgacttaaccaaactcaactcaatctacttgtttaacaggtctattgattaatgagggagggttttttttactgaaggcaagagaaaaagataaagttggggttttgatatgggtccctctctctcggtgggtctctaggcagtagctcatgtataaatcattagggactaacaaagctccgatttcttttttcgggaccacttgctgatcgtcgactaacattcataaatatactccaacgcaaatcacaagaggagcaaatacttgacagcgttattgcatgtttttccagg

SEQ ID NO: 91369 - DNA, 298 bp, Eucalyptus grandis
  Intron number 1 from transcript Egrandis_v1_0.052655m (loc us Egrandis_v1_0.052655m.g) derived from phytozome v7.0 (c hr-ID scaffold_7; pos 46194887 to 46195184 reverse strand)
attccagaaaacgaagttcgcgagtatttcaccaggttcactccctctcgaccacttcgtttctaacgacaaagcgggtcgcacaatactctttcttaagctaaccgaattcgtgactacgatttacatttcgatgttatcttcaatcttgtctgaatattttgattattcaatcaacaaggcaatcagaacaaaacaataggagggcttatgaacattaagggttgcagtagaactaagattttctttcctcccttgatgatacaggcggttcggaaacttcatagaggagctgcac

SEQ ID NO: 91370 - DNA, 1029 bp, Eucalyptus grandis
  Intron number 1 from transcript Egrandis_v1_0.016616m (loc us Egrandis_v1_0.011738m.g) derived from phytozome v7.0 (c hr-ID scaffold_2; pos 62904758 to 62905786)
cgacgctggcgctctcttcgttctcaaatctaaaggtaaactccatctcttctctctgctcttctcgtgctctgcaagcaccaccttcgcagccggcgccgccagcaccaccacctcctccgccgccgcctcctcccttggggggagactgtcggtcacatgatgaatatctagaatttcgtgtaacgtgcacttcgagaacatcggtggtgaactttttttatattaaaagataaatagagagatctttttttttgggggggccgaaatagggagttgataaggtgatatctccgttcttcaccttcagcttttgagggctagagggttggggagggtagggttccggctggttcgttttgtttgttggcttcttagcttctgtgtttattgtttgcgccctgtggctttttatcggatcctcgtcactcttgctcctttgttaagagtgcttgtttggatccgatcttttgtacttttgtcctttctcattaatattattaccttcacccaaaaaaaaaaaaaacaagcaccataaatatctccatcgattccaagacttacggccaaggaaaatgctggtcgttttcactaattctacccaactcacaattaaaaaaatagcaaatgattttttaagtaataattaacttttggcagactatacacatgtcgttttgtaaacgtaaattcaagataaagcacgtcggctgactattaccgagcgaatcatttctcttttggcactattgatatcataattaatcttgtctcatttgaaagttagaacgacgattccacaatggcacgtctttttggccggtgacaacttgacgtgaaggatcctttctttttctccattttttcatgttctttttcctccaagattggatctcaaacagatttgctgattcctagtcaaaacggtcccattgtccatatccaaattaactatcaaaagatattttgtgagaatgcttgaaaaaatctaactgattattacctggaaattggaattgaaacaggctc

SEQ ID NO: 91371 - DNA, 933 bp, Eucalyptus grandis
  Intron number 1 from transcript Egrandis_v1_0.014854m (loc us Egrandis_v1_0.010438m.g) derived from phytozome v7.0 (c hr-ID scaffold_7; pos 33146393 to 33147325 reverse strand)
gagtcatccgactgactgaatcgccgccgtcgtcggtgcgcttctcttcaatccgcgctcgacccggttcagttcgtctttcccgatggaaccgatcggggagaccagcgcgagcaagcggcggcggatgagcggccgcggcggcctggacgggcccgggggcggggtttggctccgcgagatcggcgggctcagtagcaggggcttctcgtaccggcacagggcttcggaggtccgatcgtcgatgcgctttctagttttacctttttttttttctttttttttcttttggcttttggggttcttgtcggttcgattgagcccttcttttgggtttgatttgctgtggttggattgagtttagggtcggatttgattcgtggatcgttcttcgagagattagagaggttgctgctggacagtgttgttttcgtagtcgttattgttggctcccctcgacaggctatgttaagcactcggaacgagcttgattaagcgcacaggcgatgtgtttgtcgttataggcttcttttcggtgtggctgtgcgtgtgctctggttctctaagagcctaaattgtgagagttgaagtgaaacgtcggaaatttattcatagctggatggggtgaatgggagagagatcagaatgaaagcttgtaggatttgattaggagggtcgatttaatgcgggattcatttcttaggggattaagctgtagtaaggttcttcatatcgctaaaagtttgatggaaggggaagactctgtacgatagacgaccatctgcttaagagggatactcgtgcacttttggcgcttcatcaccaaccccacttaggataagctaaaccttagctgttggattgattgattcacttttcttgtttctctatatttcaggatcttgtgctgcgcttcgagatctacaggaagct

SEQ ID NO: 91372 - DNA, 761 bp, Eucalyptus grandis
  Intron number 2 from transcript Egrandis_v1_0.022939m (loc us Egrandis_v1_0.020188m.g) derived from phytozome v7.0 (c hr-ID scaffold_2; pos 60648095 to 60648855 reverse strand)
ttcaggtgtgccttctacatggatattgttttgcttttaatgtcgttaaaacactttgatttgggtgtactttttcatgatcgaattcaacctaataccttgtaaccttgctctacccctgatatacttaacttctccatgaactgcaattttaatttctgggtgttgattttttaaaccaaacccttgaggttgagtgaattccattaacttgggtcacccaagcaaaccttttgagtgttgatggttgtctggtaaccaaaagatggattctctcttattcttcataaaatcctaattgggctgccgacaatttctaattcttggcagtgagtagggatactcgaaatttttgttaagtgtttgctgttacattgcttttaaaattgggaatatgaaattcctgcatagcatatgggaattgggaattctcattaatattaatatctaataattgtttgctgactgattcgattttggtcgtcttcattttcaaccatccaatttgtttatcttcttcatgtatccaacctattactaatcatgttgatttccaaaaagaagcttaacatagctgaaaatattaaaggtagcttgatttggtctttaattgggtactccgtagttttcttttcatccaacgctagttgtctatgtcctaacagccacaatctgatgggctcattaatctttcaagatgcaattggtgtaagtgttctctcttttcatgtgttgcagcctgtaaaaagccctgtcacaat

SEQ ID NO: 91373 - DNA, 621 bp, Eucalyptus grandis
  Intron number 3 from transcript Egrandis_v1_0.008323m (loc us Egrandis_v1_0.008323m.g) derived from phytozome v7.0 (c hr-ID scaffold_2; pos 32177622 to 32178242)
cggggtaagttaatttccaattggagtggtgaagaacttttctcagatcatcttacacggtagcatttaggcatcactctttttacgtggtaacttctaggcatcatttgttgctacatgtttgtttttcgaatttgtcttcagatacaagtaactccactgactgagattgggttggatttttccataattgtatagagttcctcgaactgtaaacaggcttcaaaagaattctgacatgggctttataaactgtgagggatagactatatagatggactgaagactgatcatcaaagatttgaataatttgatagtcagcgaaatgtccttgtatattaatctgttatactttacaaaatatagaattgacagacaagttgtataatttaatttactgtctcatctttgaactttacaggaaggttgcctatatcttctagggttgaaagtgttctgactattttctatgggatttatctcctttctattttctaatctctgttgagtgaataaataatttcttataggcttctgatatggggttttaataagttattttattggtgctaatcatccttttcaggtttcaggtgaaaaagaagcaattctttagaaact

SEQ ID NO: 91374 - DNA, 626 bp, Eucalyptus grandis
  Intron number 1 from transcript Egrandis_v1_0.009456m (loc us Egrandis_v1_0.009456m.g) derived from phytozome v7.0 (c hr-ID scaffold_2; pos 47059291 to 47059916)
ctggtgaagcaactgtagtcattcccattcataaggtagttctgtggcatctatgtttctttctttctttccttttttttttatttgggttcttttaatgcactgtgatttagttttggtgagagatgttttctggagctcaaggactttgaattgagtgaaataaaaactccaatggcagtgcatgttttcagggactattaatctgcaccccgaagttgcagcagtttaacttgtactgctctttgccatctttgtagttagtacttactctagcagttctttgtctagttgactatttctttatattttcttcaagatcgttgatccgatatgtttcttgagtactgacgttcagcttgcctgcatttctggcacctggctagtgcactcggtatctgaatgaggttcatcatctcgatccgttgctttctggttaggccaatgatttgtagtaaattctgccataataacttggattttgttgtttatcttgtatcataaaaagggattgagtagctccactgcatgaataaggcttggcagattaaatttgaaagcgtatatgaagtatggtttctgatcagcggtcgatccttgtttcttatttctaggtcgaagatttg

SEQ ID NO: 91375 - DNA, 607 bp, Eucalyptus grandis
  Intron number 2 from transcript Egrandis_v1_0.020524m (loc us Egrandis_v1_0.020524m.g) derived from phytozome v7.0 (c hr-ID scaffold_7; pos 32293342 to 32293948)
ctgaaaaggttcaatcttgctgaggacagcgcattgtaagtttcttttctttttatgattgataatgatgttaccatacttgttttgctctcattataagtgggtttttttggggactttcgattcaggatctttctttctataataatgtactctttagtcaatgtccataattcattaccttaaatattcagttgcactttgctttgacttatgatcagttcaatcactttaataatgctcaagatgagccttctgttcttctttttctttttctcttggaacctcatggatacatctgcggtccaataaaaccttcactcgctgaatcaggatttgtggagacagcaccttgtttagtcttatgttactggctcttgcgtgctttatcttgtatttctgcaaccttttaaggcatttgaccgcacctgaaatttccggatgtgagttcccttccttaatgctcgatgccatgatgtcaaagactgcttgaagttttgcgatgagaattctgcaagatttctattctcagacatttcttacctttgcatatgacaagtattataacacgtatgcagttttccaggtctcccttggattcggtacc

SEQ ID NO: 91376 - DNA, 811 bp, Eucalyptus grandis
  Intron number 1 from transcript Egrandis_v1_0.019356m (loc us Egrandis_v1_0.018997m.g) derived from phytozome v7.0 (c hr-ID scaffold_7; pos 50427613 to 50428423 reverse strand)
tggattttacatcctcggaattgtgttttatctgggtaattcccggatcttcttcttagttcagttgtaattgctccaccttggattaaggtatggtccatctttgcccatacagtggcgtgatcctcaaagctgtgcaaccggcgaagcctgctttgttttcttcatgggtcgtcctttgatttgtcttccgcttcttgtcgagctgcttcaatttcctctgtatacatgttccgatatgctttgcgatgggattatcgtttgttcatatgatgcgggagcttgtgtccttaattccttagccttgtctatgaagtcccaacggtactctcttaagccctagtgttatgggtgcggctgtgagttgtctcaggaaaggatttccgatgaattaaatgttcgtgctcttcaattgtgatggaaatagatatcactctcgacttgtttcgagtgtcatgatgtctatcaaaacaatggacatgtgaggacttcttgtgctcttgttgtttattgacaattggatactgttgacatgaataaatcaggcgctgctaagttttgtaaaatagtttctgttttataatggatggttggtatgtaggtttgttctcggagaattttctcttagtacgtgtgcttatattgcatctgctctggtgctgacaagtttgtgatctatcttttcttttatgtatctaatcacgataggtttctattgataaaatgtccttttttgttacccttctgatcattaaattctcatttgctcaaagcagtagaagaaggggataactccacggtgaaaggatct

SEQ ID NO: 91377 - DNA, 949 bp, Eucalyptus grandis
  Intron number 1 from transcript Egrandis_v1_0.014980m (loc us Egrandis_v1_0.014980m.g) derived from phytozome v7.0 (c hr-ID scaffold_11; pos 22625717 to 22626665)
tcgacgggtatctgtcggccctatctccattgcaggtgacgctttgcaaaacctttagaacttgtcgtgtccataatagcggattgcaactttggtcaggtgttcgcgttatttcgtgcctgtatgtattgttgatctaatgcacagagactttgatagttttcccgatgagagtattttcaatagcttgaatggcggtgccgaaatggatgcttttgcaaaattatttagggcgcgagaacgtcatcaatgtgccaactttttttgtcagattcgattgctgaagatgagcctgtgtgaatcccgcttgagcatccagctaacaccgatgcttacttcatattgatttgtagatgcacagacattccctaagtttgtgttattcataggcatgtccattctgattgctactgtgcaactctggaataacgaacttgagtatataatggaatttgatcttaagaatttcttttttcaatgcacgttgctctacttaggccccatttgtttcgcagaaaatgaaaaatttggaaagcattttccaaaaaacaattcatttatattgcttgaaataattagtcaatgaaaaatgttttcattatcggcaacaatttatgtctaagcattttcgaggacgatgaaaatgtttttcataaaataatgctcccttagtgtctattttctccgagggtttcgatgtaatttatgtcgacgacttaacaccaacttcgatcgtttcagtcctgctttaatgaggttgttcacttcagtttcactctactgcatttctatggcctctttgcttcatacataagtttctttatgcccacacattttcagttttgactactcaagtacgcagattttctcgtttaagtggttggttaactgttaataatgtatctcctgtttgctcttgcagcttgcgcggagcaatagcaggcgattt

SEQ ID NO: 91378 - DNA, 700 bp, Eucalyptus grandis
  Intron number 2 from transcript Egrandis_v1_0.014980m (loc us Egrandis_v1_0.014980m.g) derived from phytozome v7.0 (c hr-ID scaffold_11; pos 22626745 to 22627444)
cagagcctgtggagggggaaggcgaagaatcgttggtctgtaaaatgactctttctaatgtaacttttggatttcatattcatggtgaaagtggctacttgtttcttgactgagtcagtcagtattagcgcaaaatctcttctgtatgcttgagcatctcctgtttcggtaactttcttgcttcatatttgtttgtctaccttttcgccctatcaagaagtagatgtgcacattggacagtcctttgataatcacagttaagttttcagaaagttactcaaatgatctgattgccattttgctgtcaatgggaaatgcagttgctgggtataggccttctgtttgcttatctgtttaattatttaacagctgtgccctatatttggatgaatgtctaatttgttctgctccttcaagagcttaatgatgaagttaaacttgaaacagctagtgatatgtctagattcccattgtccattttagagtcttcattgaaatggacaggagctgaacaggcagctttatggtcatttctggctgctccttgtccttgctaaatgctagtggcagaggtttctatttttggcttatttgccttgattgcggctttatactatcttaaattttgaaatttacatttctttagattgggtaatgatatttcttacattaagtgaaattgttgtgttaggtttttacc

SEQ ID NO: 91379 - DNA, 632 bp, Eucalyptus grandis
  Intron number 2 from transcript Egrandis_v1_0.038544m (loc us Egrandis_v1_0.038544m.g) derived from phytozome v7.0 (c hr-ID scaffold_123; pos 75012 to 75643 reverse strand)
accgtatcgacactcgcgtccccattgaagtcactgtatggatcccttatcaaactttcacctcgcttgagagtttctctgagccatacgatgcatcgtcatgttgttacaagtttgttgaattttgttaaatgacacttaagttcagctgatagcagagttcaagatgcggcacggtgttgttcaagggttgtggaatttagtagtttagtggcttgagttttcgttttgtgggaatcttttacaagttaagggtcaacaagcacggaaattattcgaaatcttcctttgagatgaaagtgctccggggttcatcctgaatttatattcgggaatcacatataaagttgttcctggactttatacggagacatttgattcttgacatattgtgaaatatgacaagtacttggaatacttcttttatttgctctcttctgtgagagattaactcaataccttgtgggttttctgtcgcattgagatgcatgataattgagggatctagacacataaaaagctaatgacaaaaataattttctggatcttaacatgtaagatcttgatgttgttgttctgtcatgtgaatatgcacagatcggagagctaaagaagctcgttgaagagggtaa

SEQ ID NO: 91380 - DNA, 886 bp, Eucalyptus grandis
  Intron number 1 from transcript Egrandis_v1_0.046959m (loc us Egrandis_v1_0.046959m.g) derived from phytozome v7.0 (c hr-ID scaffold_2; pos 63182175 to 63183060)
gggaaggcccagattgtcactcccgtgttgctcaagtaacgtgcacaacccgaacatttcaatttggtccgtctgtttctcgctagtagatttgggtctacatatgattgcccgaaagtgttggagctgttgtgcctggttattttttggatacatcgcatacaagatttgtcatgtcgtgtgaagagaatggcattagagctagctccttgttgatataagttttgatgtgattggaaagcatttaagtcgttggggagaatgtcgatttccctgctgacgtgataatctagtcctgcaaaggttttggattttctttcatgctgactctcgagcccttgggatcagagctttcataagaatgaaagttttagatgaaaatgtctcttgaagtttctgtataggttacgaattacatggcatggtgttttgctcaaaggatgcaaagtgcaaagtggtcatttctttagaatctgtaaatatggagctcaagattcataaattttttgtgatcgcttgtttgctcggaaaagcattctctctgaaggccttgcttctaaatttattaggcctgatgcgagtaaaagtaagttgtaatcatgtgaaattgtttaagggaagtaggtttcgttacgctgttattgagaacttcccattataagaaaggatttggccccttttgtgtcaaatgcttgatgttgtcctgttaggagctttgaaatgattcattttgtttctattagtatttgggaaagttgagagcacaagtcgagggccatagcaaaaagattcttgtaatcatggctgccatttaattgaattaaataaaggttgcttctactgatttgtaggtaataaccatgtcactctcatattgtacagggag

SEQ ID NO: 91381 - DNA, 919 bp, Eucalyptus grandis
  Intron number 3 from transcript Egrandis_v1_0.012930m (loc us Egrandis_v1_0.012930m.g) derived from phytozome v7.0 (c hr-ID scaffold_7; pos 37990451 to 37991369 reverse strand)
ggacattcctgcgactgcggccgcgtcttctccaggtataattgatctccgatttattcttgatttgaatttttgtcgttcttcttgttttgtttcctggcttcaggagctgtgcctgtaatcaatacacgaaatgtactttttcgacgatttgtaacagcttaagctttaagataaaaaaggctgcgctccgagcaattttgcatgatgatttgtggggttcgtcttgggtcataaaaccctagggttatgttcatgaagaggaggcgagcatgttggaagcaatttggataacccttcgtttcgttttgttttttcttccctacaagcttataaaaatatttgaacttgctgggttggcttctgaaatttatcatcattgtacattgcttttctttttgtttagacagcgagagtttattattagttattccgaatccaagaatgatttcccaggtacatttgccaggccagcctcttgtccctactttttctgtttcatttttataacaattcttagccagccatttgactcataatgagcattacatcacttttcccaatggcatttctttttggtcttgacgacacagtctgctctttataattgttttttttttttggttgaaaaaaccaataagccaaaatccccaagtccagatcagtcattaacaaagacgctcccgtcttgtttctgttgtttattcctctaattaatgttgcaaacctagtcatctgcccatttttttatttgcttgtctaaccctgcatgaacaggtcttgattgttgtttcttgacatggctcgctacagacatccaaacaaagccaaagccgtatcttggtacagtcttatgatctttctttctgttgtggtcctttcagggtagagagtttcatagaacaccaagactcgtgca

SEQ ID NO: 91382 - DNA, 882 bp, Eucalyptus grandis
  Intron number 1 from transcript Egrandis_v1_0.014353m (loc us Egrandis_v1_0.014353m.g) derived from phytozome v7.0 (c hr-ID scaffold_7; pos 10802935 to 10803816)
aaggcatcagcgagtaagattcctttgattttttttcttttggtgaggaatataatattcaactgagtatcataagattcctttgcttttctctttgataatcagtaagttattctcgctataagtatttttctgggacgaagttcgatcggtgttctcccgatgttcgtttgaagtttccgtagtgctgcattcctagttagaattaggaacacttcagctaatcatttgtatcgtttgaacacgttatcttttgattgatataaggcgtgtttgaacatacgtgagaaatgtttatccaattgcttaaagtgccagatattcatatttcaaatcggagttctagaatgattggtattgtacttattgaagaccttattgaacacactgatgaagttaagatctagtgaaatttagttgttttttgtttctctataactataatagctttaatagcgtgcaattgttttttttttccttctgtgaagaataaatagtgtgataaatcagtgtgtgagggcaacatgattttgaaactgttacttgatagtgaagtcagatgccaaaagctagggaactatctttatgatattgatgagaataactctttttcttttttctttcttggagttcattttggtcatggtactaggaaatggaatcctaggatggcaccttatatttctgccaagcgtaaaggtattcatattacaaatcttactaaaactgcttgttttttatcagaagcttgtgatttagtttttgatgcagcaagtaggggaaaacgcaagaattattttaactgtctggttaaggtatcattcacgagacaattggcatttatgttctatttctctctcatgcttctctgtttccacagta

SEQ ID NO: 91383 - DNA, 1008 bp, Eucalyptus grandis
  Intron number 3 from transcript Egrandis_v1_0.024848m (loc us Egrandis_v1_0.024848m.g) derived from phytozome v7.0 (c hr-ID scaffold_2; pos 16008979 to 16009986)
cagttcctgcaggtacactcatcattctttgtcgtcgaacaatttatcaattcaagtgtttcggttagttaggcacgacttctatacacaagctaggagtgagcatatagaaccacccaaacctggttttagggggcatcagtcctgttccagttgatttttgatccagttcctggttttaggatggagactggactattcggatcaaccggactatctagaccaggccgattaattttttctatatatttagttttttaaagaagtaaaatgtaaacctaaacctttatctcctctcacgtctcacttattctagatgatgaaacacctgtgtttctttcatattgttgtatcaattcatccaacttgctccttttgtttcttacttctttccttattttactttctttccttttcggcaaagattcaccaaatttacctccctcgcttacttgcatcttccttaaatctgtgagtccatcatttatggaaaagaatccacgaatcctcctctcttttttaagcgtgcccctacaatcaccaccccatcatctctcagtcttcctctcagtcttcttcacaaattttggacgaaatcccaatttcaaattgcgacatgaattggcagttcaattaattcaaaacttttggctcagatatgtgaatacgttggttttattggattacctaggaactggtcagtccagtccggtcctaggaccaagtgattcggttccaagaacaaggaaccggtcctcttggtccaaatcccatttcctagtcgggaactgatcacccctgacacaagcaatagaactcagcttggtaggttacgaagaaatgaataataaaatgttactttacttgctaatcaccccgaccctcatgattttctcttctatcaatttcgatcacaatttggctgtgaatgttcgtcttgttgattagagacattccccatttattttcgcagattctggaacgaaagtcacaccgtcgactcaacaa

SEQ ID NO: 91384 - DNA, 980 bp, Eucalyptus grandis
  Intron number 1 from transcript Egrandis_v1_0.018997m (loc us Egrandis_v1_0.018997m.g) derived from phytozome v7.0 (c hr-ID scaffold_7; pos 50427613 to 50428592 reverse strand)
cgtgggttgctcgagtatcgaattctcgtaagagggtaagagcattcttgactccacgagttaagagatctgttcttgagtctcgcttctttcgtcccaacaccggctcttgctctttcaagaatcttgtgaagcacagcattaacgtcaattcgtgggtactgggaaatggattttacatcctcggaattgtgttttatctgggtaattcccggatcttcttcttagttcagttgtaattgctccaccttggattaaggtatggtccatctttgcccatacagtggcgtgatcctcaaagctgtgcaaccggcgaagcctgctttgttttcttcatgggtcgtcctttgatttgtcttccgcttcttgtcgagctgcttcaatttcctctgtatacatgttccgatatgctttgcgatgggattatcgtttgttcatatgatgcgggagcttgtgtccttaattccttagccttgtctatgaagtcccaacggtactctcttaagccctagtgttatgggtgcggctgtgagttgtctcaggaaaggatttccgatgaattaaatgttcgtgctcttcaattgtgatggaaatagatatcactctcgacttgtttcgagtgtcatgatgtctatcaaaacaatggacatgtgaggacttcttgtgctcttgttgtttattgacaattggatactgttgacatgaataaatcaggcgctgctaagttttgtaaaatagtttctgttttataatggatggttggtatgtaggtttgttctcggagaattttctcttagtacgtgtgcttatattgcatctgctctggtgctgacaagtttgtgatctatcttttcttttatgtatctaatcacgataggtttctattgataaaatgtccttttttgttacccttctgatcattaaattctcatttgctcaaagcagtagaagaaggggataactccacggtgaaaggatct

SEQ ID NO: 91385 - DNA, 568 bp, Eucalyptus grandis
  Intron number 1 from transcript Egrandis_v1_0.047687m (loc us Egrandis_v1_0.047687m.g) derived from phytozome v7.0 (c hr-ID scaffold_2; pos 53134730 to 53135297)
gcaaatagaatttgtttgtaagtacttgggcatctattaagtattcaatcaagacaacattataactttagataattgtgaagtcagttatcaatgtaaataaaataaaaaagaagaaggaatctttgcacattcaatattggacaagaaacacgtgtcctcaaggctagtttcataatccaattctttccaatgttaataatccaaagatgaatgtgtagacccaatgaaaattgacggcttttatttttggttcatactacgagaaactcataattggtacatctataataaatttatcgaaaactaagaatttgtacatttataacaaatttaccgttaaattgaattaatactaaaaaaaaaaccataaatcagtacacttttaactcaaactgatatatatgtcaattatgacgtataattcgactcagtaggtgtattaattttggattttttgaggtaccttttttttctgtattaacttttctggtgaagagggtacttcttttctgtattaacggcaacaatttcaaaaggtggcaagaaagggttttatctatcctag

SEQ ID NO: 91386 - DNA, 567 bp, Eucalyptus grandis
  Intron number 1 from transcript Egrandis_v1_0.054729m (loc us Egrandis_v1_0.054729m.g) derived from phytozome v7.0 (c hr-ID scaffold_58; pos 155470 to 156036 reverse strand)
cttcaggtcagttcatatgctttttgagtattaatccccaaaaaacaaaatgttcgaatctctctttcatacaaggcaatgtctcaatggtttgtcgacaacttcttcaatacagcttttccatatatttcatagatagtttagaaatgttggcatccgtatctctagtggtaattatgccgcgcgaccaagttttctggctaaagaaaaatgaaatcaagtcgcacgtattgaacatgcaaaagagtggtagtatatttgctgcttttagtgtactaaatgaatatggtacttaaacagaagctcacggaagttaatggttgtccgttgtttctctaatgatatcgttcatgctcgaaattccggtcatgtacttcaaattaactagtcctgtttgccgtgggagaggataaaggaatctataatagcacgaaggtgggggatccttcctgcatctctttgaataacaatttgtccatttgtttcatgatttttggtgattaattgtaattccatggcaatgatggagcagcaagtcccggggcatttacgggcggaacagcagag

SEQ ID NO: 91387 - DNA, 653 bp, Eucalyptus grandis
  Intron number 1 from transcript Egrandis_v1_0.054944m (loc us Egrandis_v1_0.054944m.g) derived from phytozome v7.0 (c hr-ID scaffold_2; pos 109201 to 109853)
acaattaacattacaaaagtgcacgcgcaagatacgtctatgcgaaaaatggaatttaaaagattttacggaattttcctactatgagatatttgaattatgattaatgaattgaacttattggcacaatatgaaaatatggaagccatatacgtggaaagaaaacaatatttcaagtattgcacggaaaaagttaatgttaagctctaaaccaatctgcacggaaaagcgatttccatgcacaagaagaatgttggccccgcacgtataaaggaatgggatctcctaggctaagaagaattttcttgacacttcttttggtcaatactcaatagttgcaacccggatctgcttggaagaaactttgcatttccaaacccgcaaacatttccagttcaacttattataatgattaatttccatcggttcaagtagttgaaatagctgagttatgtatccacatgttccctagagtcctctagtctatcatgtcttcttcttttttcagtcaaagtctatcacgtctttgactgaaacaaaaattttcatgctttgttgcagccaagccgaacagatcgaatcgattgttgaagaggtttcccgtaagcttaatataagacacgtgattgagactgaaaatttggttgaagata

SEQ ID NO: 91388 - DNA, 682 bp, Eucalyptus grandis
  Intron number 1 from transcript Egrandis_v1_0.030543m (loc us Egrandis_v1_0.030543m.g) derived from phytozome v7.0 (c hr-ID scaffold_2; pos 31470679 to 31471360)
ctaaaggttagctattctgcatgtttgcagcttgttttttgcttgaccaggtcaaactagaattcatctcccagtctctttcatctccattgaaatgcatatatctgctcttcgtgaccatgtgtacttgaaggaaagtatagaatttaaaaatagacgcccatgccaacaattgcacacattcttctgaaactttgctgcatgacacagctggtgatctgattttgcttagtaaccatgttcatatttacgttcttactttagcatagattttgtgttgcagttggatatgataatgatatttctcccaccctggaattcttggttataagttttaaagcctgtattaggctgtcaaattggtgtccaatctatctgatcaggctaactttcgttacctgcattgatgtcgttggaaccagtgttggggtaatgttcggaagtttaaccatcacaattcatattaggatgtgattccatggattgttgtctgtcaatgccttgttagattgcaaaaccttcgtacctcctgttgaggctgggcttccatgagccataattttgatatagaaactacaattagcacaggaatgatgttagctaaacttgatgcaggaaggattgagaaaatcctgtcttctttattttgcaggtgttgaaatatattgtgcaccgacagctg

SEQ ID NO: 91389 - DNA, 494 bp, Eucalyptus grandis
  Intron number 3 from transcript Egrandis_v1_0.017993m (loc us Egrandis_v1_0.017958m.g) derived from phytozome v7.0 (c hr-ID scaffold_7; pos 38588529 to 38589022)
ggaaccgctgaaccgtaactgtcttcgtgcttagtaatctccttctttttagccttccacttttgctctagatttccagggtcctgaatcagattttcatttgatattgaagactatgaaatctttaagattctacgatgtttataaattaaaatgtttttcttatataagtggggaagcaaaaggtccttttttgggggctgaaagataccagaattgatctggattgaaagactggtatacttttttgaaaccattgaagcatcttaatgagatggatctggatggacctccaaagaatggggcctttggatgtgtttccttttctttggaaagtgttcttcctttttccagctaggcactcatgatttttttaaccatgtaacaagtattcttttggatttaggagttgaaacatgcttggaattatatgcctctcattggcaatatcttttgcaggaaaactatcaagcctactgtgcctccttctcaat

SEQ ID NO: 91390 - DNA, 551 bp, Eucalyptus grandis
  Intron number 1 from transcript Egrandis_v1_0.001111m (loc us Egrandis_v1_0.000665m.g) derived from phytozome v7.0 (c hr-ID scaffold_2; pos 25895320 to 25895870)
ttctcgtcagtgcgaggaactttttggtgtttcaggtgatttcctttcttcttcataatgatcccttccttcgaatgtaattaagcgttctattgctgtgtcgttgatcttggatgggagaatagtgatgctgttttttacatatcttttgtcgtcaatgggcgggttgcatcatttttttttcaagttggggggtcgctcagaaattagtgaactggattggaattcttagaaaggttttcctacggttcaatggacatcatggaaataaggaaagttattgcaaactaagaatatattaatgcattttaaaagaagcaggattactataaaatctgtgttgttaccttgtaaggacgataacacggcaatttgttagaagccaaaattaaactgagaagacttgcatcactgagacatacttaagttttgtactaggccaaaccttagctagaattatcattgtaaatggacttgtcggtggattcaagcaattttgactttgatgagagattgactcaattttctactggctctccttttgtagggtg

SEQ ID NO: 91391 - DNA, 1014 bp, Eucalyptus grandis
  Intron number 2 from transcript Egrandis_v1_0.023221m (loc us Egrandis_v1_0.020551m.g) derived from phytozome v7.0 (c hr-ID scaffold_2; pos 32408397 to 32409410 reverse strand)
ttgttgcagccataaaaaaagccgggaatatcaaggtcgtgctgtttataataatttcatccaagttaccattgcttgtttgacatttgattgatgatataggttggtgcaagcttaactcttttcttctggtattagtgcatcgcgttctccttgtgagctccacttcgatgaaatgggatggattcacttacttatctgtagacttcacttctttcttttttaaacggtcatgactttctgtagaagtcgtcagtgaaatttgaggctaactatttcaaatccaagtaccggacaatgctggattcactgtggttgggtttcctctatatcaatgaaaaaagtaaaaggtttcaagtactcgatatggattatggtcatgtgccctattctttgatcaataatgggaaacatgacctacctattcattcaaaaggtttttttcggtaaaattaatattatagcaaataagttttcaaaacccaactggtggataatttactagttgttgcctagggggttgacggtcggtaaagagtggagcttagcatgctcacaaaaggcaatgtactcacctgatattttatttcttgtgaaaagtgtacaagcaagcagcatctttgcatattttatacttgccagagttatctggctattgccctaacaattaaatcttcagttttcttttcttcttcttttctaatagcacttaattgctagtcttgattcacttataatcatttttactatattatagtccgtttggaaaaaagaagaagtgaaattcagtcttatgtaagtttgttttctttgtttgctctgttatagtcacatgttgaagaaaaaaagtgaaacatagtcttatatgagtttggtttcctttttttgccagaactcatgtaagtttgttggatgagggaaatttgctctagttttttgttgctttctaataaaaatatatctcctgattcaatcaattttctttttagagattcttgccttcagagtttggaa

SEQ ID NO: 91392 - DNA, 597 bp, Eucalyptus grandis
  Intron number 1 from transcript Egrandis_v1_0.051433m (loc us Egrandis_v1_0.051433m.g) derived from phytozome v7.0 (c hr-ID scaffold_2; pos 35185194 to 35185790 reverse strand)
gcccagcagcatctcttcgtgtgaacattcgagcggtaagttgacgatcttctgaggtcttggccgatctcatctgtgcattcactaatttgttgctttctttcttactcgattaacctctactattaagtaccagcaacaaatcaatcagtggatcaatcagtggaccaatggcaacaaatcaatcatttatttaatttgacttagacatatatccagtatattgaacaactcttttgaaagaaccgatgaagtggagtgtataattggatagactaggtctagggactgcgaagttgtgtttaattaagatatggttgattggtgccaattgtccaagtacttatctgaattgtttcttcacacttcctaactatttattagtttgtgttgtcgaattatctgttttgactctcattttgtctttaagctcaccaaatgtttaagtgtagtgcttatttcaggctaatagtgattgtgttagcattgtctttcattgtctttcatgctcattttccatttgcttaatggcagttttgcatgcattgagttcctaagagctttggaaattttcttcggaactataggtggcacagt

SEQ ID NO: 91393 - DNA, 920 bp, Eucalyptus grandis
  Intron number 2 from transcript Egrandis_v1_0.004175m (loc us Egrandis_v1_0.004175m.g) derived from phytozome v7.0 (c hr-ID scaffold_2; pos 47479502 to 47480421)
ggtcatatgtaagtgcattgtgctatatcttgtcataatgcttaatttttctctagaagattttacttccttggtattctgtaatcttttgttgatgcacaatcttcttttgtttaggaactctcctactaataacattagaatgccatcatgtaaattgttcaagtttgctaatttactatgggtactcagacaagcacactagatttctcttggagtcattttctcgaaagcttatgttctgggaaaccaataacacccacttgcgcatagagtgttgaccattgcaaatacaactttcagacacactgtgaggggtctcctgaatataggctatgatactatattaaccatcaactgcaaatgcctgagctacctgtcaagcatattgtttgttgtttccactgtggttggaaagtgagatctagtttgttattttatgtggatgcatgcccggtgaaagaagattagtttaccaggcgaagatacttttagcgcgggtcatgcgatttcttccattctgttgcctttacataacgttagataatttgcctccagaagtgacattctgtccagcatttctatttgatgcctagcatcctgaaggttccttagctttgtcttcatatttctgcaactctgcttatttgttcagagcctttttccatcttgggaggccagattcaagaattagtaacttattttggaaaggaatcctcaagtgtattcactatcttctggtttaccatattggttctatttctttttgtgagggaatgtgactgtcttttaaatttctaattggtgttatcttttaaggtttaatatttctattatgaggatagattttgatttctttctttttatctttttaatgggttgcagggctttgtggagagggaaagcactctaatcggatc

SEQ ID NO: 91394 - DNA, 793 bp, Eucalyptus grandis
  Intron number 1 from transcript Egrandis_v1_0.013553m (loc us Egrandis_v1_0.013553m.g) derived from phytozome v7.0 (c hr-ID scaffold_7; pos 50593981 to 50594773)
cggtggggagaattgatcgggagggcgactggcaagtgatcggcggcggacgggggtgaaggctttaacaaaaacaaaatcatagggttttatttttcggataaaagaaatcatattcgatcttatcccattcctttcagatttttttatccagtctatattcgatcttatcctatcctagacagcctataagtgttgcctctagctgtagagatgatctattatagtatgacatttcattctatttcggtgtccattattatcaaggacacataaacaatctctctccattcactcgcatccatctttggcgctcggcgaccggatctactgacgaagttccgagctcttcatgcacaagaattggccatcatctcaagatgattctttctagaaaaaggaaattggggcgcgtgcgtgtgcgtgtgtaggccataggcattggctatctcttgagactttttagttccacggttagcctacacgggcatcggatgaactggcccctcctgtccgttcgcgactaaaaaagaaaagtccaaagacacgtcacggataacgagtcgtcggtctccctcgacatcatcatcggattcaaaacaaagagctttttcccaacctcgtcggcccgccctcccctctttccgattaggcggtgcgtccattcaccagccccacgcctcccaaaatcgacgggaaatccttataatcatctttttttcatcctctctctgcctttgtccctacgcctcccgaagccgctcctccacaactttttttctccgccatttta

SEQ ID NO: 91395 - DNA, 482 bp, Eucalyptus grandis
  Intron number 2 from transcript Egrandis_v1_0.008526m (loc us Egrandis_v1_0.008435m.g) derived from phytozome v7.0 (c hr-ID scaffold_7; pos 19768465 to 19768946)
ggagttattctcaggaaattacttaactctttttgtactctttaattgtaagccttgctgtttacattattttgaataactcttctcccaaaatccatctggccaagtatttgtcatgcctgtgagattctattacataagtcatggttcataatttggtttattttcgagtggaaaacattttgagcccctttggttggcaatatatgttcaattacttaggtcatggttcataaatttggtatgtttcatgtggagaacatttagaccccctttggttggcaatatgttgataattgtttagtaactgatttatgcacagtattctacccagatatagctattttgttgcctggggctatttgttcttctggatttgatgatgagtgggtggtatttatgctaagtgatattggtcttgcatgcaggttgatttaaatagagcaggagtaccattgcttgaaatcgtctctgagcctgac

SEQ ID NO: 91396 - DNA, 825 bp, Eucalyptus grandis
  Intron number 2 from transcript Egrandis_v1_0.042401m (loc us Egrandis_v1_0.042401m.g) derived from phytozome v7.0 (c hr-ID scaffold_2; pos 29117276 to 29118100)
ttaccaggtcagcgaaagttaacattatttcatttgcatattgattgaatgtagaagtatgcatggagacaatgtttagagcacaagccctgtgcactttggtgaatggttccaccaattatatactagacgggtagacctatttatcgaaatttaagctataaaatgatcttgcaatctgctttgttagaactgttgagaagtttgtgctgaaatacaggatattcttgttctgcctttgcccatctctgtccattccgtaatttctagaacttgaggtttgtgctatgcttctaggaccttctaattacttactggaaaatttatcttgtttttgcatgtaagtgttgtcatcagtcatatttcaggtccaattcaaaagggttattaagtcaaagaggaataagtattcaaaatacttgcaccaaatacggaccgtatatgtctataaatcctatgtaggtatgtgctatgtcatcatctcaactaaaggtgatcatttccataattggtttgaaatggatgtcctttcatataagatggatcttggaagcatgcaaaatatcgggtcccctgacacacaaaggaagatattaacctgaatttgttaagttgaattatcctgaaatgttttctgttcagtcttgaattagttcgtatatgtttctagctgaagtaattataagacaaatagtgatgactagtgctttctgatcagctgaaggtgaacaaaagagttattcccccatcccttcatttgctcttctggtgtttttacccttcatttcagctgtcagcaactcttaaaccaggtgtcacagttgt

SEQ ID NO: 91397 - DNA, 666 bp, Eucalyptus grandis
  Intron number 2 from transcript Egrandis_v1_0.011724m (loc us Egrandis_v1_0.011711m.g) derived from phytozome v7.0 (c hr-ID scaffold_7; pos 45266105 to 45266770)
ggacgccggagctctctttgttctcaaatcacaaggtcagtgcactcgtccctttctgtggactagcttgtaacacaggctctctctctctctctctctctctctagtagtgaagcaggaagacattgttgtagggaaagcaaatgagtccgaagcttgtcatttcgctcttaatgttcactgggttgtgagcttagaacgagctcgtggaacgatccattgcttgatcagacaactggcctgccaatctagaagaggcaactttaataaacagtcaaaaccctaaagaaaaagcgcatgattttcatcagcagtgtaattctttatacaagcattttctaattcatcgcgtaacatgttgtccagtcaggtctgtacaattttgcatgatttatctcttgatttttcaaactatgatcctaatcaataggtcaatagaatagtagcaaaagggcaaacaaggaagaagagattttcgtggagaaatatgtgaatgatctttcttttgcacatgatctacacatgtcgacatgcacaaaccgttttagatatgatatacatgtcttcttaaattagaaatgagtatatatggttatttctagaagtaacaggtgtacgatcacattcacaggatcgtggtggcactgtgggtaccacttgaccacg

SEQ ID NO: 91398 - DNA, 836 bp, Eucalyptus grandis
  Intron number 1 from transcript Egrandis_v1_0.023414m (loc us Egrandis_v1_0.021717m.g) derived from phytozome v7.0 (c hr-ID scaffold_7; pos 49573443 to 49574278 reverse strand)
taaggccgccaattgcttcaagctcgccaaatcttgtacgtccatctccccgctcttcctatttcgatccgattaaatcttttatgccgatgcgtcgcgcgcttgctctgcacgatcgatgccgcgggttgcgattgcatgcattgaggcgatcgcggagattggggagttcggtcgtgctcaagggttattctggatttttcggttcccggggaaggggagtggtttttcgatctgagtttgctgagcgtctctgggttttggcagattgaatttatagtggggtggatcgattaggggatgaattttgatttgattgagattgatagcgtcggagtttaggaaatgcgtgtagcggtaagtcttttccgatggatgtctttgggcgctgacatattctcttcgagattgcgtagtctcatttcatcctatttacttgtttcttttcttttccatttttgcgtgattattttttttcggttggttgactggttcacctgaataggttaatgtgcaggtttggttaaggaaaatgaatgtttaactaggcatttatgatctacaatatatgctgtgatttctaatgttgctgattgttgggttttatctggattgtccatgtaggattgatgatataggtttcacgagtgctgccttgatcttgatcctctaaataaccgaggaacttgttgggttctctaagcgctttgtggattgtagctatctagttagcttttagagggcatgcctagttgagcaacctatggctcgctaatgtttatgatcttgttaatatttcaggggacagagctggatcaacatatataaagttagca
